United States Patent Application Publication US 2019/0348154 A1 - sequence listing, part 60

SEQ ID NO: 222884 - DNA, 1200 bp, Klebsiella pneumoniae
gtgacgatttcgtttgagatgctgacagctctgtaccgtcgcatggtattccaggaggagttccgtgtcggtacgctgttgctctcagatcagtcagattgtgaccagattaataccttgcttgatgatccacgtgagtatgggctttctattgatacaggaactgtcgctccaggcaacacgatcaacctacgtgttacgccaccacggagtggactgggactcgtgtttgccacacacgaaaaattactaaatgctccaaagcaccagtgcctggaaccagctaattacttcatcctcgaaacaaaatttcgtaatgatgatgaagatatccccgttttcatcagcaattaccggaagattctggagttcgttaacctgctaaaagcggccgctgcctactttgacagctcaacttgtcagctggtttttctgaaaaaagaagttatcaagctattgccacacttcgctgctgaaaacgtacaaaatttgcatcgtgagcatcttgctaatcttttagcttgtttcaacgatgatacccataaggatcagaagctggatattctgattgaaagtatccaggccgttagtgatggagttgattcaccacgagtattcgcatttttactggacaatattcagcgtctgcatgaaaagttcctgaaagggtatcggatatactcttctggattctcttatgacaaagtcatggatcagctgcgtgccgcaaaagtcgaagaaatgggtaaaatccacaaggcgttttcggatatccagaaccatatacttggcattcctgttgcctcagttattgtggctactcaattcaaagtagctacgagatggtcgggccaggggataacaaacacaataatccttctgggatgcatttttgctgcgacgttaatctggctggcactttcaaaccagatgcaatctataaaggccttgggcgaagaaattgaatacaaagaaaagcagattaataaagaatattctttcatcaaagatgatgtagctggtgtatttcgcagtatttctgcgcgactagcgacgcagaaacgtacgttctggattatcaggggggtcttgatcataggtatcatcacagctgttgttgtgtattgttggtacacaaagcctgttctttactggatacagtttctggtggcgaagtttttccctctagcttgtagctga

SEQ ID NO: 222885 - DNA, 411 bp, Klebsiella pneumoniae
atgtcactacttcataaagttcgtcaccagcggctgcgcaactggattttccttgccgttgcgctgctggccgctatcgccgtcatttcgcccgaacagctcggtgtaacgctgtacaagctgtcgctggtttccatcgccgccattctcggctaccaccttgatcgtgcactgtttccctatgccagcccggggagttatctgactgagaactggaaaacccgggcagcgaagaagcgaagcaccggaaataacagccattctgatgctcctccaccacttcctcacggttgcgagggaagagtggaatttccggtctcgcacggttacgagctgatttttgccgctgttttgctgcgacgggcaatgattgtcgcggcgatttgtatcggcgtgacgatggggctctga

SEQ ID NO: 222886 - DNA, 450 bp, Klebsiella pneumoniae
atgacgtcgactgagtgggtgaaagtgatcgcccgttatctgttgtggggagcgctgatgctgggggcggtctggtttatctggcatcagggatacgagcgcggggaagcggatgtgcgacttgaggttgcgaatcagaagactcagcaggccgccgactccctgaatcagtttatcgacggggccaggcaactgactgcgcaggcaaatcagaccagcaccttactggcacaacaaattaacgcccgccagcaggcggatgaaaaatccacggaggccattcgtgaggctctcaaaaagaacgctgccagtcgtactggttgcaggtttgatgctgacgtcatgcaggaactcgccggagcccgtgagagagcagcaacagccgcttcctcgggtcttgccagcgaggatgaccgtaccatgtccccgtccggtgtttccggcaagtag

SEQ ID NO: 222887 - DNA, 303 bp, Klebsiella pneumoniae
gtgggaataaatgaactgagattcgactgggcatttttgcaatgggcagtgatggcggtagtcggtgtctatacctggctgattggtcgtcagtccgccagccagaaggaattactggagctgcgtacccgcatcaccaccgttgaggcacagataaaatcggtgccaacacagtcgcaaatcactgaactcatcgcaaaactgagccgtactgaagcccagatgcacgggatgcaggagcagatagcggccacctatcgtcgtactgagaatatcgaagcctatctgctgcagaagaaataa

SEQ ID NO: 222888 - DNA, 297 bp, Klebsiella pneumoniae
atgaactttgccagttttttgcgtgaggaccagcgcctcgtcatgctgcgttttttatccgaaatgccgagctacagctccaacagttccgtcatttaccaggcgctgacccgctatggccatgcccccagccgcgatcagatcaaatcagagctgcgctggctagaagagcagggtctggtgacggttgaagatatcgggacggtgctggttgcccgcctgaccgaacgcggcgctgatgtggctgcaggtcgggcgattgtgcctggtgtgaagcgtcccggcgcggggggctga

SEQ ID NO: 222889 - DNA, 1515 bp, Klebsiella pneumoniae
gtgagtcgcaaaaaacaaaaaagacagatgccatcaaaaccctcatccacaccgcgtcctgaactggggcgcgagtttgcctcgaccggtgacgggcgcgatatcacccgcccgtggattggtgcgctggcattatccgatgacagcgttctgcagcatcgcggcgcacctgacctgaagatttaccgcgaggtactgagtgacgatgaggtcaagtcagccttcagccagcggcaggatgcgctgatatcccgtgagattaaggtcgaggccggaggcgagcgcccggtggatatcgaggccgcagacgccatgcgccagcagatagacgcgctgggcttcgaccgcatcacccgcctgatgcactatggcgtgttctatggctatgcggtgtcagagctgatttatggtgtccgggataatttactgtggattgacgacattaaggtccgcgaccgtcgccgcttccgtttcagcccgaaaggcgaactgcgcctgctgaccccacagaatatgatggccggtgagccctgcgaggggccgtatttctggtcattttccaccggcgcagatcatgacgatgagccctatggtctgggactggcgcactggctgtactggccgacgttcttcaagcgcaacgatatcaagttctggctgattttcctggataagttcggaatgccgaccgtcgccgggaaacaccccgaaggagcgactcaggagcagaaacgtaacctgctggcgctgacccgggccatttcgaccgacagtggcgtcattatgcccgaggggatgagtgtcgaactgatgtctgctgcccgttccggtgccgctgactatcagtcgatgtacaacgcgatgaatgaggccatccgccgcgtgactgtgggtcagatatccagctcaggtggcgcggcaaaaggtatcggtggtaacgagtccctgcaggacaaggtgctggactccattgtcaaggccgatgcggatgttatctgcgagtcctggaaccgggggccggggaaatggtttaccgattttaatttccccgatgccgcagtgccggtggtgtcccgtgtcttcgaagaggcggaagacctgaaagaccgggctgagcgcgacaaaaccatcagcgagaccaccggctatcgtccgacgctggccaccattaaagagacctatggtggcgagtgggagcagaagcctgaaccagtatccgttccccggggcgctgcgccgtcgtcattcgcggaacatgacccggaccataacgacacgtccacactgatggccggtcgcctcaataccgaactgcgcccggtcatggacggctggatcaatcagataaaagcgctggtcgactcagcagagaccgccgacgagctgcgtgacggcctgacggcgctgatacccgatatgtcgcttgatgactatgcccgtattctgggcgaagccatgtccgctgccgccctggcaggacgctacgatctgctggaggaaatgaatggccggtaa

SEQ ID NO: 222890 - DNA, 1218 bp, Klebsiella pneumoniae
atggccggtaacgtcagctatggctcgctgccgttcagcgagcagatcgccttcttccgtcgcaagttcagtacaaagaccgatgcctggacagacgtctatggctccgcgcatgacaatgagtttatggttgccggagccagccgcgatgccctgctggcagacctgcgtaccgcagtcgagaaaagtcttgacggtggtacgctggaaaccttccgcaaggactttgcggccatcgttgcgcggtatggctggagttataacggcggctttgagtggcgctcccgcaccatttacgaaacgaacctgcgcagcgcttacatggccgggcgctaccagcagctgatggacatgcgcgacacccatccgtactgggagtatgtccacagcgaggcagtggagcatccccgccaggagcatctgggctggaacggtatggtgctgcgggcagatgacccctggtggatttaccatttcccgatcaatgcctggggctgtcagtgcagtgtgattgcccgcaccgaagacgacctgcgacgcatgggcaaagacggcccggatactgcgcctccgattaaattcattgcccgcgtgattggccagcgcagcccgggtggcccgaggaccgttattgtgccggaggggattgacccgggctttgagcataccccgggccgcagccggtatttcagcgaggtgccaccgcccaggagcagtaacccggtcggcgacggaccgttcaccccggtggcggaagcgccagccacagcggcaccgctgccagcgccccgtccggctccggtgcccgaaggcgatactgacgcggtggacgccttcctgaagctgtttggcgcgaccgctgatcacgatgcagcattccaggacccgacgggacagcgcattgccattggcagcgacatgttcgcatcgccggagggtcagggtcagatatccctgacgctggcgcaggcacttcagctggccgaggctgtccgtcaccccgatgaaatatgggcgcagatcgtctggttgccggaagagcagcagtcgctggtgaggcgctattacctggcacgcctgcagcaggaaggtgaagcggacccgctgtcggtggtgttcgcgaccgggcgcgatggctgggccggaaatatttcaactgacgatacgctgctgcagtcactgcgacagggtatcagcctgtggtcgcgggaggactga

SEQ ID NO: 222891 - DNA, 561 bp, Klebsiella pneumoniae
atgtcgggtgtgacgctgacgtttgatgctcaggatgcgctgagccgactgtgggatgcccggaccgaaatgatgcgcccggcaccgctgctgcgttcaatgggagagcgcctgctggagtttcaccagcagcgtttcacggagcagacatcgccggagggcgtaccgtggcaggagctgtcggcccggtaccagaagcgtaagcggaaaaatgcggacaaggttctcacccgcgacggctatctgcggaataccctccgctggcaggtgaatgccgatgagctgctgttcggtacgaaccggatctacggtgccattcaccagtttggcgggaccatcgaaatcgccgcccgtagccagcaggcgtattaccggcagaagaaaagcggcaaggttgccagtcagttcgtccgaaagtcgaaatcaaactactcacagtggcacaccattccggcctacaaaatcacgatccccgccagaaagtggctgggtgtgtcaaaagcggaaggggaaacccttatcgatatggcaaaaaactacctgcagggggcgtttaactga

SEQ ID NO: 222892 - DNA, 1125 bp, Klebsiella pneumoniae
atgacgacgagcacagctaaagcaacacttgcggtttttgcccccggcacccacaccgcgatggatggacggaccatcacgttcacccctgaagactgcattgatctggccaacagctacgaccctttagtatcggaagcaccatttgtcatcggacacccgagcctgaccgctccggcgtatggctgggcggaacgccttgagtaccgtgatggcatcgtctatgccgcgccgcgtcaggtgaatccggcctttgcggaagccttcaacgcgggcagctacaaaaaacgctccctctctatttatcagcctgacagccccggcaacccgaaacccggtcatttctatgcccggcacgtgggttttctgggggccgtccctcctggcgtcaaagggctccctgatgcgcagttcgcagaggccagcggcgataacggcccgctggagttcgcgttgccgtgggaagccgacaatctggccagcctgtttcagtcgattcgcgactgggtgattcaggagacaaccatcgagcaggccgattccatcattcctcagtggcgtatccagtcgattctggactcggccaccgatgaacgtaagtcaatttcaccactggcatatgccgaggagaccaatgtggacccgaacaaaaagacccccagtacggcgacggatttcgccgagcgtgaagccgcgctggcagcacgtgaagccaaactggctgcagacgaggaagttgtccgtacccgacaactggaggaaaaacgcactgccacagtggcgtttgccgatggtctggttaagggcggtagcattcttccgcgccagaaaacagccattgtcgaagtgctgatgaacctgtctcaggagccgctctctttctctgaaggggagacgactatcagtcagtcgccggaggcgctgctacgcgagatcctcagcactaaacctgccgtcgtgaatttcagcgaaaaaaccggcacgactgatgatcctgtcgattttgccgatgcttccgcgctggccactgccgcacagaactatcaggcagagcaggctaaacagggtcgcaccatctccatgacggacgccgttaaccacgtgaagaaaggagcccagcaatga

SEQ ID NO: 222893 - DNA, 813 bp, Klebsiella pneumoniae
atgagggaaaactattattatggtcagggtaaggtgttcctggcacccagagataataaacgcgcattccgatgggtcggtgatgtttcatcattgaaaatagcattttcgtatgagcaacaaataacgaaagcatcacggggcggacagctctatcagaatcagaggatcattaccggggccagcggttccatcagttcgacctggcataatttctcggtggaaaacctggcgctgttattgggagcacaactggtagatgagccgttttcatttaatgagcagttcgccatacctgatgggatcgtaaaaggagatattatcgcgctgccccataccacggtttttaacgtcagtattaacgggctggaacgtgatgcagattatgttgttgaccgccagttcggcactattgagtttcttgtcactcccgagtctgagggcctcatagcggcatacgaacacctgttcaaccagtggctaccgtttttctctgcgaaaatacaggagttttatttacgttttcagggagtaaatatcgctgaggattcagcgccggtactgctggaactgtaccgggtctcagttgaccccctggccacattagaaatgattaacagcgggactgacatagcgggcatagaaatgacctcattaatactccctgattttaaccgccaggtctcatctgcatttagttattttggacaagtacagcttgttgctttgcaatctccacagcctccagaaaacgctctgacgtataacggccgggctaattatgatgggcgatatcaatacagaggtaagtaa

SEQ ID NO: 222894 - DNA, 1746 bp, Klebsiella pneumoniae
atgccaaatcttcaggatagcccggaatggactgacggaatttatcagctcacggaagaaactcctgttcttggtaaacaggaaaatattccaggagacggacctgccaatatccaggcgattcagcttgcgaaccgaacccggtggcttcgggttcaactggaatcggctatcgattacagagaatatacattttacaaaacggaatccgaccctgatggcaccctggcgggtattgctaatacaccagacggaaaaatgttcagagttgcacagggaactgaatcagaagactcgtttatttattatctgaatgccaacggggttgcctatccggttgcggcttacgtcggtaagggatatgtagataatcgcctggttcccggaccttacaggtcgtcttatattcctcttttccatgactttaacggtatggttccgatgtggctggatgaaggtcgtccggatgccgctggctttggccccaatcttcgtggtgaggtagcagccattccaaaccagtgggctcaacaatacttagctcagatgaacttcagtacccggtattttccgctgtttcacgaccagaatggaaatgttcctatgtggtgtgttaatggggttccggatatgcctgctgtggggccagatttacagcgcttcattctgcagctcgttggtaatgcttcaggtggaacggcctccgcagataaatattttattcagggggatttattcaagtttatttttaaacgcgggcgaatgttttctggcgattcagtcagccttaattttgcgtttacgggtgattcatggacagagaaaaatacaatacctcaatcactgcttaatgttctgggcggcgcgtttaaagaccctggctggatttcttgctctgctcgtactgacgccgtcatggcgggtatttcccgggcggttgtttccgggttttccacttatgacggcggtagtaataacatcaataagccgccttacggtagcggccctgatggtaatgcttattacaataacaatgcggtgggaaccatcacatggacaggtataacggctactgagctttctgtctggtattacgacgggaatggcgtttttaccattactgttgatgacaatgagcccgtcactatcactggtggtggaaccaatgccagcaagcgatacgatttctcaggaatgagcgcgaccgcacacaaggtggtgattgccagcacaggggtcggagtcgtctgcattcatggtatgtatggcaaaaactccgcgaacgccagaggcatcacagtatcccgtatgggtaatggtggggctattgccagtgattataccaacttcaatgagtggattgcgcctgtagccagttacatcgatctggatatgttatttgttgtcattggtactaatgactttcgtctcagtaaagggttagttcagtataaaaccggcatcgaaaccatcatcaatgcgtacaaatcagccacgccaggcatttgcatttgtcttgtatcaccggggcgctgtaatgcgaccggaacaccggcgctcgaagaatacgataaagcgatgcgcgaaattgcaatcgaacataatgtaaaccttatcagtggataccagttgttccccaaaacctacgataacagcggcggtgcctgggaagatacactgcatctcagcagcaaaggtgcctacatcctgacccgaaccatgaaagataagtttttccaggagtga

SEQ ID NO: 222895 - DNA, 753 bp, Klebsiella pneumoniae
atgatcacatcaatttttattaacggaattctgcctgtcgttgatggtatgaagaaactcagtgactttacactaatcaactggtttgaggattttcctgcattgagtactgcaacgccctatgctggtcacttctttggacaagacgtcgcagatatcacgaacaacagttttaatcttgaaaacccagcgacgataattggtacgctggataacagcaatggctacgtttccgtgaatactgataattatcttgatacgaacgaaaaggctacattggatcttaccgttggtgggtgtttcaaacgtccagcggtgccatccggtagtctgttttttatcagcgatttctcaggtattggagcagatgcaactgggtttgcaataggtgttggcgctaatggaaaattaagggctgcagcacaaaatgccggggttgctcaaacatctattgctgatgttgatttcccgtcatccattgcagttggtgattactgtgcttttacagccttcatccgtaatggcacggtcactattgccgtctataacccggtcacacaacaatatgaatccactgctgtaggcttgagcggaaaccgtgccgccggaactaaaaatgtactcattggaagaaaacaggacaacaacgcaacatcattaagttgtgatgtgcgctcagtcgttctgattaatgggtctttgtctacagctgaacatatcgccgtccaacagtatttgctgaatatgtcgtga

SEQ ID NO: 222896 - DNA, 186 bp, Klebsiella pneumoniae
atgccagtcggcgatcgccgattgccagcgggcaaaatggccgccgccgttgcggcggtaggcgtcgctgtcgatgacggtagcatcgtggatatcgtgcagcgccaggtagcaggggcagccctcgctgagagcgcggaagcgctaggaggcgtagaaaccgggcacagagaccagcgccggtag

SEQ ID NO: 222897 - DNA, 294 bp, Klebsiella pneumoniae
atgggcgtttccgttaaacgcattgtcgtcaccgggatggggattgtcagcccgctgggctgcggcgtacagcacgtctggcagtcgctgctggcaggaaagtcagggatcacccgactcagcgagcagctggtcgcggatattccctgcaaagtggccggccaggtgccgtccattgacagcgatccgctgcacggcttcgacccgctggcgaccatcccggcgaaagagcgcaaaaagatggatcgctttattgagtttgcgctggtcgccgcccgcgaagcgctggcttag

SEQ ID NO: 222898 - DNA, 1164 bp, Klebsiella pneumoniae
atgaattataatgaaatagccgagaaaattattcatgaggttggtggtgccaaaaatattgataacgtatataactgcatgacccgtctgcggtttgaacttaaaaatgaaagtctggctaatgatgaaaaaataaaatcaatatcaggtgtgacagggattgtccgtcagggggggcagtatcaattaatcattggtaaagaggttgtcaatttttttaacgccattcaaaaaattattgggcctgtttcagaacattcgtcaggcgtaaaaaaagagcaaaaaggaaatattgttaaacgagtcattactggtgctatagaaattattgcttcgtcaatgacaccagtaatccccgcacttattggcgcggggattatccagatgattgttatcatcatgagtttcttcctcgggcaagacaactcaacattacgctttctatcaattattagtcattctgctttttacttcatgcctatttttattgcttatgcaatagccagaagatttaatgccaacccggtactcgcagccgttgtgacggcagtactgttaaaccctcagtttattgaggtgatgaacgaagccaaaacgactgacgtgacgttcctgggtattcctgtgatgtcagcgcagtacgcttcaaccatcatacccgctatcctgattgcctggatcgttgcctgtaccggaaaaattgttgatcgctttactccctcgatgacaaaaacatttctgaacccagcgcttattatcctgatttctgcccctattgcctttaccataattggacctgtaggaacttttttagcgaccagcttagcctcaggcgtagaacttatgcagtcgcacttgaaccttctgacgatggtgttgctcgctgcattcatgccttttatcgtgatgactggcctgcactgggcatttacacccattgttcttggctctcttgcatcaggccagggtgacggacttatcctgccaatcatgctggttataaatatggctcagggtgctgcgagtattgctgtagggatcaaaagccgtaattctaaacttaaacagacatctctggcggcaggttttacctgtatattttcaggtcttaccgaaccgtgcatgatcttgaccctccatctccgaacagcttttgtatcttaa

SEQ ID NO: 222899 - DNA, 837 bp, Klebsiella pneumoniae
atgcaggtagccaaaatacttaataataatcaggtaatttgcctggatgataatggaaaagaatgtatcgctgttggcaaaggtcttggcttcggtgtatctgttggcgataatatcgtgacggataagattgaaaaatgcttttctattattgatgaagagactcagactaaatttagaagattagttactgagataccgttagagcatatctcgcttgccgacgaaatcattagctatgttaaatgctcacttggtaagtcggttagcgacaacatctatgtatcattaactgaccatctcagttttgctattgaacgctgtaagaaagggcacattctgagtaatccactactatgggagactaagcgattttattatcatgagtataaacttggtatgattgcgctcgatatggtttttcataagacggggattcgattacctgaggacgaggcggcatttattgcactccacatagtcaatgctgaagctggggggacgttcgacgaaactgttaaggttactcacttgatacaggatgttctgaacataataaaatatcattttaatattatttttgatgatcagggacttgattacaatcgttttcttacacatcttagatttttcatgcagcgtcttaaagaaaataagacctatgccagtaaagatagtgctttttatcaagttctacgtagtgaatatccgaatgaatatcattgcgcagaaaaaataaagagctatatctttaatggttatcagcatgaaatgactgaagaagaaacaatgtatcttgttgtgcatattaatagacttattaaatctgatagctaa

SEQ ID NO: 222900 - DNA, 1200 bp, Klebsiella pneumoniae
atgctgtctcagacaaaaagtatggatcaagaaaaaacagtaccaagctctggtttgttactggcaatgctagcactgggcagtggaggattatgtataggaactggtgaatttgcacccatgagtcttttacccgatctggcagcaggaacctctgtatctgtacccgcagcaggtgcgtacataagctcctatgcagctggtgtcgtgattggagcacctgcacttgctgtccttgctgccaggtggcctcgtaaagtgcttttgatgacattactggtgattgctgtcatagggtatgcgttaagtgccctgtcatggaactattcatcccttatggttgctcgttttatttctggtctcccacatggggcatggtatggcgttgcagcattggtcgctgcatcaatggtcccggaaaaccaaaaagcgaggtatatcggctatgtcatgcttggattaggtatagctaatgttgccggagttcccctggtgacttgggctgggcaagaactgggatggcgcatgtcctttacattcgtttgtcttggtattgttctgactggattaatggtctcactatttgttcctgggattgcgccagataaaaatgccacccctcttaaggaactgagtgcattacgaagtccccaggtactgatggcctttggtgttgcgtcagtgggattcgccgggatgtttgccgtttatagctttataacgccagcattgactcaagttagcggtttctctcttaatcacgttccctggatacttgtgctttgggggatggggatggttaccgggaatattgtgggaggaagattagctgataaagcactgattcctgcaatttatggaatgatcgtttggaatataatatttttaggactatttgcgttacttgcacagtggaaaggttcagttttatttaccatattcatgctcggaaatggctttgccctggtacctgcgcttcaggcgcatatgatgaatatcgccggagatgcgcaaaccctggcctcatcattgacgcatagtgcgttcaatatttcaaatgcgcttggggcatcttttggagggcttgctattgcctatggtggctcatgggtgtcaactggttgggttggagtttgcttttcttttatcggtttaattttaatgtatttatcagtacgaatgacgagaaaaacaacataa

SEQ ID NO: 222901 - DNA, 276 bp, Klebsiella pneumoniae
atgaagatgaaacggcctcaccttgtccccctctctacccaagcactagagatcgtacagcagctcaaggtgatatctgggcaatatcctctggtgtttcctgggaggaatgatccccgcaaaacgatgagcgaagcgagcattaatcaggtattcaaacggattgggtatacaggaaaggttacaattggcaaatgggcttacactaagcttctgaacttagttaactttcaattttcaatgctaatgatgaattatattcaatggagcttctga

SEQ ID NO: 222902 - DNA, 468 bp, Klebsiella pneumoniae
gtgagccgatggtcagaaggttatgcctccgatatcatcgaagcattcaataaagatattttcccctatatcggccagcagccggtaaatgtaatcaaaccgctggttctgcttaatgtgctgcgtcgaatggtaagccgtggcgcgacagaaaaggccaagaaggttcgccagcgttgcagcgaagtctttcgttacgccattgttaccggtcgtgcggaatacaattctgcagcggatctaaccagcgcgatgtcagggcatgaatcgaagcattatcccttcctgactgttgaggagttaccagacttctttaaagctctcgcaggctacacagggagcccgttagttgttcttgcagcacgtctgctgatccttacgggagttcgtaccggcgagcttcgaggtgctttctggagtgagtttgatcttgagaaagcggtgtgggaaattcctgccgaccgatga

SEQ ID NO: 222903 - DNA, 342 bp, Klebsiella pneumoniae
gtgctcattaaaaatctgaaagaagaaatgttaaggtttgaagatgaagccaaaactgactggctgtttcctaatcctatgccgtttggtctggaacgagttatgattcaccagtgggtgcgggcttatctaggatttccgatggtttacgttgaagcaaaaattgttatgactgcttataggggggaagagatatataccttacctatacctcatcaaaatagttctgtcggatttacctataacaatgatttattttcagaaaccgtgactttttatccactggagcgagaaaaggagattcatattgcgctggagaaaaagcgacttggtggcaaatga

SEQ ID NO: 222904 - DNA, 747 bp, Klebsiella pneumoniae
atgcaaaacactccggatagcgtattttacagtcctctttatgtgagagtatctgaatatcttttttatgccggtaagcgaaacgtctttaccgccattgcgatggcggtaattgctaaaatcgaagaatttccgtatgtgaaaatcgaagagctggcgtcgtactgtaatacgacgccttcgagcatcaccaaattcgtcagggaactgggatacggctcgttccaggaattaaaaaatgacatagctccctatcggttgacgcatcagggtataaaaggaatgactgaaaaagaggtcatcgaggaaatatataaatatataccttatgaagagtgcagaaaaatggcagaggtcattaataacagtcgttccgtcattattctgtctaactcatttcttttcaatattgcaaatgtcatgagggaaagcatcagcagcagcaatcggaaggtttatctggtcgagcgttcaaacaacgaactgataaaaaccatccttcggaaggtggactgcgtttttattcttaccctgacaggacaatggataaactcatgccagtatataaataacgtgtctgaaaaatcccaattatgccttatttcaggaagcgtaccggctatcctgaaaaacaaaccaattcatactatcgaacttaataattaccctcaaatgttatacgcaaactatttttcgcataaataccttgaaagtattgtttttaatatcgtacagagcgtgatttag

SEQ ID NO: 222905 - DNA, 1338 bp, Klebsiella pneumoniae
atgtctgaacaacagcagatattgtctatcattgacaatttaggtggccgtgaaaatattaaggattattaccactgcgctacgcgcttacgttttaatctcttcgattatgacaagattaacaaggatgcccttaaagcgaacccgctggtcctctcagtcgtgcaggccagcggacagtgccagctcattatcggcaacaaggtaggggcagtatacagtgccctgcatggcgtgcttgaaaccggtggtcagaacagcgcgccgtcttcttccgggacggcagcaaaccgggaatccttcatcagccgtatcttcgcattcatttcaggcagcttcctgcctttgatcggtattctcgccgccgcaggtctgctgcgtgccttcaccacgttgttactgagcctgccttctctggcaggaaacagtacgctaaccctgctgtcatttatcgctaatgtgccgttttatttcatgccagtgctgcttggttttaccatcgccaggaagcttaaatccagtgagctaacaggcgcgataatcggcgcgtcattactgtatcccgaatttaccagtctggcagggcagacgctgaatatcatcggcctgccgcttgtggttatggaatacggttacagcatctttccggtattctttgccgtaccggttgctgccgcgctggagcgcttcctgaaggtcaggttgtgggattcagtacagctgtttatggtgccgttgttatgcgtcgtgattgtggttccgctcaccatgtttttacttggtcccttcggcaagtacctcggcgattatctggcatcagccatcgtttacatcattggcgtgaacagtcttgtggccgggatgatcatcggggcagcctattcctttatcgttctgttcgggctgcactgggctattattccggtagtcttttcaaacattgcccatggcggtgatcctatctatgccattggcggtatgtcagccatcgctcagatgggcgtggctctggggatcctcatcagaacgcgtgatacaggcacacgacaacttgccagcagtgccttcttcccttcattaatcagcggtgtgactgagcctatcttatacggcctcatcatccctaaccgccgcacgatttattacatcattattgccggtgcggtcggcggaggaattgtggggggctataacatcacgattaataaccttgtttttgcgagtctgctttccatcccgaccgcaagtaacatgctgatctacagcgtgggtctattcgccactttaattactggcgcagttttaccggttatttttggttacaagagccggttttaa

SEQ ID NO: 222906 - DNA, 231 bp, Klebsiella pneumoniae; identical to SEQ ID NO: 222286

SEQ ID NO: 222907 - DNA, 930 bp, Klebsiella pneumoniae
gtggggcattacagaatgattcctgacaaatcggttgaaatactgctgggtgagctatcgagggatattgcacagcgcacacccggcaccggcgatttccctaccgccgtagaagggctcgaattgtttcgccgaaacgaacccgctcccccggtaagctgcctggtccctcccagtatcgttctggtggccgatggcgcgaagatcatgtgggttgggggtgaaccttatgaatataatgcggaaaaattcctgataacctctcttgacctgccggccagttcggaaatattgcaggcttcgacatcccagccctgcgtcggcgtagcctataagcttgaccagcgcgtgctaatggaattaattgcccagggaagcctgccgccggtcaaaaaacgagacgcgggaacgagtgtcgggataggtactattaccgatgctttgctggagcctttctgccgtctgctttctttgcttgacgaacctgaagccattcgtgttctcgggccgctgatccaaagagagatacactaccggcttttgatgagcgatcagtccgatcatctcagacagattgcagcagtcgacggccatggctaccgtatcggtaaagctatcgactggttaaagaccaatattgcatcacctttacgcgtcgaggaactggcaagtcgggtgcaaatgagcacgccctctttccaccaccatttcaggcagcttgcggggatgagcccgctacggtatcagaaatggctgcgcctcaatgaagccaggcgactgatgctgaatgaacattacgatgtcaccacagcagcctatgcggtcggttacgaaagcctgtcccatttcagccgggaatatacgcggatgttcggggaatcgcccaagagggatattactgaactgagaaagtcagcgggtaagctttaa

SEQ ID NO: 222908 - DNA, 1935 bp, Klebsiella pneumoniae
atgattatcagtccacctcttctgaaagtgaaacaagacgatgaaactgatgcggcctggattgaaagaatcctgaccgtagttgaccgacgcggatacccggtcaacggttatggttcgtggcatggcggaatacatatacgtcagactgacgaaggaaggcctgctgagagcgtgcgggcgatagctgacggtaccgtcatttcactccgcaaaagctcagacaagcgcgacctagcaccattcaacatcaacgccgataaacccaatacaaaggggagtaatgatggttatgtgctcataaagcatgaaaccgagatcggtagcggtgatgaaggaaaagtggctttctattccttatacatgcatctgaagtcgctggctgaaactgttaaagccggtgataaagtttaccgtaaggatcctataggccttccaggcatggttgatggagtgaatgctttccatttccagattttctgcgatgatgacaacatcagcaagctaacgggcaggaaaacaggagagctggatatttcgaagaatggccgcaccgatgcggtttatggtgatattcacttttatctgccaccgcagacaaagttttatgacaaggctccagcagataacagcatttctaccaccggactttctgaactatataccagcaatgtgcctctgtatgccagcatgactctggcccaaggcaagtgcacgatggttactcgtcagaaaaatacgcagactgacggaaaatatgatctgctgggtgaaccactggttaatgcagatggtgatgactacgaatacaatctctataaaaccgcgatgcggaattataaggagagcccaagtgccgggtttgaattacttcgctttgggcgagtgatcaacacggaccatgaaacactggtaccggcagacgcaccattatggatgacagtcaattacccgggtggtaaaggggtgatcaaccttgctgattccagtattaaaaagtttagtgacgctgatttccctcactggacgggctggcagatggtagatgacgatagtgatagcaacagccagtgtaattcagctattatcaagaaacttcacgaagttggtgacttcgataaccagtgcgggaagctaatctgtcatttcccatttgaatgggaaaaaagtacgatcgacatccgtttttcgtggctgaaaacgggaaatgaagagcatgaaccgatgacggaagccgattatgcaaagtttaaatcccatgcggaagcactatgctttgattctggagcgttgagttctgaccggttgtggcattttgagccaaaatcatttattcgacatttcaggaaatgtagttggctcgactctgaagtaattgaaaaagtaatgacggcgaatgctagtaaagaaaataaaaatgcacttgaaggtattaaaaatattacattagagtactatgcggacataaatacaatcatgcgaaagtataacttatctgatgcaaatagaatttgtcattttttagggcagggtgcagttgaatcaggttatttattgtccatgcaagaaactagccagcaacaaattattgttgatggtgttcagcaaggtggtgtgattgttgaagcatcaacatttaatgaaactactaagctaggtcattggtacggagctcttaaagccgagaaggataactatttctccgggaaaaaatacaattcccgtggagggtatatcacaggatcctatagctggattaacggtaactgtggagatgtagatgcacaaaaattcagaggtagagggtttaaaatgctaactggacttaacacatattcaagctactgggtatatcgaggttggttgtcaaaaaatgactttgataaatattggtgggatgacccggagtacaagaaaaaaattcagccggtatga

SEQ ID NO: 222909 - DNA, 2352 bp, Klebsiella pneumoniae
atgagtagcgtgaaatcgttgttgttcagccacaaccaccacctgctttcggtgaagggatgtgaagccgggcttgatgtgctggccttcgagggcgatgaagccctgagccagccgttccgctaccgtattgaattcaccagcgcagaccatgccatcagcaaagagatgatgctgatgaaggctgcctccctgacgctgcaggcgccggtggctcagggcttcggcatcaatgttcagcaacccgtgcgggttatccagggcgtggtgacggggtttgaacggctcagtacctccagggatgaaacgcactacgcgctgacgcttcagccgcgcctggcgctgcttaaccgctcgcaccagaacgccatttaccaggaccagtccgttccgcagattgtggaaaaaatcctccgcgagcgccacggcctgcgcggtcaggattttctgttctcgctgacaaaaacgtatccgcgccgcgagcaggtgatgcagtacggcgaggatgacctgcgctttatcatccggctgctgggtgaggtggggatctggtttcgctttaccgccgacacgcggctgcacatcgacgtcgctgagttctgcgacagtcagcagggctatgagaaggggctgacgttgccttcggtcccgccgtcagggcagcagtcggccggggtggacgcggtgtgggagatggcatgccgccaccgcgtcgtggagcagcaggtcagtacccgcgactacaactaccgcgaggcgacggcggacatgaacgcgcaggtggatgtcacccgcggggagaccaccacctttggtgaggcttaccactggggagataactacctgaccgccgggaatgtccatgaccgccatccggcgccggagtccggggcgttttacgcccgtcttcgtcatgagcgttatctgaacggccagacccggatgcaggccaccaccagctgcccgacgctctgcccgggacaggtgctgaaggtcaccggcggagaggaggtggccagggagtttgctgagggcgtgctcgtcacggcgatgcacagccacgcccggcgcgatgccgactttgcggtggagtttgccggcataccggacagcccggacgtcggctaccggcctgagcccggcgcgcgtccgatgatggccgggacgctgccggcccgcgtgaccagcacccgggaaaacgacacctacgggcatatcgacaaacacggacgctaccgggtgaatatgctgtttgaccgggcgcgctgggaaaccgggttcgagagcctgtgggtccgccagtcgcggccgtatgccggagacacctacggcctgcacctgccgctgctggccgggacggaggtggcgattggctttgaggatggtaaccctgaccggccgtatatcgcgggcgtgctgcacgactcggcgcacggcgaccacgtcaccatccgcaatgacaaacgtaacgtcctgcgcaccccggccaacaacaaaatccgcctcgacgacgagcgcgggaaagagcatatcaagctctcgacggagtacggcggcaagagccagctgaacctggggcacctggtggacagtgacaggcagccgcgcggcgaaggctttgagctgagaaccgacagccggggcgctatccgggcacagaaagggatatttatcagcgcggacggacaggcgcaggctcaggggcaggtgctggatatggagccggcggtcagcaatctggccgaagcccgggagcagatgatgtccatctccggtgacgcgcagaaggcgaccgcgaacccggccgatctccaggcgcaaattaccctgctggagcagcagctgacggacctcaaaaaatcggtgctgctggtcagcgcgccggaggggatagcgctgaccagcggggagcatctgcaggtctcagccgggcataacctgattgccacggccggaaagaatgcggatgtcagcgtggtgaaaaagctgttcatcggggtgggcagtgcgctgagcgtgtttgtgcgaaagcttgggatcaggctgatagcgaaccagggaccggtacagatgcaggcgcagaatgacctgatggcgttgcttgcccggaaggaaatcagcattgtcagcacggaagacagtatcgaaattattgcgaaaaaacgggtcacaataaacggcgggggaagctatatcacgctcaatgccagtggcattgaatcagcgacgcagggggaatacctgacaaaagccgggcactacgggcgaaaggaaaaggccagcaagcaggaagacttcccgaacttggcgcctgaaaccacagaaccttgcagtaagttcagattttcctga

SEQ ID NO: 222910 - DNA, 747 bp, Klebsiella pneumoniae
atgacctactgtgtggccatgtgcctggcggatggactggtgtttgcttccgactcccgcaccaatgcgggcgtcgaccatattgccacttttaaaaagctgcacgttttccatcaggagggggaacgggtgctggtgctgcaatccgccggcaatctggccaccacccagagcgtgataagcctgctcagcgcgcgcatccgtacccagcaggagccgaatctgatgcaggtcacttccctctacgacgccgcgatgctgatcggtaaaacgctgctggaggtgatccagcgcgacagcagcaaccagcagacctgcagtaacaccaacttcaactgcaacctgctgcttggcggccagatcgccggcgaaactcatcgtctgttccatatttatccggagggcaactttattgaagccacccgcgacacgccttatttccagattggcgaaagcaaatacggcaaaccgatcatcgatcgggtgctgaccatcgacacgccgctggagcaggcgatgtgctgcgcgttgatctccattgattcgacgctgcgcagtaatctgtccgtcggcctgccgctggatacgctgctctaccgcagcggcagcttcagcagtgccgggcagcatcgcatcaccgacagcgatccctacttcaaccgcattcgcaaggcgtggtccgaagggctgttgcacaccttccagactctgccgacctggacgccagcggagcgggaagaggagtag

SEQ ID NO: 222911 - DNA, 1359 bp, Klebsiella pneumoniae
atgtctgctggcgaaaaaatttctgtcagagagaaaataggttatagcctgggggacgcagccagtcacatcgtatttgactcgtctgtggctattctggcttatttttataccgatatttatggcctgccgcccgccgtaatggggacgatgtttttgctggtgcgtctgctggatgcgattaccgatccgattatgggcgcgattgctgacgccacctcaacccgctggggccgctttcgcccctggctgttggcgatctgcgtgccctttgcggtgagctgcgtgctggtgtattccattccctccttttccgactccggaaaaattgcctacgccgtggcggcttatatatttatgacactgatgtatacggcgattaatattccgtactgctcgctgggagcggcgctgacctccgatccgcgcgaaagcctctcgctgcagtcctggcgtttcgctatcaccccaatcggcggcgcgctcggtactgcgtttattttaccgctggctgattttctctatcccggcgatcgcgcgaccggtattcaggtctcgatggccctgtttggcgttatcggctgcctgatgtttatcacctgtttcgccacgactaaagaacgcgtgcagccgattaaagaacagaacctgaacatcgcgcgggacgtgaaaatactatttcgtaacgatcagtggcgtattctttccgtttacaattttatgatgctggtcgccgtggtaattcgcggtggcgccgtcgtctattatgttaacagcgtcctgcataaaggcgccgacgtgattaccatattcatgctcggcggtatgtttgcctccatgctgggttcggtgctggccaagcccttcgggacgcgcttttgtaaggtccgattctctttctggattaatcttctcaccgccgcgctgggcgtggtctgctttatcgtcccggtacaatattggattgcggtgctcggcgtgcatattctgatttctatcattcagggcggcaacggcgcgttgcagtggtcgatgattaccgacgtgaataactatggcgaatggaaaacccagcggcgtattaccggtatgaatgtcgcagcaaatatctttgtcatcaagctgggtgtcgccgtcggcggggccatcctcggctggatattggcctatttccattacgccgctaacaccacggtgcagtcggcttcagcggtgcagggcgtggtgctgttgtttactctggtcccttccgtgttttatgtgcttaccgccgtctcgattaaattctacggcttaacggaaaacagaatgaacggcatcgttgatgatttaaaacacggcactttcgccgaatcctga

SEQ ID NO: 222912 - DNA, 2121 bp, Klebsiella pneumoniae
atgaacgtggctatttctcgaaaacgcccggggctgctgtatgcccttgcggtcgcactccccttcaccgcgcaagccgaagagacggtggtggtcactgccaccccgccggcgtccgccagcgcgccgacggagggctacagcgccagcacctcgctcggggcgacgaaaaccgaccagccgttaatcactaccgcccagtcggtgtcggtggtcacccgccagcagatggcggatcagggggcgaataccatcagccaggcgctggaatataccccgggggtctactccagcttcggcggcggcgccacccggttcgacgccatctccctgcgcggctaccacggcggcgacgtcgataacctgttcctcgacggcatgcgcctgatgagcgacggcggcagccataacgtactgcaaatcgacccgtggtttatcgaacgcgtggatgtgatccgcggcccctcctccgcgctctacgggcagagcgtgccgggcggcgtggtcaacctgacttccaaacgtccgcagttcagccagcagggccacatccgcctgaccggcggcacgcaaaataccaaaggcgcggccttcgattacaccgacgccatcaatgaccagtgggcatggcggctgatcgggatgacccgcagcagcgatacgcagtatgaccatacccgcgaagagcgctacgcgatttcgccttccctgctgtggcagccggacagcgacacctcgctgctgctgcgcgcctatctgcaaaaagatccttccggcggctaccacggctctttgccgctggacggcacccgctacgcgcacaatggccgtaagctctcccccagcaccaacgaaggcgatccgggagatggctataagcgccgccagcagatctacagctatgagtttgaccaccagttcaccgacgtctggtcggtctattccgccgggagctacacccataccaacgtctccctcgatcaggtctaccaggtcggctggatagatgacagcgacatgctggcccgcggctacagcggttcgcgcggttcgctggacggctggtcaaccgataaccgcctgcgcgccgatttcaatacaggcgacctggcgcacaccctgatcctcggcgccgaatatcatcgcttccgtaacgacctgtggaccggcgccggcggcgcggcgccccttaacccgtttagcggctataccgcgcagaccggacataccgttacctacagcgacgacaataatcgccgctattaccagaccgggctgtatctgcaggatgagatggtctggaaccgctggcatgtggatgtttccgcccgctacgaccgcatcgtttcccagcaggtcagcgatacccaggggacctcaaaccgccgttcagacgaccatatcagcggccgcgcctcgctgttgtacgccctggacaacggtctgtcgccctacctgagctacagccaggcgatcactccggcgatgctgccgggcgcggacggcaaaccgttgaaaccgaccaccgccgaacaggttgaagccggcctgaagttccagccgccgggcagcagcgatctctatagcatcgcgatttacgacctgacgcaaaaggatgtcgccactcgcgacccgaacatcgccaccgccacctatattccggcgggtaaggtccattcccagggcgttgagctggaagcgcaccaccagatcaccccgcagctgagtactatcgcctcgtatacctggaatcgtctgcgtttccaggacaccaaagacgggaccgacaataacacgccgcagctgaccccggatcagatggcctccttctgggcgcgctatcagttcccggcggggatctccgttggcgccggcgtccgctacatcggtaaacagtgggcggatgatgccaacaccgcgcggctgccgtcggtcacgctgatggacgccatgatgcgggccgacctcggcgtctggtcgccaacgctgaaaggcgcttatgtgcaggttaacgccaacaatatcggcgaccgcgagtatatttccggctgctatggcaccggcaactgttactggggagcagagcgcagcgttatagccaccgtgggctacgatttctga

SEQ ID NO: 222913 - DNA, 204 bp, Klebsiella pneumoniae
atggaaaacgaaacagaactgaccgagccgccatttgaaacctggttcagagaagtggttgaactggttaaaaatggcggacattcactggatatcgttgcctataaaggggagtggatcgacgcattttctgacggactaacaccagaaggagcagtaagtaaaagagttattcatgcagttcatagtaaagatgtcggatag

SEQ ID NO: 222914 - DNA, 765 bp, Klebsiella pneumoniae
atggtattaagttctcttttttctctttggtattgtaggataaagtataaaattagattaaatcttccaaatttgaaagatacattaatattaattaagtctgaaatgtggatttttttatcaaagatatcatcttttctatatacaacaatgggagttgttttcttggggtttcttgccacgtcttatgatgtggggatatatacttcggctcaaaaaatagttatgctattcattagtgcgatcattacgcctttatctttcattgttttccccgcattatctaaaagatttggtgtcagtgttgaacatggtttgaattctttcagaaagttcatgcctctattatgtatgtgctgctttggttcatttttatttatttttttctttggtggaaaagtcatactcatcatgatgggtgcacaatttaaggatagcattaacgttctgaatgtgttgtcttttggatatgtttttgttttctggggggcagtaattggcgggcaaatagttttaaacttaaaatatgacaaacaatttgttcaaatgcaatggtttgtagcttttttaagttttatattcaatgttcttttcttaaaaaaatatggtgcaatgggcttggcatacatttggaccatatctgagtttattatgacttttatgcaatgtgtttttattaaatacaaaggcatacggataattgactgggaacaatttaaaataaaaaatatgataactaactttaaagatttgttacgacactaa

SEQ ID NO: 222915 - DNA, 1839 bp, Klebsiella pneumoniae
atgagtaaccttaagtatcgtgcggatattgatggtctacgcgccgttgcaatacttccagtgttattatttcatgtggggtacaattggtttagcggtggttatgttggggttgatgtttttttcgttattagtggttatcttattacctcaatattagttaatgatataaagaataacacttatagtatattggatttttatgaaaggagaattagaaggattgttcccgctcttgtatttgttatcgcgtttattattgtagcatcacctttttttcttcccccagaaaattattcatttctgccgaaggaaataataggaacattactgtttatatctaatatagtaagttatttaaagtcagggtatttttcaactgatgcagaacagcggccactgctacatacatggtcgttaggtattgaggagcagttttatataatatctcccgttatactttttattgcgtttaaatatttaaaggaaaaaacaaacttattattagttatattgacgataatatcattttttatgagtgtatttttatctcaaaaacatccaacatcatcattttatcttttacatacacgttactgggaattatcgtttggttcattagctgctgtaggtgtatttcaggggagtaaaaaacaaatatatagggaggtattatctctcgtcggtttattgatgatattggttgctgttttttcatttacatccacaactatttttccttcctataatgcgttgttgcctgtgttgggggcaactcttataattcttaatgcggagcatacaactgttgggaaacttttatcatttcgaccattagtttttattggcgggatatcatattctctttatttatggcactggcctataattgtatttgcaaacgataaatattttgttgatataaaacttactaaagaaatgatcgtaatactttcagtattaattgcatgggtttctatgaagtacatcgaaactccctttaggaataaaaaaacttatagcagaaaggggatatttaaatatttcaccgtttcatattttattattgcttgttgctctctggccatttggccattgaatggatggtctggtaggcttagtcctcaaaaagagaatatattatccttcactaaagatattagtccggttagaaaccaatgccacttcaatgacggtgttccggagacgtcgcaatactgtatattaggtcaaggcaataaaattcctcatgttttcgtgtggggggatagccatggcgcagaaatagcctatgcgttgtcatcgttgactccgttagttacggctacgtattcagcttgcccccctgcttatgcatttaatactgaatctcgaccagattgcataactcataacaaaaaagttatgaattatctcttaaataataaaaatattaaggatgtcgttttagctgcaaactataatttgtatggaagtgataaagacatcgagtcttttgtcaagggctttgaggaaactattgagctattaacccggtctggtaagcatgttattgtgttagatcaagttccatctccaggagtgaatgtcccatacaccttaacaaatgtagatgtagtagtgaataaagaatttagatacaatgacaaggtttttagaaaaataaagttaacggatggtgttgatttattttcttacgaaaaatacttatgtgctggcgagtcgtgcccaatgatgtataataattttccgatatcttttgatgataatcatttatcattgtctgttgcaaaaataatggtgaaatatattaagcgtgatttattgctgaccgagtga

SEQ ID NO: 222916 - DNA, 1674 bp, Klebsiella pneumoniae; identical to SEQ ID NO: 159343

SEQ ID NO: 222917 - DNA, 1566 bp, Klebsiella pneumoniae; identical to SEQ ID NO: 27070

SEQ ID NO: 222918 - DNA, 1785 bp, Klebsiella pneumoniae; identical to SEQ ID NO: 159345

SEQ ID NO: 222919 - DNA, 1059 bp, Klebsiella pneumoniae; identical to SEQ ID NO: 27073

SEQ ID NO: 222920 - DNA, 1860 bp, Klebsiella pneumoniae
atgattttaaataagcttaccgcttcactgtccccgatagtgaacgggatgctggcggtgctggcttttgtgcaacagaaacaactggtgctggcattattagcggggctgacgatgccgttttttgcatcaatgaaaagcgatgaacggcagaaagcgccgctctggaaaaagctgattattgctttttccctgctgtgttttctctccggcacactggctccggtcgttatcggatcctttcagtggctgtataagatcagacccaccagtgataatacggtactggcgtggtcagtacggattgctttcactgtaaccgggattatttttcatattatgcttcgccggatattcacaccggaactggacaaaataaagaaacgccttgttaaaaagaccacccttgaacgggaattgcgcaccgatgtccgcaccgtaaagtccctgctgccggaaacactgcattataacccgctggattatatcgacctgaataaaggcatttttaccggcatgggcagggaaaatgaaccaatgtatctcccgttaaaagactggcagaaacaacacgcggatattatcggcaccacaggggccggtaaaggggtagccgccggcatattactttatcaaagtattctggccggtgaaggtgtttttgttatggaccccaaagacgatgaatgggcaccgcatctttaccgcaaagcctgcgaggatgcaggcaagccttttgccttaattgacctgcgaaaacagcaataccagttaaatctgattgaagatatcacgcccgatgagctggaagaattgtttgttgcaggtttcagcctggcagaaaaagggcaggaatctgatttttatcgcattgatgaccgaaaagccgcccgtatagccgcacaatttgtcagcgataatccatcgacaacaatccgggatgtttataacggtgattacgttcagagtattgccgaaaagatcaaagcctttttcggaaaaattgaggaactggcattactcaatgccattaactcaccagaaggcttttcgcttaagcacatatttgatgagggcggctgctgttatgttgtcggctccatgcgaaacagcaaaattattaccgcccagcgcatgctactggttcgcctttaccagctggcagaaaagcgcgatcgagtaatagacgtcccccgccccattgctgtttatctttccgaactgaaataccatttatccaggtcagcactggagggattaggggcagcgcgtgataaaggcgtgcatattattatggaccaccagtccattgccgatttaaaagactgcccggcagatttgaaaggtgacgccgttgtcggtgcggtcgttgaaaatgccaaattcaaactggtttaccgggttatggacccggatacagcggaatgggtagcgagaatgtcaggcactattctggtggatgacgaactccgtaaggctaaaacagataatatgctcacggagaccatcgacagtgagcgcacaatccgccaggccgaacgtttctttattgacagcaatatgatcctgaacctgcccgattttgtcagctttatctttacgacaaaaacgctaccttctgcttcactgatctcgccgataaaggtcagaaagcgccagctaaaaactttttcggtttcccctgatattgccgcaacggtagcccccgtgaagatcatgctggatttttgcgaggatgataaacccgccatgtcggatgtgatgacaacacacccggctcttttcttcgacgaaagcgaagtcaaaccggtaaagccgaaacctgatgatgaagaacacctgtccccgctggatttttaa

SEQ ID NO: 222921 - DNA, 306 bp, Klebsiella pneumoniae; identical to SEQ ID NO: 27077

SEQ ID NO: 222922 - DNA, 684 bp, Klebsiella pneumoniae
atgagtgaacagaaattaatagctgaatcccgcacttttgagcagcaaatgattgagcgggataaacgcgccacaaaagccggttttgttgttggcggtatgggtctgctgattgcggtactggcgctcgtcgccgtggtcgtgatgttgccgctgaaacagacggacgttgagctgtataccttggataaccacacaggacgggtggaacacgttacccggacatcgaaaaccagcctgaccgcaacagaagcctatcaaaaggcgatggccgcaaactacgtcaaagtgcgtgagcggtatgtctatccctctttgcaggacgactacgagacggtacaggtctacaacgctccccaggtaaacgatgactatctggcgctttacgccggaaaaaacgccccagacaaggtttataagaacggggcgcacaccgtgaaagtggagatcttgtccaaccagatcaccgatgcgacagcccctgatagggtcgccaccatccgctacaagaagattatccgccgtctggctgataacagcacccgcaacgaatattgggatgcccggttcacgttccattctaaccctgacaaggaaatgagcgatgcggaacgcgagatcaactacttcggctttaccgtcaccagttggcagaccgaccgcgaaatccggggaggtgaatga

SEQ ID NO: 222923 - DNA, 138 bp, Klebsiella pneumoniae; identical to SEQ ID NO: 71834

SEQ ID NO: 222924 - DNA, 1074 bp, Klebsiella pneumoniae
atgagtggcggtctttttgttggggttgagaaatacctgataggaggaattacagacgccacaaagagattgatgatgtcgtactcttctatgatgatggggttggcagcagcgtcagctaccatctacatcatgtggcgtggataccagactttggctggtaagctatctacgcctatggaagacacgatgtgggacatcatgaggatggcgatcatcctgtccttcgtggctaatttaggcggctacctcgatggcgttattgatgccataaacggaataaaggagggtttttctggtagtgataatatatggcagttattagacaccctatggaataaggctaaagtgttagggaaaacgctacatgacatggataattctacatatgtaaaagatgagggaatgactgctcaattttgtgtatggcttggaatattcgcacttatgattctagcgggctttgtttcaatggttgccgaagtaatgattctactattaggaataactgcacctattttcatattctgccttatgtatggtttcctccgccccatgttcaataactggttgcaaaatatatttgcaggaatattaacaattctatttaccgctctctcattgagaattgtagtgaattacttgaatctcgttcttaataaggcgacgaaggtagcagacagttcaacaattgttgaacttggtgctcaagtctgccttgcaggtattttcgctgcaatactggtgtatatttccgctaaggtagccgcagctctggccggggcaagcgctaccgtatccatgcaggggctggccgctgtaggtatcggtgcggctgcttttggtgccgggaagctagccgggggtgcagttaaagaaaccaaacgttccgcccaggacaacattcagggctggaaggatgcgaatgcaggtaagcccggcaagcccggaggtgagttaggctataacgcatctaaagcgcggaagtacgcgattgagcagatgatagcccggaacgaagcgcggaggctggcacagtcgagagaatccgcggttaagaagttcaacagctag

SEQ ID NO: 222925 - DNA, 183 bp, Klebsiella pneumoniae
atgaacattaatatcccggcactcataaacttcgatcctgcaggtataaaaaaaagcacctgcatgtatatttcagacctgcccggtattgtgctatatgacactataccattcactgaatattcagctgaattactgagtacttattcagttaaggagtcaatttcatgcttccatccctga

SEQ ID NO: 222926 - DNA, 798 bp, Klebsiella pneumoniae
atgcttggtaataaagtagcacttataactggcgcatcgaatgggatagggcttgaaattgctcgcaaattttcccaaaacgggtgggatgttattgctgtcgcaaggaatgaagaaaaattatctaaagcagttgaggatctaaaacaatacggcacaaaaattatcccctattccatcgatctcagtaagtatgagcagatagaaacgcttaagcgaaaaacggaacaagatggattcgatataggagcactggttatcaatgctggccaaggactcggcggtgcatttattggtggtaccgatttgtcaaaagaacttgagctcatccgactcaatgttgactcatatgttcatatgtcaaaaatatttttgcctgatatgatcaaacgtggcggagggtatgttctgatgacatcatcagtttctggcacgcagccaataccttttgaatccatctatggtgcgacaaaagcatttgtgaattccttcttctgggccattcgcaatgaattatccggcaagggcttaaaaatgactttgttgatgcctggtgccactgccactaatttcttcattaatgcaggtcagtccaacactcgggtaggtgcacaccagaatacgactgcggaacaagtcgctgaacgtgcatggtatgcattaatgagtgaacatgaagttgcgtatgggagtgataatgcagaattagcggctgaagtttacaatcgacaaatgagtgagtctcataaagcccagcgtgctcgtctaaattctgaacctggttcagcagtaaaataa

SEQ ID NO: 222927 - DNA, 840 bp, Klebsiella pneumoniae
atgaacagttcaattatcgtaaagggccgtaccgcggttatcactggtgcggcgaaaggtattggtgccgcagccgcaaaacgtttatctgaagccggtatgaatctctgcctcttcgatagagacgagaagaatcttaagtccttagctgatgctcttgattctgagatacgtcttgttacaggtgatgtgacaagcctggaagatattgcgcgccttcgtgacacagctataaacgactttggtgatattgccttgcttattaataatgcggctatttcgcaccggagcggtccatggggtgatccagatgactggcgcagtcaacttgaagggaatttattatcaatactgaacgtgcaacacttgttcgtaccggaaatgcttaagatggacggccgaagcgcaatcgtaaaccttggctcgaagcagggaatcactaccccgcccgggaacaatgcctataatgtttccaaagcgggggtgaaaatagttacagagcaattggcccatgatttgtttaaagaatgtggaaataaaataactgcccatcttttggttcctggttatacatggactccaatgaatttccctgaaatggacgaacaacacgatgagcagccaaaaggaacatggaaagctgaacaagtgattgaatactttatcgagcatttctctcggggcgacttttatatcatttgcccggatggaacggtcacctcagaaatagacgcaaagcgtataacctgggcctatgaggatatcattcaaaatcgcccagcactttccaggtggcaccctgactggaaagataaatttgaagaatttatgaattcgtaa

SEQ ID NO: 222928 - DNA, 1116 bp, Klebsiella pneumoniae
gtgtttcatctatggactttgatccccgcaatctatattggtattagggttatctttccactgagagtctcagcatcatcacgatgcttgctgttttttgtcatggcaatggttgcggattttcacctgctcagtcgattattttttggaaccatgttctctccagaactccctgaatttctaatgattatgattggctggggatttggtttcatagttattttctttatgttgttagtgattagagacctgatgcagttgattagattttttctcaccagaaaaaagtatcccctatttatccctgtttatcttctgcctgtattggcatcgtcactggcaggtatcggtgtttatcagtccgtgaaagtacctgatattcgggaagtcgaggtgagaattcagggattacctgaagaatttgacggctaccgcatcactcaactgacggacattcacgtcagtcgtcttttaaccggtgactggctgcgacaggtggtagaaaaaaccaatgctctcgactccagtttgatcctaataaccggcgatatcatcgacggaacggttgaggacagacggccagatgtcagctcacttgccatgctaaaggcccctgatggtgtatttgccgtcacgggtaatcatgaatattactttgatggtgcccaatggactgctgagctatccaagctgggtctgcattttctaaataatgaacatactgttattactcgaaaagatgtaaagctagtgctggctggtatcaccgatgaagctgcggctaagtttggtggcactcctcccgatctctcagcagcattgtctggtattgataattccgggaaaatcattctgatgagtcaccgaccgaataatgctccacaaagtgccgctgctggtgtgtcgctccagttgtctggccatacccatggaggtatggtgtatgggttcgataagtttatagcatcagccaacaatggattcgtttcaggcctgtatgatattgggcagatgtcgctatatatcagtaacggtacgggtatctggaacggctttcctctgcgacttggtaaactatcagaaatcacggtgctgacactacggagttttaattga

SEQ ID NO: 222929 - DNA, 927 bp, Klebsiella pneumoniae
atgccggtaagaccaatagctaaactttcgcgcagcgatctggccgatctgaatgctttcagaaccgtagagaggctcagaagcttcacgcaggcagccgtggaactgggtattacgacctctgccttgagccattctgtccgcaatcttgaaacccggttgggtgtcaggctcctcaaccggaccagtcgaacggttgctcccacggatgccggaagcaacttggcaagacgacttgaaattgggtttaatgaaattggtgaggctcttgatgagattaatctgctcagagacaggcccgttggccgcttgcgcataaatgttctcgcagacggcgctagattgatactttccaaactcttacctaaattcctacaaacctatccggatgtggaggtcgaagtcgccgttgatgacaaaatggttgatatcgtctcggccggatttgatgcaggcatccgatttggcggcacggttcctgaggattttgtggcagtcaagctgggcccggaactcagatgggtagcagtagcttctccgagatatctatatagaaaacaagcacctgttatacccgaagatttaaaatcccataattgtatccagatacgcacgggtcagggtgtcatttatcgctgggatttccacaaaggcgatgaacaccgaagcattgaagttcctgggcaggtatgtgttaacgaaacgacgttaggtgttgagcttgcgctaaaggacgtgggtattacctattgccttgaagagcgtgttgcagagcatatcaaaacgggggaactgcatattgtgctaccagactggtcacctattgaacccgcaatgcatttgtattacccggggcatcgacaggtaccccagggactaaaagagttaatcgaagtattacgctcagcctatctcgatgttgcataa

SEQ ID NO: 222930 - DNA, 1026 bp, Klebsiella pneumoniae
atgtccagtaaactcaccattggttatatcggtaatggaaaaagcaccaatcgctatcacctgcctttttcacttaaattaaaagatctgattagcgttaagcgtattttctctcctgttgaaaatactggttggcccaaaatagacggtatcagctatactacaaatatcgatgatctgctgaacgatgatgaaattcaggcggtaattataacaacgcctcctgaattccattatgagctggcgaaacaggctatcaataaaggtaaaaactgtgttgtcgaaaagccttttactgaaacctctgagcaggctgtcgaacttttccgtcttgctaaagagaaaggcgtaatggttcagtgctatcagaaccgccgttttgacagcgatttcttgacggttcaggaggtcattcgtagcggaaaattgggtgatttaatcgaactggaaatgcattatgattattttcgccctgaagtgcctgaagcatccaccacgtttagtcgagctcattcctatctttacggacatgcctgtcatacgctggatcaggtcatatcactcttcggaaaacctgacaatgtccattttgatgtcaggcagcttcttggccccggtcgaatgaatgattattttgatatcgacttgatgtacaagaggcttaaggtatctgtgaaatcaagctatttcagaatcaaggatcgtccgagttttgtggtatatggcaaaaaggggatgttcgtcaaatcaactaaagatcgtcaggaagagcatcttaagcttttccatatgcctgaaaataaagactttggtgttgatttaccagagcattatggagtactgacttacattgatagtcacggtgattaccatgaagaaaaggtgaaaactgtgcaaggcgattactctcgttactataccgcgctgtacgaaactgtcgttaacgggcgtgagcaggaagtgaagccagagcagactattttgcaaataaagctgcttgaagcagggattgaagggcttcattaa

SEQ ID NO: 222931 - DNA, 978 bp, Klebsiella pneumoniae
atgaaaataggcattctgggtactggtatgatcgtaaaagatctgcttaccgttattgaccaattgtgctttgattatatttctgtgctgggaacagagcaaacaagaaatgaaacgttagaattaaaagaccgttatgggcttgatgaagtcttttttgattatgacgccatgcttgcaagtaatgtagatgtcatctatgttgccctacctaatcatcttcatttctcatttgctcagaaagctttgaatgctgggaagcatgttattattgagaaaccgatagtcttgtctatagcagaattactggcattaaaaaatattgctgaagcgcagaaatgtttcattcttgaggcaatgaatattcattatctctatccagtacagttaatcagaaaaaacctgaaacaactcggcgagctaaaattagtttctcttaattacagccaatattcatcgagatataacgacttcaggcagggtataattcaccccgcgtttgacccttcacgaggtggcggcgcgatgctggatattaatgtttacaacttgcatctggttgtggggatgttcgggcgtcctgattcttatcattatatgccaaacattatgaacaatgttgataccagcggcatactcgtgttgaattatccaacattcaaagccgtatgtattggtgccaaagattgccaggcacctgcggtatcgacgattcagggcgacaagggatgtattattctggaatcaccagtgaataccctgacaggttataaaatcagatttaacgacggatcgtttgttgaatctgaacagtggaacgggcaccgccttattcctgaatttaaagaatttattcggatcattgaatccgatgattttcaaaaagccgctaaaatgttagaaaatagcattattgcaactgaaatacttgagacagtaagtaaacaggttacaaaggagaatacgcatgtccagtaa

SEQ ID NO: 222932 - DNA, 1434 bp, Klebsiella pneumoniae
atggtttttaatagtgattttctttggggcggtgcgatttcagccaaccagtgtgaaggtgcatacaatgttgatggtaaaggactgagtattcaagatctcatgcccaagggtattatggggccaatgacagaaacaccaaccccagataatttaaagcttgaagggatcgatttctatcatcgctataaggatgatattaaacttctggctgaaatgggattcaaggtttttcgtatttcaattgcctggtcacgtatttatcccaatggcgacgatgagatcgcgaatgagcaagggttagcgttttacgacagtgtatttgatgaatgcttgaaatatgggatccagcctttagtcacaatttctcattatgaaacaccttataatttggcgaaaaaatataatggttgggcatctagaaacttggtcgaattgtatttaacatacgcaaccacgttatttaatcgctataaagataaagttaaatattggttgacatttaacgagatcaactctgttcttcatcatccactgatgagcggcggaattatgactcccatgtctgaactgagtaagcaagatctctatcaggcagtacatcacgaactgatcgccagtgcactggctaccaaggcaggtaaggctattattccagatgctcaatttggctgcatgattctcagcatgcctgtgtatccgctttcccctaaacctgaagatgtgattgcagtgatggaagcggaacatatgaatgatttctttggcgatgtccatgtaagaggaaaatacccaaactacatgaaacgctacttccgtgaaaatgatataaatatcaaattcatgcctggtgacgaagaggcattactgaataccgttgattttgtttcatttagctattatgtcagcgtctgtgagacagccgataaatctatctctgctggagaggggaatttgcttggtggtgtacccaatccttatctgaaagctagtgaatggggatggcagattgatccgcgagggttgcgtatcgttttgaatcgtttttatgatcgttaccagaaaccattatttgttgttgagaatggtcttggggccgtagaccggttagtacagactaaggatggcagttttactgttgacgatgactatcgcattagttacatgaatgaccatcttgttcagattggtgaagctatcaaagatggtgtgccagttatgggttacacctgctggggctgtattgatctggtaagtgcagcaacagcgcaactgagtaaacgttatggcctgatttatgttgatcgtaacaacgatggctcaggttcatttgcacgttataaaaagaaatctttctactggtataaagacgtcattagcactaacggtgcctcattgaacgatgaaaatattactacaaagataacatattga

SEQ ID NO: 222933 - DNA, 651 bp, Klebsiella pneumoniae
atgtttatcaatccggaaaaccacagcaatattatcttcgcttgttcagccgctcttatggtgattttcttgaccatggctttaaccttcatccttggctttgacgaccctgctgatgaaaaaaacattgagccaagtgacttgaaaggaaaaaacaatgaaaattcgcaaagcatcgtttcaactttcaagacaatcgatggacagattttaaattcaccagtaacgggtaagatagtaccgctgtctaaggtaaatgatttaacgttttctacagaagccttgggtaaaggtgttggtatcattgctgatgaaggccgcgtatatgcccctttcaatggcactgtactgtcaatattcccgacgaaacatgctataggtctggcttctgaaactggcattgaattactgattcatattggtattgataccgtaaaacttaacggcaacggatttacctcatttgtaaataatggcgatacggtaaaagaaggtgacctgttgatcgagttcgatattgagatgattcagtcacttggctatgacataacaacgattgtggttattgcaaactcagagaattatcagaaagtagacacttattcagagcaaattgctcatgtaagacaacctcttttatcactggcttaa

SEQ ID NO: 222934 - DNA, 270 bp, Klebsiella pneumoniae
atgagtgaagcaaaaccgcaagatggcagcaccgtgaaaggctatagaaaattaagcgatgcagaaatcgcagcaatgaatcgcctaaaagaactgagtcgcaattttattcgcgagttgcgaaatattcagttggatttgttaccgcaggatcccgttctctccgatcgcaccgctgcttaccgtagcgcctctttggcgaccacaaaaatgcaggaggcctgtatgtggggatgccgtgcggtcgcccgccctgatggcgactgctaa

SEQ ID NO: 222935 - DNA, 471 bp, Klebsiella pneumoniae
atgactaaacatattggcgttaaattaattaatgcgttccatatgacccgccaggagtataacgattttcgtggctggcaacttcctgccgacgagaacggcgcggacgaaggctatctggttgaatacctggacggcggaaaacctaacaccgatcgctttgatggctacgttagctggagtccgaaagaagtattcgaaaaggcttaccgtccggtatcaggactaagtttcggccttgctgttgaagcactcaagcagggtaagaaagttgcccgcaatggctggaatggtaaggggatgtatctgttcattatccagcagaatgcttgggggtttgagtgtgacctggacggagttaatggccttgtgacgctgccatgtatttgcatgaagacagcggacgataaattagtgccgtggctggctagtcagactgatgttctggccgaagactggcaaatcgtttaa

SEQ ID NO: 222936 - DNA, 165 bp, Klebsiella pneumoniae
atgcagaatttaattccgtctctaagagcagcagataacgctaaaaaatgcggttggccaacgcgtccggaaagcatgaaattctgttcaggctccttttccattctggcgggcggcgattttgcccttctctatgctcgcgcacgcgcgcgtttagggggctga

SEQ ID NO: 222937 - DNA, 339 bp, Klebsiella pneumoniae
atggctaaatcatccgcagaacgtaaagccgcgcagagggcgcggcaatctgccgccggcaaccgcaaaattgagctggttctcgatgttcaggaactggacatgctggcgcgtaactgcgccgcccggcgtccggggcgtgaaccgtacgaactggctgagtacatcgctatgctgatccgtcaggatgatgcgcggcttactggccacatcaaatcgatcagcaaacgcctgtgtggaaagtgcggtgagtcgctgccgatcacctcctgcccgtgtgctggtgattcgaaatgctgggtaacgcgagggtggcacgaaactaaactgtcagcatag

SEQ ID NO: 222938 - DNA, 618 bp, Klebsiella pneumoniae
atgatagagaaatacactccagcccaggagttgtttatcaggcagcatatcaaaagctccactgcgcgggaattaactgaaatgtttaacgctcaatttggtacaaataagagcgtgggcgctatccgtatctggtgcaaatctcatgggttaggaaagcagtttttaattgagccgcgctataccgatgagcagctaactttcatttatgccaacaggaatctaacgaatgctgaactaacagaacggttcaacaggcgattcggtaccgataaaaaacctgacaatatcaaggatgtaaagatagctcgcggatggactcgcgaacctaaaggccggaaacgcattcttccccagtacatcactgttaataaagagaaaattagactcgatgtatacgtatatgaatgcgtacatggaaaattaccgaccggttattcggttatacatctggataatgatcttaataataacaatatcgataatctgcgcgctgcccctaaagaaattcgccgcctgttttctggcgcgggctactctaaaatgccgcaggtgcttgctccggcgctgtatgcacaagttatgctccgccatgcaatcaaacgattatccagctaa

SEQ ID NO: 222939 - DNA, 231 bp, Klebsiella pneumoniae
atgaaaaatactattcaggatttaatgaatcaccagtttgccatgctggaaactgtcactgatcccaatatcaaaggcgacgtgcttcaggaagagttatcgagggcaaaggcggtagttgagatcgtcggggtaatggtcggtacttatcgcgtcgccctcgacgctcagaaggctatttatgacggtaccgcaggcaatgtgcctaagattatggggatcgaaaaatga

SEQ ID NO: 222940 - DNA, 285 bp, Klebsiella pneumoniae
atggatattagaaaattgctggaaagaattcacgaagttaaagaccgattagagcgagcaaacagaattatcaaaatttgtggtaacgaatgccattcctccggaatttttgcggatggaagaaacggcgagtgctatctcaaggtcgattcatcagagattaaagagctggcagaaagccaaaaggttcatctcgaaagcgaactaaagcagttggaagaagcaaaacaaacggcagaacgcgtgatcgccgggctgctccctgaaattaaacaaaatgcctaa

SEQ ID NO: 222941 - DNA, 2145 bp, Klebsiella pneumoniae
atgaccatctacaacggcttattcgagcccaaaaaatcggctatcaaagactgcggcgccgtgcagctggcgatcgccgtcgaagcaccaaacaagaaagtcgccgaaagcattatcaccggcaaactctgggaatcttaccctgcgaacggtgacaactatttcaaaccgaaactgtgggaacacgaagaaggccagccgctgccgaccgttggccagttcgacgagctattcgcccagcaacatactttcgacggtgaaaaatgggtttccattgccgcgaacggcaccgccggtgaggaatcaaatttacccgctgacgatgatgttatcgatttaatggccgtttccccaggtgaacgttttgcagccgttctgctgtttagcaccgctcagatagacggccatatctattctcaggttgtggattatctggataacctgaataaccgtgatacagaactggaagatgaagatcgttttaaccttaacgtgctgtgcgctctgcataataacgaaccagttaagcacatgcatgttgaaggtctgaataatcttattcagggcattttctcccattttgaaaaccagactccgggcaaagcggctatttctcaatttgtaaaacgctggcttgagaatcccggtaaacgtgaagaaatgttaccaggccaaaattcctcactcggcgccgccagcactgataccaacgttaaaatcgcgccaaaacgtggttataaacatacctatgcaacactggatcaggagatcgctgttgccctactccctatttctcccgatgcgccagtattatcaggcaaccttcgcgatgctgagaaaatcattgctgacgagcgcgaagattttaaacgttggtcaatggcgcttcgcaccacagagcacattctgaaatatgaccgagacagtatttttggtgtagtgcagaacgtcccggcaaaagatacctaccatttccctgacagcctacgccgccacattgattcatggctggaggcaaacggccgctttgaagaaaccgagacaggatccgttaaacaaccagaggcaacgcaaaataccgcctcaaacgtggtcgaaaaagcggaatcaccacagccggtggtaaccgatacccaggccaaacaggcgcgtgagacgctcaacgatatgggctatggcgtatatgcctctggtgatgcagagcagccagtagagaagttaagcgctaaagcggaaacaatagctgataacgccgcggtgctggcaaagcaaattattcacgccgaaagactgcctgacgctgaagaagtaatgaagtctgccggcgcgcagagtatcggacaggacaatttagaactgtggaaacgtgtattcaaaactgatgaacggtttactaaagcctttacgcagaacggcggcggtacctcgatcaacggtacctatttaaccatgcttgccactcgcgagtttgggccaaaggggatcggttggggtgtggacatactcgaggaacgtttcgatatcggtgcacccattacacgccaggtgaaagggaaagataacaatgcgtcatgggagttagtgctcgacgggaatggaaataccgtcaacgagcagtatcacgtcgttaccgtacgactctggtacatcctgaatggtgtgcgcggcgaggaaacggcctacggttgcacgccatacatttacggcagtaagtacggtattacctgcgatggtgaggcaacaaaaaaatcgctgactgatgcaaccaaaaaggctttatctggcctcggcttcagtggcgatatcttcatgggcctttacgacaatctggaataccgccagaaaaacaaggcagagtttgatctgaagaatgccagcgaaaccgcagaggacgcagtacgtcttcgccaggagtttgacgacaaacttagccgtgttgctaacaccctggcacatggcgtgacagttaacgaaataaacggcgtattttcccctatcgcacgtgaaatcgatgttcacattaaggccgcacaggccaacggtgacgcgcaacacgaacgctatttgtctggccgcctgcgccgactcattacgattaaagacggacgcatcaaagaactgaataaagccgaggagaaagcataa

SEQ ID NO: 222942 - DNA, 186 bp, Klebsiella pneumoniae
atgctgagactatccctgaagaaaggtgatgcggttcatgtcgttttaccagatggaaccaacgcaattatcgaagcgcgggcccgttgcgaactcggcatgcatttcccccgcaatatcaagataacgcgtgaagatggtgcattccgaccgaaacaaaacctgattaagcgtaatcagaaataa

SEQ ID NO: 222943 - DNA, 264 bp, Klebsiella pneumoniae
atgagacacgatcacgacatcatcaccagagaggaaatgatcgagctgacggggacgccacttaaatcaaaacaatgtgaggcgctgcgccgggccggcatcttctttatggaaagagcagatggccaccctaaaaccacatggggccacttcctgaacccgatcaaataccgcggccagaaggaagagacaatgcacgaaaatgacgaacctgattttggagctatattcgatggccggaaagcgaaagaatcctgccgatag

SEQ ID NO: 222944 - DNA, 180 bp, Klebsiella pneumoniae
atggaagacgaaacagaactgaccgaaccgccatttgaaacctggttcagagacgtggttgaactggttaaaaatagtggctactcaatggacattgttgcttataaaggtgaatggattgattccttttcggatgggttaacaccagaaaatgcgcttagcaaaagaatcgtgcattaa

SEQ ID NO: 222945 - DNA, 192 bp, Klebsiella pneumoniae
atgagtgatgcgttttttgcagagttaaccgagggggacgatattcccgctatgtcgccatttgatatctggtatgaggaattatgtgcttatatgcttgaacatggtggacgtgccccttacaaaatggcgtatctggaatttttcgagcaaggattaacggtagaggaggcgattgaaaaatttaaataa

SEQ ID NO: 222946 - DNA, 1968 bp, Klebsiella pneumoniae
atggccaacatcgaaaaacttggctcgtcatcaccagaggtattgcttaagaatgcaactaacctcgatcagttagtcaatggccgggaatcggaatcattacctgatcgctttggtgtactgcgcaaaacctggcacggcatggagatgatcttcagccgctttatagactacatcactggtcgcggcgagcaggcagttgcagccatcggctggcaggagcttggcaactgggctgttggtctggctgtagataatcgccagcaaatcgtctactacaatggctcgtggtacaaataccttggtgagcttgaacacgtcattgccggagattctcctgagaacgatggcggtgtgtggtcggctgcaaaccccacagggaaatggtcgaacatcggtgacgcggctcttcgctcaaacctgggttcaggcgaagctgatttaggcggtgctttggtgagcatcgataacgccactgtgagggagttagcagagaataacatcttcaggaaaatgacccgtgcggatattaacacgatgctcaacacccctggtgccgaggtcgatgttgaatacgctttacaggttctgatcgatgagggtcacaaatcaatactctttccgcatgacgtaaagggcatttatattcttgctggaaacgtcactgtacccgcccctgtaacgttgatttcattttctccttgcgttaagccatacacaattacggacgattcgtcttttctgaataaaggcgctgtcattcgaaaagcagcaggtgctgattatatttttgggccgggaaccgtccctcgcttctacggcctgcttctcgatggcagagacagcagcagaccgctgtttaatcaggagaatcagcagcgcggaggtatactgtttaactgcggtatttatcgttttctgtacggcattggtagttattcctatacctctgttcaggtgggaatgtcttccatatgcgccaaccaggacggagtttataacctgattgattctcgcctgattaactgcaccattaacgcgaatacccggcatggtgtttatctccgcaatggtgctaataacaaccttttccagaatatccgaaatgaatggaatggaggggtgggatatttatctgatggctccgtcggcaacattattaatggtgagctggttgaccgtaatggctcggcaaatttcgcggtgcttaatggcggaggttttctcattggggatgtattctcccagcgacctggccgaacctcggcggctggttcctcctataatacccatttttacatggagggcgctggcagctatatcatgctcagcaatgtcgtgacacgaaccggcgttgatgatgatggccagggaacactgacgccagaaagggtactgacaaccggtggcggctccacggacatgacttttatggccaatggttgtgatttgtccgggtataccatttctgcgcttcggcagattaccactgccgagaaaatgatcctcagggaaaataaaggcacaactgacctgataactactggtctgtatcagttccagaacggccggggtaatgttggcggggcgaagagtaaccaggttctgacgtccggcgtcggttcggtgctgacgctcagtttccaagagacaggattagccgatcccgcgacagcacaggcaacagttccgttatgcagaacgctactgattgagtcgctaacatcaggcggggtatcaggaaaattcaaactaccgttccagataagacgcgtggtacaggccgctaatgttgacctgtacacctctgaagcccgttcatctccagcgggagcctacgctgtcactggcgcgacaggtgtcaatgtatcactggcagttaatgctgatgccacactgacaaccgtcacgctcaccagtgttgacggcatcgggcggttcctgcgcgtgacaattctggacaactaa

SEQ ID NO: 222947 - DNA, 3069 bp, Klebsiella pneumoniae
atgaccattcgtttttacccgtcccggcttcccggtgaaccactcgaaacgcatgagcatggtgtaaccagtattcgcaagtggctggtggcaaatgttgaaggttacgaggatcgggatgtcccaccgctgaccgttgaggttgaggggcagtcaattccgccaggcgaatgggctattttcgtgatccaccctgatagtgatgtccggctttatccggtgcctttcgggcttgaggccgcgacaattgcctggataggagtgggcattgccgtcgcatctgcggcttattcattgttcatgatgagtaacattgatgccggcggctatacgtcatccacagggcggagtctcgacctgaacccggcaaaggcaaatacggcaaaactcggtgatgccattcgtgaggtatttggccgggtgcgtatctaccctgattatgtggtgcagccggttacccggtttgatgccgccgatcctacgaaaatgcgcgtccagatgctgctgtgtctcggtgtcggtgatctgatttataccaatggcgatatcagggttggcagtacgccagcttcaacgctaccgggattcagcagcacccattacccgccaggcgcggacgtttccggtgatgagcgcagcgaaaactgggtcaactccaccgaagttggcgggacgtcatccggcaccgggctggatatggcccagacgtcgccggacgcagacgacattatcgcagacagcatgaccgtctccggatcgagcgtgacgtttacggggctggatacggatgatgatgacgataatgacgagaacgataacgcactgccgcccagctgggtcgctggcgccgtggtcgaactgaaagccccggcgaactaccagatcaccacggcggccggatacagcgttatcgcaagcccgctgctgacggagatcgcgccggtagtaggtatgccggtgacgctggggtttaactctgtcgattacgatctgtttatcgcgtcatatacccccggtcaggctgcagtgcccggcgccggagggagcgcggcaaaagtccaggccagtgcggccccgaccacctacgatttttcgaccagctccagcacgttcacgatcacctggcagggggttacctacccggtgtcgctggtggctaactacgtctcgatgtcgggactgctggcggccatcaccgagggactcaccggctccggcctggttgcgcaggacaacggcggaactgtacttataaccgagtcggccagtccgttcgcgggtggggcgatcacgtcctcttcactgccagcagctgttttcggtgatgccccggtttacacctccggcacggcatcaaccggcggcagcccggcggtaacggcgaatgtgacactcgcctataactctgccacgggaacggccttttccggcatgccggagggggtgcaacggctttcacttgctcaccgcgggaatgagtaccgcattgtctctgccgacggcacgacggcgacggtggcgcgcctggtttccggtgccgttgatgagtcatggccgggattctccgcccggacgatgatcgactatgaggccactggtcttaacgacacgctgagctggctggggccgttcctggtttgccctgagaatgaagtggtggatgcattcgaggtgaatttctccttcccgaacggcatctgtggctttgacagtaagggcaaaaaacggattcgccacgttgagtgggagattcagtatcgcgtctatggttccggatcggggtgggtgagtcaccagggagagtacgcgcttaaaaacatcaacgggttaggtttcactgagcggatcaccctcagttctccgggactggtagaggttcgctgtcgccggcgcaatgagcagggctcaaacaacgccagggattcaatgtactggcaggcactgcgcgggcgactgctgacgcgcccttcatcctatcccggcgtgtcgctgatggcggtgaccgtcgagacggggggcaaattggcggctcagtcggaccgccgcgtaaacgttgtggccacgcgggcctacgactcaggaacggccagaaccatttcgggagcgctgctgcatgtagggaactcactgggcctggagatggataccgacaccatcaacgcgctggagtacgcgtactggacgccacggggcgagtatttcgatttcgccacgggcgacagtatctcagcactggaaatgctgcagaagatagccaatgctggcaagtcccgcttcctgttaagcgatggcctggcgacggtcaaccgtgaggggattaagccctggactggcatgatcactccgcatgagatggtggaggaacttcagagcggatttaccgtaccgtccgacgatgattttgatggcgtcgacgtgacgtacatcaacgggactacctgggcagaggagaccgttaaatgccggacgccggacaatccgacgccagtgaaaatcgagaattataaactcgatggggtactcaatcaggaccacgcctaccaaatcgggatgcgtcgcctgatgaaatacctgctgcagcgggtgacgttccagaccactaccgagctggacgcgctgtgctacaacacgggcgatcgcattgtgctcacggatgatattccgggtaacaacacgatttcctgtctggtggaggcgatgacaacggctggtggcgtgacaacgttcaccgttacggagccgctggactggtctttcgaaaacccccgagcgctgatccgctatcaggatggctctgcatccgggctgatggtggcgagcagggtgggtgattttcagctgtcagtcccgcacctgagcgagtttgatgacccgatgaaggttgacctgtcgtcggcaaccatcgagccgatccgcctggtgttctgcggctcaacgcgccacgtctacgacgccattgtagaggagatcgccccgcagtctgacggaacatgccaggtcaccgctaaagaatacctcgaatcgttctatgcctacgacgacgctacataccctggcgacgtagcttag

SEQ ID NO: 222948 - DNA, 381 bp, Klebsiella pneumoniae
atgtttaaccctgataaataccgttcagtcacctggctgaagggcgggcgcgtatacccgcagctcgactgcttcggcattgtgaacgagatacgccgcgatctgaatttacccgtctggcccgattttgcaggggtcaccaaagacgacggcggcctcgaccgggaagcgcgcaggatgatgcttacccttgagcgctgcgagccctgcgaaggggccggggtggcctgttattccgggtcgaccgtcacccacgtagggatcgtggtcagtatcggtggcctgctgcatgtggcggaatgcaacccaggcacgaacgtcacctttctgcccttgccgcggtttaagcgtcgatttgtcaaagtggagttctggcgatga

SEQ ID NO: 222949 - DNA, 1164 bp, Klebsiella pneumoniae
atgtctgaattatctgtactggaaaaagctatcgaaaactcccaaaaagaagtaaaggagcttatcgaagaacagcgtaaatccatcaaccagaccggtgaaatcaacaagcagctgcagatcgatctgacgaaagcacaggaagaactgaaagccaccggcacccgcctgttcgatcttgagcagaaactggccggaaactctcctgatcagactgcgcagaagtcatttgctcagcgcgtatctgaagacctgatgaagggctgggacggctcgcgtactaaagcgaaagtcaccagttttgataaagcgattggttccggcgcagcgtcggcaggcgccctggtccagccgcagcagctgccgggtattcttatgccgggtcttcgccgtctgaccgtgcgtgacttgctggcacaggggcgtatcaccagtaacgcgctggaatacgtgcgcgaaaacgtgtttaccaacgctgcagcaccagtggcagaaggtaccctcaagccggaaagtaatattaccttcaccaaagaaacggcgaacgtgaaaactatcgcccactggatccaggcatcgcgccagatcatggatgatgccccggcgctcgagtcttacctcaattcccgcatgatgtacggactggcactggtggaagagaaccagatgctgaacggggacggtaccggcgataacctgcaggggctcaacgtagtagcgaatgactacgaaaccacactcaacgcagccggagatactggcgctgatgttctggcacacgccatctatcaggtatcgctgagtgagttcgaagcagacggcatcattctgaacccggcggactggcaccgtattgccctgctgaaggacgctaacggcaattacattctcggtggcccgcaggcgtttgcctcgaaagtgctttgggggcttccggtggtgtcgaccacagcgcagacggcaggcaaattcaccgttggcgcgtttggcctggcgtcgcaggtttgggatcgcatggatgccaccatcgagatcagcaaccaggaccgcgataacttcgttaaaaacatgctgaccatcctttgcgaagagcgcctggcgctggcccactatcgcccggcagcgattgtgacgggtgatattgctgtcagcactggtgcataa

SEQ ID NO: 222950 - DNA, 210 bp, Klebsiella pneumoniae
atgcaagacctgaagattgaataccaggatggcaagctggtggagctgagcattgatggtgtgagctttctttctgcatcctccatctccttcagccacacggtgggcgagacgctgccaactgtcagcctgacctttccgatcggtatcggcgaacgactggtgcccgccagcctgtcccgtgaaaatctgcacatcattgagaaatga

SEQ ID NO: 222951 - DNA, 549 bp, Klebsiella pneumoniae
atggatacagattttattgccttcgaaaccctaaaagcggctcaagagacagcaaaatggacctattggatgatgtttgccacatggtttgctggcgctgcgacgtttgctgctgttgttttaacgctttatattgctaatcgaaaacccgtcccatcacttaaaatcaccgcttctgccgcaataatttcacctgcgtcaggtattgcccagcaaggatatggcataacagtggcaaacataggaagttcacctgctgttgttagttcaattcactgggagtgcggtggtaaacagaagtttgctcaattttttgcacttggtgtatcaagtcagatgccgaaaaaacttgagcatggtgagtcagcattcttcttttttgagcttgatgactttccgagttggttaaagtcaatgaaagcaaacatcgaaaatgcagaagggtcggttgataaactgaatatcgttgttaacctttctacagggcgctcggtaaaggttaaggctgagaagtctttaaggaaggctttaaacgaaatcactttatag

SEQ ID NO: 222952 - DNA, 195 bp, Klebsiella pneumoniae
atggacgaaaaatgtattgattcaaaaattatgaccggagagcgtcttctggtcattagctctgaaattctcacggttttaaaaagcgagctttcctccagaggattaaagcccacttccagtaatttacgcgttgtgatgaatattattgatcagtctcttcctgattcactcagcgatttttttattgaataa

SEQ ID NO: 222953 - DNA, 240 bp, Klebsiella pneumoniae
atgactgatatcaacagactgatagccagcctcaagcgccgatcagcccacgtaaaagagtttggtgacgacattacgtttataaagctcgaagacctcgacgcgctggtagaagcggtggaactggcacgaaacaaagccgcggattgggaggaaaaagcagccatcaactatgcggaacacacagccatgattcagcatattgtagatctggaggctaagacaaaagtaaaaaagtag

SEQ ID NO: 222954 - DNA, 1020 bp, Klebsiella pneumoniae
atgacttcagagagcaatcgaactggtgctttaggcgtaaactatgtagagggagttttacttgagtggggatggggttttcaaaaaatagatcaagagaatgatgatggttttgatgggattatttatattcgttcaaaaaaagtagacccggctaagcctgacgatagaagaagacagtactgggaagggactggaggtttaatacatgtgcaaattaaaacaggtgatgggtatataaaaaaacaagacaagcaggaaataactcttggtttgaataatatacctgaaaagagattgttatggaaaaaatctgccttgccttgtattttaatttttgtttctagggatgataaaggtcattattattcgtattggtcagatttaaagtctgattcaacttatgttagtgacacgagtaataatgttaaggtttttcgaaaaaatagatttttcaggtcaccggaatgcaaggggcctttgcgtaagctttcacggtcttcacacgggtatattaataagccagtcattgatcttgctaaatatgactctttacatggcttaattgaacccaaacttcctggtggcttaaatgtaccgttaaaatatcgagcaattgaattttacaaagaatggaaaagaattggcgcagtcaatccatgcttcggaaatgttattattaatcggactggatggtctcatattactcgtaaagatagaccaatgggccgcatagaaaccagtttttcactcttgccatatgcatcgagaataattaacgatgttacaagttggcgtacgcttacttcaataagaaaatatgataaacgccaggataaacatattacttacgttgattttattggtttgacagcaaaggttataatcaaaaatagaggttcaactgaagtaatggtggttttgaaaagagaaactaaatttttagatggagatctaaatacaaagcctatcaatagggtgtggttctacacggtttatgaacctggacgaggaaagtaa

SEQ ID NO: 222955 - DNA, 177 bp, Klebsiella pneumoniae
atgcaagacgaaaacgtagtacctccctttgaatcctggtttttagatcttatcgcgttagccgccgagcaaaataaagaccccgtttacaaggggtactgggttgatgcttttgatttggggttaacccctgcagaggctattcaaagatttggtgaggctctcaaggacctttaa

SEQ ID NO: 222956 - DNA, 1764 bp, Klebsiella pneumoniae
atgtaccatctcgacaacaccagcggcgtcccggagatgccggagccgaaagaacagcagtccatttctccacgttggtttggggaaagtcaggagcaaggcgggataagttggccgggtgctgactggtttaatacggtgcaggcggagttactgaatctgctggcggccgcaggaattcctcccgataaggcatcctttgatcagctttcaaaagcaataccggttctgggtgatgccgggttgcgtactgacctgatttccgcgatgggcggatctaaggtgtttatgggatattcgcccatctcccttatcgttcgcgcatctatttttcagtatctgctgccagcagatcgcgaatcgctactcaccatcacaggcgctgaagttgttgcggattacgccctgaaacaggctgttgctgatggagtgacagacctgttctggcctccagtgaagggtgtttatgtcgccgggatagaccctgcaacgatccctttgtggtttcagtccactggcgttaaccgccgaccatatacaatcgttaatgacagtagttttaacaattctggaaccgtgattcgggtggccgctggcaagaaattcccgttctattcaacagggcgacatgttttcagggatatcaacttcgatggccgtgatctgacgtcgtcattgctttattcagaaaacacaggggctcagtttaacggtacccgctttgaagggtgtggtatctacaggtttgcttatggtctgggatggtattactacgttgggactctgttcgcgacacgttgttccatttccggtaatggagatggcattcgaaacctgattgattccagcattatcggctgtgtcgctaatgcaaataaaaggaatgtcgctcttttgagtggggcaaataacaatacattcaatggattgcgatgcgagtgggcggaaggcgataatttttatgcttataacgcagttgaaaacgtcattattggtgaattgatagatcgagctgggcgggcaggtgtggtagcagcaggaaatgccagttggacagttaacggagctgttgtccggcgctcgggcgccaatgagccggttggttctgattactctgcaaacttcctcatcatcgactctggtgaaatcattattaatggcgttaagactcgtgcaggtgttggggatactgggggcggtactctgtcaccatcatactgcgtctctattattggtagtggaactcctgtcctgtcggcctcagggtccgacctgtcaggctttgtcactagcggtattcatgaaaaaaattccgctaccaaacttattggcaattgtgcaggtgtccctgatctggttaacgctggtctgtccaaacatgtatttggacgcgactgctccgatttcaagtctggatttctggcagctggcgcagcttcgacgctgacgctttcgttaaaacacgaccagttcactcagtttcagactccactgtacaggcggattcttattgaatcgcgacgcgagttaagtggagctacagacttttcgtttattccctgtgcgattaatttcgaaaccagcgtggccaaaattaccccattacccaataccattcccgccgggaatatcagttctgatccggctgcgacaggggctgtagcatctctttctataaacagcgacgggacacttatcacattgacacttacgagtgtggatggtcttaaacgcaacattaacgcaacattgctccccgtgtga

SEQ ID NO: 222957 - DNA, 876 bp, Klebsiella pneumoniae
atgtcatttgaattctctcaaagtccgcaggccatctggctttatcagtacgatgtcgatggtgtttatatcggttccgtttttatgactattccggcaggtacgggcctgcccgtcaataccacgcatattccttgtgaaccggataaaggccagaccggtatatttaaaaatggcatctgggaatatgtggacgatattcgcgggacccgctactggaatattcacggcactggctttgttatttccgcgctgagtgaattcctgccggaatgggccattaccactgaacctccggtcgctgatgccggttatgttctgctgttcactgatgaccagtggacgcaggtagaagataagaccggtcagctttattacgagagcaacggcacgaagcacgtcgtttctgacgcgtggtttaccctcccggagggctgcacgttcgtggccccgccagaggacaagccaacgttcgtcacccgctggagcggcactgaatggatttacctcaaagacctgcgcggccagcttgcctggaatactgaaacccgtgaggcgatcacaatactggagatcggccccgttcctgacggatataccctcaaaatgccgggtcagttcgatgagtgggatggctctgcatgggtgaaaaatgaagaggcagagcgggcttaccttatcgctcaggctgaccgccagaaggctaagttgctgtctgcggcatccgagcgtatttcactgctcagctatgctgtcagcagcgggcaggcgactgacgatgaaaccgcgcaactggctcgctgggaagagtatcgcctcgctttgagccgtgtagacactacagcaaccttttttgtctggcctgagcagccgtaa

SEQ ID NO: 222958 - DNA, 753 bp, Klebsiella pneumoniae
atgtatcacctggataatgcctcctccgttcctgatatgcccgccatcaagccggtattatttagcgagcgtcgctggtttaccgaaggcggcgacggtattcagccaagctatccgggtgcggactggtttaacgctattcaagcggaaatgctgaacgtgctggcgctggccaatatcacgccggataaatcgcagcttgaccagtttgcgcaggccatccgtattttctcttcggactacatgctgcctccggggattatgtttgcgtggccgggcgcgactgcgccgagtggctttatgctgtccctggggcagagcttcgataaaaccgcgtatccgcgactggctgtcgcgtatccctccggcgttctgccggatatgcgcggccagactatcaagtttttgcctgcctccgggcgtgcgctgctgtcttacgaagccgatggcgtgaagcttcacgcccacgacgcgaccattagcagcaccgacctcggcaccaaacagaccagcgacgataacgagcactttcaccagggcggagatggtgcgccgggtgaagcgtggcgggaaaccactcatggcaccgataaccagaaagacacaacctacggcaataccagtactgccccggcgcatcatcatacggtgtatatcggaccccatgcgcacacggccacggtggccagcaccggcaataccgaaaacaccgtcaaaaatatcgcctttaacgccatcgtgaggttagcgtaa

SEQ ID NO: 222959 - DNA, 585 bp, Klebsiella pneumoniae
atggcgcatcgtgtagaggactggcaggacgtcctgcagcagctgatgccacgcggtaaggcatggccgcgcgaccagacggcggcgctgacgtcactgctccggggcttcagttcccgcctgcagctggcggaggtgaacgcggatttgctggtcaccgagatgcgcccggagaccaccgacctgttgctggccgactgggaagattatctcggtctgccggactgcaacgccatcccggatggctttgaccgccgtcgtgacgccgtggtggagaagtatcaccgcaagggcgggctggctacctggcagattgaacaggccgtgaaggatgcgctgggcttcaccattcaggtgacggaaatcctgccgcatcacgtcatgcgcgacatcatgtatccgatttattcgcacaaataccgctacctgctgcaggtgacggtcacggatatgccgatgatccgctttcgcagtatcagcaacgtcctgacgccgttaatcagcctgcaggcgcagatactggaatgttttttacgtcgttaccggctggccggtcacgattatgattttctttacgaggtttaa

SEQ ID NO: 222960 - DNA, 1077 bp, Klebsiella pneumoniae
atggctacatttaatgtcccgacgctccgccagcttattcgcgccggtattcaggatttagagattgaactcgaccaggaattaccgattgtcggcgttgaacgtgcgctaaatacggctttcagcggcgctttacgcgacgtgtacgattatcagacgtggattaaaaaccagattatcccgtcagagcagtccgccgacgaaaccatcattgataccgcccgctatgagggtgtgattcgtaaggccgcatcctatgccagcggcccggtcaccttcaccggcacccgaccgctgccgctcgatacggagatgcagacgcaggacggcatacgctaccacgtcaccgccacaaacgacccgtcagcgggcaaaatcaccgtcaccgtgcaggccgacgaaacgggcctcagtggcaacctgactgcgggtgacgtcctgaccctcatttctccggtggccggggtgaacagtgacggcgtggtggcggatgccggtatctccggcggcgcggacgtcgagtccgtggccgagctgctgacccgcctgctgtaccgcaaacgtaacccgcccaccggcggcgcgttgcatgattacgttatctgggccaccgaactgccgggcatcagccgggcatgggcctttgactgctggcacgggctgggtacggtgggccttgcgtgggtctacgaccagcgcactgacattatcccgaccggcaccgaccgtgaagccatgcagcaatacctgttccgccatcaggacccggcgaccgggacttacgttggcaagcccggcggtatcgaggtctggcctatcccgctgacgctcaagccggtgccgctgaccatccgcgtcatccccgacactgcggctatccgttctgcggtcaccctgagcctgcaggcgctgttccgttcggtctctccgggcgacacactgctgctctccgccatccgtacggccatcggctcatcgacgggcgtcaccgactacgagctggacctcaccaccaatcaggccagcgagaactatgagctgctgacgctgggggcaatcacatggcgcatcgtgtag

SEQ ID NO: 222961 - DNA, 453 bp, Klebsiella pneumoniae
atgaccatcagaataaactggcacctgcccgctggcggcgacatcgagattgaacacaatggcctttcgtttgacgagggccttgtttctttggtgtatatctgcctgtttactgatgctcgggccgataccagcgacgaaatacccgacggcaccgatgaccgtcgcggctggtgcggtaattccttcagcgattttgaatggggctcaaagctctggctgattgaccgtgaaaagctgaccgaagaggtcaggctccgcgcggagaattacgcccgtctggccatgcaaccgttattacgttacggctatgcgcgaaatgcgcaggtcattgccactattccccgtattaactggctggcattaaccattattctcacccgcccggataaaaccgagttaaccgtcgaaataaagaaacgctgggaggcggtagaaaatggctacatttaa

SEQ ID NO: 222962 - DNA, 540 bp, Klebsiella pneumoniae
gtgggactaaaagaagcgaatttcgggcgttcctttgctgagctgggccgacgtctgcgcctgatggtagaccgggctctggtacgtattgtgacggacagcctcggtcggcagaacctgcaggtgcagtctctggccgacgagaccaatgacgacgtcgagcgcttccagaattacgggttttccagcgttccacctgcgggctctgaggcgatagttgtcgccgtgggtggacgtcgcggcggtctggtggccatcgccgtcgaggataaagggagccgtccccgtggcggcgaagaaggcgacgttattctttatcatcaggaaggccatattattcgtctgaaaaagaatggcgtgattgaaataacagggaagacggtaaatgtggttgccgaagagagctgtgacattatcggtaaacagataaatatcaccggccccacttctttcagtgaagatatccaggttcagggaaaaagtttcctcgaccatattcataaggatggtgacggtgaaaacacgactaaacccttatga

SEQ ID NO: 222963 - DNA, 1080 bp, Klebsiella pneumoniae
atgactgaagagttaaccctgaacgttgacggcaaggtctggggcggctggacggacatgactattaaccgctcactggagtctgtcgcgggcgagtttgatctgaccgtcaccgcccaatggtcatctgccgcgccacgctccatcaaacccggtcagtcctgtacggtctccatcggcagcgaccgcgtcatgaccggctacatcgacgactttattcccagctatgactcggaaaacgtctccctgcgcgtgatggggcgcgacaagaccggcgatctggtggacagctcggtggtcgataagtccggccagtggaaaggtctgaagctggagcagcttgcggccaccatctgcaaaccctacggcatcgaggtggttactgagaccgataccggcgaggcgtttgccagtatcaccctggaacagggggaaaccggctttgaactgctcgaccgtctggccaaacagcgcggcgttctggtgacctcggacgcttacgggcggctggtcatcacccgcgcttccacccggcgtgcgggagtaaggctcaccctcggcgacaatattctggccgcacgggggcgtttcagctggcgtgagcgtgccagccagtacatcgtcaagggctctgccagtgcgggcggtgcgacttgggacgaccagccggtgaagatggtcggtggacgccagaccgttgtcagtgacccggagatcacccgctatcgtccgaagattctggtcaacgaggacagcctgacggtcggcggtgccagtgcccgtggtgagtggcataaggcttacgtgctgggcgaatccaacaccaccgaaatcactgtggcgggctggcgtgaaaacggtgctacagggccgctgtgggatactaaccgactggtgccggtgaccgatgaaatccagcaactcgacgtcacctggctgattaaatcagtgtcatttatggaaagtgacagcggtcgtctgaccgtactgacactggcaccgcctgagtcgctggatatgccctcgcagaaggcgaagaagaaaggcaaaaaaacatccgtgggggtcacgtgggactaa

SEQ ID NO: 222964 - DNA, 1257 bp, Klebsiella pneumoniae
atggccactaaatgggaagacctccgcgatgcctctttccggggcgttcctttctttttccgcgacgtcgaggggactggcggtcgtcgggccatccctcactcttaccccaaaaaagaggtcggctggacggaagaccacggcgcggtgctgactcagcagcagattaacgcgatcctgctcggcagtgactacatcgaccagatgaaccgcctgctggctgcgctcaatactgctggtctcggtgaactggtgcatccgtggttcggcgtgcagaaggttcaggtgggccgggtctcgcatcgcctttctaccgaggaaggcgggattgcctacgtttcctttgaggtgtacgaggctggtgaacagctgtttccgtccggcaccgaagacaccagcgccaccaccctcagcgcggcggataaggtcagggaagcactggccagcggggattattttgcggcgctcgatggcgtcggcagcatggtggacaccctgctggaagatatggagggctttgtcaccagcctgccgaccctgccatcagcgctcagtgagtggatggaccgcctcaaccggtttaaggacctcgccggtattgtggccgccgcgcctggtaaaatgatccgcgatatcaccggtctcatcagcgatatgaaagacctcgtctctgagccgccgttcgccctgcgggtctatgaccaactgcgcgacaaatgggaaggcgaccgggcggctcagtctgcaaccaaatcccttgtcgataacatcagcgtgaacaccgatagcggctttgccagcagcgtcaccccggcatcgacgccggagaccacggcggcgatgaagaccaatatcgttgacttccggcggctggtgattatctccacgctggtcgctcaggctgaagcggtggccaccgcgacctttgagaccggccaggatgcacagaacaccggcgaccagctggctgagcgtctcggcgagaccgccgcagaagccgtcgaaagcggcctgcgtgagctgtggcgatcccttcgcgagctacggttcgcggtagtgaatgatgtgcgtatccgcagtatccagctgccggagctgcgccgcgtcacacctgccaggacagtgccggtgatactgctggcctaccgcgagaccggcgatgctgagaaccgtgacgagctggtcatccgcaaccggctgcgctatcccgcctttattacgccttcacagacgattgagatcatcagcaatgactga

SEQ ID NO: 222965 - DNA, 1797 bp, Klebsiella pneumoniae
atggcaaaccgcctcaccactgagatactcatcaatctggcaggtaacctgaccgccaaagcccgccagtatggggccaacatgtccgagttcgcccgtaccaatcagcgggcaatgtcggttgtcaaagccacgacggcggcggctggtcgtggtctggatgcgctgggcaaccgctataccaccatgattgccggttttgccggtggtgccatgttgagagactacgccgcgacagaccgccgcatcacccgtatggggctggcagcagagaagaccaaaaaagaaatgtccgagatgtttggcggtatgcaggatgctgcgatcaagtttcgtgtcgatgacagcgaagtggtcagcgctattgagaaggtcgggacagttaccggtgatattgattacggctataaaaatcgcaacatcatagcgccgtctatcgcggcatccggtgctgatggtgaaagtatcggggggctcttctctcagttcacaaagtttaacctgagcaacgagaaagacactcttcaggcaatggataccctgaatcagctcggtaaagaaggtgcgtttgaactgaaggatatcgccgaacgcggcgtaaaagcattctcaatgtatgccgccgcagggggaacgggtgtgcgaggcgtgaaggacgtcggcgtggcgctggagagcgcagtcgatgctaccggcgatacgaccactgcctcgactgccgtcgaaaacctgattcgggatctgcagcttccaaaggtcgtaaaggagctgcgccggaacggcgtaaatgttttcggtaaagacggcaaaatgcgatcactgccaacactgatggaagagattgcaaaaaaatcaggtaataaaggagcggaaacccagagcgcgcgcttactgggggccggatttaatcaggatagcatccttttgcttagcagcgtgacgtccggtaaaggtgcggagaacctcaaacgctataacggcgtagtggccgatggtcagggcattatgaaagatgccgagtatgcatctaaagatttcacatcagccgtcactgcactcaccaccacctggaaaaaatttgcaaacagcaatctcgcaaaaccagtccaagagctagctgatgcaattaattccgttgaccaagaaaccgtccagcattggctggagattggtaaaaatatcgccatcgcagtcgggggggttattgccgcccgcaaagcgtttcagtttggtaaaggtgtctgggatgtgcttaatccaaataaaggtaagggtatacctaatggtatcgcagatgtattcggttcaggtgtaatgccagtttatgtgactaactggccagctggtgggctgggcggaacaggtgaagataaggttaacgatcttcttgatactaccgccgaccttcctggttggcctggaatgcttgcccgaggcgggttaattgccagtaagttgatggggttaactgatatggatcctttttcggatgaggggcgccaagaactccttaaaagggttcagcagaacaatgagcgttcaacgatgtgggaggatatcaaaaactttttcacgtcttcctcgtcgtcacctgcgggttatcaagacccgtcgccgtgggcgtctatgcagccccagaaccagcctggctacccgttcctgcagccgcctgagctgaaaggcagtatcgaggtttccgttaaagatgatcgggttcaggtgaccagcgttaaggtcaatgcccccggagtcaccatgagtgcatccagcggtgttcgtaatatggagcagcagtaa

SEQ ID NO: 222966 - DNA, 384 bp, Klebsiella pneumoniae
atggcgcagatgagtatcaccttaaaacatggttacgtcgccggtaaaggtactgacgatgagatcctctacaaagaggttacctttcgcgagctgacctcaaaagacgttatcgacgcccagctggaggcagaacgcgtggtcataggcgagaacggcaaggccgtggcgtactgctctgaggtgctgatggggctgggtatgctgcgacgacagattgcctcggtgggcgagattccggggccattgtcgttgaagcaaatctacgcctttcacccggaggacctggagttactcagcagtaaagctgctgcactcgatgacctgctttcggagactgcgtcacgggggcgacctggtgccgctggcgacggcgctgagtaa

SEQ ID NO: 222967 - DNA, 354 bp, Klebsiella pneumoniae
atgagcattctgggtatggcggccatccgtgttaatggccgcgaaatcaagaccgagggaaaatccaccctcaatccggggggctatgcccgtacccagcatatgggtggcggcaaagtctgggggtactcccgcaagatggcgagtccctcgatccagatgaccctcgctgcagcggaggatatggacgttgtcgaaatcagcaactgggagaatgtcactgtgatatttgaaggcgacaacgggctgacctacatgatgaccggcgcggcgacggcagaaccagccacacttgaggaggatggtggcaccatcagcgccaactttatcggcaccaaactggtgaaggtgtaa

SEQ ID NO: 222968 - DNA, 1482 bp, Klebsiella pneumoniae
atgtcttcactgggtgatattcctgctgatatccgcgtcccgctggtgtacatcgatattgataattctcaggcgctcgacagcgccccggcgcagtcgcgcaaaattatcgtcatcggccagcagagtgcgaccggcaccgctgccgttctgacgcaaaaccgcatcaccagcgacggcaccgctgaccagctctatggtaaaggctccatgctggccgggatgctcaagaccctgcgtaaggccaacagctataccgaagtatgggggatgggcctggctgatattgccgccggcgctgccgcaaaagcagagctggccattaccggcccggccaccgctgcaggtacgctggccctgctggttaacggtatctcggtgcaggtcggcgtcagcgccgatgcgacagcggacgccatcgctgcctcaatcatcaccgccgtcaataaactcccggacacgcaggtcaccgctgcgctgaaagccgcatcaacaacctcagtcaccctgaccaccaactggaaaggcgtgaccggcaatgcgatggacgtccgtctcaactactacaccggcgagcagacaccggcaggcgttgctgttgccctgaccgctttcgccggcggcaccggcacgccggatattgcggccgtcgtcgcggcgctgggtgatgactggtacaccgatattgtgtttccgtacaacgatacgcagagcctgaacaccatccgggatgagctgcttaaccgctggggcccactcaagatgattgaggcgcagctctggaccgcattccggggcacccatgccgagtcgggcacctttggcgaaaaccgcaacgactggctgatttcctgtatcgggaccaacattgcaccgcaaccgcactggctgtgggcggcatcttacggcggtgtagcgtcatactatctggccaacgacccggcccgtccgctgcagacactggtgctgccgggcatcctgccgccggtgaaaacggtgcgctgggatatgccggagcgcaacctgctgctgcatgacggcatcgccacccattacgttgacgccagcgacaacgtctgcatcgagcgtgaaatcaccatgtaccgcgtcaaccagtatggcgacgccgatgcgtcgtacctcgacgtgcagtcaccggcgacgctggggcgtatccgctacgtcatcaaaaaccgcttcaccaaccgctacccgcgtcacaagctggccggggatgatgtgctcgacctgcttgatccgggccagccggtgatgacgccgaagattgcccgcgccgagctgctggatatcgcgctgactgagctgattcctgcgggtctgattgaggacttcgacgactacaaagatacgcttgaagtgtatctcgacggcgacgacaaaaaccgcctgaactttatctgtcacccgaacctggtcaatcagctgcgcgtgctggccggtcttatccagttcaaactttaa

SEQ ID NO: 222969 - DNA, 252 bp, Klebsiella pneumoniae
atgaagaaacatattaagcccgcccgcgcagggctgcaggtgcgaaaagctgatggccagcacctcagtcccgaaggggaagcgctcctcatgagcacatggtggcaccgtcgcgaagctgaaggtgatgttgttatcaccgatatccaggctgaatccataactgaaccggcggaagtggtaaccgagccgggggatgttaattccgaacaggcggaagtccgccagacccgaactgcaaaggagaagtga

SEQ ID NO: 222970 - DNA, 612 bp, Klebsiella pneumoniae
gtgagtaatgaacgtccatccctgctgaccacaggctccacggtctccgctgccgagaacatcgtggcgtggctgaagccggagctgctgaacgaacctcagcaaaacaaacctgaccgcgtcagcgtcattgagcgtcacatcggccagttcagcaccccggcagaggtcaaaacgtaccttaccgatcgtgatggttgtatccgcgtcgccgcgcttcgtgtgcgcaatattcgctctcagtccggcgggaccgtgggggatgtgacctgggcggcctatgtcatggccaccgatgcatggggttattcacgtgatacccgctgcgaggtgctggtcggcaagctggcacgtcgcatcgtttcccgtggcgcagctgcagccatgcgggcagaacgaatcgcgacggctgttaacgctgaaaatatctattccggtgggctgaacgatctgggtctgaccatgtgggccgtgacgtgggaacaggagttccgcctggatgatgaaatcgaccttgccacactccctgacttcctgcgactgggtgcaacgctgcaggtcagcgatagcaccgaccccattaaaggcgttattaacgtaagagagccataa

SEQ ID NO: 222971 - DNA, 543 bp, Klebsiella pneumoniae
atggggatttcggttgaggttatcggcgctgagaagctgcagcagatgcgcatggccatcgagaaactttccgacagttcgctgcagcaggagctgctggagagtatcggtgctgtcgtggaatcgcagacccgccgccgcatcagtgacgagaaaacctcaccggctggcgagcgctgggaggagtggtccgagggttaccgcaagacccgcagcgggaatcagagcctgctgcagggcaatggcgatctgctcgacagcatccagtacatcgtcgaacgtggccgcgttcgtgtgggttcgccgctcagctacagcggcgttcaccaggacggctttgcaggcagcgtcccggtcagcgctcacaagcgccttattcatcaggcgtttggccgggcgctgaaacatccggtctggcagaccgtaggctcccataaccgccagatgaatattccgcagcgcgagtacctcgggctgtccggttcaaacagtgatgagctgatgcacgtcatcggcgacttctggaaagaggtattaccgtga

SEQ ID NO: 222972 - DNA, 441 bp, Klebsiella pneumoniae
atgggaatttacgttacccgtgatgacctgctggctgcggacgggtcgctggtctggacgatggccatcgacaaagcgactaaccagctcgacgagacgaagatagccacggccatagaggatgccgacgcggagatcaactcgtttctgtcaaagcgctatcagttgccgctgaacctcaccaccgttccgcgcccgctgcaccgggtagccgtatccatcgccatttactggctgtccgagcgtgacaatcagatcaccgacctgattcagaaacgctatgacagcgccacccagaccctgaaggagatggcaaacggcacccgcgacctcggcctgccgaccgacactccggcccctgagaccgataacggcaggatgattgttgtcagcgataacaaacgtctgttcacccgcaacaaccttaaaggggtgctgtga

SEQ ID NO: 222973 - DNA, 621 bp, Klebsiella pneumoniae
gtgagtggaacgaaagaaaaagcaacgggtaagcaaagcactaaaggtcgcgctggcaaggtttcagcgcaggaagtggcacaggctgatgcatctgacctgccgggagctgaacggtcagtcacattgccagggcattacgttgcggtgggtgcgtcccccgtcagtgtgacgcctggcgatgctggtacgactgagttatctggtggcgtcattaccttgaccggggacagcgtcagcattaccgggcctgcagtttccatctcagctgactgggttaacggtgttcagggtgagttaaacgccgctctgacgcctgaaggtctggccgctggtggcggaagtgagaaccttatcaccgttattcctgctaccgacgacgtcgaggtactggaggttcgcgccagacatgagcgcgggttctggcgctgtggccgcttctggccgcgtgagccggtgcatgtgtttgtcagcgacgatcccgatggcgataacgaggcgaacgcgctggagggtgatgtggtggtggagtgcttcatcagtcacgaaaccgcagcacgcctgaaagctgagcctcatctggtggtgacggtcctgcagacggtaacggagaaagactga

SEQ ID NO: 222974 - DNA, 900 bp, Klebsiella pneumoniae
atgccgcaaccgtcagcagaaatcctgcacgcgctcaccacctccctgagcgcagctttcacccggggtctcgcaggtgtgaatccgcagtacctgcgcatcgctaccgaagtgccgagcggctccgcgtccaatacgtatggctggctttcggacttaccgaccatcaaagagtgggtcggcgaacgccagttcgcgcagttgtctcagtacggctacaccatcgccaacaagacctgggaaaactcgatccgcgtcaagcgtgaaaatatcgaagacgaccagattggtcagtacagcgtcattgcgaaggcattcggtcagcaggtcgccgagttcccggacacgctcagcttcccgctgctggttgccggtttcaccaaactgtgctttgacggtcagtacttcttcgatacagaccatccgatggcaggcggaacctacagcaacatcgtgggcgatggcaccgagaccggcgaaccgtggttcctgattgatgaaagtcaggtgctgaaacccatcctttaccagaaccgccgtcccttcaatttccaggcactggatgacctaagcagtgaacacaccttcaagaacaatgagttcctgtatggcgtggacggtcgctgcaacgtcggctttggcttctggcagaccgcctgcgggtcccgcgcaccgctgactgtcgccaactatgaagcggcggtgaaggtgctgcagggtatgaagcgtgattccggttcgccgctggggatccgtccgaccacgctggtcgtgggtccgaacaaccgtgcagccgcgaagaagatcatcgaagcaatgctggtcgatggcggtaactccaacatctattacaaggatgtggaaatcgtcgacagcccgtttatcaccaccccggcgtaa

SEQ ID NO: 222975 - DNA, 972 bp, Klebsiella pneumoniae
atgccaaagcctgcaacacaactcgaatttctggccctgtgcttcgagcttcccgacctgtcggatgccagtacaccgctgccggaatggctaccgatgatccctgcgggtacattcactggccgggatggccgttcgtggattaacgacaatcccgctgcggtcattgccgcctcattccgttatccaaaattaccgattgatatcgaacacgctaccgaactgcttggcccgaaaggcgaagaagcaccggcctatgcctggattgattccatgcgcattaatgctgacggtagcctggatgcgcacgttgagtggacgcctgatggtgaagcatgtgtcaggggtaagaagtacctctattacagcccggccttccgttatctctcaacaggtcaggtgacgctgctgtccagcgctggcctgaccaacaaacccaacctgtatttacccgccctaaactcggagaacaccatgactgtacctgtgcagattgccacggtgctggggctggctgcgactgcgtcgattgatgacgccgtgtcagctatccagaccatcaagaacagcgagcagaccgcgctgaaccgtgctcaaaacccggacctgtcgaagtttattccgcaggagacgtatcagctggcgctaaatcgcgctcagatagcggaagaacgcctgaagacgctggatgagaaagcggcgacagctctggttgacgatgccgtaaccgccgggaaagtcgcgcccgctaaccgcgatatgtatctggctctgtgccgctctgaagatggtcgccagaagtttgaatcgttcgtaaaaaccgcgcagccgctggtcaatctggacccgtcaaaaggcaaagagaacaacggtcagcagaccacgctgaccgaaaccgaactggcgatgtgtcgcagcatggggcttaccccggaagagtttctcgccgctaaaccgaaacaggagcaataa

SEQ ID NO: 222976 - DNA, 843 bp, Klebsiella pneumoniae
atggctaaggctcccgatattatccccaaagaggcgctcgcctggctgaagtcgaaaaagctgacgccgggtttcgattaccgtgatgtgtggaaacaggagcatagcatcggtttcaccgtggcgaagatgacgcagcttgacctgctctctgacgtcaaagcgctggttgatgaggcaatggccagcggccagtcgttcgctgagttccgcgaggtgctgaaacccctgctggtgaagcgtggatggtggggacagcagatgatggatgacccgctgacaggtgagacaaagccggtgcagctaggcagcgatcgtcgtctgcgcactatctatgataccaacatgcgcaccgcccgcagcgccgggcaatgggaacgcattgagcgcaccaaacgcgcgatgccgtatctgctctacacgctgggcccatcacgcgagcaccgcgccgagcacctgaaatgggcggacctctgtctgcccgttgacgacccgttctggcagacgcatatcggccccaacggctgggggtgcaaatgcggggtccgtcaggtcagtaaatacgagtacgatcagctgcagaaaaatggcgtaccgcgcaacgtgcaacagctcgatgacaacggtcagccgactgggcacattatccgccagaccgtcccggtccgcaccgaagcgccgcccgtcaaacgggtgaagtgggttaacaagcgcaccggcgaagaggagatggtgccggagggaattgacccgggctgggactacaaccccggcacccggcgtcaggcagagcttgaacgccagctggcggcgaaacaaaacgccttcgacactgataattaa

SEQ ID NO: 222977 - DNA, 1572 bp, Klebsiella pneumoniae
atgttaaaaaaacttaccggggccatccgcagcctgttgagtccctcaacgggtgagccggtcaccgtcagtgaatcggatatgaaacaagcagaggcccgggccgggagcgtcagtatcaggcgcccctctccgggcatcagcgtggcgagtactttatccccggccagactggccggggtgttacgtaatgtggcggaaggtaatgccagcgactactttatcctcgccgaagagatggaagaacgtgacctgcactattccagtgtattacgtacccgcaagctgaccgtcgccggtattcctccggcagtggaagccgcaagcgatgatgagcatgatgtgatgctggctgatgccgtacgcgatctgattgaacaaccgcagatacctgagctgctgtttgacctgcttgacggactcggcaaaggcgtgggggtctgcgaaattctctgggacacccgcgatggctggaaaccccgcgactatgaatgggttgacccgcgtttcctcaaaactgaccgcgagaccctgcgccagttccgtctgctgaccgatgagcagccggttgatggtatcccgctgacaccgggtaagtatgttatccacttcccccgtctcaagtccggcctgccactgcgtaacggtctggcccgtctggtggcggtgatgtatatgctgaagtccttcacggtccgtgactggtgggcatttgccgagaagtttggcattcccatcgtcgtcggtaagtacgggaataatgccaccgatgagcagattaagatcctcattgccgccatcagttccatcgcttccgatgccgggtgtgctatcccccagagtatgcagcttgagatgcaggagacggccagccgtaacggtggtggcgctctctttaaagagatggccgaatggtgcgacgcccagaccagtaaggccgtactggggcagaccatgaccaccgatgacggcagttcgcgatctcaggccgacgtgcatgaccgggtgcgtatggatattgcccgctgggatgcccgtcagctggagaacacccttaatgagtttctggtacgtccgtttatccagttcaactacggtccgcaggaaaagtacccgcgtgtgaagctggctatcagcgagccagaggacctcaaggcgtttgtcgatgcgcttatccccctggttgatcgtggtctgcgggtgcaggaatccgaggtccgggacaagttcgggctggcggagcctgagcaaggcgctgccgttctctcgccatccaacagtttctctgccttcagccccgcaccggcgctgaaccgcgagcaacttgcccttaaccgtgcgcaggacgacgagattgacgtgatggccagcgaggcgctgaaggactgggagcagaccggcgacgcctttaccagtccggtgctgcagctggcgcaggaagtcgggagtttcgaggagtttctggcgcgtctgccggacctgcagaagacactggagcctgcagcgttcgtcgagcagctggcgatgctgagctttaaggcgcggacactgggagatgcgaacgatggctaa

SEQ ID NO: 222978 - DNA, 1587 bp, Klebsiella pneumoniae
atggccggaccattgtcagcgcaggaacagttacgtaatcagtccgccagcgccattctggcgggcgagttcgacgcggatcaggtgctgctgccgtatcagcgccgctggattgcggacacgtcccagctcaagattgccgagaaatcccgtcgtaccggcctgacgtgggcggaagccgccgaggcggcgctcagcgggtcaatgtcaccggaagccggaggaaccgacaccttctatgtcggcaccaccaaagacatggcgcgtgagtttattgacgcctgcgccatgtgggcgaaggcatataatctcgcggcctccgcgattggcgaggaagcgctggaggatgacgacaaggacatactggtttacgtcatcaactttgccagcggcttcaaaatcaaggcgctgtcgtcaaacccctctaacctgcgcggtatgcagggtaacgtcatcattgacgaagcggcattccagaaagacctcgctgccgtgctgaaagcggcgctggcgctcaccatgtgggggtctaaggtccgtttgatctccacccataacggcatcgaaaacctgttcaataccatcatcactgacagccgcgcgggcaagaaacggtactccgttcaccggattgatatcgagctggccatcagtgaagggctgtatcgtcgtatctgccaggtgacgaaaaagccgtggtccccggatgctgaagcggagtggctggcgaatcttctcagcgatactgccaccgaagaagacgcccgcgaagaatactactgtgagccgaagaacggcggcggcacctatctggcccgttccatccgtgagcgtgcggcacggggaacaggtcccgttctgcgtttcatcggtacatctgcgtttaatgtcatgccggaaatcattcgggcactggatatgcaggagtggctggataaggaggtgctgcccgtgctgaacacgctcccgcagaacctccgccactgcctcggcgaggactttgcccggtcgggccacctgaccgtttttgcgccgatgaccgtcaacgatgacaccacacgcaccgtgccgtttctggtcgagctggccaacgttccctacaaacagcaggagcaggcgttgttctttatctgtgaccggctaccgcgccgcgatggtatcaagcttgatggtcgggggaacggtaactatctggccgaacaggcggcggagaagtatggcgctgaggtggaggtggtcatgccgtccgtcgctcattaccgcgagaacatgccgcgctttaaggcggcgtttgaggatgatgaactggtcctgccgaagcatgaggacgtcatcagcgacctcgggcagattgtcgttcagcgcggggtacctggaattgatgaccgggaaaacaccggcagcgatggccacaagcgtcacggcgacagcgcgtatgcgatcttccttgcctttctcgccagtaaagaggactgccagcgctacgaactgcaccggcttaacactccccaacagcagcgcaaccgcgacagtcaccgtcagttgcgcatcacccgtggtcttaaaaatcagcgaggactgctctga

SEQ ID NO: 222979 - DNA, 576 bp, Klebsiella pneumoniae
atggcagttgaaaaaccaacccgtggtcgcccctccaaaatcgacctgctgcctgatggcgttcgcgaccagttgcaccagatgctgcgtgagaaacgtcatacccaggaagagattcgcgaggcgattaatgagcttatcgacagccacaacctgccggaggatatgaagctcagtcgcacgggcctgaatcgctacgccagccgtatggaagagttcggggccaaaattcgcgcctcccgcgaaatggcggaaatctgggccgcgaagctgggttctgcgccgacgtctgacgtcggcaaattgttgatggagtttgtgaaaacgctggcattcgaaacgtcgatgtcactcgctgaagaagaaggcccggttgagccgaaggccctcggccagctggcgctggttgctcagcgtctggaagccgccgcgatggccagccacaaacgcgagaaagagatccgccaggccttcgccgaagaagccgccgcgcaggcggagaaaatcacgaaaagtgccgggctgtctgcggaaaccgccgctgatatccgtcgccagattctggggatcgtatga

SEQ ID NO: 222980 - DNA, 288 bp, Klebsiella pneumoniae
atgatggctaaaactaaaccttataccgaagcacagcggcgtattttttatcaactggccgcagtgatggtttgctcagagattgagtctcaagttatcgcgccactcagcgagaaagagactggaaaaccttatgaccgcagttcccctgatagctttaccaacacgtttctgaacaaaaatcctgagttcagacgtgcatttgaaacgctgggtcgggccatcaccagagagcggaaaaaccagctgcagctggcaaaggcagcaaggagcaagcatggcagttga

SEQ ID NO: 222981 - DNA, 288 bp, Klebsiella pneumoniae
atgcgtgacattctcgaccaggaccagcgcctggttattctgcgatcccttgtcgaatgcggcgacagtgccaacgagtcgattctgcagacctgcctgcagacgtatggacatcgagtttcccgcgatacggtgcgcacgcatctggcgtggctgcgtgagcagggtctggtcagtctgacggatgtttccggctgttatgtggcggaaatcactggtcgcggtgatgacgttgccagcggtctggccacggttccgggggtgaaaaagccccgcgcgaggggataa

SEQ ID NO: 222982 - DNA, 303 bp, Klebsiella pneumoniae
atgggctgggaaatcattaagggtaactgggcgatcatctgggcgctgtttatgtccgccgtgaacgttatccagctcctgctggccaaaacctacgtcaaacgcgaggagctggagctgatgcgtacccgactgcagggcattgagaataccatcgcggggctaccgagccagaaagaccttcaccagctgcagctggagatgagcaacctgcggggcgatttgcgtgaactaggcccggcgattcgccaggtaaaacacgtcagcgatctgcttctggaaaacgagctgaaggaaaaataa

SEQ ID NO: 222983 - DNA, 231 bp, Klebsiella pneumoniae; identical to SEQ ID NO: 184832

SEQ ID NO: 222984 - DNA, 612 bp, Klebsiella pneumoniae
atggatccgataaccctttccacagtggcctccgttctgctcaaagccgggccttctctggtccgcactgtcggtggctggttcggtggcgacagtgccacggcaaaagcggcggactcggtggccagtattgtcgagaccgtcaacggtgccatcaatcctgctgaccagcagcgtgtgctggagcagaagctggcgcagctcccgcctgagcaactcgtccagcttgaaaccttaaaggtacagctgcagcagttccagctggagcgggacaaggcgcagatggcagatcagcaggctacacaccacgaacagcaggaaaccatccgcaacggcgacaacgccacggacgaatatgtccgccagacccgtccgctgatggctcgactttcgctctacagcagcattgcttacgtgatgatcatgtcgctgggccagcaggctggtgcagtggccggtgcttttggtcatacgttttccatgcccgcaccggactgggatatttcgctgatgctggcaactccggcgctgggttatctgggtttcaggacactggacgggttcgcccggtacagcaaatccagcaaacacaaggtcatggtgggtaaatga

SEQ ID NO: 222985 - DNA, 408 bp, Klebsiella pneumoniae
atgtttaaatcgttgaatactgactggctgaagctggcattactccgggtatttcagtccggctggacagtggtgattgtggtgggattgtcgctgctgttctgcagcttcactggccgtcaggcgtttattgtctggtggctgactttcgccggggtgctgttaattggtgcgagcgtatggctcggcaatctgccttaccgtctgctgcagccgggtaattctgctcgccggtggtcaggtgcgttgtcctggataatctggggagctggtttcctgttgctggccgtcgctcccgcgaatgcaaaagacccgtgggtcctgctgtttaatccgctggctgggctgaccgcattccttctcttgttatgggcttcacataaggagccgctcaaatggatccgataa

SEQ ID NO: 222986 - DNA, 219 bp, Klebsiella pneumoniae
atgggtaaaggctgggattcatcgttacgcgcggggcggcgcgaccgcctccgtcaggaggtgcttcaccgggttgccggtggccctccgcccgttcctcaggactacacaggctgtgacggcactcatgccagttattaccgcaaaggctgggactctgtcgatacaagagacatcgtctggcagtgccagcgatacaaggaaaaacatcatgtttaa

SEQ ID NO: 222987 - DNA, 579 bp, Klebsiella pneumoniae
atgacaacatcatttcccctctcattttctcacgcgctcgctttcgttctcgcccgcgaaggtggttatgttaatgacctgaccgacaaaggcggcgaaaccaaatacggtatttccgataaacgtgacggtcttgccgatggcaaaaccgacgtcgatggcgacggtaaacccgatacccgaattaaagacctgactgaagaacaggccgggcaaatttatttccgcgattactggtatccggcttattgctctgactggccggatggcatctcactttttgtctttgattcatccgtgcagcatggtgctaaaaaagcgatccagttactgcaggatgcggtcggcgtcaccgctgatggcatcgtcggccccaaaaccaccagagccgtcattggtgcagacgctgaatggctcctgacccgctgcttcctacgccgttcccgctattacgccgagatcatcaaagccaatgcttcacagggtaaatacctcaatggctggtttaaccgcctcgatgaactggcgaacgcctgtcaggaggtcattggcggtcaggtctcggttgcccggagctga

SEQ ID NO: 222988 - DNA, 327 bp, Klebsiella pneumoniae
atgatcggtgggttactaattgatgtgattgttgttgtatgcgttttttgggttttttttgatgcggcaaataataaaatcgggacctatgttgcaactgaaggactacacaaaggctacaaacgaggtatgccccctgttgtatggggactattttgtatgtttatcattcctttttttatttacctttttcgccggaaggcgctgatatcaattgctcaacaaaatcccgttgaaacagataaaagtcgtggctttattttgctttttcttatggtagcgattatggaactatacagttaccgagaatttcttttttactattaa

SEQ ID NO: 222989 - DNA, 393 bp, Klebsiella pneumoniae
atgagtggcgatctctttggtgacgtgcaggacgacagtattctggaccatatcgatgatgagatggagagttcccgtttcccctcgttgttggctgaactgaatgcgttattgcgtaaggaacttgaacgctttggctatgacccgcgccattctatcgagctggtcgcagccatcagcagtaaaatcggcggaatgcaggtttactttccacgtggtcaggtgcttgaacaactcatcagggatatgcgtatctggcgtgatttccagggaaataacatccctgaactggttgagcgctaccaggtgacctacaaaacggtgtataaagctatcaagcgaatgcgaaggcttgaagtaagtaaaagacaatactctttggatatggagtga

SEQ ID NO: 222990 - DNA, 555 bp, Klebsiella pneumoniae
atgacccgctcaaacgcaatccagcttatccatatcgccaaaggccagctggcgcttgacgatgacacttaccgctccctgctgggggcggtagttccgggtaagtcgagctgccgcgagatgaccgtcatcgagctgcagagcgtcattcaggcgctggaggctaagggattcaaaagcaaacctcagcgccgctctatgcgccgcatgtctgccccgtcagacgtgagcctgaaaatccgcgcgatatggaaaacgatgtttaacgagggttttatccgggatggtagcgatattgcgctcgaccgttttgtccggcgccagactcgcatccgtaatggcggcgctggcatctccagcctggaatggttgcgcggtgatgccgaagcaaatttccttgagagcctgaagcaatggcacatccgggcgatgagggaggctatgttggcgcaccacgtccgactccctgaaaacccggacaccggcgaagaaagccgggactatgacacaatctgcagcgcttacgctgacgcagccagaaggtggataaaatga

SEQ ID NO: 222991 - DNA, 444 bp, Klebsiella pneumoniae
atggttaatttagagcagattaaagctgatattgcgtcccgcaaggcgatgccagcatgggggcctcagacgtctatcgagcgcattaagactatcaacgccacgcttcccagcttttcgctgaaaacggttgaggcgctggtgaatatgctggagtcctgcaccggcactaaagcaattaacgacgttatagctgagcaccagcggcagcagacagtgaaaggattctcgacagaacaggatgataagtatgtcggtttccagctgtcggcagctgcaatctgttatatcgaaccgatggaggccgaaaactattggccagcagactggaatgacgacagtttcaagccgacagatacccggcgaaacctgattaaagcagccgcacttatcatcgctgaaatcgagcgtcttgatcgtcaattgcctgaggggagcctatga

SEQ ID NO: 222992 - DNA, 498 bp, Klebsiella pneumoniae
atgaatccgaaaacaaaaggtatttttgaggccgcattcgccaaatggggatttgaatctcaggtgcttgttctttccgaagaggccagcgaactatcagctgcctgctgtcgttttctaaaccataaaatcgacagcagcaaagtggccgaagaagcggcggatgttgagatcatgattgagcaactgcgtcataacgggatgggcccgatgattgaccatgaaaagaaccgcaagatggcgcgtctggctcaggttgttggtgttgagtcacaacctgtcaatccctttggcccgtccgttatggggcttctggaggaagcgaccgaacagatggggctggcagaaaccctctatcgcgacaccaaaaccagcaatcgttatgccgccgcccgcgcccgtatggccgtcagtctgcttatgctggccgcacagaagatgatgcgcgagcaacagtatgccgaacgtatgcaggcggagggcaaatctcatggttaa

SEQ ID NO: 222993 - DNA, 618 bp, Klebsiella pneumoniae
atgaatactttaaataccatcccggaaggttaccggattaacgctcaggggcatttagttcctgaatcacagattaaaccactggataaattgcgtgatgaaatggtgctcggcatcgttgaggcggctcgtctgcagcgtcagtcgctggtcgagttcaaactcggctctatggcgaaagtcggtgattttatcgacctttcagccgcggagtacggtgttgagtatggcggtgctaaaggtaacgtcacgctggtcagctttgatggccgttataagctggttcgcgccgttggcgagcatcgcatctttgatgagcgcattcaggcagcaaaaaagctgattgatgactgtatccatgaatggtctgccggggctgatgaaaagattatggcgatggttgaccatgcctttcgcgtcaataaacagggccgaattgatatcaatcaggtgctcagcctgcgttcactgaatattgacgatgccaaatggaatgaagcgatggacgccgtcgcggacgcgattcaggtgacgggaaccagtcagtacctgcgtttatatgagcgtcaggacgatggcacttataagcagatatcgctggatttagccagactctga

SEQ ID NO: 222994 - DNA, 297 bp, Klebsiella pneumoniae
atggaaaagcgccgtatgtggactaagcaggaaattcagttcgttcgtgaaaatgccggaaaactgacgtcacagcagattgccgacaggctaaaccgcacccgtcaggctattcagtctcaggctaaccgctggggcctgtcagttcttgttcaaccagcagacgcgcatgatgcttatctttgtcgcgagctttataaagagggactgaccattccggttattgccgagaaaatggaattaagtcgtcgggttgtttcgaatattgtttttttcagaatgctattaattcagtga

SEQ ID NO: 222995 - DNA, 258 bp, Klebsiella pneumoniae
atgaacaaaaaaattacggcttatgcctgggcttctggattaatcgagtttggcgatgttttcccggatggtgctttacccattatcaccggtgaagaaaaaagagttcgggaaataattgaagtgctggccaggcactcacggacgaatgaacagatgcttgttccgggtgttcccgaggcggataaccaacgtgatgcctgtgatgcattaattcgcttcacagaaattgttactaaagagtacgtggaaaaataa

SEQ ID NO: 222996 - DNA, 240 bp, Klebsiella pneumoniae
atgattactgaacgtattgctgaacatgttggtatggccaccgctgcgcaggcatggctgcaggcgcgcggtagtcgtgttacggagatgcgggtgtggatgcgccgcccatgtctggaaatcacctgtccgccgactgaactggtgaacagggctaatcatctgattgaacgctgccccaccgggacccgttccgtgtggatggccacccttgaaggttgtcatgttatctggaggtaa

SEQ ID NO: 222997 - DNA, 948 bp, Klebsiella pneumoniae
atgtctgaggtgaatatttctgatattcgcgaggttctgcgcaaccttgttgatggtacccgttttacttttgctcaggttgcccgtgaaaccggactgtcttccagtgtcgtcagtggcttcatgaacaacaaatacgccggtgataacgaccgcgtcgagaaagctctgcagcgctgggttgataaacagcattctgctgcagaactgccggagccgccgcgttttattgagacgccaaccgttaaacaaatctggacagccttccgctatgcgcatctgacggagtgcatcggcgtggtctgcggtaaccccggtgtcggcaaatcagaagccgcccgcgaatatcgccgcagtaacgataacgtctggatgataacgatcaccccttcatgtgccagtgtgctggaatgcctgaccgagctggcctatgagctggggatgaatgatgcgcctcgccgcaaggggccgctggctcgcgcactgcgccgccgtcttgatggcactcagggccttgtcatcattgacgaagcagaccatctgggtgcagaaacgctcgaagagctgcgcctgctgcaggaagccacccgtgtcgggctggtgctgatgggtaaccaccgcgtttacagcaacatgaccggcggcaatcgaaccgttgagttcgcccgtctgttctcccgtatcgccaagcgtgtcgctattaacaaaactaaaaaggccgatgtggccgcgattgccgacgcctggcatatcaccggtgaaaaagagcgcgatttgctccagcagatcgcacagaagcccggcgcactgcgtatcctcagccactccctgcggctggcggcgatgacggctcacggcgcgggtgaagctgtcagcgaaagctacattcgcaaggcactgcgtgatctggatctggatgttgatgtttcaacgttactgaggggttaa

SEQ ID NO: 222998 - DNA, 2094 bp, Klebsiella pneumoniae
atgtttgtcactgtgaatgaattagtcggccttcccggcttgcccggcactcaacagggtattcgcgggatgatgaacaagcggacggctgatgcgcctgctctcgtgcgcaagcgtcagggtacaaaggctttcgaatatcacattgactgcctgcctgacactgctcagaaagcgctacgtgctcgccagataaaagaactgatgaacggttcaccgaaagagcaacctgtcgctacggctactgcatcggctacgccacgcgtcaaaggtgccgaggagagcaaaatcgcggtataccgcaaatgccctgcgctaatggagcagaagctgaacggtctgacagcggtacagcgccagactgctgatgcgcgcatgacgctggtcgttgaagtgctgcgccttggtgaactgccgggatacagccgggcaaaagctatacgtgagatcgtgcgtcaggctcagagcggtgaactacctgagcggctggccgctgccgtctcaatggcgaacgccaaaaaaggcgcggcacggtcgctgagtgaaatatcactcaagcgctgggtggcggattttaacaagacccgctccgccgctgaacgtcttcttttactggcgccgggtaagcgtcaggtggttaaaccagaagaaatcagatggttgccggagttcctgagcttttatcgtcgccctgacggtcgcggtattcaggaggcctacgacgattttgctgctgaatgggctgagcgttatcaggatgatgccctgatggccgccgccatcccttcttatgatcaggtgtgctatgccatgaataaattacccgttgttgttaagcagaaaggccgtatcaccggaagcgagttccgccagtatgagggctttgtccgccgtgactgggaatcacttccggttaattatgtctggattggtgacggtcacggaatgaagatgaaggtcgcccatcctgaccacggaaacccgttctccccggaggtgacgtttatcctggatggtagttgtcgctacattgtcggctggagcctggcgctatcagaaagcgttatcgcagttgccgacgccctgcgccacggcattaaaaaccacggcaagccgtttctgtactattccgataacggtggtggtgagaccaacaataccttcgatgcggagctgacaggtattcttccccgcctcggtattgatcaccgtctgggtattcctgaaaacccgcaggggcgagggattatcgagcgtcttaaccgttcgctggccatgcgtatatcacgccagttcgccacctattacggcaccggcgcagaccgtggcaccgttcgccgcatgacaaaagcgctgcagtcggcgacgaatgcagcgaacaaagggaaggagctgacggcaaaacaacagcagactctgcgcgatctgccgtcatgggaatcactcattgagcacattgaggccggtgtggagtggtacaacaaccgcccgcacgagtctctgccgcttcgtggtgatggtgagcacttcactccggcgcagttccgccgctataagctggagaaagaagcgacagaaatcgagtggctgtcagagcttgagctgcgtgaaatgttcatgccgcagatagagcgtaccgtcaaccgctgtgaggtccgtttattcaataacctgtattactccgctgagctgaataacgagcacggtaataaagtgctggttaattacgatattcacgatgcaacaaaggtcgttattcgtcgtctggatggttcctttatttgtgaggctgtctgggatggtaataaacagcaggcattcccggtcactgctgaatatcaccaacgtcagcaacgcatcaaagggatgcgccagcgcggtgaagagaaagtccgtctggctgaggccgagaacgtccataccctgccagctccggcagggcaggaatggctacatggcaacgtctatcgccccactcgcggttcgacacctttggcgctggcggaagtggaggatgcggaatatagcgaggatgaatatctgaataactcactggatattctggaatcaaataagcgtaaaaacgcgatttaa

SEQ ID NO: 222999 - DNA, 225 bp, Klebsiella pneumoniae
atggaaagaaatgaagtgcgtgactggcatcgcattgacattgtcgccgagcttcacaagcgcggcgtgacaatgcgcagcctttccaccagcgccgggttaagccccgacacgctgaaaaatgcgctggctcgttcatatcctaaaggtgagcgcatcatagctagtgctctcaatctggaaccctcttcaatctggccaagccgatacaacaaggatttgtga

SEQ ID NO: 223000 - DNA, 564 bp, Klebsiella pneumoniae
atggccactggaaaagcaaatgaaattgcttttgatgaagacagaaaagaaagctttatcaagagactaaaatcgcttgtaggaagccgcagtattcgggctgcagctaaggattgggggctgtctttctctacgctaaacaattatctatcgagagggactgaaccctccttttcagctatgcaagcaatcgcatcaaaagagcatgtgacattggattggttagccttcggtgttgattctaatttgaatcaattaggggctactaactcgtctagtgctgttcataccgaccccatcaagagtacatggaacatgatttttgataccctcgggccggaagaacagaaagaagtgctagattattgtttgaaggaaggggctcgtagcatggtgggtcttatagcctcaatagcggaggcagacaggacactgatgggcctgagcctcgatgagaaagaacgcttgctgagactaaatgaacaactgaaaaaagggtcatctgagagcgatcagggcatagccaaaacagaccttactgaaacaaccaagaaggccggttaa

SEQ ID NO: 223001 - DNA, 1101 bp, Klebsiella pneumoniae
atgagtcatctttttagcgcgacgcgaattggtcaactcacccttgataaccgtatcgttatcgccccgatgtgtcagtactccgccgacgagggtaaggcgacctcctggcaccggatccatcttggccaactggctttctccggcgccggcctgttaattctggaagccacggcggtagagcctgcggggcgtatttccccgggggatctggggctgtgggatgatgaaaccgaaaacgccctgcgcggcgtagtcgaagatattcgggcctggtcgccgatccgtctggggatccagctgggtcatgccggacgcaaggcatcctgcgccgccccctggctgggaggccatcagctggcgctcaacgatggtggctggcagaccgtcgccccttccgccgtggcgtttcacgatggcgatcgcgcccccgctgaactgagccatgccgatatggcgcgcatcaaagcggccttcgtcgccagcgcgctgcgcgcccagcggctgggctttgagctgattgaactgcacgccgcccacggctatctgctgcaccagtttctctcgccgctcagcaaccagcgccgcgacgagtacggcggttcgctggagaaccgaatgcgctatccgctggaagtctttaaggcgatccgcgaggcagtgggcaacaccatggcggtgggcgtcaggctgtcggctaccgactgggtcgaaggcggctgggactgcgagcagtccattaagtttagccagcagctggaaacgctgggcagtgactatattcacgtctccagcggcggtttgtcgccgcagcaggcgatcaccgttgggccgggataccagttgcctttcgcccgcgacattcgccagcaggtagccatcccggtgattggcgtggggctgatcaccgacccgcagcaggcggaagcggcgctggagaatggcgatgccgacctgatcgccctcgcccgcgcggtactctacgatccgcactggccgtggcacgctgcggccagccttggcgcccaggtccgtgtgccgtcgcagtatttgcgctcggagccgcacggcctgaaaggcaccctgctgccaaaccgttga

SEQ ID NO: 223002 - DNA, 738 bp, Klebsiella pneumoniae
atgcctctcatcaccattaatcagatgcagaagtactacggcgacaaccatgtgctgaagggcgtcgatctggatatcgacatgggggaagtgatctcgatcatcggccgcagcggctcgggtaaaagcaccctgctacgctgtatcaatggtctggagggctaccaggagggaagcatcaagctcgggggcatgaccatcaccaaccgcgattcccaggcccgggagatcagccgctccatcggcatggtgttccagaactttaatctctttccgcacatgacggcgctggagaacgtcatgctggccccgcggcgggtgctgaagaagtcccaggcagaatgccgggagctggcgcagcggatgctggagaaggtcgggctcggcgaccgtctggattactacccggccaacctctccggcggccaacagcagcgcgtggccattgcccgggcgctggccatgtcgccgaaagttttgctctgtgacgaaatcacctcggcgcttgacccggaactggtgggtgaagtgctgaaggtgctggagcaactggcggcggaaggtatgacgctgatcctcgtcacccatgaaatgaattttgcccgcgaagtgggcgaccgcgtggtgtttatgcatcagggacgcgtctgggagcagggcgacagcaaaacgctgttcgccagcccgcagaccagcgaactgaaacagtttatctcctcggtgcgcggtcttaactaa

SEQ ID NO: 223003 - DNA, 786 bp, Klebsiella pneumoniae
atgaagaaactgttgatcgcgctggccggggccgcttgtctcctatcgtctgtttctgccgcgcaggctgaccagctccaggatattgaaaaacgcggcgtcatccgcattgccgtaccccaggactttccaccgttcggctcggtgggtaccgacctgcagccgcaggggtatgacatcgatatggcgcgctatctggcgaaatcgatgaagctcaagctgcagctggtcccggtgaccagcgccaaccgcgtgccgtatctgcagaccgataaggtggacctggtgatctccagcctcggcaagaacgccgagcgcgagaaggtgatcgacttcagccgcgcctacgccccgttcttcctcggggtgtttggcccgaaaggggcggagctgaaggacgcggccgcgctgagcggcaaaagcatcggcgtgacccgtggggcggtggaagatatggtgctgaccagcgtggcgccgcaggcggcgcagattaagcgctacgaggacaataacactacgctgtcggcttacctgtccggtcaggtgcagtatgtcgccaccggaaacctggtggtggcggctatctcccggcagaacgccgacaaagcgccggtcccgagctttatgctgaaggactcgccgtgctttatcggtctgaaaaagaacgaaccggcgctgaaggcgaaagtggataccctcatcgagcagggcattaaggacggcaccctcaacggtctgtctgagaagtggctgaaagcgccactgcctgccagcctcggcgcgtaa

SEQ ID NO: 223004 - DNA, 840 bp, Klebsiella pneumoniae
atgcaacaactcgatgaacgactgaaagggcaatacgcctcgctgtcgccgcaggagcagcgggtggcggatttcatctttgaccactttgatgacctgataagctacaacagcgccgagctggcgcagctgagcggcgtgtcgaaagccaccgtcagccggctgttcaagcgcctcggttacgacaaatataaggatatgcgcgatgaactgcgcaccctgcgccagagcgggatgccgctcaccgaccagcgcgacgcggtgcagggtaacacgctgctggcgcgccattataagcaggagatggcaaacctcacccagtgggtcaacgccctcgacgcccgccagttcgccgaggcgctgacggcgatggtggccgcgcgccgcattgtggtgattggcatgcgcaacgcctatccggcggcgctgcatctacgccagcagctgctgcaggcccgcggccaggtgctggtgctgccccagccgggtcagagtctcagcgaagagctggtcgatctgaccgccgatgatctggtggtaatgatggcgtttcgccgccggccgcgaatagtacgcccgctgctgcagcagctgcagcgcgacggggtgccggtcctgttaatgtgcgagccgcaggcccacagcctgtttccgctctcccgctggcagctctgcgcgccgctggacagcgtctccgcctacgatagctatgcctcggtcaacagcctgattaatctgctggccaatgcctttctccatgaaacgctcgacagcggtcgtccgcgcatccacgatatcgccacgctttaccagcagctggacgagctggaacaacgctga

SEQ ID NO: 223005 - DNA, 1587 bp, Klebsiella pneumoniae
atgcacagtagcaacgtttcgacccacggcatggcggtggccccccaccacctcgccagtcagagcgcgctggcgatcctgcgcgagggcggcagcgccattgaagcgatggttgcagccgcggcggccatcgccgtcgtctatccccatatgaatggcctcggcggcgatggcttctggctgatcgtgccgcctgagggagaccccatcgccattgacgccagcggggcggccggatcgctggcgaccctcgaggcctacgccggacagcggcatattccccaccggggaccgcaggccgcgctgaccgtcgccggcaccgtcagcggctgggacgaggcgctgcgtatttcacgggacttaaccggccgcgcgctgccggtggcccgcctgctggccgatgcgatcggctatgccgaagacggcattccggtcactgcctcgcaggcccacgccaccgccagcaaactggaagagctgcgccatcagccgggcttcagcgaaacctggctggtcgcgggcgaggccccgcggcccggcagccgctttcgccagcccgccctcgccggtaccctgcgcatgctggccagcgacggtctcgacagcttttatcgcgggccgctggccgagcgtctcgcgcagggtatggccgcgctggggatgcctgtcaccctccgcgacctgcagacccaccgcgcccggcgtccggcgccgctgacgctccagcaccagcagggcacgctgtggaatcttgccccacccacgcaggggctggtatcgctggcgatccttggcatcaccgaccgtctgaagatggccgatgccgacgacgcgcaaacggtgcaccgtatcgtcgaagccaccaagcgggcgtttgccctgcgcgatgcgcatatcaccgatccgcgccatctggatgtggatgtacagcagttgctcaccccggaagccctgcagccgctggccgacagcatcgacgacgccagcgcttccccctggggcggcggcaaaggcccgggcgataccgtctggatgggcgtcgtggataacagcggactggcagtgtcgtttattcagagtatctatcacgagttcggcagcggcgtggtactcccggacaccgggatcgtctggcaaaaccgcggggcggccttcagcctcgacccgcagcatctcctggcgctggcccctggcaaacagccattccacaccctcaaccctgccgccgcgcgcctgaacgatggccgggtgatggtctatggctcgatgggcggcgacggtcagccgcaaacgcaggcggcgctgtttacccgctatatcctgcagggggtgccgttgcaggagagcatctcccgtccgcgctggctgctgggccgcacctggggccagtcctccgactcactgaagctggagggacgctttgcccccgcctgtatcgcgcgcctgcgcgagctggggcacgacgtagaagtgctggccgatttcagcgaagcgatgggccacgccggggccattgtccgccatcccaacggtctgcttgaaggggcgaccgatccacgcagcaacggcgccgccgccggatactaa

SEQ ID NO: 223006 - DNA, 1116 bp, Klebsiella pneumoniae
atgacggcggaagcgctgagcctgcagataccacgccgaggggatcatcgccccggccagcagccgctcgcgggagtggggttcaaagcgctcgggcgagtggcgaagatccgccagatactgattgccgccttcgctggcgctgatgataaaggccgccgagcgggccagggcggcatccgcgaactgcagctcgctgtcggcgctcagcgcgtgggcgacccgatccacggccgcccgggcgtcgtcatcgcaccaggtggtgaaatagccccccagccgcgcgcagcgcagcccctccagtccgcgctccagcaggttgccggtgcgctcgctggctttatcggcctgaaagtcatcggccgggtcgcgtccctgcagggcgtcatacaccgcggcgaggtcggccacccgacgggcaaagggaccaatatgatccagactggcgacaaacggatggctgccggagcgggagaggcgaccgaaggtgggtttcaggccaaagatcccgcacagcgacgcggggacgcgaatcgagccgttggtgtcgctgccgaggctgaaatggaccagtccggccgccaccgccgcggccgaaccgccggaagaaccgccggcgatccgcgacagatcgtgcgggttgcgcgtcgcgccatagtggctgttttcggtggtgaagccgtaggcgtaggcgtccatattgagcatcccgctgagcagggcgccggcgctgtgcagctggcgcaccgcccagctatcgctggctgccggcggccggtcgctcagcagttcggcgccggcgagggtggtgtgcccggcgacatcaaacagatttttcaccgcgtaaggaatgcctgccagcggcggcagggggcgcttttcccggcgcagggcgtcgatgctgtcggcctccgccagcatgcgctgggcggtgacctcggtccaggcgttgatctgcggattcacgcgggcgatatcgtccagcgtctggcgggcgatctcccgggcgctcagttcgccttcgtgcagcgcacgctggatctcggcgatggtgaaatggtgaagtgtcatgctttatacacccccgcaatctcctcgcgcggcccgaggggatag

SEQ ID NO: 223007 - DNA, 5259 bp, Klebsiella pneumoniae
atgcttagtttcagccaggttaaatcagctggcagtgccggtaattactatacggacaaggataattactacgttatcgggagtatggacgagcgctggcagggtaaaggcgcggaagcgcttggtcttgaaggaaaggtagacaagcaggtcttcacggagcttctgcagggaaaactacctgatggcagcgacctgacccggatacaggatggcgtgaataagcaccggcccggttacgacctgaccttctcggcaccgaaaagtgtatcgatgctggctatgctgggcggcgataagcgtcttatcgatgctcataatcgcgcggtgacagtcgctcttaaccaggtggagtcccttgcttccacacgggtaaagaaagatggcgtgtctgaaacagtcctgaccgggaatctgattattgcccgctttaaccatgatacatcgcgcgctcaggatccacagatacacacacacagcgtggttatcaacgcgacacagaacggcgataaatggcagacgctggccagcgataccgtcggtaaaaccgggttctccgaaaccatactggccaaccgcatcgctttcggaaagatataccagaactctctcagggccgatgttgagtctatgggttacaagacagtggatgcgggtaagaatggcatgtgggagatggagggcgtgccggttgagtcgttttccacgcgcagtcaggagctccgggaggctgcaggacccgatgcctccctgaagtcccgggatgtggccgcgctcgatacccgcaagtcgaaagaagccatcgatccggcagagaagatggtggagtggatgaacacgctgaaggagaccgggtttgacatccgggggtaccgtgaggccgccgatgcgcgagccgcagagctggcacgtgcacctgccgcgccggtgaacactgacggtccggatatcacggatgtggtgacgaaagcgattgccggtctcagcgaccgcaaggtgcagttcacgtatgccgacctgctggcacgcacggtcggccagctggaggcgaaggacggtgtgtttgagctggccagagccggtatcgatgccgccattgaacgggagcagcttatccctctcgatcgcgagaaaggcctgttcacctcaaatatccacgttctcgatgaactcgccgtcaaagccctgagtcaggaggtgcagcgccagaatcatgtctccgtcacgcccgatgcgtctgtggtgcgccaggtccctttcagcgatgccgtcagcgtgctggcgcaggatcgcccggtcatgggtatcgtttccggtcagggcggtgcaaccggccagcgggagcgggtggccgagttaaccctgatggcccgggagcaggggcgcgacgtccatatcctggcggccgataaccgttcacgtgattttctcgccggggatgtgcgtctggccggggagacggtgaccggtaaatccgccctgcaggacgggacggcgtttattccgggcggaacactcatcgtggatcaggcggagaagctgagcctgaaggaaacgatttccctgctcgatggcgcgatgcgccataacgtgcaggtcctgctctccgacagcgggaagcgcagcgggaccggcagcgcgctgacggtgctgaaggacagcggcgtgaatacgtatcgctggcaggggggccatcagaccacagccgacatcatcagtgaaccggataaaggagcacgctacagccggctggcacaggagtttgccgtcagcgtacgtgaagggcaggaaagcgtggcccaaatcagcgggacgcgtgaacagagcgtactcaacggccttatccgtgactccctcagacatgagggggtgctgggtgagaaagacacgaccattacagccctgacgccggtgtggctggacagcaaaagccggggcgtgcgggattattaccgggaggggatggtgatggaacgctgggatccggagaaccggacgcacgatcgctttgtcattgaccgggtgaccgcgagcagcaatatgctgaccctgaaagaccgggatggggtccgtctggatctgaaggtttccgcggtcgacagccagtggacgctgttccgggcagatacactgccggtggcagagggggaacgtctggcggtgctcgggaagataccggacacacgcctgaagggcggggaaagcatcacggtgatgaaagtggaggaagggcagctgacggtacagcggccggggcagaaaaccacgcagaccctggccgtgggcgcgggcgtgtttgacggtattaaaatcggccacggctgggtggaaagtcccggcaggtcggttagcgagacggcaatggtctttgcgtcggtgacgcagcgtgagctggataacgccaccctcaaccagctggcgcagagcggaagtcatctccggctgtactcggcgcaggatgcggcgcgcacgacggagaagctgtcgcggcataccgccttcagcgtggtctcagagcagctgaagacccgatccggcgagacggacctggatgcggccattgcgcagcagaaggccggactgcgtaccccggcagaacaggccattcacctggccatcccgctgcttgaaagtgagaaactgaccttctcccggccccagctgctggcgacggcgctggaaaccgggggcgggaaggttccgatggcggacatcgacacgaccattcaggcacaaatcaggtcggggcagttgctgaatgtaccggtggcgcacggccacggcaatgacctgctgatttcccgtcagacctgggacgccgaaaaaagcatcctgacccacgtgctggaaggtaaagacgcggtggcccccctgatggaccgcgtgccggccagtctgatgacggacctgaccgccggacagcgggcggcgacccggatgattctggaaagcacggaccggttcacggtggttcaggggtatgccggggtggggaaaaccacccagttccgggcagtcatgagtgccatcagtctgctgccggaagagacccgtccgcgcgtcatcggtctggcgccgacgcatcgcgcggtcggggaaatgcagagtgctggcgtggatgcgcgcacgacggcatcgttcctccacgacacgcagctgctgcagcgcaatggccagacacccgatttcagcaacaccctgttcctgctcgacgagagctcaatggtggggctggccgatatggcaaaagcccactccctcatcgtcgccggcggtggacgggcggtgtccagtggggataacgaccagctgcagcccatcgcgccgggccagccgttcaggctgatgcagcagcgcagcgccgccgacgttgccatcatgaaagagattgtacgccagatgcctgagctgcgaccggcggtctacagcctgattgagcgggatgtgcaccgcgccctgaccaccatcgagcaggtcacgccggagcaggtgccgagaaaagaaggcgcatgggcgccgggcagttctgtggtggaattcacgccaaagcaggaaaaggcgatagaaaaggcgctgagcgaggggaaaaccctgccggaaggtcagcccgcgacgctctacgaggcgctggtgaaggactataccggacggaccccggaggcacagtcgcagacgctggtgatcacccatctgaataaggaccggcgggcgctgaacagtctgatccatgacgcacggcgggagaacggggaaaccggcaaagaggaaatcacactgccggtgctggtcacgagtaacatccgtgacggtgaactgcgcaaactgtcgacctggacggctcacaaggaggcggtggcgctggttgataacgtataccaccgtatcagcaaggtggataaggataatcagctgatcaccctgacagacagtgaaggaaaggagcgatatatctcaccccgggaggcatcggcagaaggcgtcacgctctatcgtcaggaaaagataaccgtgtctcagggggaccgaatgcgcttcagcaaaagtgacctggagcgcggctatgtggccaacagtatctgggaggtgcagtctgttttgggtgacagtgtcacgctatctgatggcaaactcacccgtacgctgaccccgaaggcggatcaggcgcagcagcatatcgacctcgcctacgccattacggctcacggcgcccagggggccagcgaaccgtatgccatcgcgctggaaggggtggccggtggtcgggaacagatggccagctttgagtctgcctatgtggctttatcccgcatgaaacagcatgtgcaggtatacaccgacagccgtgagggctggataaaggccatcaagcattcacctgagaaagcgacggcgcacgatattctggaaccccgtaacgaccgggcggtgaaaagcgccgatctgctgttcgggcgggcaaggccactggatgaaaccgctgctggccgggcagccctgcagcagtccggtctggcacagggaaattcaccgggaaaattcatttctccggggaaaaagtaccctcagccgcatgtggcgctgccggcatttgataaaaacgggaaagccgccggtatctggctcagcccgctgaccgatcgggacggacggctggaggctataggcggagagggaaggattatgggcaatgaagacgcgcggttcgtggcgctgcagaacagccgcaatggtgaaagcctgctggccgggaatatgggagagggggtcagaatggcccgcgacaatcccgataccggggtggtggtgcggctgaccggtgatgaccgtccctggaaccccggggccattaccggcggacggatatgggctgaaccggcgccggtggctccggtaccgcagaccggggctgacattatcctcccgccagaggttctggcgcagcgggcggcagaagaacagcagcgccgggaaatggaaaaacaggcggaacagactgcccgggaagtggccggggaggcgcgtaaagccggcgagccggcggaccgggtgaaagaggttatcggggatgtcatccgcggactggagcgtgaccggccgggcccggagaaaacgacgctaccggatgatcctcagttccggcgccaggaggcggcgattcagcaggtggcctcagaaagtctgcagcgtgagcgtctgcaggctgtggagcgtgacatggttcgtgaccttaaccgcgagaaaaccctcgggggcgactga

SEQ ID NO: 223008 - DNA, 348 bp, Klebsiella pneumoniae
atggattttgaagcgcggaaacaaaaggcgctggcgataatggccagccgtaagatgtggaaaagcaattatgcaccgcctctgatacgactgatgtggcggctggggataaacattcccccgctgccgtttgctccgctctggcaggtttttgtcgtaatgacaggctatttctcccttggatatgggctgtggatgtactggacggtgtggcgggcccaggggatgcctctcctgttcgcctgcgaagtcagtcttatcgcgggcgtgttatttggcctgacgatggcactgtttcatctgtggcgacgaaaggtgaataaattacctgactggaaagatttataa

SEQ ID NO: 223009 - DNA, 222 bp, Klebsiella pneumoniae
atgtttaaatattttattctgcgcacacagcagcagctgttctgttatttctgcggcatcgtgcttgcgatggttcttatgctcctgttcccttctgttttgcgggggagtgggttttatctgcttttatcgtctgttgtgctgttctgggcaggtcttgtcctttatacccgtcacatcgaccggatgagaaagccaatcagaagagggacagaaagatga

SEQ ID NO: 223010 - DNA, 651 bp, Klebsiella pneumoniae
atggcaaagatattaatgatggcaggcagcattattgttgtgctgagtctgctggggtttctggtgctgcttctgaaaggacgcgcagtaacgcagacttccccggttctgatgtcactgaaagccctgggtattcgcccctcagaggctgagcaacggttgtgtcgccagcgggtctgggtgggtaatgacacactgttgacgccacgggaacaacattttttcagggcattactgaggcataccagccgaaagcgctggctgttgtgtcctcaggtccgggtggcagatattgccacactctctccccatatcaggccacgttcccggacctggtggcaactcttccggatggcatcacagtggcactgcgatgtggtcatcgttgacatccataccttcgctatcatcggcgcagttgaactggatgatgcctcacacctgaaaaaacaccgtatccggcgcgatattctgctggaagaggttctgaggcaggccggtattccactactacgcgatcgggattcagagaggctggtaagaagggtcggagagtttctgaaataccgggaagccggtgctgaagaaaaatccataaccgttatgaaatcaacgacaaagcatagcgaacacaaggagaaagaaaaatga

SEQ ID NO: 223011 - DNA, 309 bp, Klebsiella pneumoniae
atgattatcgccgccgaagtgaaacgtgatgaacaggggtactggacacatcctgcgctggtacgaagtggctgtgaaacttccgcagaattaagttactggctcagaacccataaactccagtgctttgtgatgacaatgcgcgatgaagcgcctgaagctttcgctgccggatttacggatgaagccccggatgcccgtggctggataccggagccaccggatgatgatggctggtttctgggatctgtccacgataccggcgacggacccgtctgctacaggtttcgtcataccacaaaatcctga

SEQ ID NO: 223012 - DNA, 561 bp, Klebsiella pneumoniae
gtgaaaaaaatgaaccgtacgctccgcagatgttgtctgtccgggcttatcagcctgtctttgtttgcaccagttccggccgtgtatgccgccagcatcgagacggggtattcgccggaaggaacggctctgcagctggtcctgaagactattaattctgcacagcaggaaatccggctgatgggctattccttcacctcacccgaagtcgccggcgcgcttgtcagggcaaaacagcgtggtctcgatgtgaaagtggttctggactggaaagccaatacaggcaagcaaaacaaggcgagtctggcggccatgaatcttctggtcaatgccggtatcccggttcgcacagtgtcgcagtacaaaatcatgcacgataaagtcattattgctgacggccgtaatgttgaagtggggtcttttaactacactcgagccgctgatcggttctattcagagaatgtgctagtcgtgtgggatgaaccagtcgttgctcaacgctatctgcagcactggcaaactcgttgggagatgggaaaagactggagttcctcgtattaa

SEQ ID NO: 223013 - DNA, 1014 bp, Klebsiella pneumoniae
atgagtaatgcgcacaatccgcaacactggagtcagctggatacggaagaacagatccgtttctggcagggggtagaggacggccatgtggcatcttttctggtttccccggagaagaaatctacccgtcgccggcgcggcgagcactccacaaaacccaaatgtgaaaacccgacctggtttcgaccggagcattacaaaaaactgggtggccagctggggcacgcctataaccgtcttgttcaaaaagatcgcaccactggtgaggtgcgactgcgtatgcacgtatcgcttcatccgctgtacgtcagggaacgccgtcgggctggccgccggtatggcttccggccggaaaagcaacgtctgctggatgctatctggccagtgctgatcagtttctgtgatgccggcaagctgacggtcggtatgtgtatttctcgtctggcaaaagaactcagccagaaagacagtcatggaaaagttattccggaaacagaggtaacagtctcacgtctgtcccggttgattgacgaacaggtccgttttggtgtcctggctgtatctgaagaaaatagctgggacagggaatcccgtacctggcttcctaaatacgtctatatcaccgcgttagggtttcagatgctgggagtggatctggaaaaacttgatgcggaacaacaaaaaaagctccggcaaagcgaagagcatcgtcgtcttatcgaggaggggattctgcgtgaagatgaggagatctccccgcgtgcagcacgtgagcgctggtaccgtcaaaaaactctcgatgcactgaagttccgtcggcagcgtggcgccgaacgtaaacgagctaaccgcctggccagatattctcgtgagcgccagattcacgaaatgtcgcttcatatcctgaagacaatgccggcagacgaggcttactggtgtacaacggagcggctgcagcagctggccattcagaacctgtatcagctggagctggccctggctccgccgtcctga

SEQ ID NO: 223014 - DNA, 1119 bp, Klebsiella pneumoniae; identical to SEQ ID NO: 103021

SEQ ID NO: 223015 - DNA, 1260 bp, Klebsiella pneumoniae; identical to SEQ ID NO: 187160

SEQ ID NO: 223016 - DNA, 276 bp, Klebsiella pneumoniae; identical to SEQ ID NO: 103024

SEQ ID NO: 223017 - DNA, 999 bp, Klebsiella pneumoniae
atggcaaaaaaaataaatttcagtcgtattgccgagttagctggcgtgtctacgacaaccgtcagtcatatatttaatggtaatgccgaacgacatcgtatttctgatatcacaaagaaaaaagtattagccattgcaacacaatttgctgatcaagaacatatacgcagagcgataataagggcatctttaactagaaccatcggtgtaattgtacctgacatgtctaatttcagttttgcgatgtttctgcacaaacttgaaatgatatccagtcaccaaggtatacaaattatcatatcttgtagccattacaacccagctcaggaggtcaatgctattaataatcttttggaacgaaaagttgatggtattattaccataacatcgttagatgatgatgtgctctattcaaaggtaagcatcaaaacgcctgttctattatacgatcgttttatttctcatagtcaattaccttttgtctcttgtgagtcaatttgttcagttacaaaacttatatctgaaaaagctaaactatttgatgagttctggtttttaggcggtgatattcaaatatcaactatcagagagcggctgattggtttcagaaaaggcttaaaaaaagcaggcctaaaactaaataaagaatggattgtctatgataagtatcatgagaatcttggttaccatttgatggagaaaataaccaaaaaaattggacgattaccaaaggctatatttacaccgtctggaaacttgttggaaggagttttgttatatttgaaggataataaagttgcacaaaatgagatttatctttgctcttatgattacaatatgtaccacgatttccttttttatgatgttgatattttatcacaagattatgaacaacttgccagacactgttttataaatattcagcaccttattaataaacatgctgttgagcatagaataacaagggtccctcctaaattaattgtatcttcaagataa

SEQ ID NO: 223018 - DNA, 399 bp, Klebsiella pneumoniae
atgactacgactaatcaatttgctgcacatgttggtctggactgggcagataaaaaacacgatgtctgtgttcagtttaaaaacggcgaacgcgtattccatgtgattgaacatacagcagaagcgcttgatgtctggcttaccgagttacaccagaaggtagaaggcaggatcgctatcgccgttgagctgaagaaagatcccatggtgtatgctcttcagaaatatccgtttatcaccattttccctgtccacgctttgtccctggctcgttaccggcaagccttctcgcccagcggcgctaaagatgacccgcaggatgccgagctggcattagagttaatgctacgctatcccgggggaaccgcagaattcggaaaaaatcgtacgctaagctaa

SEQ ID NO: 223019 - DNA, 1578 bp, Klebsiella pneumoniae; identical to SEQ ID NO: 62825

SEQ ID NO: 223020 - DNA, 2967 bp, Klebsiella pneumoniae; identical to SEQ ID NO: 5007

SEQ ID NO: 223021 - DNA, 1140 bp, Klebsiella pneumoniae
atgggcgatttaagcggcattcagtctgatttagcccagctggttaggctggtgatagccgaacaatatgatgatgttaggttgtatgtcgctcgtttagttcgtaagtatcgtgactcatcacctgaattggcggctcagcttgatcaatacttgcgttcgaaacctgcgaacagccacaacagcttgcgtaaggcatctagccccacgcacacagtttccccacagcctttgcctgtggatgatgaatcgcgattaagtctactgaagacgccagttctgaaagatgaacttgaaaaacctgtactttcggaaaaaaatgaatcggtattagacaggctcatactcgagcgcaaaagtatccaacggttaaacgacttgggattgtcaccgacgcgatctgcaattttcgtaggtcctccaggggtgggcaaaactttaacggcagcttggttggcaaaacaactcaatgtgccattttatatccttgatttaactgctgttatgagtagttatcttggcaaaagcggtaataatttgcgagcagcattagattacgcaaagaaaaaaccatgcgtattattacttgatgaaattgattcgatagctaaaaaacgtagcgacgactctgacattggtgaactcaagagactagtaacagtcatcttacaggaagttgatgaatggccgacaaattctttattgttggcggccacaaatcacgaggagttgatcgatcctgcattatggcgccgcttcgatatgatagttaacttcgagaaaccagatgctgcaagtatttctgatgcgttaagaaggttttcagggcctgattttgcaatgttttcacgctgggttgatattttgaccttaacgtttaaaaatgaatcatttagcaacattgaaaaagaagtaaataaattccgtagagcagtggcattagggattgcatctgatcaggaattaattgaagagtttataaaaagtaggatttctctattggaacgtactgagaagctggaggtggctttaagcctcagtaaagagacaaagctctcacagcattctatctcagatattaccggggttagtcgagatactatccgtaaacatcgtgcctctgagggcacagttgcataa

SEQ ID NO: 223022 - DNA, 2223 bp, Klebsiella pneumoniae
atggctactaattttttaataggtcgcggtgaattgctggcaagtgctgttgttggccctcgacgcggaatggataaatcagaggtttacacttttgctgaagcaaagcagagattaatacctcaagttgaacaagcaacatctgatttggatgatttgccagctgttgcttgcccaaatgattttgctgtagctactttaacacttaaccctagttatattgctcgttctttttttccggatactttactccgggaaaataacctgcaatcaataggaagtaagactgttaaaattaagcctgacggttggaaacgcaaagccgaagtgacagagtttccaactacccaaatttttgtggcgggtaaacgctcttctttcaaaaatataattccatgggtacagtctttagacgatggtagtgacgaagcgatagacttcgcacgaattgaaatgttttctgcttataagccagaagaaagaatagtcccctttagcaatagggaagccggcgagttcttcgaggttggcatacatcttttaccgagtaacaatagtgacctagttcaatcagcgtttatgggttatgccgaagataatggcattactctttactcagagctttcttttacggcgggtaatctttggtttgtccccgttcagtgcggtcaagaaaaaatcgagactttatccttatttacatttgttagggtaattcgccccgtacctcccctgcgcggtattcgtccaatacaaagagcctcgggtgttaaaattcaaacattattacccagcgatccacctgtaagtgatttaagagtagctattttagatggtggtctgcctaaacaacactcaatacagaaatggcttaattcatatcgagttatggatgatggtgcttcggatgatagcgatgcgttacagcatggcctcgcagtaacatcagcgtttctttttggccccttaaaagccagaaccatggcccctcgaccatattcttatgttgatcacttgagggttttagatgccgacatctgtaatgaacatcctcttgaactttatagaactctagggttgattgaagaggttcttctttctagacagtatcaattcattaacttaagtttagggcctaatttgcctattgaggattcagaagttcatgcatggacttctgtgatcgatgatctgctcagcgatggtgaaacgctgatgacaatcgctgtaggaaataatggtgagatggataaagagtctggcaatgctagaattcaagtacctgctgactcagtgaatggtctttctattggtgcagccaattctacagactctaacaaatgggcgcgatcctcatatagtgctatggggcctggaagaagccctggagttattaaacctgacttagttactttcggtggtgaagagcgtgaatattttcacgttctaactgacgatacaaatccagtaatcgcacctcaaatgggtacaagttttgccgctccatatgcattacgtacagcggttggaatcaaagctcttttaggtggagatctaacaacattggcgatcaaagcgcttatgattcattcatgttctcaaaaagattattctcatgcagaagttggttggggaaaactacctgaaaatattaatgatataattgtaagtcccaatggagtagccagaatcgtgtatcaaggagaattgaaacctggcaaatacctgagggcagcattaccaataccagatggcggtcttaatggtatggtgaacctaactgcaaccttttgtttttcaacttctgttgatcctcaggattcagcatcttacacaaaagcaggactcgaaatatcgttccgacctgatgagagtaagaaaaaacaaggtgctcagaatgctgacaccaaaggtttttttgaactaaaaaaatatgccaatgagcaggagcgtcgctctgatatgggcaagtgggagacagtgctacatgcatcaaaaagtatgcgtggcacttctctaaataaacctgtattcgatattcattataatgcgaggcaaggcggaggggcgatacaaggtaataaagctgagaaaattaaatatgcattgatacttacgataactgcaaataaacatccggatctgtataacgatatattacgaagttataaccagatcttggcacccattcagcctcaagcaactatacctgtcagaacttga

SEQ ID NO: 223023 - DNA, 639 bp, Klebsiella pneumoniae
atgagccaatatctattcaataacatacccggcgaatattttgataaatttcgccctgttagagatgtgttttctaatttagaaaacctccttgtgattgcggaaatcgtgaacacttgccatagttcatggaataaaaaaacaaatgattttgatttactaataacaactggcactcacaaaagaatacttataagaaaaccagatggtttttttacaatgaaccttccctttcaggtaatagagtttgaagaaaacatcagctttaattatgacgcctatggattagcagttaatgccgagttcatttctagatgcaggaatgttattacaacttgcgataatggattcttttctcacgaggcaatagctgttgatttatgtgataactttgatggagacatgcaacaagctatacattactctgatgcaatttcagccttactattattagaccatggatattttaggtttgatgatgatccaataagggttaatggtaaaatacatccaagatatcatttcgatttcttctgtaataattcaacaaatgtgaagattggttctaatactcgtatagaagattcgttttttttgaacttatttgatgttaataaagatcgaccttatcttgcttaa

SEQ ID NO: 223024 - DNA, 1986 bp, Klebsiella pneumoniae
atgtccagctactgcttttactctcaagatgcattagcactcgctcaaagttctgggatcgatgtgcttatcaatgattatgcagagcagcacaaaaaacaaacatacattctttgcagaccattatctaatgaggatgtaatatatgattacgataaggcaatagctgtattttcatctggaataaaaccttttttcatagatattggcaacaatttagaattatttgaagaatatcaggaagattttctagaggatgtttcattcttagctgagaaattcaaatatagagaaaaaattggtaggaaaaaatcatggcaaagcctattcgtttcacttcccatagatgatcttgacttcagtaaattagaagttgaaactaaagaaagtcgagtgattgacctaataatttcacttatcgttggaagtattaatgatacctctagaataaatctggaagcgagtaacctgttagatacaattaagtctaaaattatcttatttgacaccgatcaaacaagatttgttttccaaagtggatttgggaaaaaaagtgtaattcagggattagctggttctggtaaaacagagttattattacataagttgaaagaaatctattctaaaaatccggattctaaaattgcctttacatgtttcaataaaatcctcgcatctacaatgagaacaaggattcctgaatttttcgattttatgcgagttgaaaaacagattgaatggggcacaaaacttttttgcttcaactcttggggtttgactaaagatcctctctcaggaatgtatagatacatttgccatttttatgaaatcccatttggtggttttggaaacggagactttgacttcctttgcaagaaagccattgcagatataaataatagcggacgatcagataaaaaggctcttgattatatctttatcgatgaaagtcaagatttcccgcaaagtttcattgatctctgtgaaatggtaacatctaaaaagctgtacgttgccggagatgtttttcaaaatattttcatgcctataaatgataatgtaaatcgggccgatatcgttcttaaaaaatgttatcgcacagatccaaaaaatttaatgttttcacatgctttgggaatgggtctttatgaagagcctgttctacgatggttaaaagaggctgagtgggattcttgtggctataaatacaacaaaataggcaatagagttgaattgtcaagagatccgctaaggcgctttgaagatattccaaaagattataaaagcacaactctacatttaatggagaggaccgataatggaccagataaaataattgaaataataaaagatattaaacaccgcaatcctaccttagcagaaggcgatatagctgttatattccttgattccagtggatatatatatgattacattcaatctctaaaattgaaaattaagcaacaacttggctgggattctaatatctcacatgaaacaaaagccaaacaagatggtaaattgttcatttcgaacattaataacgctaaaggtctagagttcccttttgtagtttgttttgccatgaaactggttaaaagatcaaacttccgaaatgcactctatactatgatggcacggtcatttctcgaaagccatctagttttaaatgatgataaagaaaatccatcgatgccaactattcttgaaggcttacatttcctaaataacaataattacatgaatgtaagactaccctctgaagaagaaataagaaatcaaaaagatttcattgtgttggatgagtctatttctatacctaaactagtaaaagcctattgctcagacaagagagcatcacctttattaattgccaaaataattgacaaggttgaaagaatgatttcagaagatgatgatgacgttgatggagaatacattaagagcctgattggactagaatatgaaaggaatagaaaaaaatga

SEQ ID NO: 223025 - DNA, 1029 bp, Klebsiella pneumoniae
atgcgccgacttagcgatacgttatttctgacatggctttccgttctgttcatgctgagcgccttcccggcgcaggcgctgacctgcaagaccacctcgtccacgatcagcgaagtcgtgaatatcgagagcatcattaaagtctccagcagcgagcttattgccaataaaaagatatgggtctccagccctattaccgccaccttcagttgcgaagataccgataattttccgaacggtgaaagcgcctatttctggctggatccggaaaataaagccagcagcttgcccgactttatccaggtaggcattacttacaacggcatcgactatctgctacaaaataaaaaatcggtggagattggcccggcgacgctgtgtgataaaagcgggaatacctgtaagtccccggccattgggcagacattcagcctggtttaccaggtctatatcatctcgacgggccgcagagtgaccggggaaggtaaaatagacgataacctaaaattgtcgctttttcaggtagatggccaaggcggtctacgcaacggcaccgctggcgccaactataatcttttcattaccggcctgaaccgtatcagaacaatggcctgcgtccccacggtatctatttcgccaagcgaaattaactttggcgatattcctgccggtaacgcccgaccgggctactatgaaaaaacacgcccctttaccgtcacctatggtctggtcaagcagggtaacggcagtgattgcgggaccgaacctatgcttgctacgtttagcaccactaatacgatacaggagagcgccattattttgccgcagcccgacagcggcttcggcattgccatctcgccaaacgccagcatgcatccccttattgagatgaatgctccgattcactttaagctggcaacgggcgcgaccctcgcgagcacctatacggcggggctgctctggttgtcgagaacgccgaagctggggcctttttccgcgaccgccaaaatcaccgtgacctttgaataa

SEQ ID NO: 223026 - DNA, 2556 bp, Klebsiella pneumoniae
atgaaaagaataacaacagccagggtgcgggagtatgccttgttgcccgttaccgccgggcgggcgatggcgctggcgacggtgccgacgatgatgttttgtctcagtccgttgagccgggcgctggccgacgactattttgacccggcggcgctggagtttgctgacccgcagcagcaaacctccgatctgcactacttcgccaaacccggcggccagcagccggggacttatcctgtcaccgtggtggttaatgaccaggagctgggtcaggctgatatcacgtttgttgacgatggcgggcagctgcgcccggtgctgacgcccggtcagctggcggagtatggcgtcaacgtcagcgcgtttcccgcctttcaagcgctgcatgaaggcgaaaccttcacccggatcgagaagtttattcccgacgccagcagtcggttcagcttcgctaaccagcgcctgacgctgagtattccccaggcggcgatgaacgtgcaaagccgcggctatgtcgatccgtcgcgctgggacgatggcgtgccggccgcgtttgtcgattactatttttccggcgcgcaaataaagaacgccgacgaaggggagagcagccgctcaaactatctcaatttacgcagcggcctcaacctgggcgcctggcgactgcgcaacatctcctcaatgcagtatgaccagcagcgccggcactgggatacccagagcacctggctgcagcgcgatgtccgctcgctgaagagcttgctgcggatcggcgatacctacaccaccggcgatgtgtttgacagcatacagtttcgcggcgtccagctgatgtctgacgatgaaatgctcccggacagccagcgcggctttgcccccactattcgtggcgtggcgcacagcaatgccaaagtgaccgtctctcagcacgggtatgtgatctacgagacctttgtgtcaccgggggcattcgccatcagcgatctctaccccacctcgcagagcggcgatctggaggtgaaggtgaccgagagcaatggcgtggtgcgtacctttacccagccctattccgcggtgccatatatgctgcgcgaagggcgcggcaaattcagtctcagcgccggccgctaccactccgggggggagtcggtgcgctcgccggaatttctgcagggcactttgttctacggtttgacggcgggattcaccctctacggtggtacgcagctggcccgggactatcaggcgtgggcgctgggcctgggccgcggttttggcgagttcggatcgctgggaggggatgtcacccaggccgtcacccgtacgccgtcgggcaagcgctatacgggccattcgctgcgcgctcagtatcagaaaaattttgtcagctcgggcactgcgttcagcctcgccagctatcgctactcgtcaagcggctattacgattttgccgaagccagcgcccttgaaagcgcccaggggcaagtagacaaccggcgtcgccgggaagagctgtcggtgtcgcaaagccttggtggcctgggcagtctggcggtttccgcctggtcccaggagtactggcatcggcagagtcgggatgagacggtgcaccttgggttctacagcgcctggaaagggatctcctggggcgtgggctattactacacccgcgccagcggccagcaaaaaaatgaccgctcctggtcattcaatatcaatattccgctgggtggtccgctgtccgacagcgcggtgagctacaacaccacctcggacagcaatggctatacctcgcagcagatgtcgctgtatggcgcggtgccgacgcggccaaatctgttctactcggttcagcaaggttatggcaaccagggacgaggcagcaacagcagcgcctccctggactaccacggcggcttcggcaacgcccagatcggctatcgccatgacgccgccagcaaccagttgacctggggaggcgccggctcggtggtcgcgcatccgcacggcgtcaccttcggccagacggtgggtgagagcttcgccatcgtccgggcgccgggggccgccggcgtggcggtgcaaaacggcaacaatgtgcacaccgactggcgcggctatgccgtggtgccctccctgaccgcctaccggaaaaatgtcattaccctcgatacggagtcgatggccgacgacaccgacgtcgaccagcaggggcagaccgtgatccccggcggcggcgcggtggtgatggccaactaccagacccacattggcaaccgggtgctgtttaccctgcgcaatgcccaggggccgctaccgtttggcgccagtgcgcggctgatcgaggaggaggagagcggcaatccgccgggcggcatggtggccgacggcggccaggtgtatctcagcggcgtgccgcaggagggaaccctggcggtgagttggatcgtcaacaaccagtcgcagagctgcacgctgcattttcatcttccggataacccacagcagagtctgaatacggtgaaaaccgtctccggactgtgccagacacgctga

SEQ ID NO: 223027 - DNA, 579 bp, Klebsiella pneumoniae; identical to SEQ ID NO: 111904

SEQ ID NO: 223028 - DNA, 375 bp, Klebsiella pneumoniae; identical to SEQ ID NO: 111905

SEQ ID NO: 223029 - DNA, 546 bp, Klebsiella pneumoniae
gtgctaaccgtaaaccatctgactctgagcgtgagacgccagccgctgctgcgggaggtcgccttttcggtagccccgggggaggtgctgacgctgatgggcccctccggtagcgggaaatcaacgctgtttgcctggatgattggcgccctgtccggcgattttcgcgcccgaggcgaactgtggctcaacgaacggcgttgcgatacgctgccgacagagcagcggcgcatcggcattctgtttcaggacccgttactgttcgaccatttcagcgtcgggcaaaatttacagctggcgctgccggagaacgtgcgcggcgaggcgcgaaaaaccgcggtggaggaagcgcttagccgcgccgggctggcgggcttcgccccgcgcgatccggccacgctctccggcgggcagcgggcgcgggtgagcctgctgcgcgccctgctggcgcgccccgaggcattactgcttgatgagcccttcagccgcctggatgccagcctgcgcgccgggttccgccgctgggttccgccgctgggtctttga

SEQ ID NO: 223030 - DNA, 1257 bp, Klebsiella pneumoniae
gtgggctcggagatgtgtataagagacagggcgacggcggcgctgctgctgttcgccgaagggggctggctctggcagcggctgccgtttctgacgccgccggttgaccggtacggcatcgggcttggcctgacgatggccctgaaagagagcgcctttgtgctgtgggtgatctatggcctgctgggagagaaacgcctcgccgaccaggcgaccgccctgaagagcctcggctacggccgctggcagtgcctgcgttggctggtgctgcccgccctgctgcccgccctcggcatggtgctgctggccaccaccgcctggagcctgtcggcggtagacgtcgccctggtgctggggcccggcaatccgcccaccctcgccgtgctggcgtggcaatggttaagccagggcgatgagctgcagcaggccaaaggggcgctggccagcctgctgctgatggcgagcctcggcgggctggcgctggtcgcctggagcggatggcggctacagcgccagtaccagcccgatctgcacggtgttcgtcacccgcatcctcatgccctgcccggccgcctgctggcggcgctgctgccgctgagcggtctgctgggcgcgctattgctggcggggctggcgcgctcggcgccgccgcagatggatgccctcggcaacagccttgggctggcgctggcggcctgcgccctcggcgcggctgtctgcctgctgtggctggcctgcggcccggcgcgaggcgatggctgggtctggctaccgctggtcctgccggccctgccgctggccgacggccagtaccggttggcgctgtatgcctggcttgacggtgactggtggaccgtcctgtggggccatctgctgtgggtggtgccctggatgctgtttattttgcgcccggcctggcgccagcgcgatccgcggctgacggttgtcgcccgcacgctcggctggggatccacgcgtattttctggttgctgaccctgccttcgctaactcgcccactgctgaccgccctggcggtgggcttctcagtgagcatcgcgcagtatctgccaacgctatggctgggggctggccgaattccgacgctcaccagccaggcggtggcgctcagcagcggcggcgaggcgcagacgctcgccgctcaggcgctgtggcaattactgctgccggcggtatgctttaccctgacggctctgctggcctggctggcaggccgctatcgacgaggacttcgctag

SEQ ID NO: 223031 - DNA, 1788 bp, Klebsiella pneumoniae
gtggcaggcaatccctttcttctcgcaccagaggttaatgcgaatcccctgctgagcgattcgtggtctcgctgccagcgctacgggctggatcccgccaccgaggattttccccgcctcggcgccggcgagctggcggaccggctcgccagccaccgcggcctgcagcagctggcgcagccggtggtggaagccctgtcgcgccaggtcgcagacctgcagtcggtggtgatcctttccgaccccgacggcctggtgctgcatactctcggcgatacccaggcgctgcaaaaggcccagcgcgtggcgctggctcccggcaatctgtggagtgaaagcgggcgcgggaccaacgccatcggcaccgcgctggcgattgacgatggctgcgagatcgatggccgtcagcactttcttacccgcaaccagaatctgtactgcgcagcgatgccgctccagcgaccggacggaagcatcgccggggtgctggatatctccggcccggcgaattttccccaccagcacacctttggctgggtaaaagcggcggcaaagcaaattgaatatctgtgggtgaaacagagtctgcatcctgagcagtggctgatgagcctgcaccggcaggtggacaaactcgacagcgtcgaggagctgctgctggtcttttccgacaacgtcctcaccgccggcaaccggctggcgatgcgcgagttcggcctgagcgcggcgcagtttggccagctcacctttgcctcgctttttccgacgctgacgcaaacggcggtcagcgtcccgctgccgctgaccacgccgcagggccgctaccactatcgcctgcgggagcccacccgccgccgggtggcggtaagcgccccgccggccatgcatctcccctttaccagcccgcgcgaaggcgaaaagctgctgcggctgctcaacgccggcatcgcgctctgtattgagggggaaaccggcagcggcaaagagtatgtcagccgcacgctgcatcagcacagccgctggcgcagtggcaaatttgtcgccatcaactgcgcggccatcccggaatcgctgatcgaatccgagctcttcggctaccagccgggggcgtttaccggcgccagcaaaaatggctatatcggtaaaatccgcgaggctgacggcggggtgctgtttcttgatgagatcggcgatatgccgctggcgctgcagacccgcctcctgcgcgtcctgcaggagaaagaggtcgctccgctgggcgccagccgcagcgtgccggtgaatttcgccttgatctgcgccacccaccgcaacctgacccagcgggtcagcgccggagaattccgtgaagatctgctgtggcgtctgcgggaatacgccctggcgctgcctccgctgcgcgagtggccggcgctggaaacctttatcgccaccctgtggcacgacctgggcggtgcttcacgccgggtgacgctttcaaacgcgctgctggttcacctcagccagctgccgtggccgggaaacgtacgccagctgcagagcgtcctgaaggtaatgctggctctcgccgatgagggcgacacgctgacgcccgacgcgctgccggaggcgtatcgcgccgcgcctgcgccgttgccgcgcgggggattgcaggcccatgatgagcagttgattgtcgataccctggccagggtcaacggcaacgtcagccgggcggcgcagatactgggtatcgcccgcagcacgttgtaccgccgtgccgcccgtgccggacggcctcgtcgctga

SEQ ID NO: 223032 - DNA, 1521 bp, Klebsiella pneumoniae
atgcgttatgcacatcctggccagcccggcgccgtggtttcatttaaatcggcttacggcaactttattgacggtagatttgtcgagccgctgagcggtgaattctttatgaatacttcgccggtcgacggcagcaacattgcgcagtttccccgctcggatgccagagacattgacttcgccctcgacgccgcccatcgcgcggcgccggcgtggggtaaaacctcagtgcaacagcgctccaggctgctgctacaggtcgccgatcgtattgaacagcatctggaatatctggcggtggcggagagctgggacaatgggaaaccgatccgcgaaaccctgaatgctgacctgccgctggcggtggatcattttcgctacttcgccggctgcctgcgcgctcaggagggaagcaccgccgagattgacgaaaccacggtggcctatcatttccatgaaccgctgggggtggtcgggcagattatcccgtggaacttcccgctgctgatggccgcgtggaagctggccccggccctggcggcggggaactgcgtggtgctcaaaccggcggaacagacgccgctaagcattaccctgctgctggagctgatcggcgatctgttcccggccggggtgcttaacgtggtgcagggtttcggcaaagaggcgggcgaggcgctggccaccagcaagcgtatcgccaagctggcgtttaccggctccacgccggtcgggcggcatattctcgcctgcgcggcggaaaatattatcccctgcaccgtcgagctgggggggaaatcgcccaacatctacttcgccgacgtgatggacggagaagaggaatttattgagaaggcggtggaggggctggtgctcggcttcttcaaccagggtgaggtctgtacctgcccgtcgcgggcgctgatccatgagtccatctatgagccctttatggcacgggtaatggagaaggtggcgcagatccgccgcggcgatccgttagataccgacaccatgatcggcgctcaggcttcccgccagcagttcgacaagatcctctcctatattcagattgcccgggaagagggtgggcaaattctgaccggcggcgagcgggcggctatcgcgccggcgctggataatggcttttatattcagcctacgctgattaaaggtcgcaacgatatgcgctccttccaggaggagatctttgggccggtgatcggggtgaccacctttaaggacgaagcggaagcgctggctatcgccaatgagacccagtttggtctcggcgccggggtgtggacgcgggataccaacctcgcctatcgcatgggtcgcggcattaaagccggtcgcgtgtggaccaactgctatcatgtctacccggcgcatgcggcgttcggcggctataaacagtccggcgtcgggcgggaaacgcacaagatggcgctggatgcctatcagcaaaccaaaaacctgctggtgagctacggcaccgcgccgctgggcctgttctga

SEQ ID NO: 223033 - DNA, 309 bp, Klebsiella pneumoniae
atgagggaatgctttgttgatcgactgattctccgggtttactttggcgtaaaccaggcgcgtactccagcgctgattatcttctgtaataagttcaaccctaccggcaatgagttgaccatccccgcccatcgcatcccccaacggatatccctgctggtagtaaccatccttgtaaatatgatgcgtgtaaatgtagtcagtacggctcatattagatcttgtatcgtgggcctcaacgtaccagtttaccgcatccttaccccagccgtggtgcccttccaccccaccaaggaatgtatttgctga

SEQ ID NO: 223034 - DNA, 495 bp, Klebsiella pneumoniae; identical to SEQ ID NO: 136244

SEQ ID NO: 223035 - DNA, 162 bp, Klebsiella pneumoniae
atgaacagcccagagcacttgccgtctgagacgcacaaaccgatcaccggctacttgtggggcgcgctggccgtgctcacctgtccctgccatttgccgattctcgccatggcactgttgcaaatagtcggtggtgataaacttatcatccccttttgctga

SEQ ID NO: 223036 - DNA, 231 bp, Klebsiella pneumoniae; identical to SEQ ID NO: 216491

SEQ ID NO: 223037 - DNA, 501 bp, Klebsiella pneumoniae; identical to SEQ ID NO: 216496

SEQ ID NO: 223038 - DNA, 249 bp, Klebsiella pneumoniae; identical to SEQ ID NO: 216495

SEQ ID NO: 223039 - DNA, 1362 bp, Klebsiella pneumoniae
atgtttaaaccagaactcctctccccggcgggaacgctgaagaatatgcgttacgctttcgcctatggcgccgatgccgtttatgccggccagccgcgctactcgctgcgcgtgcgtaacaacgaattcaatcacgaaaatctgcagctcggcatcaatgaagcccacgcgctgggtaaaaaattctatgtggtggtcaacatcgccccgcataacgccaagctgaaaacgtttattcgcgatctgaagccggtggtggagatgggtccggacgcgctgatcatgtccgatccgggtttaatcatgctggtgcgggaacacttcccggagatgccgatccatctttcagtgcaggctaacgccgtcaactgggcgacggttaaattctggcagcagatggggctcacccgcgtgatcctgtcgcgtgaactgtcgctggatgaaatcgaagagattcgccgccaggtgccggagatggagatcgagattttcgtccacggcgcgctgtgcatggcctactccggccgctgcctgctctccgggtatatcaacaagcgcgacccgaaccaggggacctgcaccaacgcctgccgctgggaatacaacgtggcggaaggcaaagaggacgacgtcggcaacatcgtccacaaatatgagccgatcccggtgcagaccgtggagcccaccctcggcatcggcgcgccgaccgataaagtctttatgattgaggaagccaaacgtccgggcgagtacatgaccgcctttgaggacgaacacggcacctacatcatgaactcgaaagatctgcgggctatcgcccacgttgagcgtctgacccagatgggcgttcactcgctgaagatcgaaggccgcaccaaatccttctactactgcgcgcgcaccgctcaggtttaccgcaaggcgatcgacgatgccgccgccggcaaaccgttcgataccagcctgctggagaccctggaggggctggcccaccgcgggtacaccgaaggcttcctgcgccgccatacccatgacgattatcagaactacgagtacggctactccgtctccgagcgccagcagtttgtcggcgaattcaccggagagcgtaacggcccgctggcggccgtggcggtcaaaaataagttcagcgtcggcgacagccttgagctgatgaccccgcagggtaacgtcaacttcacccttgagcatatggagaatggcaaaggcgaaaccatgccggtggccccgggcgatggctataccgtctggttgcctgtgccggacgacctgcccctgcagtatgccctgctgatgcgcaactttactggtcaaacaaccagaaatccgcacggtaactag

SEQ ID NO: 223040 - DNA, 1014 bp, Klebsiella pneumoniae; identical to SEQ ID NO: 5004

SEQ ID NO: 223041 - DNA, 993 bp, Klebsiella pneumoniae; identical to SEQ ID NO: 96021

SEQ ID NO: 223042 - DNA, 1680 bp, Klebsiella pneumoniae; identical to SEQ ID NO: 216671

SEQ ID NO: 223043 - DNA, 276 bp, Klebsiella pneumoniae; identical to SEQ ID NO: 149542

SEQ ID NO: 223044 - DNA, 747 bp, Klebsiella pneumoniae; identical to SEQ ID NO: 131555

SEQ ID NO: 223045 - DNA, 429 bp, Klebsiella pneumoniae; identical to SEQ ID NO: 131545

SEQ ID NO: 223046 - DNA, 1194 bp, Klebsiella pneumoniae
gtgaagggtatgcggaagatcaagaggggtaagaactttgctggtgtggtccaatatgcattgaagccaggttcacatcataaaagcgatccagtcgtaattggcgggaacatgttaagtggctctgctcttgaactgatttccgaattcaatggcacaaaacagcttcgctcagatgttcagaaggctgtttggcataactcgcttcgcttacctgatggtgaatcattatcgaatgaccaatgggcaatgatagctgacgactatatgaagaagatggggttcaatgagacccatctccgctgctatgttctacatgacgattctgccggccagcacatacatatcattgcaagcaggatagacctctatgctggaaagctataccttggcagaaacgaaaacctcatcagcacccggatcattagtgaactcgaaatcgctcacggtctgacagtgaccaagacagcaccttccattacaccaaagcaaccgaagcgaagaaaggtttcccgcaatgaacagatgctttcagaacggactggccttccctcccccaaagaagctctgcagcagatacttgataaaagtttatctgataagccggaccttctaactttcacaaaacgactggaagaagcagaagtcggctggacggcgaatgtcgcttcaaccgggaaaatgaacgggttctcattctcctaccgcgatatagctttcaaggcatctaaacttggaaaggcatactcttgggtaaatcttcaaaagcagcttaactacaaccctgaccacacagaagctctgcgaagcgacatatcgataaaagaccaatctgctgctcctgctcctgctcctgctcctgctcctgctcctgctcctgctcctgctcctgctcctgctcctgcaaccattttaaaaaccactgagagaaaggaaagtatcagtgaaaaaattgctgaactcgaactgcgactcagaaaagacagacgaaacgagattgttgagaagattctccaaaagaatgcggttaaccagcaaaagcatctcaggcttatcggctggcttccatttcttagaaggcttgcagagcttctccgaagctatggtaagagcattcttcacaagcccctccctggattctcaaatctctatgtaacccgacctttacataaagaaaggaaaattcatttataa

SEQ ID NO: 223047 - DNA, 1503 bp, Klebsiella pneumoniae
atgcaaatcggaagtaaatattttgaaggtaatgttctcgctcaatgtgggatacagcttgaaaaattatcaaaatttctatgtaaacataaccttgtgaaatcaggatacatatcctggaaaaaccatgtgaagcagaaggtcaaaaacaactatcttcctgagattgaggactatcacagaaatgataagttacccgatgaagcagcattacttgccattgctgatattttttctaaaaatgatgagctactgagtccaagggataaattcaccagtgcagtatttgcacttctgctttgttgtccgagcagaatttctgagattttagccttacctgctgattgtgagattacacaaaaagatgagaagggtatcgaaagatatggcctgagattctattcggttaaggggtatggccccaatatcaagtggattccacaggttatgataccagttgcgaagaaagcgattagaagattgctttccttatcacaaaatgcaagggagtttgctcaatggtgcgaaaaatatcctgataaattttaccaacatgaactttgcccaaaagttgatgaaaaatcaaagttgacagttatacaggtttgtcatgcacttggttaccctttacatgatcacaaatcttgcgttctaaaaattaaaaagacaagtctggatggtgggaaaagtttcttaaaccccaatgattataactattcattgagtgagttatgggaaatgattatctctggttttagtaaagactttccttggtatgatgaagaaaaatccataagatttagcaatgcattatgtttattaaatcctcgccaatttactttatcccaaatgattgatatctacttatttcataagccaactaaaggattcttttttaatgatatccaaaataaaaaacgtaatgagcatggatttaaaaatattttcgcccgacacgggtattatgatattgaaggtcagccactacttattcgctcacaccaaccaagacatcttttaaacacaatagcccattatggtgaaatgtctgagctggatatagctaaatggtctggtcgtgtcaatgtgaatcagaatagagtttataatcacgtgtcagaagaagatatgttagataaaatcaaaactattaaattgaccatggaaaattattgtcaaaggaagtcaatacccacaaatgaattgacagttgattttgataacctgaatcaaggagcaattcacttaacagaatttggttactgtgtacataactatttagttaagccttgtgcgaaaattaatcagtttgttgagtgtgataatgaaacactggacatgaaatcagtagatagaattagactggaatcaatccgagaaaaattaatgcaattgataaatataactcagatcgcttttgaaaatggtgactatggggctgataaatggttgcagcaccacgaaaaaaacttggaaagaattaataagcttttgaataattga

SEQ ID NO: 223048 - DNA, 732 bp, Klebsiella pneumoniae
atgttgaaatataaagaccttcttcaaaagaaattagataatggtaaagtagaatatttaatttcagtaccacgagttaaacaaaggggtaaacaactacaatatcgagaactgccaataatctcagaagttgcatcaattgttcaacttcaagctaatcactccgtgaggcttgttgagcaaacccttggcaaaacccttgatgatcatgccaaaggcaaggttccagttttcttgaacgaggaaaaaatgcttgatttagccataatagattctaacttcctggagtctaataaaatatatgcaaaaccaacaattgctaacttagcactaaagaatattgttaataatagaaatgtaatttcaaatcgtactggttctctactcaatgtcactcctcgcaggcttcgctatacgatagcaactaagctggctagggagggacataatgccaatactatagctcaattgttagaccattcttctacttcaagtacgggaatttatattaaaaatcttgctgagagtgttgaaagaatagattttgctgtttcagaacaattgtcatttatcgctgatgcctttatgaatggaataaagtctaaagagaaaatacatttcaaattttgttcttcgagaaaatgtcaaagtcagaatttaaatgtaaattttccttgtaaagaatgtgctttctttatgccagttgatattgacgaggtaaatccccgatga

SEQ ID NO: 223049 - DNA, 828 bp, Klebsiella pneumoniae; identical to SEQ ID NO: 95489

SEQ ID NO: 223050 - DNA, 1197 bp, Klebsiella pneumoniae; identical to SEQ ID NO: 95490

SEQ ID NO: 223051 - DNA, 447 bp, Klebsiella pneumoniae
atgtatacgtatttcaaaagtaaggatgagcttgttaaggctattgtactggaagaacagaactccgcgctgactgcccataatgcaacctatgcaggctcttattttgatcgcctttgtgcacaagtcacgtcctgtattagcgagatcggttaccctatcacacatcaactttgggttgaaatcatggctgagtctgcgcgtaatccagaactgcgaaaaacgtatatctccagtgatgacatcatgcggaaaagcttcgcgcggctcatccaggagggtatcgctgccggagagtttcgccgtgatattaaccttgaagaaatcacgatcattatttttgcccttattgacggtttaatcgctcgtcaggcaataaacacgaccttctcattcaaggatgatctgccaatgttttttgacgttatggcaaaattgcttaaataa

SEQ ID NO: 223052 - DNA, 864 bp, Klebsiella pneumoniae; identical to SEQ ID NO: 217112

SEQ ID NO: 223053 - DNA, 570 bp, Klebsiella pneumoniae; identical to SEQ ID NO: 198819

SEQ ID NO: 223054 - DNA, 1476 bp, Klebsiella pneumoniae
atgcttagaaaaataatcaggggtagcggattcactcagtcagaagaaaaactgatagagttcgctgatgatgctttttttggtctttggtcttatcctaatgtttatagcgatgagggttactctaaaaataaaattgggaaagaagttagtgacttattagttatttttgataaagatataataattttttccgataatgctattacatacaataaaaacaaagatcctaaggttgcatggcagagatggtttaaaaaatcagtcatacagtcttgcacacagttatttggcgcagagaagtttataaaagatcatcccgaaagactttttgttgacaaagaatgctcagttaacctccccattaaaatagataattcatttaattttcatttggtggccgtcactaataatatttcagatccggcgatctcgtactttgacaaaatagaaaaaggcagctctgctactttagttaacatatttcctttaaacgcccatcaatgtctagaaaatccattttgtgtcggagacgtttatcctgataagacttttgtccatatacttgatgagactgccctaaaactactgttaaccgagttaaacacagcaactgatttcattggctaccttaacgaaaaagagagggttgtaagagaaagaacattattggtcagcgctggggaagaagagactcttgctgcttacattatgggtgataaaaccataatatcaaaagaaattattggaaacgatcaagggatgaccataccggaaggtgaatggaaaaactataaaaccactttcaattatcaatatcagctctcaatgaaaaagggtagcgttttctgggataacctaatccacaacttctcgacaagtatattgtcagctaacgttggtttttttagtgaaattgaattttctacacatgaattaggtgttagagaattagccaaagaaagtaggcaatctagatattacctttcaaagaactttaaagagaaattaaaaacaactcagcctcatctaagaacgtcaagaatggtcgaatcaatcgatgagcctggaaagttttacttattccttttttttcctaacgatagcaagttgagttactctgattacagaattcaacgtatatcttatataaatgcttatgctgaggttgcctttaataaatacagacatattaaaaaattaattactattgcaacagagccgcaaaatacagaaggaagatctgaagacctaatatatagcatatccccagagaaatttaccaaagagcaaaatgaaaaagccaaaagattatcaagagaatacaaaatactaagtgattttttacctactaaaacgacaaagagcgataactttaaatcagttatatcaaaaggtgaaaaaatagggcggaatacaccttgtccatgtggctccggtgttaaatttaaaaagtgccatggtgcgaataattag

SEQ ID NO: 223055 - DNA, 1137 bp, Klebsiella pneumoniae
atgaagaaaaaacttgttagattttcggcattagcgttggcaattgggtttttatcgggttgtaccattattccgggtcagggattaaacagtctgcgtaagaatgtagttgagcttccggacagtgactacgatctggataaattggtcaatgtttatccgatgaccccaggactgatcgatcagcttcgtccggagattatactcgctcgtccaaacccacagcttgataatttactgcgcagttacgaatatcgcatcggtgtaggcgatgtactgatggtcactgtttgggatcacccggagttgactacacctgcaggccaataccgtagcgcaagtgataccggtaactgggttaattcagatggcactattttctatccttatatcggtaaagtgcaggtggccggcaaaactttgagccaggttcgccaggacatagcaagccgtttgactacttatattgaaagtccgcaagtggatgttagcgtggctgcatttagatctcaaaaagtatatgtgacaggcgaagtttcgaaatcaggtcaacaaccgattacgaatatacctttaacggttatggatgcaatcaatgctgcgggaggattggcacctgatgcggattggcgaaatgtagtgttaacgcataatggaaaagataccaaaatttctctttatgcgctgatgcaaaaaggtgatcttacccaaaatcatatgctttacccaggtgatattttatttgtaccacgaaatgatgatcttaaagttttcgtgatgggggaggttggtaaacaatcaaccatgaaaatggatcgaagtggtatgaccctggccgaagctttaggtaatgctgaaggtatttcacaggatatgagcgatgcaactggcgtattcattatacgacagttaaaaaatgataagagtggtaagattgctaatatctatcagttaaatgctcaagatgcctcagcaatggtacttggaacggagtttcaattacagccttatgacatagtatatgttaccactgctccaatagttcgttggaacagagtgatatctcagttagttccgactatatctggcgttcacgatatgactgaaactgtaagatatattaacaactggaattaa

SEQ ID NO: 223056 - DNA, 189 bp, Klebsiella pneumoniae
atgctgacccagccgatctccttcctcggtctgccggtggtgaccgtgcccctgcgtaccgccagcggtaagccgattggcctgcagctgattgccgcgccgtttaacgaacaagcctgtcttcgcgccgcgcgggcgctggaagcgatgggcattaccgatgcccgagtggcggagagtgcagcatga

SEQ ID NO: 223057 - DNA, 414 bp, Klebsiella pneumoniae; identical to SEQ ID NO: 109942

SEQ ID NO: 223058 - DNA, 279 bp, Klebsiella pneumoniae; identical to SEQ ID NO: 198457

SEQ ID NO: 223059 - DNA, 225 bp, Klebsiella pneumoniae; identical to SEQ ID NO: 102183

SEQ ID NO: 223060 - DNA, 213 bp, Klebsiella pneumoniae
atgaaagtatacggccatcaacactcatcagaggctttctttcgggaaacttccccatcctgttttgaaccaaaagcggaaaaggtgatcgcttttcatggaaaggatgccagttacgcctataacgtgctggccgatctgaaagccgcaggtgcttcatatacgcgccggaatatcatcgccgatatgttccgccgtctgggtgtgaaatga

SEQ ID NO: 223061 - DNA, 357 bp, Klebsiella pneumoniae
atgagcacacaaaacgtcaacgaaaaaccctccaccaaagaaagcacaaccctccggactgacggttttgtgcgcaacattcattcccgaaacccgttcgatgttatccgcgccgatgtagtgcttgaacgtatcgagaaaaaggctggtcggagctgcggtatgcattacgagctgtatcaggcccatctgctgggtggtgcgctggattatctggatgcgctgccgttgaaagaccgtccggtgttaatgggcgctgcggcaaagcgcggctatctgctgacgctagccgaagaggaacgcgcgctggaagcacgggatgtactgatgagtgaactggcggcaaacgactgctga

SEQ ID NO: 223062 - DNA, 1437 bp, Klebsiella pneumoniae
atggagcgggtgcatcagcggaatataatccgtcagaaaaaactggagggaaaaattgaaggtcatgccagttttgcactgggggaggcgaaggccgaaacggccctgtacctgccggacaggttaggtgtcagccttttatttccggcgaaaaaagtgactccacagacaccggatggtgtctgtaatatgggagcgctgcgttttgccatgaaactggtattgtcaggtagcgttggtgccagtgctgcaattgaattaggggtgacagcagactggagtggagaaatgggaaagggctatggcattaaaggccgtcctgcaaccctgactgctccaccgttgccaggacagcagcaggtgaatttaaagacctcaacaatacctgaagcacaggggggaggtgaaattggtgtttttgttggtgctcaggcgggaggtaatatcagtggtgccattgagtggtttgacccgcatcctgatgatacgccagtagctataggtgttgagaaagataacaaaccccttgtcaataaagagaagaagtttgccgcgatagccaaactggaagcggggatgacggtgcaggcaggcgctgggggaagtggggttttttatatcacctatattcagggacgttttcgtatttactgtaaagcggctttatgttggggagtgggagccaaaggggaagtcggttttgaagttgatggcagcagttttgcggcttttatgaagagttttatgtttatgctgaggaatgtggattatcagaagattgagctgatgatggagggagatgccttccgttctttatgtgcaattcctattattatggcggcacaagggatacaggcgggtgaggccatgctaaagaatatgggaataatattacgacgaattgaaaccgatcttgaagatgaaaataagcgcgttcatctgatgaatagtattttgtcaaaccccgaccagcttaaatatacccctccggaaacaaaaggggcagtgattgccacattaattgatcagaattgggtagactggcttgaccctcgcaatcaaaataatgattttttttccgttaacagctggaagctcggtcctctcaagaggcgaaagcaagcggtgtttatggcgctgaagtgggtacaaagtcaggcagattataacaatgttatgcagcatttgacgttgtcgccaggggagaagaaaggtaataaagaactgaatgaaaaggatgtgattaactttttaggtatcggggaacacaaattttttttctacaccaattatggtgaaaagctcaccttattgcataataacctcccggtttttgttgacccggatgagccatttaaacccattcctgacatccttatgtcagaatatcttgccatgatcgacgaccagcacccgacggggacaatgactgcctga

SEQ ID NO: 223063 - DNA, 894 bp, Klebsiella pneumoniae
atgagaaaattaatcgtagttgcttcagttgccgccagtttactgctcgggtgcgaccagaagagtactggcaagcgtgaaaccttgtctgaagcgcttgttgctaagtcgctttctaacatggttcccgttcagggcggcgagttcttaatgggcgattttggaccgttagtcggtgaaaaactgcctttcagcataaaccaggatgacaaggtattacataaggttgtattaagcgatttttcaatatcaaaatacaaagtcaccaatgatgattataataaatatctgcagataacaggagtaaaaaaaccacccattaatattctgctaaaagattacccatcattgcaaaaaagtgattattctgttggcatcacctggcaacaggcaaaagactattgtcagtggttaggtaaggagtctggtaaaaaatttgatttaccaacagaggcgcaatgggaatatgcagcaagatccagagggcaatacattccgtttgcaacgaataatggtgagttcctgcccggtaaaaacatccccagccaggatgagctgagtgaatatactgatggagcaggtattcctatttatccagtggggaaatatcccccaaaccccctgggtctgtatgatatgggacttagtggctcagaatggaccaatgactggtatgcgtcagattattactctcattctccggtaaacgatcctcagggacccgtaaaggggaccgaaaaagtcctccgcgggaatgttggcggtgacagacaatacgctttaaccgtgttcagacaatcagatttgccagttccaaagatcaataaagacgatgattatgaaaaatatggtgttggtccgcagtatgttttccgttgcgtcatcaataaataa

SEQ ID NO: 223064 - DNA, 300 bp, Klebsiella pneumoniae
atgaaaaaaagaaatttcagcgcagagtttaaacgcgaatccgctcaactggtcgttgaccagaactacaccgtgacagatgcagccagcgctatggatgtcggcctttccacaatgacgcgatgggtgaaacaattacgtgatgaacggcagggcaaaacaccaaaagcctcccccattaccccggaacaaattgaaatccgtgagctcaggaaaaagctacaacgtattgaaatggaaaatgaaatattaaaaaaggctaccgcgctcttgatgtcagactccctgaacagttcttga

SEQ ID NO: 223065 - DNA, 273 bp, Klebsiella pneumoniae
atgaacttcacgataaaatcccgtaaaaccggcgaaattttcagtttttacgcacccgagagtggcggttatgtccacctggagtccccgggacactctggtaacacaggtgctcagatttgctgtggtggagggttcatggggagtacgctttcctgtggcgcttctgaggacgatctggccagtgttgcccgtaaatggtaccgacagttcgtgagggagcggcgcaaattcttaattatgtcgggccagtattctgaggataacccatga

SEQ ID NO: 223066 - DNA, 213 bp, Klebsiella pneumoniae; identical to SEQ ID NO: 25793

SEQ ID NO: 223067 - DNA, 162 bp, Klebsiella pneumoniae
atgaaactaccgcgaaacgccctggtctggtgcgtattaatcgtctgtttaacgctcttgatattcacatgcctgacccggaaccgcttatgtgaagtccggctaaaggacgggaacagggaggtcgcggcaagcctggcttacgaatccaacggtaagtag

SEQ ID NO: 223068 - DNA, 141 bp, Klebsiella pneumoniae
atgtaccgggtaaaacagctgttcggaggttcactgacgctgcgtgactacgatggtcaggttgcggaggctatggccctggtacgagcgctgaacaaaatgacgaaagcaggtatgcctgaaagcatgcgtattgcctga

SEQ ID NO: 223069 - DNA, 291 bp, Klebsiella pneumoniae
atgctaaaacgtggcatcgacctgagtgtaaacattgaaacccgtcagtttgatggattaaccgtttcttgtgttgacggtggcaaattgtttacctgctttgctaatcaaatccctgcatcttccgtcgaagaactgaccaaggggatcatcgactggcataagagtttgaaggctggcaaagatactgtctgctatttccttgatgacgcatttgaaaataatgtcgctaaaacaaatctttgcgccattatggaacaacacggcctaactaacctgcacagcttgtaa

SEQ ID NO: 223070 - DNA, 216 bp, Klebsiella pneumoniae
atgaacaaaaaaatattagtattgtcagttgtgttaggtttttcagctatgtccaatgccagtgaaccaaaatatgctttccctcaatcggataagcctgttatatcaaaaattaaaatcaaaaatgctcctgtggattcagagaaatatgggcatggggaagtgttagcaaatgggatgtgggttaaaggtaatactgcaaaccataagaattaa

SEQ ID NO: 223071 - DNA, 669 bp, Klebsiella pneumoniae
atgaatcgaactaactggcgcatcattaaaaacagtgaacaacatgctgctgctatggcaagactcattgaactggcatctggagacttgcagcccggcaccgaagattttgacgaactcgagctgcttggtctgctcatcgagcactatgaatcacgagagtttcctatggataagcctgacccgatcgaggctataaagtttcgcatggatcagcaggggctctcgcatgccgacatgaagcaatacattggctcagcatcaaaggtttctgaggtattaaatcgtaagcgtccattgagtttatcaatgattcgcagaatacacgatggcttaggcattcctgcagatattctaattcaagatatgagcgccttagaatggagtctggttgatgtagaggaagaagaaacgacaatgaccagtgtcattgttgaatacaatttggtcacagatcacgagtaccctgatttttcaagcaaggcggcagagtcttacctttcccagatgtggtcttggataagcagaagcggcgataaaaccgaagaaagatgcaacggggttgcagaaaatttttctttgaaacggaaattgtcatcaagtctcactgttgcaaacagcatgagcgacgggattacttcagacaggaactatgctccagtatcatga

SEQ ID NO: 223072 - DNA, 327 bp, Klebsiella pneumoniae
atggagcaactacagagattggctgaggtgattgccgaaacctatatccgcgatctgcgccgggaaacgggtagcaacgttcttaccgtggatggcgttagcgggtgtgtcgaagcccctctactttcagccggacttgttgataacgctgtgagtgcgtccaaagataagtttgactcggccttcgagcgtaaggcctatcgaatgttgatggagtttatttcttttgatggcccggagtatcggcttactgagcatggtcgccatgtaattacagtcatgaacactatatccctgagaaaaaataaggtaataaccatccattga

SEQ ID NO: 223073 - DNA, 630 bp, Klebsiella pneumoniae
atgagagagcagacgcgggtttacacctctgcgctaccacgaattaacctccaatttctggcagatatgcaaagaaagctggtggattcgagcccgaaaacacagatcttttgtgataccgagagcggaagggtgtacttctctctagtttctggcggctacagcgcgacaatcaacggggtaacgcgggttattggcatcacgattacccgggcagggtttggttaccggcgatggtacatttgcccgcattgtggtggccgggttgcgaaattattcattggccggaaggacgtagggtgtcgtaaatgctggagccttcactatgccagccagagtgaagatgaggtcgctcgcttacggcggagtgtgtggaagcagaggcatgacctatggggggatgattacccgcccgcgggcagcctgctaaatagcccgctcaagtttccgaagcctgccggcatgcgatgggaaaccttcgagaaaaagcgctctaggctgctaaagactgaatcagcttactggcggttgaaagaaccgagggacgctaaagggtttgcccgggtgatgcgcaaagcggaggcgtcaattaggtcatttgaacgggcatcccaaaaggctaccccatga

SEQ ID NO: 223074 - DNA, 198 bp, Klebsiella pneumoniae
atgcctttgcttggccgtgagataacagagctaacaatacaggatatacccaggctgaacggtgaagccctcgataaccatacccactacaacattcacaatgagctggcacagtcactacaggtcaacgagtgccaccgccgcaggatgagcgcaccggcctaccagtggaagaagcccgccacgccgcgcagataa

SEQ ID NO: 223075 - DNA, 1608 bp, Klebsiella pneumoniae
atgagtatttccttgaagaaatcagggatgctgaagcttggtctgagcctggtcgccatgaccgtcgccgccagcgtgcaagcgaaaaccctggtttattgttctgaaggctcgccggaaggatttaacccacagctcttcacctctggcaccacctatgatgccagctccgtaccgatctataaccgcctggtcgaatttaaaaccggtacgacggaagttattccaggacttgctgagaaatgggaagtcagtgcggatggcaaaacctatactttccacctccgtcagggtgtgaagtggcaggataataaagactttaaaccaacccgtgacctgaacgccgatgacgtggtgttctccttcgatcgccagaagaatactaataacccgtaccataaagtttctggcggcagctatgaatactttgaagggatgggcttaccggacctgattagcgaagtgaagaaagtggacgataataccgtccagttcgtcctgacccgtccggaagcgccgttcctcgctgatctggccatggacttcgcctccattctttcgaaagagtatgctgacaacatgctgaaagccggcacgccggaaaaagtggatctcaatcctatcggtaccggcccattccagctgctgcagtaccaaaaagactcgcgcattctgtataaagccttcccgggctactggggcaccaagccgcagatcgatcgtctggtcttctccatcaccccggacgcttccgtgcgctatgccaagctgcagaaaaatgagtgccaggtgatgccgtacccgaacccggcggacatcgcgcgcatgaaggaagataagaacattaccctgctggaacagccgggtctgaacgttggttatctctcctttaacaccgagaagaaaccgctggacgacgtcaaagtacgtcaggcgctgacctacgcggtcaacaaagaagcgatcatcaaagcggtttaccagggcgcaggccaggcggcgaagaacctgatcccgccgaccatgtggggctataacgacgacgttaaggactacacctacgatccggagaaggcgaagcagctgctgaaagaagcgggcctggaaaaaggcttcaccatcgatctgtgggcgatgccggtacagcgtccgtacaacccgaacgcccgccgcatggcggagatgattcaggctgactgggccaagattggcgtccaggccaagatcgtcacctacgagtggggcgagtatctgaagcgggcgaaagcgggcgagcaccagagcgtgatgatgggctggaccggcgacaacggggatccggataacttcttcgcgaccctgttcagctgcgccgcggcgaaagacggctccaactactcgcgctggtgctataagccgtttgaagatcttattcagccggcccgcgctaccgacgaccacaacaagcgtattgaactgtacaaacaggctcaggtagtgatgcatgaccaggctccggcgctgatcattgctcactccaccgtctatgagccggtgcgtaaagaagtcaaaggctatgtggtggacccgctgggcaaacaccacttcgataacgtctctgtcgaataa

SEQ ID NO: 223076 - DNA, 198 bp, Klebsiella pneumoniae
gtgaaagacagatcgcatgatgcggcgatggccgagcacttccgcgccgatccgacctatgcagcggagctgctggccgaagtccgccgcgacggccacccggccgaactggccattctgttgcgtcagatggccacggcgtcggcaggggatgagaggtcggatgactccgatacagagcgcgctctacctctctga

SEQ ID NO: 223077 - DNA, 1548 bp, Klebsiella pneumoniae
atgggtgataagtacgctcttgccggcttcgcgaacagtgtatggaatgtttttctaagacaacggttaaaaccagatcggacaattatttttgatgatttagaacgcagctccttatgggcaaatcaaaagagtgaattactgggtgcaattaatcactatgtagaacatcgcggcttccgcgttatagttatttgtcacgatgagcgcatagctgatcaactagccgagcttaaggaaaaaacatttggccatactgttatggtcgaaccacaaattcatgcggctttcgaagcgtttctaactgatattcaagataaaattgcacaagattttgtcaccaaaagaaaatcaattatcgaagaagtttggtcgcaatccgagcagtcttctttgagaattctgaaacacgttatcaacgatgttgctagacttcgtttaataatgaaagacaggcatctagaaaataaagacgctatagagcacattataaaatttttctgcgccttggatatagaggtgcgtgcgggaaatttaacgcgagatttactccttgaccggatgaaactacatatcgcggagaggatggatcgcaacaatcaagacaatattcggccattaagtaaaataatttcaaaatattcatcatctgatattacaggctcaattctgagcgatgaaattttagagtcaaccctcatagagggtagatttgattctgaaatgcttgcagcatggctcgatcaaacaccttattttatccaagcctcagatacccctccgtggctcatagtaatgaaattcgatgagctcgatgatgaaattattaaagaaggcatctctcggatgcaacagcagttcgatgagcgtgccgtaactgaaatcggagagtttcttcacatcgcggcacttcggctaatgatggttgaacagggcgttattgcccactccatggaagaagaaacatcactctgcaccgcgtatattgacgaccttttagcgaccaaaagaatgcctccaaaacctttggaatactcatttgagaggctatttgaggcttatggtggttatggttattgggtttcagaggttgcgagaccacatttcagggccatttgtgagcacgtggaccaagcgcggcatcaagcgctggaggccacttatccaagtcatgccgcagaaattttgcgtcagctcaaagaagatcaagcgtctatttttaagacaatttcaccaacaaactctggaagtaacaccctcgcgcatgttcctatcctcaatcatatacctgtgaattctttcttggacgcttggcttagcggtccgcgcagtggatggcgacaaacaactatggcactcgacaatcgatatgaacatggtcaactcgatcggaacttgagtaccgaaagaccttggttaattgacctagagcgggaaatgaatgcgcgaatagataaggagactggtctcgacgcatttcgattgaagcgaataaagccaaaaatatttagcgagttacaagaaatagaggcaccagatcaaagatag

SEQ ID NO: 223078 - DNA, 1908 bp, Klebsiella pneumoniae
atgatcgcacatcgcatcaaccgtgaacgcaaggcctcaagcccagcccggttaatcaagtatatggtggcggccaagggcggcattgacccgacgagctgggagcgcacggccgattacattctggattccgccaatggcacgaccgagggcgagaaggtcgccagctaccgcgttaccaactgcggcacggatgatccggcagatgccgcaatcttaatccaagccacgcaagcggctaacaccaggtcgaaggcggaaaagacctaccactttgtctattccttcccgcccggcgagcagccagaccttgagacgctgcacgccatcgaagacgaactatgcgctgccatcggcctcgatgagcaccagcgtgtatcagcggttcatatcgacaccgataacctgcatgtgcatgtggccatcaacaaggttcacccgaccgggttacagaacatcgaaccctattacgatcagttccgcctcatggaggcctgtgagcgtcttgaggtagagcatggcttgcaaagaacgtttcatggtctggaggcaaagcagcggcatcagaaccgcgacattgagctgttgccagcgaaagccccagagcagcgcgacagcctattccgtgaacaccttagaaacgcttacgacctcagcatatcggagcctcatgaagccaaaaccctgaacgggttgcgcaagctgtccgatacccgtctacagaggcagttagcagataaagcggagccagtccgcatcggcgcgaaggtggccagcgtggaggcgcggtccggcatcgagacgctgaccggatacgcggcccgcgaactggccccggcgatgcgacaggcggcgagctggcaggagctgcacgacgcagcggccgaacacggcctagaggttcgccagcgcggcgctggccttgtcatcggcgagccagatttaggcatttgggcgaaggccagcaacgtcggccgcgacctttccatgaaggccctaaccgaccgtcttggcccgttccagcattccgaacggcaggccgaggcgaaggcgaaccgcaagcggtacgagccacgaccccggcggccggacaacccgacgactgcgggcctgttcagccagtaccagcgtgagcgacaggcggccattctggcccgccgtcagggcctcgaccagatcaagcgcgagagtgcggctttcaatgcgcaggtgaggcagtggagccagacagagagaatgcttttgaaggtcgcgggcaaggggccgaccaaacgcctgatgtacggcactatcaaacagcaggccgacgcctcgcgccagaaaaaccggcagagcgcagacgctcgccgtcaggcgctgttcaaacagacgacgatgcccacttgggccgactggctgacgcagcaggccgagcgcggcaatgccgaggcgttggccgtgctgcgcgaccgcgaggaacggacacgccgctggaacggggagctactgaccgccgaccgggccgacaaggccaaggctgtcgttctcgacaagctcaagcccaaggcccggaaagacggaacgatggcgtacagcaccatcgacggcggcatggtgatcgaccggaagacccacgttcaggcgcagaaagccacgaccggcgcggcgctggttgcgctcgaactggcgtccaagcggttcgagggtcaagccctcatcgtggaaggcacagacgagttccggcttgaagtcgcccagctcgccggtatgcacggcctcaaggtcacgttcaccgatccggcgatggagcaggtgcgccgcgagacggccgagcataaggaaatggagaattcaggtaaggctgacgcaaggaaaacttctcgccgtcgcggcagcaaagatggtcagagtgcaggggtggagatttga

SEQ ID NO: 223079 - DNA, 381 bp, Klebsiella pneumoniae
atggccggagaaaatgcgattgaggctatcaagccgcattcgcgtgggacacgtccacggcgcgagcgaattgaggtttgggtcagcattgatgagaaaaaagagttagccgaaagggccgatcaggcaggattgtcgaatgccgctttccttcgcgctgttgggctgaatctgcctataggttcacgggccgatttggaagctgtccgccagttggcaaaagtgaatggcgacctaggccgagtggccggattgctgaaattgtggctcgctgagaaacgcggtcagggcgctcgaccgattgacgtggaaacgatgatgatggatttccgcgcaatccaagaggacatgcgggcgctcatggggaggatttccaaatga

SEQ ID NO: 223080 - DNA, 210 bp, Klebsiella pneumoniae
atggcacgaaaaaccctcgcagagcgccgttctgatgccctttcggagcttgaaatggcgaaagccagattggcaaaactcgacaatgaggcagcagaaagaatcggaagaattgcaataaagtcaggattggttaatcttgagctgacggacgatcaagtccgggaagaattcgacaaaatcgtggaaaggatcagcaaggggaattga

SEQ ID NO: 223081 - DNA, 792 bp, Klebsiella pneumoniae
atggaactagaatcgcaaaaaatgtcggcttatgccgcccgaaaattcggtcgaggcgcggcgctcgctcttgcaatggcaagcgcaggccttggtgtaagtctctacatagcaccggctccggcctatgccatctactgctcgaactgctcgacgttctatcagcagatgtacgagtacgccgaagcggtgaatacgcaactgaacaccgcgcagcagttgcagacgcagatccagcagtacgacaacatgattaagcagggcatgtcactgcccagccgcatgttcaacaccatcactggcgacctccagcgcgtggccagcgtctacaactcggcgcagtcgctcggccgcaacatcagcaatctggacgaacagtttcgccagcagttcaagggctatgacagctatctgaactcgattggccaagggcaaaacaacatgccgcagcgctatcgggactgggcacaatccggcttcgataacgcccgcacggccatgcaggccgctggcgtaaataccagcacattcgaggatgagaacgcgatgctggatcagttggtgagccgttcgcagtcggccgttggccgtcagcaggccattcaagccgggaacgagattgcggcgcagaacgtgcagcagctccagaagctgcgcgatctggtagccacacaaatcaccctgcaaggcaactacatggcgcagcaaaacgaacgacagtccgttagcgatgcctccgaacagcaattccgcagccgtgaaaatacacgcggcccgtctgaggggttctaa

SEQ ID NO: 223082 - DNA, 183 bp, Klebsiella pneumoniae; identical to SEQ ID NO: 17383

SEQ ID NO: 223083 - DNA, 1644 bp, Klebsiella pneumoniae
atgcgacgttcaaccgttttcgcacttgtcggcgcggtgctcttgctatctgcaactagtgcgatggctgccggggtcgatttggcgcagagcaacacgtctatgaacagccttctgcggctgattcagaacgcttcaaaccaatgggcaccgcgcctgcatgactacgccttgtggctcttgggatgccttgccgtcatccagttagtttggacttttgctcctttggtcatgcgcggagctgaactgggcgacatcctccatgagctggtgaaattcatcctcgtgatagggttcttctatgcgatgctcgagcacgcgaccgagtggggcggggccatcgtcaacagcttccggcaggccggggcgcacgcggcagggttgggtagtgcggagctgatgccgggggatatgttctcaactgctgtggacttttcacggcaggtgctgacggccggtgtttcgatgttcagcccaatcacatcggttgtagtggccgtatctgcattgatcgtcctgatatgtttcacgtttatagcggctctggtgttcgtgacgctcgtagaggcctacgtcatcatcaatgccgccgtcctgttcatgggtttcggtggctctcaatggacacgcgaatatgcactggctcccattcgctatgccgttgcggtaggtgccaagctgtttgtcctgactctgattgtgggtctgatcatgcaggtttccgcagaatggtcggcagcctacaccaacgacgaagcgtcgttgatgaccttggtcggcctgtctttggtgtgcgcttacctgaccaaaaccatccctgaactgatcggcggcatgattagcggcacgtcgatgggcggcggctctgcaattgggggcatggccgcagccggtgcagccggtgcggcggccgcaatcgctactgttgcaacagctggggcagcagccccggctgctggagcactaggggccgcgggaactggcggaggcgctgccagtgccgcgggtggtggactgtcctccgcattgaacgccagcatggcaggcggcagtaccgcagggggcatcggtggtgcgacgggcgtcggcagcactggaattggcgcaagcacaggagggggcagcggtgcgaccgcaaaggccgcaggttctcgcgtcgggggtggtgccgcgtcaggatcggaaaatccagtgtcggcggccgcttcgcctgctagccaagaatcaggcagcagcttgaagcaagccgccaaacaggccggaaaagctgcgaagggtggtgacgacgatatggatcagcaagccgtcgcgcagcaacggcagatgacaccaaaagaagggactggcggcaacggcaaggctgttgcgcagggcgccgaggtggccacacgggcgcttggcgtgctgggcgctatcagcgtacccggcatggaaagctcccacgggctttcgcttgggggcaccggttctccccctccagtccccggcggtgacagtccaacgcctgatgacggcgcggagccgactgcacaagcggaatccaacattattcgtccggcatcggacaccactagcaccggagacgtcggcgcgctcaatgtgcccggcatggcttctagcgttaactctcaatcggagacgtaa

SEQ ID NO: 223084 - DNA, 327 bp, Klebsiella pneumoniae
atgatgaacgatatattttttggcctgatgatgctcggcggcttttttgttctcggtattggtatgtgggcgcttggtcaatggctgcgacgcaaaggcttcggcccgcagctcgatgcactggataagcagtacacggcactacagcatcgtgtgaaccgattggctctgcctgccgctgcgcatttctacggcggcatgggtatgcttaatcgcatgccacttttcggcaacaagaatcaggtggtactggtagagcgtgtgagaatggccatccttcagatggaagaggaagaacggcagcgaggcagggtcatcaatcgctga

SEQ ID NO: 223085 - DNA, 984 bp, Klebsiella pneumoniae
atgccgcagccgcatattagaccggcttacgctcggctcgatcctgcccatgcgttcgacggactattcgtacccacgaagggcaagccgcgcggacgtttgctcgtggagccgcgccgcttcggtaggctcgaaatcggctttcatggcttcgagcagcttggagccgatgatcaatcgatcctgctggcattgactgctcagcttggcatagagcgtcttgtaattgaagctaccccagtcgggcctgtcagcaaacagttgcgcctcgcgctggactttaaccgagacgaaggcgcaccgttggcgaccaagcgcaccagtctgcgaagcctcctgatcgacgccggatatcgagaccccgaaagtggagctgcgcttgcaagagcgaaaaagagtctcaaccggctgcgggcaacacaaattcgggaaatcgatagggaaacggggtgggatagggcctgcaaccttatttcgcttagcttcaaccataagagcggggaaatttatgtcgccgccaatcctcgcctgacgggtgcggtttttcacggacagcatgtccgagtctcgttgttcgagcggaacgcactggaaacggaggtcgccaagctgctgcactgctggctatgctcgaatatccgacttggccgagcgctggggaacggcaatggagcacacctcgacacccttgcgcctcacgtctggggcctagtggcatgggagcgcttctccgcgtcggaccgcagtaaaaggcgcggccagctgcgagcggcattggatgaaatcgcagagcgcacatgcggcctgcaagatggaatgggctgggccatcgaccagaccagcagcgggctggtgttggtcggccgccccaaggtgctgccacttcttgaaagcgagcacgaaacgcctcccgccggaatgtacggactcacaagtcagtccgaccgagagccgtcctccttgtcagattggacgccgaattga

SEQ ID NO: 223086 - DNA, 540 bp, Klebsiella pneumoniae
atggacgtgatgaacgaaagtaagcgggccgaggtaatcgagcaatgcgaaggcgctcgactaatcgttctggacacgttgagccgtattcatacccttgatgagaacagcaacggcgagatggctcagcttgtcgctaagcttgaggaaattgcgaccattactaaagcgtcagtgctttatctgcaccatgtcagcaaaggcagcgctcgcgacgggcaggccgatcagcagcaggcagtacgtggtgcctcggctcttgtcgataatcccagatggtgcgggttcgtcgcgaaaatgactgacaaagaagcgcagaaccatacggaccgcgcctatgaccgacagcctatcggggaagaccgccggaagttctttgtccgttttggtgtcagcaaacagaactatgccgaaattgacgacgatcgttggtatcaacgtcatgacggcggcgtgttgctgccggtggagttgttggacgccaagcaggagggtgcggatcggacccgaggcaagggccatgccgcagccgcatattag

SEQ ID NO: 223087 - DNA, 231 bp, Klebsiella pneumoniae
gtgaaaaaagaattaaggagagcaagtaaagttctcattagcaaaaagcaactgctggagatgattccgctgtgcgagcgcacgatctacaactttgaaaagcaggggaaattccctcagcgcattgcactcagtagccgcaaggtcgtgtgggatttggctgaggtcgaggcatggattgatgcgtgcaaacattccagcccggcccctcgccccggaatgggggcctga

SEQ ID NO: 223088 - DNA, 1257 bp, Klebsiella pneumoniae
gtggggctttttgagcatggtatttttgagaggaaacctaacccgaccatgctgaccgataccaagctgcgcaacctcaagccaaaggacaagctctacaaagtgaatgaccgtgacggcctctacgtggccatcacgccagcgggttcgatttcattccgctacaactactcgatccacggtaggcaggagaccatcaccttcggccgctacggtgtcggagggatcacgctagcggaagcccgcgaacggctgggcgaagccaagaagatgatcgccgcagggaaatctccagccaaagagaaggcgcgggacaaagcccgcgttaaggacgctgaaaactttggtgcttggggcgaaaaatggctacgcggctatcaaatggcggacgttacccgcgatatgcgtcgagctaccttcgagcgcgagcttaagccgaagttcggtaaccagaagctgacagaaatcacccatgaggatttacgggcgctgactgatgcgattgtggagcgcggcgcaccggcaacggccgtgctttgccgcgaaattgtgatgcaggtcttccgttgggctatagaacgcggccagaaggttgagaacccggccgatctggtgcgcccgtcgactattgcaaagtttgagccgcgagatcgagcacttacgcccgatgaaatcggcttgatgtaccagtacatggagcgcattggcaccacaccttcgatccgcgcggccgccaagttgctgttgctgacgatggtacgcaaaagcgaactgaccaacgcaacgtggagcgaaatcaatttcaccgaagcgctctggacaatccccaaggagcggatgaagcgccgcaatccccatctggtgttcctgtcgaggcaggcgctcgacattttcatagctctgaaaaccttcgcgggcggctcggagtacgtgctgccatcgcgctatgactcggacttgccgatgagcagcgccacgctcaatcaggtgctcacgctgacctatcgtctggcccagaaggaagggcagtcgcttggcaagttcggaccgcacgacttgcggcgtacagccagcacgctgctgcatgaggcaggctataacactgactggatcgagaagtgccttgcgcacgaacagaagggcgttcgagccgtctacaacaaggccgagtaccgcgatcagcgccgggcaatgctacaggattgggcggacatgatcgacgagtggacaatcaggaagccccgcctcaaggactga

SEQ ID NO: 223089 - DNA, 546 bp, Klebsiella pneumoniae
atgtcactgactgatattaaagcaaaaaatgccaaaccccttgagaaggaatacaagcttactgatggctttggtatgttccttcgcgttaccccgaagggttccaaatactggcaaatggcctaccgttttgaagggaagcaaaaactcttctctattggtgtttaccctgctgtttctctttctgacgcaagacaacgccgtgatgaagccagaaggcttcttgctcagggcattgaccctaatgccaagaaacaggcagaagttaaagagctaaaagctaaacgtgataaaacacgctctttcagcgtagtcgctaaagcttggttctccacgaaaacaaaatggtctaaagattatggtgattccgtatggaagcgccttgaaacctatgtcttcccgacaattggcgataaagatgttgccgaactggatacgggtgatctgctggttccagtgaaaaaggttgaggcacttggctatcttgaagttgccatgcgcattcaacaatacattactgcgatcctgcgtcatgctgttcagtag

SEQ ID NO: 223090 - DNA, 1437 bp, Klebsiella pneumoniae
atgtccgttttgcataaaaaaagcgcccgcttgcgtgacgaagagcgcgcccgtctgatttggctcttgagcaccgataaagcggtgacttccgcgctgctgggcaaactgacgctggctgagcgctatgatgaagggacgctggccgatgacctggccgaagtggaaatgctggtctcgcatctgccgccgccggatctcgccgatgcgctggaagcgcttccctatgacgcccgcaccgcgctatggtgcctggtgcccgacgataaacgcggcgaagtgctgctggaggcctcagagaacgtctggggcgacctgatcgacaagatgagcgaccccgagctgctgcaggccatgcagccgctggatatcgatgaacaggtttacctgctgcagcatctgccgcgcaacctgaccggacggctgctggcgaccctgccggccgagaagcgcgcccgtattcgccagattatgcgctacgccgacaacagcgtcgggtcgatcatggagtttgaggtcattacggtgcgaccggaggccaccctggcggcggtgcagcgctatctgcggcgtctcggtaaaatgccggaaaacaccgataagctgttcgttaccacccgtaacaagctgctgctcggcgagctggagctgcagaccattctgctcaatgatgcgcagaagcgggtgggggaggtgatggagggcgacccggtcacctttcagccgcacgaagaggcggagaaggtggcgcgcaccttcgaacgtgatgacttgctcagcgccgccgtcattgatgccgacggcaagctgatcgggcgcctgaccatcgatgagatcgtcgatgtggtttatgaagaaaccgataacgatctgcggcggatgggcggcctgagcgatgaagaggatgtcttcgccccggttagcaaagcggtgaaaacccgctgggcatggctggcggtcaatctgtgtacggcgtttattgcttcccgggtcatcgacggcttcgaacacaccatttcacagctggtggcgctggcctcgctgatgccgatcgtcgccgggatcggcggcaacaccggcaaccagacgatcaccatgatcgtccgggcgatggcgctgcagcagatccagcccggcagctttacctttctgatcctgcgtgaaatgggcgttgcgctgattaatggcctggtgtggggcgggattatgggggccatcacctggtggctgtatgacgatccgcagctcggcggggtgatgacgctggccatgatgctcaacctgctgatggcggcaatgatgggcgtgataatcccgatggtcatggtgaagttggggcgtgacccggcggtcggctccagcgtaatgatcaccgccatcaccgacaccggcggcttctttatttttctgggtctggcgacgctgtttctaatgtag

SEQ ID NO: 223091 - DNA, 1053 bp, Klebsiella pneumoniae
atgcgcttgaacagtcttcctggatacgggctcccagaacttgccttctggccacaaccttggtacgaaacagatctatggtatatgtacagcttgaaacttcgaactgatggaacacttcattggttcaagcatcacttagaacgtggcatacctcctcatgcatatgctcacacctatgaaaattacgaagatgccagaaaatcggcaattgagatgaataaaaatattgatgttgataaatacattttatccctaccagaaaaagagtcattgcgtttaaaagtggataaagccctcactgctaaaatacggttgatggatgaagagcaaatgatgctcaatgaagccacaatgaaacacactaacgatccgcgtatttttcccgaggagttaattcttaagcccgagttagagagtttacgggagcctctgctcgacgctctcaataagaggccatatctccgtttcgtttatctaccgaggtaccaaatttgcctgcaactcggtgaaaataactcttgggagcgttccaatcttattagttcaagagcggcaaaaatcttctatcaagagcgcattgctagaggttttggattgtctggaggagcacattgggggaaaacaaaatcagctatacgatcgatgctccttccacgtgccaaccaattgctgcagctagccagtgtaaaacggatgttggatgaagccatcagaaacggaaaaagagtcctcgtttttagcaattacgttttctggtacgaggacaaaaaccaagttggatggagcgttaaggagctcagcgagagcgaggttacctcaaggggtaatactatctggacgaaagggacaattatttccaaaaatcatgggcggattgttgtacttccgtacactaaggaaaacggcgaacacgttaaaggctataccaagaacgcaccgaatgacggtaaagcgctgcctaggcataaagacgaatatgttgagcttcccttcgaaattctggatggtgatttgatgttcagtttattcggtgagcttaactatgagtaa

SEQ ID NO: 223092 - DNA, 474 bp, Klebsiella pneumoniae
atggataaccctactctgggtggacaggaacttcgggacaaaattttttccggactcaaagtctatgaaggtaaagcctttatcgagcggtttggtctgtttatgggcaaggcgcagttgcttgagtttgggctgaaaaaaatcttagcttcactaccgggctataatctttcagaagagaaactagagaggctgactttaggccaaactcgagttgagcttgagaagctagggctacgcacggactataatgaatgcctaaagtcatttaaggataagcgaaattcgatggcgcatgaattcctggctaattacgcgatcactcagcaactactagacggacctgtgcttattggtccgtttgagcgagagttaactcatgcgagctatgaattggaacaactgatcattgttttcgactttatcaatagtaacggtgacgttactgcttggctggaaccgaaagccctttga

SEQ ID NO: 223093 - DNA, 1179 bp, Klebsiella pneumoniae
atggccgccagaccgagaaaaagagaatatcgtcatcttccagaatacttgttatttgataaggatcgtggcgtttataaattcacactaataacaggaaagaagaaaaatcttggtaaagaccgggctatggcgatcgctatagctcgagaatataatctaaggatgaggccattaaatgcgccatctgttgaattgttaattcgagaatcaggcggcgttactggcgaggctaaaccatttgctgcgcacgtagatcatatcatgcagcgggcaatagagaatgagcgaccgtcaccaaatacccttgatgactggaacaacgacgcacttagggtaaaagaattttttaacagcataccttcttgcgatattgagttggagcatgtgaacgcatacataaagcatttccactcagactcttcagcgaacgtacaaaaccgaaaggtcagctttcttaaaaaattgttctcatatgcggtcgatgaatcacttatgtttgataaccctgctgcccgaaaaaaaatgcgaagaactgaggagaagaaacgccagcgtctttcgctcgataactttaaagccatccggcgggccgccgccccctggttacgcaccgcgatggatttagcattgcagacgacacacgctcgcctcgaagtttcacgaatccgatattcaattagtgagccaaaggatggtgtatgcggctgcgtatggctggcacagccggaaaacgggatttatggcacgctgtacatccaccgccagaaagtacagaaaaaagaggcctcgcatgtcgcaatcccgatcggggaagaattgaaacggattattgacgaaagccgcgataatgtggccagcccgtttgtggttcatcggatacctgatcggcaggttaaacgaagtaaagaagtttcacaccctacccaggttgcacctgattatctgagccggtcgttttccgcggtgcgagataaacttggtatatgtgacaaactggcgatggatgaaagaccaacctttcacgaaatccgagcgttggccgctcacctcttcgatcaacagggtatcgatccacaagggcgaatggcacatagcgatgctaagtcgacaaagatctatacgcaaaaccatattgattgggttgttgtccctcacggagaaattaaagctgggtaa

SEQ ID NO: 223094 - DNA, 210 bp, Klebsiella pneumoniae
atggcaaaactaatgaaagcgagtcaatggggaaaacgcgaatttaccaaagactcaattccagataacagaaccattaaacgttgggttgaaaatggcctactcacaggaaaaatcgtcgacggcactgtgttcgtctacgagtctgaaaagtggggagttgactcaatggttaatcatacggttcttcagctaataaatgaaggttga

SEQ ID NO: 223095 - DNA, 219 bp, Klebsiella pneumoniae
gtgaataaggtcgaactgcttgagaagatatcggcgctcgctactgaatgccacacgctggcttgtgagcttgatattggtgatgagcgaaccgaaatgttcgaaatctacagcgtgctacacaacctcggtcgccgtgggtacgcctgccaggtagggcggcgaatgaatccattgctcgcatcctgcgatgacgacgatgatgaggatgatgactga

SEQ ID NO: 223096 - DNA, 663 bp, Klebsiella pneumoniae
atgaccattaaccagttaaacagagagcgcctagaaaaaattaaatcatggcgtgaaacctacggcgccggaagcaacgtaatgctgccagctgaggaggccgaggagctggctcgtatagcgctggccgcaatggacagcgagccggtggcgtggacatggcactatcgtgagcaatggcatgtcacaaacgataaatgccgggcagaatttgtcgcaacagatggtgatgtggctgtactgccgctctatcgccacgcgcagccagcgcctgaaaaatacaacatcggtgatgccaccatgcgtcatatattcacaccaaccggcatgactaatgtctctgacatgcaggcggtatttgaccgagttgaagctgttttggtgggaatgaatcagcaagcgccggtagtgcctgatggttacgtgatggtgccaatgaggttaactgctgagaacggcgctaagggggcgctatccggtgagttttcagaaaccaagttcgtaaactgcccggaatgctttggtgctgatgaatgtgaaacctgcgatggcagcgggagaattgaaattacggtacctgtcacctggacgactatcaaagaaatctgggctaaaggcgttgagcatttctcagccacaccaagagaggtgaaaagtgaataa

SEQ ID NO: 223097 - DNA, 228 bp, Klebsiella pneumoniae; identical to SEQ ID NO: 186299

SEQ ID NO: 223098 - DNA, 564 bp, Klebsiella pneumoniae
atgactgatatcaccgaactggcgcagagagagaaattcgaaaattgggcccgcagtcagcaactcagcctcgcttatggcgactgcggttatttttattcctcaacggaaatggcctggcgtgcagttaaagcgcaaagcgctgagctagtagaggcgctggagaaggcgcagcatcggattgatgaactggagaatgatgaagttcgccagcgcttggctaacgcagagcaccaactctacatggctgaactggctaagcataaccttaaagcaagccgtaaagcccagttctgcaagcgtagagcagccgagaaacgcatcgccgagctggaagaagcagagcaaaaactctgtgccgctaacgtgacgcttgatgctcgcgcggaattggctgagcgccagctggccgagctggagtcccgctccgtcaccgtgaagctgcccgacttgcggcaggttgtgtctggagacagatacgtatggtctgatggagtttttaactatagccaagacgttaaggctgagctgaccgcgaagggcatcaagtgggaggctgagtag

SEQ ID NO: 223099 - DNA, 270 bp, Klebsiella pneumoniae
atgagcaaatcattcatcgtaattatccggcgcgcctggtgtaacgaaggcggacacggtatcgaatattcatctgaccttattcactacgagacacgcaatggagccatatcacacggttttcgggctgtggatagcgacgatttcaatgtcggcgtaatcgagggcggcaagttgatttcatttgactggatggacaagccggttggagaaagcgaagacacgctggcgcagattgccgagctaatcggtctggaggatgcagcatga

SEQ ID NO: 223100 - DNA, 135 bp, Klebsiella pneumoniae
atgaattttgaacctgagaattacagcaaatacaccctgcgtcggttcgccgacgtgttcgatgtgatctgctgggtgctgattgccgtagtaaccgttggtatctgcatgtttattgaatggtggacagcatga

SEQ ID NO: 223101 - DNA, 801 bp, Klebsiella pneumoniae
atggggttaaaaaccatggctaaaaactcgatcgacgtgtacggcgccagcggcaaaaccaacgctctttcgttcgaaccggaaaagcttcatctggtcaccgataagacccaccctctctacgatgagcgggtccaccttcctatcgacgaagggatggttctgaacatcaaggagctgggcgtacttgagccgattatcgtctggaaagactctgaaacgggtctcacctgcgtagttgtaggccgtcagcgtgttaagcataccctggaggcaaataagcttcttttaaaagagggcaaagccccactgcttgttcccggagtcgttaagcgcggatcagcaaatcagatggctaaatacatggtcagcgaaaacgaaattcgccgtcctgatacaccactgggccgggctaaaaaaatgtcagacgcgctcgaccgcgggctcgatgaggacgacattgcggtgttgtttggctgcagcgttcagaccgtgcgtgcaacgctatccctgttggatgccacacaagccgtccgggaagcggtagaggctggcacaatcaccgttacccaggcgcgtcagttggcatcgcttaaacccgaagagcaacgggagaaggtcaagcagatcgagacagcgaccgccggcaccacgggccatgaaaaagcccggcgacagcgccaggttcttggtgaagcaaagccgcgtatcaaatcacgcaaggaaattacaaaagcccttgagggtgccagcggtgaatacgctgatgctctgcgctgggtgcttggggaggcgcaatga

SEQ ID NO: 223102 - DNA, 201 bp, Klebsiella pneumoniae
atggcacatatgaaagttaaagaactggtcgctgcagcttacgctgcggcacccgatcttccactggaaaaagcagagttaatgcgcaatatcgcttcacggctggatgtaacgttcatcgcccttaccgaagcaatggaccaaaacacagcgcaggcagcggtgctggcaggcctgaatggggttaaaaaccatggctaa

SEQ ID NO: 223103 - DNA, 528 bp, Klebsiella pneumoniae
atgagctttattcaaaccctttcaggcaaacactttaattatctcgatatccggcaagacgcgatcgagatagaggatattgcaaccgccctctcgcatatctgccgatttgccggccacctgccagagttctacagcgttggacagcacagcgttttatccagcctgctcgtaccgcaggagttcgcccttgaggcacttctccatgatgctgccgaggcttacctgcaggatattccggctccgcttaagcacctcttacctgactatcgcgcaatagagactcgggttgatgcagcaatacgtcagaaattcggcctgccggctgagcagcacccgaccgttaaatatgccgacctggtgatgttggccagcgaacgtcgtgactttgagatcgacgacggcactgtctggcccatgctcgaaggcattattccgacggatcaattcgttattaatccggttcgcccaggccaggcctacgggatgttcatgaaccgcttccaccagctgatggagcggcgctaa

SEQ ID NO: 223104 - DNA, 831 bp, Klebsiella pneumoniae
atgtcccagcaattagacagcagcgcaattaaccaaattaaagacctggtgctttcaggataccacctgaacgacattcacagtctggcctgcccgacaaccattctgccggaaggtacggccgtcgcgagccttgagcgtttcgcactggagcgttaccggttccgcggcgccatggacacaaccagcattgacgatttcgttcgctattccgttagttatgccaaggaagacgaaaaagcccgttgcttcatcgatgccgataacatgctggcgcgctctatcttcaacatcggaacgctggataatcctggccacgctgataacgtcgcctcgatcaagctgaagaaaacagccccattccgcgcgctgctgtcgatcaacggtgaccacctcaaccagaagcaaatcgccgaatggctggaagactggagtgattacctgactgcattcgatgccgacggtaacacgatgaaaatctcccaggccgctcaggcagttcgccgcgtcaccatccagcaaactaatgcctccgatcatgaagatggtgatttcagtggcaaaaaatcgctgatgcagagtatcgaagccagcagtaaagacgtgatgccggtggcgtttgagttcaaatgtgtgccgtatgaaggtctcggcgaacgtgcattcagcctgcgcaatagtctgctgaaaagtaatgacccggtatttgtcctgcgtatcgtccagttggaagcccaggaagaagcgatcgccaatgagttccgcgacctgctgactggtaagttcgatggcaaaccggtcgagaccttcatcggtactttcaaagcctaa

SEQ ID NO: 223105 - DNA, 372 bp, Klebsiella pneumoniae
atgagcaatgatcgcatgaccaatgttccagatttcctgggcgaactggatgctggcgtgttcatcaacaagatcgccggggcgctcaataccgccgcactgggcgttttgaacaatggcagcaaaggcaaagtagtactgactttcgacatcgatcgcatgggcaattcgatcgaagaaaagcgagtcatgatcaaacacaaactgcagtacatcacccccaccccgcgcgggaaagtttctgaagaagacacgacagaaacgccgatgtttgttaaccgcggcggcaagctgaccatcctgcaggaagaccagggcaacctgtttactctgagcggggatccggatgcaaagctgcgagcggctcagtag

SEQ ID NO: 223106 - DNA, 633 bp, Klebsiella pneumoniae
atgagccttgcagaacgcgtaaagcaaaaaagaatcgaacttggtcttactcaagagcaagcagctgaaaaggcaggaataaggcaacaatcatgggccagcattgaggatggtaaaactaaaaagcctcgcaacattgtaggaataagcaaagcacttaagtgtgacccaacatggttgatgaacggtgggcctttcatggctcttgccgatgtgaattcaaggaaagtgcctttgatcagttacgtccaagctggggcattagcagaaaaaaaccctattgatgcatttgatggtagcttcgaatacatcatgacagacattgatatttctgagtttacttttgcactaaggatagaaggtgattcaatggagcctgactttaaagaaggcgatattatcattgttgatccagagttagagccagttccgggcgagtttgttgttgctaaaaatggtgataatgaagctacttttaaaaaataccgtcctacatttactgatatttcaggccgccagcaatatgaactggtcccccttaatgacgactaccccaccattaatagctctgaacgcccgttgaaaattatcggcgtaatggtcgaacatagaatttacaggcgaaaaaggtaa

SEQ ID NO: 223107 - DNA, 231 bp, Klebsiella pneumoniae
atggaatcaatttctcaaagattaaagaataaacgtgaagagatgaatctctcacaggcgcaattggctgaattggtcggaatgacccagcagtcattacaagcgatcgaggcgggttttacaaagaggccccgttacatcatcgaattgtcttcagccctgcattgcgatcctcattggttgctctatggcgagggtgctaatcagaacgatagcgcttcaggggtgtaa

SEQ ID NO: 223108 - DNA, 468 bp, Klebsiella pneumoniae
atgactttgcaatctgcgtacgtttcaattaaaaattccctcatggcgagttatgcaaatacctatcgggaggaagtcgggtattggctacagaacctgattgccgcccgttcgattcaactcaccagactttatgcggtcacccgccagtacaaaattgaaaatccagaactcaacctgaacagccgggaagcgatcattcatttgcttcatgcccactctggggttgtgtttttatcccttgaaaatattcccgcttctcttgctctgaaactcctgggtccgtgtttagccagtcaacaggtagcggccagcgacgggtttctgaaatctgaagagtcaatgaatcaatggattgacggaaatcgtgaactgattgctgaatctcacgaagtaggcgaaggtcttcctgagttgagttggaatgatcttccgaacgaattatttccgggcttgaaaggtaagtaa

SEQ ID NO: 223109 - DNA, 549 bp, Klebsiella pneumoniae
atgaatgaacctgaatggaaagtggataagcagccggcatggctggtggcctctataaaaaaaacgatcactgatttggacggtggttacgtggaagcagcggagtggctgggcgttactgaaaatgcattgtttaaccgtttacgcgccgatggtgatcagatttttcctctcggctgggcaatggttctgcagcgtgctggtggatcaaaccacattgccaatgcgatagcacgccattcgaacggggtattcgtgccactggccgatatcgaggaagttgacaatgccgatattaaccagcgcttgatggagtcgatcgagtggataggaaaacactcgcagtatctacgcaaagccactgctgacggtgttatagaccaggccgaacgtgagcagatcgaggagaacagttaccaggtcatggcgaaatggcaggagcatttaacgttacttttccgtgtcttttgtcagccagaaaagagtgacgcccgcgagtgtgcagctccgggcgtcgtggcagataaatcaacgtgtatggagaaataa

SEQ ID NO: 223110 - DNA, 180 bp, Klebsiella pneumoniae
atgcgcgaagttaaccgaaagttcagagaccactatggcaagcccgtcagagtcatacggtgggaacgtgagaccaatcgtgtcatttacctcagggaaggctatccgcacgagtgttttagcccactcgatcagtttcaacgaaaattcagggaagtagagggcagccatgagcagtaa

SEQ ID NO: 223111 - DNA, 912 bp, Klebsiella pneumoniae
atgagcagtaaattacacggtctggtatgggaagcctgtgctttcaaaggcctgatcatatctgaaatagcggtcatggcccgcctggctgacttcagcaacgacgaaggaatatcgtggcctgctgtgacaactattcagcgacagatcggggcaaagagcgagaacactgttcgaagcgccattaaaaaacttcaggcgaaagggtggctgaagaagcaggagcgtcgcgtaggcggcaagaataattcgaacgtctacaaactcaacgtcgatatgctggaacgtgcagcagctgaagcaaaactcttctacgcaaccccgcgtgaacaatcaaaatttgatgcctcagaaattgagggttcaaaatttgaggggtcaaattctgacgcctcaaataatgggtctgcatcccctcaaatattgcggggggacccctcaatggttgaaggcgatccgtcattagatccgtcattagatccgtcatctaaaaaacctttttgtcgggctcctgcggaacccgacgataagccggatcctgaagtggtgatcactgaccatgcgatcgaagttctgacgcatctgaaccaggtcagtggctcccggtttcagaagtcaaaaaattccctcgaaaacattcgggcacgtctgcgtgaggggcataccgttccagatctgaaactcgttattgacgttaagcatgagcactggcatggcaacgacgagcaataccagtacatgcgccccgagacgctttttggtcctaaaaaattcgaaggctatctgcaaagcgctatccgctgggatgccaaagggcgaccgccacgggaatcctgggacagaagtaagccgcgtgatatcaaccaaattggtgcagtgcaaacgatcataccgaaggggtttcgtggatga

SEQ ID NO: 223112 - DNA, 459 bp, Klebsiella pneumoniae
atgaacattactcaaatggcctttgaattcattgctaaaaacccagatcagaaaatgcgcgatatcattgccgcctttcctgactgcaaacctgtttctgtgaaaagtgccgtatatcgcctgtacacagaagggcgcctggaaacaaaagcaacctcatgcggttttatttatcgagtcatcaatgatgcatcctgctgcgatgacctacaggacgactttaagtccaggggcaaccttgaacaggaaaaagccgctaaaaaactcgaagagcgcagcctgtatcgccgggccgctactgtatggcaccagctcagtacctcaagctgcagccagaaaactctcgagtattacattcgtcagaaaaatgcctgcctccggaaagcacgcatggggaaatcacacactgagtgtctgttagccgggaattactgcggaggtgatctgtgcatcgactga

SEQ ID NO: 223113 - DNA, 1383 bp, Klebsiella pneumoniae
gtgcatcgactgaacacgaccagcgaaggggaaatgctggtggatgaggccgaactcccaatcaccagaagccaatactgtgatgctctggatgcattacgtgctgcacctgcccactatctcaaggaggtgggcgaccagtggagaacgcccgatctgttgttctggggggttaacgctatgtatggcccactggtgctggacctctttgcagacgaaagcaacgcaaaatgccctgcgtggtactcagcagaagataatgccctgacgcaggactgggcggggcgactgatagaactcggcggcgcggcatttggaaatccgccgtatagccgttctcagtatcacgaaaagcaggcgatcacaggcatgacccacatcatgagttatgcatccgctcagcgtgaaaagggaggtcgttatgtctttctggtgaagtcagcgacgagtgagacgtggtggccagaagatgcggatcatgtatgttttatccgcggtcgcatcggtttcgatctgcctacctggtttaagccggcggacgataagcagaagccgaccagcgccttctttgccggggcgattgttgtattcgataagtcctggcgaggtgagcgctttagctatatcgatcgtgtggctcttgaagcgaaggggcgcgcgagtatggccctggcccagtacgccgtgggtaaacaggcaacagctccagtaatggatcagcctcagacagagcaagctgaaactgaaatcccacttcttcaggacgaaatcctcgcgaaaagcggcatacgatcctgggcttgcgtggttgcggcttttggagataaagccgagtacacctttgccgagtcgaagtttggtcatacctgggcggctgattcagtggataaaccggagtttacgccggttaaatcagaaacgatcgccacagctcaatccctgatcatcaaacaaactgcgaaacaagtgctggtgggctggcttaacggtgttgatcttggatccgcaactgcacgtgaagaaaccatagaacgcatgaattcggtgtatgcagagtttatcgacacatgcccggtcactgagttcatcgatattgttggcagcctggataaagcaagctggttcaacagcagactgatccgcagccatgttcgggaagctctctcagttgccaaacagaccttacccgaaagccggatatggccactggaagtaggcctggtttttgagcaagtcgaaggcgtgaatcatcttaacgagtctcagcaaaacaagctgaaggcacacatcaatcagctgtggcttgagcgtacgcccagtaccgaaatcataactattgccagcggactggtcagcagtatgcagggggttagccatgcgtga

SEQ ID NO: 223114 - DNA, 1971 bp, Klebsiella pneumoniae
atgcgtgaaattatcgttgataactttgccggaggcggcggcgcttctaccgggattgagatggctcttgggcgtagcgtcgatattgccattaaccatgatgaaaacgctgtggccatgcaccgtaccaatcatccggataccttgcactactgcgaaagcgtgttcgatgtttctcctggcgcagcaaccagcggcaaacctgttggcctgacctggttctccccagactgtcgccacttttccaaagcgaaaggagctaaaccagttgaaaaagcgattcgtgggcttgcgtggatcgttcttcgctgggcgctggatgttggtccgcgggtaatgatgctggagaacgtcgaagagtttaaaacgtggggtccactactggcggcggaaatgcgtccggatccggaccgcgttggtgaaacgttcgaggcgttcgtaggcatgctgacatccggagttccagcggatcaccctgcgttgttggaatgctgcgaatttttggagttatcgccggatagcgaacaggcgatgcgtttgattaccgggctgggctatgacgtcgattatcgcgaattgcgcgcctgcgactacggcgcgccaactatccgaaaacgtttcttcatggttatgcgacgggacgggcagtcgatagtctggccggcagctactcacggggatccgaaatcgtcggcggtgatttctggcaaactggcaccatggcgcacagctgcagaatgcatcgactggtcaattccagcgccaagcattttcgaccgcaaaaagtctctggcagagaatacgctgaagcggatcgcgcgcggcatccaacgctttgttatcgagagcgcgtcgccgtttatcgtgaagtgcaatcacactaccactaaaggcaaatacgattgcttccgggggcaggctctctctgaaccgctgcagacgattacgaaaacccacggctacgcaattgcggtacctcatctgacaaagttccgcaccggcgcaaccggacagccagtcaccgaaccggtaccaacggtgacggctggcacgtccaggcgcccgggcgggaatggtcatgcgctggggtttgttgaggcgggccttgtccctttcctcgctggcaacggtggcagcgaataccaggcgaaaccgcgcccgcttgataaacctgctcacaccatcctgaaagagtcacgagcctgcgtcgtcgctccagttatcgcccggcaattcggtgccagcgtcggccaccgcgtagacgagccaagcgctacgattaccgctggagggggaggtaaatctcagtttgtgtcagcatttctggcgaaacactacggcgggaactaccagggcgccggtattgacctgggcgaacccgctcattcagttaccactgtcgatcatcacgcgctggttactgcgcagattgttggtgttggcggtcgtgctgggcagagcaggccgcgagacgttagcgagccactacagaccatgacgacaaaggctgatgctgcaatggtcacgtcccacctgataaaactccgcggtacctgccgtgatggccagacaactgacgagccgatgccgactattactgccggcgggcagcacgtaggggaggttaaaacgactctggcggtcgcggactatgacgaagagcgcgcgcagcaggtgctggcgttcctgcagcaatattgcggggaggatagcaccgggctggtggatatcggcggagtgacttaccgcatcgttgatatcgggatgagaatgctgcaaccgcatgagctttaccgggcgcagggctttccggagtggtacatcatcgatcgggattaccgcggggtgaagtatgcgaaggataagcaggttgcgcgctgcggaaatgccgttccgcccccgttcgctgaggcgctggttagggccaatctgccggaaatgtgcattaacaaacaggagcgagccgcgtga

SEQ ID NO: 223115 - DNA, 477 bp, Klebsiella pneumoniae
gtgatgaagttaactatcaggcagcaggaagttcttaacctgctcattgagtaccagcgcgtccatggattccctccaaccacctatgaactgaccggcatgttggggtgccggtcccccaatgctgcggcaagtcatctcaaagctctggagaagaagggtgcgatcaaaatcacccgcggggtttcccgcggtataagcatcgttaattttccccctcagagagaacttgtcataaatcttaataccctcgttaaagtcaaacttagtgatgtcgcctttgtgtttttggagcgtcagcatgaagaaaaccgtattcgctacccctccatttttggtgagtttgaaccaccatcaaaggatgaaaatgggtttacgaaaatgacgctatggagcctcatgtccgaactggggcagctatgttattgcggcggggaagttcctttcgaacttaaaattcccctggaggatgaatga

SEQ ID NO: 223116 - DNA, 399 bp, Klebsiella pneumoniae
atgaaatttattcttcctttcccgcccagcgtgaactcctactggcggtccccaaataaggggactgcaaaaggtaaattgctggtcagcgaagccggccgcaaattcaaacatgctgtaagagcagcgattatcgaacagctgaaagcagtcccaaaaccctccgcttcaccagcggaggtagtcattgtcctgcatccgcctgattaccgccgccgcgatctggacaactacaacaaggcgcttttcgacgcacttacatacgccggtatctgggaggatgacagccaggtcaagagaatgacgatcgagtggggtgagaatgcaaagggagggagagttgagatcaccataacggcattcaataaagtgctggatgtttgttcagtggtaggttga

SEQ ID NO: 223117 - DNA, 906 bp, Klebsiella pneumoniae
atgcaatcaggcattaatctcaaggtgtgtaaacgaaccgggcgtgcaggcccgatcgtcacgttaaagtgtatggagataaatatggctaaccacgttatgggctatggtgcgcccaaaaaccactctcatttggcgatagaaggtattttcgttcgccgggattcagcaggtcgattttgtttaaatgactttcagcgcgcagctggtggagaagaacgtcataatcctaaccgctggcttcggtccgagatggcagctcagttgattgctgagctaacgccagatatggcgtttgctcctgtcgatgttgtgagaggagggatcaaccctgggacatacgcctgcaaggaattggtgtatgcctatgcaatgtggattagcgccgccttcaatctgaaagtcatcagaacgtttgatgcggtgcaaaatactatgacagcgctgacctccgatcgtattcaggctggtgtcattttgctggagtcagcatcccgaacattaaacctctcaaattcttccaaacttggtgcttaccagaaattgcaacaggcggccgggcttccagatttaatgcctgcttatgcgattgatgctccagccggcgtcatggatggatccagtcggcccacactctcgcttagtgctctgcttaaaacccatgggatacggctaactgcaaaccaggcatatcacttaatggctcgtgccgggatcgtggataagaaggaacggcaaagccggagcggattaaacggagtaaaaaaattctggtctgtaacagccaaaggctgcctttacgggaaaaatatcaccagccctgcgaatccccgggagactcagccacatttttttgaatcaaaatttcccgagcttctgagactgctcggcattgtcacgcagtag

SEQ ID NO: 223118 - DNA, 987 bp, Klebsiella pneumoniae
atgagcctttttgctcaggggcgcgttctaataactccacagcccgagtacatggccggttttcctacggggaaagtgccagacgctcgccagccgttatccgtagatcgcagccttgttcctttctttaccgatccacgtgtcatcacagctgcgggaggtattgaggggctggagcgatggcttagcctggctgtcagacaatgccagaatcatgatgagggatatcaccacatcgaaacagtcatcttaaggcaagatccaggctccgttttattatgctggcattgcgacaataagtttcgagatgagccggatccggcgatcaaggaaatagcaagtcgtaatgttatcgactgggtcatcgatatggtcctgctttcgcttggttgcacgcgggaaaggacattatccctggcagagttgtgctggtgggctgttcagtctgggatttctgatgcgataacggaggttatggctgaaaaggccttgcggatagctccagagccgcaccgttcggtatacagggacagcgacatcatcccggcaatacccgcggccgacatacttaaaagacgtctggataagagggaaagccatgccataacaggggatctggagacgggtgatcaggatgctgggaaacctattctccagttgggcgtggatccggattgccctgaagcatttatgttgcgaccgaagcgccggcgctggatttgccctcaatacacccagtgggtaaaaacacaggaatgtgcctgctgtaggcaaccagctgacgatccacaccatataatagggcatggtatgggaggaacagcaaccaaagcccatgatctattcgtgataccgctgtgcagagcgcatcacgatgaactacatgccgacctcatcgtatttgaagagaagtatggttctcagctggggctgctaatccgttttcttgatcgtgcgctgggcattggcgtcatttttaaagaataa

SEQ ID NO: 223119 - DNA, 384 bp, Klebsiella pneumoniae
atgcgcgatatgcaaaaagttttagatttatggggcggttgggcagcagcagacagttccggtatagattattctcacattgcggctggttttaaggggttgcttccgcagactggaaaaacacgtttgcgctgcaccgatgatgatgctctaatcatagaaggctgcttggcgagacttcgcgagaagaagccctacgagcatagtttgatcgtggctcattacctgtacggtatctcgaaacgtaaaatagctaaggcgcaaaagaaagatgaaaagttgatccggatcgagatgcagatggctgaaggatttattgatggatgccttagcatgttagatgtatctttaacaatggatgcaattgtaaagattttacgataa

SEQ ID NO: 223120 - DNA, 1017 bp, Klebsiella pneumoniae
atgttaactcggcaggtaaaaaataataatattacatttgctttttcccttttaagtactgttattacatttaacagcaagcaaggtttgtttgatattaataaaactatggaaatagttttgactgacctattgaacgaagtttatgatttatcattaatcaacctcaatattattaagcataaccacccggctatagacttaggcgataaatcgcaagggatagcggttcaagtcacttcagatggatcaaaagctaaattttcaaaaactgtagataaattctttgaatggggccttgatcaaacataccatgcaatttggatgatggttatatctaatgaccctttggaggaacattcaaggaaaggtgttaccacacacacaataaatttatcctatgttgcaaactcaatatgcaataagaatgcggaggagtttgataggctttatgagttttgtgaaaacaactttggagcatattttccgaaagaaaataatagtatattgaagccgatgcaggcggcaagtgtgaatccaggttcatccatatctaattttttaatggaaaattcaattgatttaaatgattccgattcaactgtgtctgagcaagatattaggagtgatttaatccttttgaaggatgaactgtcacgacttaatgagggtcaacgatggtttatttttcgagtcatggagtatacaattgagtataataaggataagtttattgaggaatgtattgcccccgtatctctttttatgaatggaatgaattataaacaacaatcatcaataaaagaaactgctgactctctgtcgttcatgcggttagctaattatgatgagtataacaataaacttcagagcgcagtttatgttatatttttcgaaaaaggaaagtatgagtattttgattatttttcggcaatagctgtgtttcttagaaacacgcagcgaggaaatttattggaagatattattgttgggtgtaatttctcgcacattgattaa

SEQ ID NO: 223121 - DNA, 1074 bp, Klebsiella pneumoniae
atgagtcaaccaatcaccttaacgctggcgcagcgcgcgccgcggcctctgcgctggctggggatcctgctggtgctggggctgctgagtatgccattcctggcgctgctgccggcctcccatccgctggcggtgccgagctggctgctgacgctgagcggcaaaatcctctgctacgccattgtggcggtggcgctggatctggtctggggctacgcgggcatgctgtcgctggggcacgggatcttctttgccctcggcgggtacgccatggggatgtacctgatgcgccaggcggcgggcgacggtctgccggcgtttatgtcttttctctcctggagcgagctgccctggttctggtggggcacgcagcatttcgcctgggcgatggcgctggtggtgctggttcccggtctgctggccctggttttcggctggtttgcctttcgctcgaagatcaaaggggtctatttctcgatcatgacccaggccctgacctatgccggtatgctgctgttctttcgcaacgagaccgggtttggcggcaacaacggcttcaccggttttactacgctgctgggttttccggtcaccgccaccggcacccgcgccagcctgtttatggccacggttttgctgctgttgctgacgctgtggctgggcgcggcgctggcgcagagtaagtttggccggatcctcaccgcggtgcgtgacgccgaaaaccggctgatgttctgcgggtacgacccgcgcggcttcaagctgctggtgtggacgctgtcggcggtgctctgcggtctggcgggggcgttatatgtcccgcaggtggggatcatcaaccccagcgaaatgtcgccgaccaactccatcgaggccgccatctgggtggcgctcggcgggcgcggcacgctgatcggcccggtgcttggcgccggattggtcaacggtgcgaaaagcattttcaccgtggcgatgccagagtactggcagctgtttctcggcctcatcttcatcattgtgaccctgtttttaccccgcggggtgatgggcctgctgcgtcgaggagaccgctaa

SEQ ID NO: 223122 - DNA, 1575 bp, Klebsiella pneumoniae
atgaacgcattgcgtctcatgaatgtgttggcgctactgctgatcctgctgccatggcgggcgcaggccgcggaggcggacgacttcgttgccgccagtcgcagccagcaggcgcagctgttgagccagtgggcggcagcgccgcaggcggatcgtctgccgctgctgcgggcgttgaccaccgagagcctggtgatggacgacggaaaacatgctttccgcacccgacagggcggattacagccattgggcgctgtcgccgcgccgcagggcgaaacccgaccggtccgtctgaccaacaggctgcgcaatctggctgccggcgcgctggcaagccaccttattttaagtgacaacgtcacagagcgagcttccgccgcacgaacgctacagcgggaagcgaccccggcaatggccgcgctgctgcaacagcggctgcaggcggaaaccgatgatactgtgcggggtctgctggaggtggcgctggcgcgcctgcagctcgctcagcctgaggccagcgcgcggctggccgccgtgacgctgctcggccattccgcggatccggaaacccaggcgctgctgatcccctttaccgatgcccagcatgagccggatgcggcggtgcgcgaggcggccagcgatagcctgcaaaagatcaaacatcgtctgctgctcggcgatctgctgggccaggcctttatggggctgtcgctgggctcggtgctgctgctggccgcgctggggctggcgatcacctatggcctgctgggggtgattaacatggcccatggcgagatgttaatgatcggcgcctacagctgctggctggtacagcaggcgctggcgcagctcgcgccgcaatggctggccttttatccgctggtcgcgctgccgatggcgtttctggtgaccgccgggatcggcatggcgctggagcgcaccattattcgtcatctgtatggtcggccgctggaaacgctgctcgccacctgggggatcagcctgatgcttatccagctggtgaggatgttgtttggcgcgcagaacgtggaggtggcaaacccggcctggctctccggcggcgtgcaggtcctgccgaacctgatcctgccgtggaaccggctggcggtactggcgttcgtcctgctggtgctgtgctttacctggctcatcctgaaccgcacccgtctggggatgaacgtccgcgccgtgacgcagaaccgggcgatggccgcctgctgcggcgtgcctaccgggcgggtggatatgctggcctttggcctcggctctggtattgccgggctgggcggcgtggcgctgtcgcagcttggcaacgtcgggcctgaactgggtcagggatacatcatcgactcgtttctggtggtggtgctgggcggcgtcggccagctggccggcagcgtggcggcggcctttgggctgggcattttcaacaaaattctcgaaccgcaaatgggcgctgtgctgggcaaaatcctgatcctggtgatgattattctgtttattcagaaacgcccgcagggtctgttcgcgctgaaagggagggttatcgactaa

SEQ ID NO: 223123 - DNA, 1098 bp, Klebsiella pneumoniae
atgacagaaaacgctaacatcctgacaaccccttctgtgacaccgtcacatcatcaggtggtcgccctcgcctacgatggcctgtgcacctttgagtttggcgtagccgtggagatcttcggcctgccgcgcccggaaatgggcgacaactggtaccagttcgccgtcgccgcgatcgatgaaggtcccctgtgcgccaccggcggcatccgcctgatgaccgacggcggtcctgaacttctcgcccaggcggatacgatcgtggtccccggctggcgcggcgtcgacgccccggtccccgaggcgctgtgcgccgcgctggcttccgcccacgcccgcggatgtcggattatttctatctgttccggggtgttcgttctcgccgctgccgggctgctcaatggccgccaggcgacaacccactggcgctacaccgcggcgctgcagtcccgttttccgcagatccaggtggtggaggacgtcctttacgtgggcgatgctttgctgatgacttccgccggcagcgcggcggggatcgacctttgtctgcatctggtgcgtgaagatttcggcagcgaagccgccaacgtcgtcgcccgccgcctggtcgtctctccccatcgcgacggcggtcaggcgcagcaggtcctgcgcccggtagcccgcagccgggagagcctgcgcctcggtcagctgtttgactatctgcaccagcatcttgccgccagccataccgtcgcttccctcgcccagcgcgccggcatggggacgcgcacctttttgcgccgctttgaggaggccaccggtaaaacgcccgcccgctggctgctggaggaacgactgctgcgcgcccgccagcacctgacggagagcacgatgggcatcgatcagatcgctgagcgctgcgggtttgccagcgccggcaccctgcgccaccattttcgccagcacttcgcgctcagcccgctgcagtaccgtaaacagtttacgccttctccgattgcaaaatcgtcgcagccacggacaatagacggccacagtaaaccggtcgccaggagggtcgatgatgaagaaagagtgtcgggtagtgatctataa

SEQ ID NO: 223124 - DNA, 1434 bp, Klebsiella pneumoniae
atgaatttaattaatagcgcaaaatgggttgccttttctcagttcttcaaagttattgttcagttggtaaatattgtttatctggcaagattaataccccctagtgaatatggtattatggccatggctttggttgtaattaacttcggactattaataagagacttgggtactgccgctgcaattatccaacggaaagaaattgatgatggtattattaattcgattttctggttgaatttatttatggggctttttattgctgttgctataatttttgcctctccattaatagcaagcttttttcatacccccaaactgatttatgtattattattgatttctttaatatttccaatatctagtagttcagctgctcaccttgctcttttggaacgagcatcgaaattccgtgttatttccttgattgaaattttttcagcattgataggtttgatatctgcattaattttggcctatcaaggatatggtgtttatagcctagttattcaaacgatcgtcctaaatgtaatttcaacaattcttttttggaaaatatctaaatggcgacctcagttgtctatgatgttcaaattttcagggttaaaacaaatagttggatttagcgttaatctttctttatttaattttgttaattatttttcaaggaatacagatagtttcattataggacgctttatgccatcttcagttcttggtgcatacagcctcgcctatagagtcatgctttttcctttacagagtcttacatttgttgtatcgcgatcgcttttgccaattttaagtcatcatcaaaatgataatgcgattataaggaaaacctactccaattgtgtattctcgattttatatcttgtagtaccgttgatgagcgggcttgcttatttaagttcaccttttgtatctgtaatttttgggaatcaatggaccttaactgcagaaattttgaaatggttagcgccaaccgcaattattcaagcagtgcttagtagtactgggacagttttcattgccaagggccgcactgatttattactcaaattaggcattttgggtacttttctatatgtcctctcttttttaattggtgttaattttgatattgtcacattttctaagttgtattttatagctaatgtattaaatttttttcctgcaatgattctaatgatgcgattaatcgaagggtcactctttactttgcttaataaatgttttgtaatattttttattaatttcggaatgctggcctttttatactttattgatggtttggatttcataaatgcaattaatgagcaagttgtttatttaatattaatgatttctttaggtggagggttttatgttctgtcatctgttttacttattggtaaattaagaaggttcctgttggcacgttttgttaattaa

SEQ ID NO: 223125 - DNA, 1455 bp, Klebsiella pneumoniae
atgaatatcaaggccgccagtctgaccccggaacaagcgcttgccgagctggaagcacgctatgaagcctcggtcacggcgttacgcaaagccatcggcgactatatcgaccataatacgctccccgataccgaagcccgcgcggaaggtctttttgtctatccgcagctgtcggtctcctgggacggcgccgatcataaagccctcaaaacgcgcgcctggggacgtttcacccatgccggttgctataccaccaccattacgaatccgaaactgttccgcaactatttgctggaacagctgaccctgctgtatcaggactatggcgcgcatatcagcgtcgagctgtcgcagcatgagatcccctatccttacgtgatagatggttccaccctgacactcgaccgctcgatgagcgccggtctgacgcgctatttccctaccaccgagctgtcacaaattggcgatgagaccgcggatggcctgttccatcccaccgagttctatccgctgtcgcactttgacgcccgccgcgtcgatttttcgctggcgcgtctgcgacactacaccggcacgccggcggaacacttccagccctacgtgctgttcaccaactatacccgctacgtggatgagttcgtcagctggggctgcagccagatcctcgatcccgacagcccctatatcgctctctcctgcgccggcgggatctggatcaccgccgagaccgaagcgccggaacaggccatttccgatctggcgtggaagaagcaccagatgccggcctggcatctgatcacccacgacggcaaagggatcaccctgattaacattggcgtcggcccggccaacgccaaaaccatctgcgatcatctcgcggtactgcggccggacgtctggttaatgatcggccactgcggcggcctgcgcgaaagccaggccatcggcgactatgtgctggcccacgcctatctgcgtgacgatcatgtactggatgcggtgctgccgccagatattccgatccccagcattgccgaagtgcagcgcgccctctacgacgccaccaagcaggtgagcgggatgcccggcgaagaggttaagcagcggctgcgtaccgggacggtggtcaccaccgacgaccgtaactgggagttgcgctattccgcttcggcgctgcgctttaatctcagccgggcggtagctatcgatatggagagcgcgaccatcgccgcccagggctatcgcttccgcgtcccctacggcacgctgctctgcgtctcggacaagccgctgcacggtgaaatcaagctccccggccaggctaaccgcttttacgagggcgctatctccgagcatctgcagataggcatccgggcgattgacctgctgcgcgccgagggagatcacatgcactcgcgtaagctgcgcaccttcaacgagccgccgttccgttaa

SEQ ID NO: 223126 - DNA, 978 bp, Klebsiella pneumoniae
atgaaagcattagttctggaccagatcgacaaccgcaccgtcgccaccgtcaaagatatcgacctgcccgctcttgccgaaggcgacgtccgggtcgccatcgactggtcgagtctcaattataaagacgccctggcgatcaccggcaaaggcaaaattatccgtcagtttccgatggtgccgggcattgattttgccggtcaggtgaaagaaagccgcgatccgcgctttgttcccggccaggccgtgatcctcaccggctggggcgtgggcgaaaaccactggggtggcctggccaccgacgcctgcgttaaaggcgactggctggttgctctgccggagacgctcagcgcgcgtcaggcaatgatcatcggcaccgccggctttaccgcgatgctatgcgttgatgctctcgttagtgcgggcgtcacccctgacagcggggatatcctggtcaccggcgccagcggcggggtcggcagcaccgccgtggtgttgctgaaagcccttggctaccgggtgacggccgtatcgggccgggaatcgacacacgattaccttcgccagctgggcgccgatacgatcctgccgcgcagcgacttcgcggagacccgtccgctggagaaacagctgtgggcgggcgcggtggataccgttggcggcccggtgttggccaaagtgctggcgcaaacgcaatatcgcggctgcgtcgccgcctgcggtctggccgggggcttcgatctgccgaccaccgtgatgccgtttattctgcgcaatgtgcgtctgcagggggtggattcggtgatggtgccgaccgctgaacgcgacgctgtctggcagcgtctggcccagcttctgccggagagctactaccagcaggcggccacagaaatcacgctggagcaggcgccagcgtatgccgcagatttcctcagcaataatattcatggtcggacgctggtcaatatcggccagtaa

SEQ ID NO: 223127 - DNA, 468 bp, Klebsiella pneumoniae
atgaggaaagtaaagttaaataacgacgatttaattcagtatctgaacaccatcaatacgttaaaacaatatccaacgatgtctgaatacagagagcaatatcgcaggctaagaaccgatggttcaccgttgagtgaagccaagaaatttaaatcggcgcataccgaacttctgagattagacaggaagaaaaaatcgctgctcgataaatttattgaagaacttaatcctattagccatgcttcgactcttgcatccaagagccttgagaaggttcaggaatccatactctacagaaaaactttattggaaaaaacacctgatgaactcttcgctctcgtcataaaacagcgtacagaagctgctcttgagttccaacgttctgttgaacagagtcttgagcaactctctaacatatcgtcagagttcgaaccatcaagtcaactacaacgaaaaatggccctataa

SEQ ID NO: 223128 - DNA, 420 bp, Klebsiella pneumoniae
atgcagttctacactcccgttgagttacgtcagatcatgctgctcccgttgtacagcgaccttgtgcaatgtggttttccaagtcctgcgcaggactacgttgagcaacgtatcgatctgaacgagttgctcgttaaccaccccagtgcgacgtattttgtcaaagccgccggcgacagcatgaaggatgccggcataggggaaggtgatcttcttgttgtggatagctcaaggacagcagttcatggcgatatcgttatcgctgcagtggatggggaattcaccgttaagaagctgcagctgcatccgcgggttcagcttaacccaatgaaccctgcatattcgccgatagtcgtcggtagcgaggatactctcgatgtgttcggggtggttacgtacatcattaaatcggctggctga

SEQ ID NO: 223129 - DNA, 1311 bp, Klebsiella pneumoniae
atgtgttcggggtggttacgtacatcattaaatcggctggctgaaatgtttgcactttgcgatgtgaactcattttacgcatcgtgcgagaccgtatttcgtcctgacctgaaggggcggccggtggtcgtcctgtcaaacaacgacggctgcgtgatcgcccgttcgcaagaggctaagcccttcgtcaaaatgggtgagccttatttcaagcaaaaggacatgtttcgccggcacggtattatcgcgtttagcagcaactatgagctttatgccgatatgtccaaccgagtgatgacaacgctggaggaactctctccacgctgcgaaatttacagtattgatgaggcattttgcgatctgactggtgtgcgtaactgtcgcgatcttaccgactttggcagggaaattcgcgagacggtactgcgcaggacacaccttactgtcggagtgggcatcgcccagactaaaaccctggcgaagctggccaatcatgctgcgaaacagtggcagcggcagaccggaggagtggtggatctgtctaatcaggaaaggcagaggaagttgatggctttgcttccggtggatgaggtctggggagtcgggcgccgcctcagtaaaaaactggaggcaatgggcattaaaacagtgcttcaactggcggatacagatatcaggtttatccggaagcattttaatgtggttctggaaagaacagtacgtgagctgcgtggcgagccatgccttggtcttgaggaattcgcgccggtaaagcaggaaattgtgtgcagccgttctttcggtggccgcatcactgaatatcatgaaatgcgacaggcgatatgcagctatgcatcgcgcgcagccgagaaacttcgcggcgagcatcagtactgccggtttatctccgcttttgtcaaaaccagcccctttgcgctcaacgagccatattacggcaacagcgcatctgtaaagctgctaacgccaacccaggatagccgggacataattaccgcggcgacgaaatgcctcgatgctatctggcgagacgggcaccgttaccagaaggccggcgtgatgctgggcgatttctacagccagggcgtggcacagctgaatctttttgatgacaacgcaccgcggaagaacagcgaaaagttaatggaagtcctcgaccatctcaatgcaaaggatggcagggggacgctctattttgcggggcagggaatccagactgcctggcagatgaagagagaaatgctatccccgcgctatactacgaggttctgtgacctgctcaaagttagatga

SEQ ID NO: 223130 - DNA, 909 bp, Klebsiella pneumoniae
atgactaaacaacataaaatcggcttagttaaagtgctcgaaactactacagtagttttggcctttatcaacgagtcgtggactttcgttgaaaaggtgctgagcctctttaacatagtccctaactacatgactttaagtatgagtacacctagcgattggttgcataaatttgaaatcaagactgaacgttgggtttttgtgccaagcaaagagaccctggaacgagggcggcaaatccatgcttacattaagcaaaaatggaagtatccgcgctatatgttccatttgagaaatggtggtcatgttgcggccgctaattttcatttaaaaagcaattattttagcttgattgatgtaagtgatttttatggtgcgactagtcaaagtcgtgttacgagggagcttggtcgattagttccttacgttaaagccagacaaatcgctaggctgtcgacagtagcaaacccgaatagaaacgggtttaagcacgtcattccctacggatatccccagtcgccaatattggccagcctatgttttcaccactctttttgtggcggggtcattagttcgatcagtaaatctgagcgtgttttcgtcagtgtttatatggatgacattcttctatcaagtgacgacatgaatctcttggtcgaggcatttgataccgtaagacaggctttacggaagtcaggttataaagtcaatgaaaacaaaacacagtccccatctcccaaaattcaagtattcaacttagagcttgggcacaatcatttacgtgtcacccccaaaaggattgttgagttccttaaggttttcatttccagtgccaatgaacatgaaagaaaggggattgcttcgtacgttggcagcatcaataagtcgcaagctaaactcttcagatag

SEQ ID NO: 223131 - DNA, 669 bp, Klebsiella pneumoniae
atgtgcggacgatttgcccaatcacagacgcgcgaagaatacttggcttatcttgtagaagaggccgagcggaatatcgcctttgatcctgaaccgatcagtcgttacaacgtcgcgcccggaaccaaagttctgttactgagcgaacgtaatgaacaactgcacctcgatccagttcactggggttacgcgccagggtggtgggataagccagcgctcattaacgctcgcgtagaaaccgcggcgacaagcagaatgtttaaaccgctgtggcagcacggtcgagcgatctgctttgctgatggctggtttgaatggaaaaaggaaggggacaagaaacagccctatttcatccaccgtaaagacggcaagcccatttttatggcggcgatcggcagcgtgcctttcgagcgcggcgatgaagctgagggatttttgattgtgactgcagctgccgaccaaggtctggtcgatattcatgaccgccggccgctggttttggtaccggaagcagcgcgcgaatggatgcggcaagatgttggtgggaaagaggcggaggaaataattgcagatggcgctctgtcagcagatcatttcaaatggcacccggtttcccgcgcagtgggtaacgtgaagaatcaggggcctgaattgattgaggctatctaa

SEQ ID NO: 223132 - DNA, 171 bp, Klebsiella pneumoniae
atgtgcgaactgctcgggatgagcgccaatgtgccaaccgatatctgttttagctttaccgggctggtgcagcgcggcggcgggacggggccgcataaagacggctggggcatcaccttctatgaaggtaaaggctgtcgcacattcaaggatccccagccgagcttttag

SEQ ID NO: 223133 - DNA, 276 bp, Klebsiella pneumoniae; identical to SEQ ID NO: 222901

SEQ ID NO: 223134 - DNA, 267 bp, Klebsiella pneumoniae
atgaataacgacaatctggccctctaccaggatgcgtatgagatagggccggagaagatcattgacacttacgccgaggcgacgcgccacgtcgaccaggggctgtcgctgaccctgttcttccccgataccgccaccacccgcgatatcaacaaggcgcaaatttacgcctggaagaaaggcatcaagacgctctactacatccgtctgcgccagctggcgctggaaggcactgaaattgaaggctgcgtgtcctgcgcgctgtaa

SEQ ID NO: 223135 - DNA, 981 bp, Klebsiella pneumoniae; identical to SEQ ID NO: 95379

SEQ ID NO: 223136 - DNA, 294 bp, Klebsiella pneumoniae; identical to SEQ ID NO: 214838

SEQ ID NO: 223137 - DNA, 396 bp, Klebsiella pneumoniae; identical to SEQ ID NO: 100678

SEQ ID NO: 223138 - DNA, 882 bp, Klebsiella pneumoniae; identical to SEQ ID NO: 137383

SEQ ID NO: 223139 - DNA, 204 bp, Klebsiella pneumoniae
gtgttagccgttacttccctgcaggcttacggagagaaaaaaactgaccgcgtcctgcagcgctaccaccctctctcccctattttcagcattcagccttataaactaaacggtatctctatccctgcgctggccccaacgtcatcgctgtcgctgttgttcgcgttggtgtaccacagtgatgtattcaaacgtaccgactga

SEQ ID NO: 223140 - DNA, 2154 bp, Klebsiella pneumoniae
atgaacacaaaagataataggcaacagcgttctgaagcaaacgaacttgagcttgggcgtatcgttggtgagcttatcgattgtagaaagcttattattggcatcactacagggtttactgttatcgcagtattgtacgctttaatggctacccctatctatcaagcaaatgcgcttattcaagtcgaacaaaagcaaggcaatgcaatattaagtagtttgagtcagatgttacctgatggtcaacttcagtcagctcccgaaatatcattattacaatcacgaatgatactgggaaaaacagttgacgatttgaatttacaaactcaagtggaaaaggaatactttccaataatagggaaaggtatctcgagaatcttaaataataaaaatgaatctattaaaatagataagttgtatattgagagaaaagaagattcaacagaccctgaaataattatcacgattaaggatgataaacactttactgttgaaggtgatggttttaaagtggatggtattaaaggggaaatgttagacaaggataaattacggatcttaatcactgaaattaatgctgagccgggtgcaagttttgaagtaaaatatttaagccgtctaaaagcaataaataatttacttgaggcgtttaacgtatccgatcaaggaaaagatacgggaatgctaggcctgactctcacaggtacagatccgaatttaatatctaaaactttaaatagtatagctaataattatttggaacaaaatgttgagcgacaagcagcacaagatgcgaaaagtttagatttcttgaaccagcagttgcctaaagttcgcgctgatttagatattgcagaagataaactgaattcttatagaaaagaaaaagattctgttgacctttctatggaagctaaatctgttttagatcaaatagttaatgtcgataatcaactaaatgaattaacatttagagaagctgagatttcacaactatacaccaaagaacatccaacatataaagcgttgattgaaaaacggcaaactttgcagcaagaaaaaactaaactaaataaacgcgtaagcggaatgccatcaactcaacaagaagtcctgaggttaagccgtgatgttgaatcaggaagagctgtatacctacaacttttaaatcgtcaacaggaactaagtattgcaaaatcgagcgcgattgggaatgtcagaattgttgatgattcaattacagatccgaagccaattaagcctaaaaaaatattgatttgcataatcggatttattctgggtctctttttttcagtcgcattaataatgttgcgattccttctcagaagaggtattgaatctccagaacaattagaagaaatgggaattaatgtttatgcaagtattccggtttctgagtggttattgaaagcttcagataagaggaaaaggaaaaataatgaatcagataaattactggcagtggagaatcctactgacttggctgttgaagctataaggagtctaaggactagtttgcattttgctatgttagaggcaaaaaataatgttctaatgatttctggtgcaagcccaaacgcaggcaaaacattcgttagtaccaatttagccgcaacaatttcgctagcaaataagtcagtactatttatagatgcggatttaaggaaaggctatgtgcataaaatgttaggtaacgaaggcaaatctggcttatctgacatactttcggggcaggctaatgtcgaggaaacaattatctctgtacccgatgggcaattcgactatatagggcgcgggcaagtgcctcctaatcctgctgaacttttgatgcatccacggttcgaaaagttgcttgcttgggcatctgcaaaatatgatttagtcattatcgatacacctccaattttggcagttacagacgcagcaataattggtcgatatgctggaaccacactacttgtggcacggtttgaatctaatacagttaaagaaattgaagtaagtataacgcgttttgaacagagtggcgtcaacgtaaaaggatgtatattaaacggagtagtcaaaaaagctagtagttattatgggtatggatacaactactatggatacaattattcaaataaatcttaa

SEQ ID NO: 223141 - DNA, 1065 bp, Klebsiella pneumoniae
gtgaacattgtgttatttaatacgctatattatccatatagaattggcggtgctgaggtttcagttcaaatacttgctgaagaattagtcgctaaaggaaataatgttacagtagtttctttatctgaaggattgaaacaggaaagagataatattggtggtgtgaaaatcataaagttaccaataaaaaatctctattggccatttaatcaaaagaagcaaagtaaatttaagagattattatggcatataattgatatttataaccctgcatctattaaaactgtaaaagatatttttacggaaacagaacctgatgttgtgcataccaataatctatcagggttttcaacctcagtatgggccgttgctaaaaaaaataaaataaaaatagtccacacagcaagagactattatctcatgcaccctaattgtacactttttaaaaacaatgaaaatatgaacgttaagtctcttaacgtaaaagcatggtcattttttaagaagaaaaaaagcgcaaaaatagatgttttcattggaatcagtgagtttataacaaatctacataaaaataatggcttttttagagaatctttatgtacaacaatatataatcccgtagtggtaaatgctatcaagcaaggcgaaagcactcagttaacaaataaacgtgtaggatttatagggcgacttagtgaagaaaaaggatttctggaatactgcgaactagctaaaaataatcgaaattatactttttttgcggctggtaattatataagtgagaaagaaaaggagaggctaagtaagttttctaatgatgccaatgtcaatgtccttgggtatgttccggttgaaaaattctttaatatggttgatattgtgatactacccataaaatggaatgaacctttcggaagagtggttgttgagagtgtattagcaggtaaactagttatatctagaaaggttggctctctacctgagttaagtcaaatcctgccaaatattagattggttgattcgttaattgatgagtttgatgaagttgttaactgttacttttag

SEQ ID NO: 223142 - DNA, 450 bp, Klebsiella pneumoniae
atgattgatgtgaatctggatttttccgggctgcaggatatcgcccgcgatctgcaaacgctcagcaaggccgaaaataataaagttctccgggattcgacccgtgcttgcgccgaattgctccgccaggaggttattgatcgtgctcctgagaaaaccggaaaactgaagaaaaacgttgttgtcgtcacccagaaaagccgccgtcgtggtgaaatctcatcgggggtgcatattcgtggcgttaacccgcgaacggggaacagcgacaatacaatgaaggccagcaacaagcggaatgcgttttactggcgcttcgtggagttgggaacatctacagcgcctgcacatccgtttgttcgcccagcttttgatacccgcatggaagaagctacgcaggtggcgatgcagcggatgaatcaggctatcgatgaggtgttatcaaaatga

SEQ ID NO: 223143 - DNA, 483 bp, Klebsiella pneumoniae
atgccgcattggtccaattttcatcatcccctccggctaaacacccatttgaattcgccagggattcagcaaccagcgtgcgggtcctggaatatcaggactcagatcatccccgcggttttcatacaaccagcccacgataagaagaaccgcgctctgaatggagggcgtgatgataagaggacgatcgccagcgcttttattctcaacagcactatccagagcagcctggtcagcgaaaaagcgtcggttgagaaactgcattgcagcatcctccgcagcggcaagatacccctccaccatcgttttatcgatttcatcatccagcctgagatgttccatggctgtttcagtattgattaccgtcataaccattaccctttggtttcgggggcgcggttcattttgttatcagggacttcaccagctatggtcaccagcccgttacctttgagctcggcagcacgtaagcgagagacgtga

SEQ ID NO: 223144 - DNA, 255 bp, Klebsiella pneumoniae
atggccagaaaaaatgtggctgaaccgtctgtacccgacggcataaatgcggcgccagaacccacagagtccgggactattcaggttcagcctgtccggcgttttatggatggcgacattttcaggacgccagctgatgatccgtttcacgtctctcgcttacgtgctgccgagctcaaaggtaacgggctggtgaccatagctggtgaagtccctgataacaaaatgaaccgcgcccccgaaaccaaagggtaa

SEQ ID NO: 223145 - DNA, 1221 bp, Klebsiella pneumoniae
atgtaccagaaaaaatcggctgatgatcagccacaaagtattggcgaaatctctaatcagctcaccatggtgattgatcaggtcaaaaactttggcgaagacgtgaagaaaaaaatggaggcaggagaaaccgtttcgctggaactgaaacaacgaacggacgaaagccttaaccagatgaacgagctgaaagaacgtctcactgagctggagcaaaaaggtgcacgccgcccgaacgatgcacctgcacagcgaaaatcgctcggtgagctggtggtcgaaagtgaagagttcaaaggtatggacagttcggcccgtaagagcatccgcgtcaaactggaacagaaagatattatgaacgtgccggccactacgggcacaggcgtgagcccaaccaacagccttgtggtctctgatcgtgttcagggcattatcgccccgccggaacgcactctgaccatccgtaatctgcttatccctggtactaccgcatctaacggtattgaattcgttcaggaaacggggtttaccaataatgctgcagctgtggcggaaggtgccctgaaaccaaaatcagacattcagtttgatctgaaaagtgcgccggttcgtactattgcgcattactttaaagcgtcccgtcagatcctggacgatgcgcccggtctggccagctatatcaatggccgcgctcagtatggtcttcgtttcaaagaagagcagcaactgctgagcggcgatggcaccggtgcgaatatcctcggtatcctgccgcaggcaacagaatttgcaccagccctaaccctgtccaatgccacgccgatcgaccgtcttcgcctggctgttctgcaggccgttcttgcggaatatccggcgtctggttttgtcctgaacccgattgactgggcaggcatcgagctgaccaaagataatgaaggtcgctatatcatcgcgcagccggtcaatagtggtgttcctcgtatctggggtctccctgttgtggaaacacaggccatggcgcagaacaacttcctgactggtgccttcaacatggctgcgcaaatcttcgaccgcatggatatcgaagtgctgctctccactgagaacgaagatgactttattaaaaacatggtcaccattcgtgcggaagagcgtctggcgttagcggtttatcgtccggaagcatttgtcaccggtactgtaaccgcttctggcggctga

SEQ ID NO: 223146 - DNA, 708 bp, Klebsiella pneumoniae
atgtaccggaaaaacgcagccatgaaagtaaaggcattcgacttcgatattaaggctgtcaacgatgacggccttttttctggatacggttctgttttcgatgtggtggatagctacaacgaagtcgtggcgccgggcgcattccttgaaagcattgaggaaacacgggcgaaggggagaacgttccctgttctctggcagcatcgcaccggcgaacccatcgggaactgggatatctcgaccctgaaagaagataaacatgggctttttggtgaaggggctttgtggcttgacgacgctgcctacgctaaaactgcctggcggggtatgaaaacccgtgccattacaggcctttccattggctattacgtacgggagtcgaattatgatgagaaaacccggatccgcacattaacgaagctcgatctggttgaaatctccatcgttaccgtaccggccaacgacgatgcccgcatcgacgtcattaagtcgaaattatcacacggtgatcttccttccttacccgaatttgagaagttcctgcgagaggcaggtttctcgaaaagtcagtccgctgcggtcgcctcccgcggactgtcctatctgcttgaccggagtgagtccgggggcgaagacggcgaaaccaaagcggctattgcggcgatgcgccagcaactgagccagttttctctcccaaaaattctctaa

SEQ ID NO: 223147 - DNA, 996 bp, Klebsiella pneumoniae
atgatcatggccagcctgcttttgtgggggaatgcttatgcagaaatcgatcgaaccggaaagcgtattacctcgctggtgcctctcaggccagaaaggatgaaggttgatttaagcaagagcggagatccaatttatacctaccgtgactggccttcaggtacatcccgaaacattgatgaacgggacatcatgcacatccgtgcgttcagcaccaatggtgtcatgggcctgtcacctgtcagttatgcccgacagacacttggtctggcaatggcaacagatgaagccagcgccaaagtttttaaaaacggtatgcggcccagcggcgttctctcaatggatcagatcctgaaaaaagagcagcgcaatgaagtacgtgaaagcatggttgaacaattttctggatccatgaataccgggaaaatgatggttcttgaagcgggaatgaagtttcagcctgttgacctcaacccggaagacgcgcagatgctgcagtccagagccttcaatatcgaagagatttgtcggtggttcagagtatggccggggttgattggacataccgctcaggggcagacgatgtggggaagtggcgtcgaacagatgctgattggctttttaacattttcacttcgtccatggctgacccgtattgagcaggcgattcgtaaaagtctcctggctccgggagaaagaaataagtacttcgcggagttttccatcgaaggtctcttacgtgccgacagcgccgcccgtgccgctttttactcaacgatgacccagaacggtctgatgacccgcaatgaagcacggcaaaaagaaaaccttcagccaaaacctggtgctgaccaactaactgttcaatccaacctgctgccgatagatcagcttggcaagtccggcgacagtgaatcagccaaaaacgcactgcgggaatggcttggcattaaatcagaggagacgccggaatgtaccggaaaaacgcagccatga

SEQ ID NO: 223148 - DNA, 1050 bp, Klebsiella pneumoniae
atgatgcgcgccggaactaaaggtcgccggcaggcactcatttttatgatcaccaacagtggacacgataaaaccagcgtctgctatgactatcacgaatacggtagaaaggtatctgccggttcgatagcagatgacagttttttcgcctttatttgttcactggatgaaggtgacgatcctttcaaggatgagtcctgctggaaaaaggctaacccctcgctgggtcacacctttgaagaaagctatcttcgtgagcaggtgactcaggcccgggggatgccttcgaaagagagtattgtcaggcgtctcaacttctgtcagtgggttgacgcggcgaacccgtggatgagcagcgatgtctggatgggatgtgaggaaaactttgatccagatgagctggagggtgaggaatgctacggtggccttgacttgtccggatcccgtgacttgactgccctggcgctgttttttccaaaacaacgcaagttgctggtggagttctggacacccaaagataccttgctcgaacgggctaaaacggaccgggtgccttatgacgcctgggagcgcgatggtcacatccacactacgccaggcaaagcggtgaaatacggctttgttgcccagcgtattgccgatctgacggagaagtttgatatcaaggccatcgccttcgaccagtatcgcattaaatatcttgagccggagcttgaggaagcatctgtttctgttcccttaatccctcatgggcaagggtattacaaagcgaaagattccgggctgtggatgcctcactccatcgaattgtttgaagagttgcttgatgacagcgtcattatcatcaggacgaacccttgtcttcgctggaatgcggcttcagcagtgacggaggctgatcagaaagaaaaccgaatttttgccaagaaaaaaagtaccggacgtatcgacggcattgtagcgggcgctatggcaatcggtgcctccgaaggctatgaggatgattctggcgatatcgacgactttttcagtaatcccatcattgtgtga

SEQ ID NO: 223149 - DNA, 342 bp, Klebsiella pneumoniae
gtgaacaaagagccccgtatctacggcagcaagtgggaccgagagcgtcttatcttcctacgtgcgcaccccttgtgcgtcatgtgccaggagcaaggcagggtgacagcggcaacggtggttgaccacatcatcccgcacaaactgaaagaggctctgcgctctggtgacagccaggaaatagcgaaggcgcaaaagcttttctggagccggaagaactggcaagggctgtgcaagcagcaccacgactcaacgaagcagcgaatggagaagcgtggcaccctgattggctgcgatgaaaacgggatgccactggacccgacctctcattggtttaagtga

SEQ ID NO: 223150 - DNA, 276 bp, Klebsiella pneumoniae; identical to SEQ ID NO: 217799

SEQ ID NO: 223151 - DNA, 312 bp, Klebsiella pneumoniae
atggcaaagcatatgcaagacaaagagagcatggccggaatcacctggctggctctgctgatcattgctggttggggcggccttgtccgattcctgatggatgtgaagcagggcaaagcaaaatggagctggataaatgcttttgcgcagattgtggtttcggcttttaccggggtcattggtgggctcatcagcattgaaggtggactgagtatttacatgatactggccactgccggtatcagtggtgctatgggttccgtagcgctcacgtatttctgggaacgaatcaccggagtgaaagcacaatga

SEQ ID NO: 223152 - DNA, 219 bp, Klebsiella pneumoniae
atgagttcgaacattcgtgctcgttatgaagcatctccccgttctgctaatgcccaggctctccgtgagctggctgacgtagccggcacctctgacgcggtagatgtgctctgcctctgtctggatgtcgcagatcaggatggtattggcgaagatgaagaagcagcactgaaaaaaatcgcccaagcgcttcagcttcctctggaccagtatctgtga

SEQ ID NO: 223153 - DNA, 207 bp, Klebsiella pneumoniae
atgtttggattcggtaaaaaagcacgtaaggcagtagcagaagttaagaagatggagaaccgcgatgcggtagaggcaactgtctggggcgcatactcaattgcgtatgcggatggtacctgtgatgcaaaagagattgcggtactggagaaaactatctccgcgctgccggcatttgccccttcgctggtgaaattgcccagatga

SEQ ID NO: 223154 - DNA, 222 bp, Klebsiella pneumoniae
atgtcatgccatcttaaaaaagtaaaagacatgctaaatcagcaagatatgacagagacagccaaagcggttttgaacgtcttaagcgacaagcctgcaacggctggagagattgcacagaatacgcacctgacgcgcgaacgttgccagttaatactgacgcagcttgtgatggcggggttatatgattaccagtttgggtgttacaagcgcctccagtaa

SEQ ID NO: 223155 - DNA, 126 bp, Klebsiella pneumoniae
atgtttaagatgtgtgtcgaagtgactactcttaacacgttacacaacaaaatgcggaccgcgttagtgatttatttactaaataatagtaattttaagataatacatcttggtttggttggatga

SEQ ID NO: 223156 - DNA, 126 bp, Klebsiella pneumoniae
atggaagcctctgatatcaaaaagatgaaggaccttgaggatgaaaaccgccggctgaaacagatgtttgcggacctgagcctcgaatgccgcgccctgaaagacgttattgaaaaacagcgttaa

SEQ ID NO: 223157 - DNA, 2007 bp, Klebsiella pneumoniae
atgaaagataaaccgtacttcatggcgttaccggaaatggtgagggtggaaatgaagacggttatttccgtactgactgcgcatttttttgtcctgagcgcctttatctggctggcatcccccgcctgtgctgacagtggaagcgactataaagctggttcggattttgcgaaacaggtgcagagcaatggtctgaactcactgaaaaatttcagtggtgagcaaaacctgccggggtataccgacagccctgatcagacaaaatactatggcggcgtcactgccagcggagacagctctctgaaaagcgattcagccctggagttcagccagggagataccggcaaagcgattactgagtcgttcacgaaccggccaccggatcagatatctcaggatgcgccgtttattcaggccgcaaaggatacagaatcccgcgccgacagcattgtcggcgataccggacagtcctgtaccgcccaggttgttaaccgcagcgaattcacaaatcatacctgcgaacgtgatctgcaggtggaaaatttttgtacacgggaagcgaccctgaaggataacgccaccacgcagaaagttaaccgaacctatcagcaggtggtgacgctgaattatgcccggagtacccggcaatggagtggcaacctgacgatcccgaccaatggtcgtctgctgaatgcctcggtggatggtgagcctctggtgatcccctggattgaagaatgcgattccgaagggaaggtgcgggatagctgcaagagtgcagtcagtgaaagcctgaccctctttgaacgaacgttccccattgatgtgatcagctggccacgttcagaatcgatgtgttcaggcggtcagaacacgcattgtacgaaatatacctatgacgggaaggggaagattcatcagtcgtttggtgtggacaaagcggttaatgcaggccagaacttttcagtaagcaaaacatcacggaccgtatcatcggccagccagaaacccgtacaggtcacggtcaccctggtgatggaagaaaccgaaaccgtctacgcacctgaagtcgtctgggttgaaagctgtccgttcagtaaggatgaaggaaaaaaaacgggcgaggaatgtatcagcccgggaggaacgcgaaccatcaccctcggaggcagggattactcgttcacggaagcatgctggaaatataaggatacctggctcacgcaaccggcggacaacggctcctgtgaaagcctgatgaaaaatacggcctgtactctgtcatcccgccagtgcgccttctccagcgaggaaggcacgtgcctgcatgaatatgcaacgtattcctgcgaaaccaggacgagtggcaagcaaatgatctgcggcggtgatgtcttctgccttgatggtgaatgtgacaaagccacgtccgggaagagcaacgactttgggcaggcggtgtctgagttggcggcactggctaccgcggggaaggacgtcgcggcactgaacggggtggatgtccgggccttcaccggaaaagcgaagttctgtaagaagtttgctgccggcttcagtaactgctgcaaagacagcggctggggccaggatgtggggctggcacgctgcagcagcgaggaaaaggcgctggccaaagcgaaaaaagacaagctgacggtcagtatcggggaattctgctctaaaaaggttctggggatttgcctggagaaaaaaaggagctattgccagttcgactcaaaactggcgcagatcgttcagcagcagggaagaaatggtcagttgcatatcggttttggcggcgccagcagtcctgactgtcgggggattacggttgaagagctccagaggatcgactttaacatgcttgatttcaccaattttatggacgacctgatgaaaaatcaaaaaataccggaaaacgatgttctcaccaataagaccaaggaacgaattaaggaaatcatgagtcagcaatccgcgcaataa

SEQ ID NO: 223158 - DNA, 285 bp, Klebsiella pneumoniae; identical to SEQ ID NO: 102270

SEQ ID NO: 223159 - DNA, 252 bp, Klebsiella pneumoniae
atgattgatgttaatctatataatgagtcagttactcagttaggtgttttattagatgccaaaaaagttgttgatcgaaagaataatggagcacttactgcatactatattctggaggttagatatccaagtggaatatcatatgaacattatttctatccagatgataaaattcttacacttatcggtaaggatatagtatttgatcgcattgactataatcaagaaaaaataataacacatatttattag

SEQ ID NO: 223160 - DNA, 2850 bp, Klebsiella pneumoniae
atgcttgagatatatgccattgctggcggcgactggttacggggcaacctgaacgcgattgcggcgtttatggggaccagcacatggtcgactatagaaaagatgtgtatcgccatctcggtactcattgtggcggggaactgggtaaaaaaacacaacgtaatggaccttattggctgggtcttttccctcaccctggtctctatgctggttgtcattcgtacccctgtgcagatcatcgattacagtaacgttgcgcaggtctatgaagtcgataatgtgcctattggtctggcgattccggcgtcgctgacaacacgggcaggaaacgcgcttatccagagttatgagatggtcttcgctctgccggacagtgtcacgtacagtaaaacggggatgttatttggcagtaatctggtcgcgaaaagtacggattttttgtcacaaaatcctcagattacgacgctgttttccgattacgtacaaaactgtgtgatgggcgatattttcctcaatcataagtactcttttgaggaattactgaattcacctgatccgtataccctgatttttgcaaacccgagtccactgcgtggcgtgtttgacaaaaacaaccagttccagacatgcgaggaggcctcacgggatctgaaatcggctctcgtgctggatactcagacaggcggtaaaacctggaactactatgttcgtcagctgtttggcggcaaacctaatcccgatctgcttttcagccagatgattggcgacagctacaattacttctacagctcgggacagagcgccgggcagattatccgccagaacgtcacgatgaacgccctgcgcagtgggatccagagttatgcggcccgcagcggggacaccgccagtctggtcaatatggctaacacatcatcccttgaaaagcagcggctggcacaggccacaatggggcaccaggcgcttcgcacacttccgctgatgcagaccgttatcatggggataatgattgggatgttcccgatcatggtgatggccgccatgtttaacatgatgacgctgcaggtgcttaaagggtatgtgtttgcgcttatctggctgcagacgtggccattactgttcgccatcctgaacagcgcgatggcctactatgcgaagcaaaatggcgtgccggttgttctctctgagttgtcgcaggttcagctcaaaaactcggatattgcgaccaccgcgggttatattgccgtgatgataccgcccttgtcgtgggggatcgtgaagagcatgggggccgctttctccagtgcctacagccatttttcttcttcggggctcagtgcaacatcgcaggcggcctccggcgtggtggacgggaattactctttcgccaacatgcagatggagaacgtcagcggctacagctggggtaccaacagtacaaccagtttcggacagatgtcgcggcagctggcgaatgggggtatgagcacgcagacgcgggatggatcgatggtctgggacagtggtggtgcaatgtcaaaactgccggtggatatcaacgtcggtcgtcagatagccagtgcgcagcaacagatggcccgtgaggctgatgtccaggccgaaagcgcgctgcatggctataacagcagcgtgacaagtgcctggaatagtctgcagcaatttggcaccaataaagggaacagcacatcaacaacgactggggccgatactaccgagtcttcgcaggattcgatggccagaagcaagatgtggaatgcggttgttgctaatgcgaaagccaacaatatcagtaatgaggagtctttccagcagttgatggatgattcggctaaaagtacgcagggcgttgatttattcggatcaggtaagtggagttcaggggatcagctgtttggtaagctaggtaaatggggaactggattatctgctgaggccggatttaaaggcagtgtgggttgggcccacagctcaggtaatacagataacgttggaacttccggtcgggaatctcatgacagccggcatgataccagcagtcaggcagcgaaagactttaaggaagcatccgattactttaccagccgcaaaaccaccacatcgggcaatattaccgataataatgccagctcgcgtgttgaccagtttgccgcgtcactctccagtgccaaaaacagctatgaccagtatacaaccagccggacacgcagccatgaatacagtgagatggcgtcacgcacagagagcatgactggccagatgaacgaaaacctgactcagcagtttgcgaactttgttcagcatcgtgctccacaggatgccgaggccattctgaccaataccagttctcctgaaattgcggcgcagcgtgaagccctggcgcgtgaattcgtcaaagagcaggtagaacccagggttgatgctgcatatcaacaggggcgtgaaagcatcggacagaatatgacaggggtgtcaggaggtggagacaatggttcggtaatggccgactacagacataattccgcccgtatcgatgcgatgacgcaacgggcagatattaaggataatgtgggtcagaaagtggatgggatgattacagagaataaacaacagcatcaggaaacccgtgaaaacatacaacggcaaggcgcagaggtgaaaaatgagaatgctgaaatggaaaaggaccataaaacaaaagcaaatgagtttaaaggtgattataatgaaagaaagagtaaggtgaaaactttaccaggagctgactcgcctgctgagttagaggcgaaagcggcgaaaattcaaaaggattatcttgatggtaaaaggtaa

SEQ ID NO: 223161 - DNA, 1089 bp, Klebsiella pneumoniae
atgattcagtacattcgtattcaaaattttcgctcagtgaaggatatcgcgctggagctcgggccgctgaacattgtcttcggccctaacggctgcggtaaatccaatatttataacgccatccacctgctgaccgctgccgctgagggcaggctttcggggtttatcagcgaagagggcggtctggagaatatgatgtggtccggggagcgttcgcccctcgatcgtcacccccgccggctgcaaatcgcctgccggaccgacagcttcgattatgaactgcagataggcttccctgaaaaattgccctatccgacgcaattcatgctcgatcctatcgttaaagaagagaatatctggctggccggctactcccgccggccttcctcccgcgtactgcagcgcaagaatcaggcggcgtttctcgtcgatgtcaccggggagaaaagtactttcaccgagagtatttatgaaaatgagtcggtgttcggtcagcttggcgagccgcaccgttttcccgaagtatcgcgagtgcgggagaccctgcgccgttggcggttttatcatgaattcgcgattggccgtcattcgccactgcgtcagccggccgtgggttaccgttcgccagtcctcgacagcgatggccagaatctcgccgccgcctttcagaccattgtcgagatcggcgcggaggagattttgcatgaaatccttgccgacgcctttcccggctgccagttttattgtgaaaacgagcactcgcgtttcgctctgaaaatgcgtcgcgaagggatccgccgcccgctgctggcggcggagatgtccgacggtacgctgcgctttttgtgcctcgccgtcgcgctgctcagtccgcgcccgccggcgtttctggcgatcaatgaaccggagaacagcctgcatcgcgacatgttgcccgcgctggcccggctgattatcgaggcctcgcgctacagccagatctggctgaccagccactcggcggagctggcggagcttatcgccgccggggcgccttgtcagcgctatgcgctggagaatcgcggcggtgagacgcggattgtcgagtga

SEQ ID NO: 223162 - DNA, 621 bp, Klebsiella pneumoniae
atgactgagcaacaactgcgagaggaaatggtacagattggcgcctcgttgtttagccgcggctatgccaccggctccgctggcaatctgtcgttgctgctgccggacggcaacctgctggcgacgccgaccggcgcctgcctcggcgaactgcaggctcagcggttgtcggtggtgacgctgcaaggagaatggatctccggcgacaaaccgtcgaaagaggtcacttttcaccgggcagtctatttgcacaacccggcctgcaaggcgatcgtccacttgcacagccactatctgaccgcgctctcctgcctgcaggggctcgacccgcacaactgtatccgcccctttaccccctatgtggtgatgcgcgtcggcgacgtcccggtggttccctactaccggacgggcgatgaccgtattgcccaggcgctggccgggctggcgccgcgctataacgcctttttactggccaaccacggaccggtggtcactggctcatcgctgcgcgaagccaccaacaataccgaggaactggaagagaccgcacggctgatatttaccctcggcaaccgcgagatccgctacctgaccgctgacgaagtaaaagaactgagataa

SEQ ID NO: 223163 - DNA, 447 bp, Klebsiella pneumoniae
gtggtagagatagcccggtttggtctgcggattcagcgcttcgatgagtatccgcttgtcgtggcgggcaaagcactccgcggcgtagcgcagattatcgataagcacggcctcgcaggctgcgcgatccgctcccggcggcaccacgccggccatgatatgcacctgcgggcaaccgagctggcaggcatactccagcgccagctcaatatcgcgtcgggcctccgcgcttctcccggggatggcggcgagcccccattctccggcgttgacgtcgccgggtggggtattgaacagcaccagctgcagctggttctcctgcaggcgctgtctgatttccccggcggcatactcatagggaaacagaaactcaacggcttcaaatcccgcccgggcagcggcggcaaagcgttccaggaacggcagttcggtaaacagcatggataa

SEQ ID NO: 223164 - DNA, 2196 bp, Klebsiella pneumoniae; identical to SEQ ID NO: 222351

SEQ ID NO: 223165 - DNA, 900 bp, Klebsiella pneumoniae
atgaccactatttttcagtcatctacgccagccaataacccaaaactacagtatgccgtgcctgataacctgctgaaagggtatgggactgaggcgggcaccactgacggtgttttccttttccgcctcgatgacaaacgctcattcccacttcaggccgcccccgccagcccaactgatgctgcaattctgaacctggcaaacaatattagcgctcaggcgtcgctgggtggggatgtagcggcgtttacgtggaatgctgcccgtaaatctctggcactgaacagccggagtgccccccgttacctgcaaagtgcgggcaattttatggcgcggtttgatgctgcgacacacccggcaaagaatcaatatttcgcgctgggtatgtatgttcgtattccgtcagctgatgattttgtcgcggtcagcaccagctactcaggcatctgcggaacggctgaatctctgacacccgcgaacgagttcggggggattgcattcactaatatcagcggaacaaaagcgatcaacgccattcgcggcactgatgcaggtgcgctgcgcacggtagctgtcccggcgactaatttcctcggcaaggtatgtctggtcgttatttaccgggacgccgctggaatgcacctctatgtcgaagcaaccgacgggacaacggcttctgcgatgaccgcgattacgaatgtccctgttttgacaacgaccatgaccagccggagcctgaaattcggcgttactggtttttactccggtagtctcgtctataaacacgagtttttcgggggatggttgatcgacctggaaactatcgccgtttctgatatccctgcgtttgcatctgccgacctggctcgccagatcggcagagggtgggttgttggctaa

SEQ ID NO: 223166 - DNA, 753 bp, Klebsiella pneumoniae
atgggtattactcttttcactaataatgcgttttcgtctgtttcagaccctgacgaatactcgccagggtttgatgtgacgtcccttcgtcgcgccgaaatatttacttatacagggattggtaaaaatcttatgccgggggaaggcggccccactgtagttggcaccccgacgtttatcaccgactcgccctttgttcagttatcaaataacgcgaacgtggcgcatttgagcctgggaattaatgatgcccccaaacaaacctggtttttgctctttgatccgaataatgattccacgcagagaattatcgctggtagcttttcggggactgctgccgttaccccaccaggagtatctgtgattgtagatgaggctggcgcgctggccgccatgcagggtatccactacacggaaaatgacacttacggaaccgcgcgcgcaactctgagtgcatttaataaaacaaagccgatgcttctttgtcttacccttgacggccagaccaccaggctgaccgacatgaccaacaatgtttcagcgtccctcactctggcaacaggtcgtgagcgagccccggccccccttcgcatcggtaaaggcggagttacatactggggatcaacctctgcaaccagccgacttggggcttatatggttttcgatcgcgtattatctgatgctgagaaaattactgttcatgactatttactccgttgcatacaggcgaagtatccatcattgattttctaa

SEQ ID NO: 223167 - DNA, 1866 bp, Klebsiella pneumoniae
atgccgtcacagaaaaccgttgatgatttacttaagcatgttgaaaccacaaacctaattttccagctcgttgacatcctcgggtatcgccagttttatgccctgacatcaggtgaattcgggacggcaaaaacgattattaaacctgatggcattgaactggagggctattcactgaccgtatcggatgacaatggaatatatatcgaaaatattcttggtcaacgcgtcgtattagttgatgaatatgggaatgtggcaccaaggagtttgcgcgctgcgcgagatggttcgttcggcacagatacggcaatggtgtcaggaaatggccttaattttaactcaggtggctcccggattgatattacaggtcctgagtttttaaaggtctctgattttcttggccggtctaaaacaattattgatgcgagcgggaatctggtcggcggcggtagcggtggcggtataacgctgcaggacagaattaacattctgaacgcggaaaatctgaactattacagtaaagttcgcagtcggtataacgctgacatagagcgactggtgttcgctctgtcgatggtcatctggtacggacaatcactttccagcaaccaggagggataccctgcgctcagcaaaacgccgtacagcaatctgggcaatctgatgctgggaaactcacctcgcccaaatacccggacaggggcaggattcaccccggtggggtctgccatcctcaacccgctaaaggccgtcgttcagtcaggtgacgggtcgtatgtgatgagtgatgccgcggttgctgcactgcctgccgggtcaggtaatgagggtgaaggagccgttgctgcggttaacatgctgcgcacgctgtttctgcgtcaggctgcattgctaactgacccgtcgcgcctgcttgttctggcaagctgcggggtcaacgggaggaccgttgaggctctgtccaggggggccgttccggagctgtataaccgcattcgtgaagctgtgtctaaaataaaggccatcgcggatggcgacagcaagacattcggcatcggtgctttctgtttcctgcagggagaatggaattacaaccctgggtacggcggggactatacgcgggagggctataaagcgaaggtgcgtcagctttatagcgatgtgattgccgatttttgcgcaggacagagaccgcctgcgatgttcacctatcagactggcggcacttacaccattgatacctatgagctggcgatcgggatggcgcagctggatatggcaacggagggagggaacatctatggagtctgcccgtcgtatccattccccaataaggatagcgggcatctgaccagtaacggttatcgctggatggacatgtttttcggcaaggtcatgttcagggttctggttcttggtgagggatgggagccgttacactgcacaggcgttgaagttcaggatgattacgcactccttaactatgcagtcccgtatccaccactgcagtgggggacaccatatgatgggcgaacagctaaaacctatgctgataaggggtttcgggcgactgatgcaaatggcgcgctggacattactgccgcagagattgttgctgatacggtggtaaaactgacattttccaggcgagtctccgggaaaatcaaaatctggtacgcagataaaacatcacataacggaaatggctgtctcaaggacagcgatccattcctggcaactgaaaattacgtgtataccgcaggtagcggccaatatgcggacgaaaatattcctgaacttgtagataaaccatacccgctggaaaactgggcatgggcacaaattatcgagacaactgtatag

SEQ ID NO: 223168 - DNA, 903 bp, Klebsiella pneumoniae
gtgcgcacgagggtacgctttcgtattgaagaagatcctgagtcaggggaactggtttcccgcagctatgaggtgggggaaaaaagcgggttggatcgggtccgggtgcggtttgcaaaacagctggataaagagacatggggttttgaagatccttcaattaaaggcacatttgtctggtcccggtctgccgggcagggaaaatttgagtggggttccagccagacgactgttcatgacgggagcgctggcggctctaccacaccgcctacacccattccggaaccgcggagcatctgggggttgcctaacccggccccggaatcgttaccgcccgtaccgggaacgccgatcccggaggaacaggaaccaaatattgaaacattgcccatcgaagaccgggatttcgatgactttattattgttgacccgatgggggttgtcccggcaatctatgtgtattttaagaaagcccctgtggaagagtatgaggttgactattatgaaaattttgaaggccgttcaaggcagggaaaatatcaagtcgatcatattccatctagagatgcggttcgtgtatatttagaggatttatatcctgatgagggaagtaaatatatagataagatggttgataaggttgcttcagttgctattccaatagctgttcatcaaaaatgtagtgaaacctatggcgggcgtaataatcgtaaggtagagacagaaagcggcgagatgataactaaaaaagagctagatgctcgtgacttagaagctgccgtcaatgccaactgggatgcgaatgctgaatgccttaagaatgaatatggtatgagtaacgagaaaatcgaagagatcagagcaaaactacataagttaaaccgaaatgtggggttatattaa

SEQ ID NO: 223169 - DNA, 201 bp, Klebsiella pneumoniae; identical to SEQ ID NO: 214892

SEQ ID NO: 223170 - DNA, 1203 bp, Klebsiella pneumoniae
atgagcagtatttatgtagattcgtttatgttggaaaatggtgagaggtattgccatgttgtaaataaaaaaacgggtgaaccattgtattatccaaatttgtatataacaacacaagtcagaaatcggtcagagtctatatcaacaatgaaagttattgccggtagcatttcattgttatatcgattctttatgaggaaagagatcaatattgatgaaagaattcagaaaaggatatttctggctcctcatgaaattgatgatttgattgagtttacttcattcaattttaaaagtggtgtagatagtgatttttgcgtttcaaatgtcaaaaaaccaactaagtattttcggattacaacaatagctaactatctggaatggctatgtaaaatacttctttctcatacaggtcagaaagatacaatcaaagagatacttgttttcattaacaacataaaaagaaagaaaccaagaaacaatgacaaatatgttatggatatcgaaaagagcttagacaaagctcaactggattctttgtttagcattctttcgccaggaagtaacttgaatccgtttacggaaatagtacaaaaaagaaataacctaatattcctattattacattgctttggcatgagagccggtgaacttttgaatctgcgaattggtgacatagattttgcagaatcaacaatagcaataaggaggagagcaaatgataaaacagattcacgagtttatcagccattagtgaagacttgtgagaggaagttaattgctgatgcgaaccttatatatgaaatttcagattatatcttgaatgatcgtaggaaagttaaaaatgctaataagcatgactttctgtttattacctataaggaagggaagactcaagggcaaccgctgtcattttcttcataccataagatagtgagtgttgttcgtcaatcatcctcgcttctaagtggattaacaggccataaattacgacacacatggaattatgagttctcgaaaacaatagataaggctaaggacatatccgacgaaaaagagcaacaaatccgttcttatctaatgggatggctaccaggttcagacacttcaataatctataatcgcaggcatatttttgagctatcgaaaaaaactgcacttgagcagcaagagcaactattcaaaggaggatttgatgaataa

SEQ ID NO: 223171 - DNA, 282 bp, Klebsiella pneumoniae; identical to SEQ ID NO: 215489

SEQ ID NO: 223172 - DNA, 1113 bp, Klebsiella pneumoniae; identical to SEQ ID NO: 188185

SEQ ID NO: 223173 - DNA, 141 bp, Klebsiella pneumoniae
atgaaaaaaaaggaattaagtgatgacagtaaagagttttctgacttcatagaactaatggatttatgttatacaggaaggcagaaagaagaaaacaaaaacgcactgaaatcagacaacgcatacattacaattcggtag

SEQ ID NO: 223174 - DNA, 576 bp, Klebsiella pneumoniae
atgttctgccagcctttgcgccagctttcaagcgtttcaggcttatcccattcacggacctttttaccaaagccggtagaaaggacctcacgggttgttcccatgatatggatatgtgggttacgaccattgatatcgtggataacaacatctgcgatgatgccttgcttggtaaagtgttcaagaacaaaagcagcggtgagttcaatgctttgttctggtgttagctcagcggggagggcaattttaaattctttggcaagacgggtcctttttatgtgctgttttgcgaccacaaacttcaccagttctgtaatcgaagaaaactttacggtgacgatatgcagcagagttaaccgaagatttgccttcgcctctgctgatgttctccattttaaaactgtatatcgccatccaaagatacctctaatgctgactagctggttttcgttttacgcaaggaaaacgctggggttgacgttgaccttgattttgtttccgaaggaaacggttttagcctgcggcaggcaaccgtcggtagaccccacggcattagagcgaagcgataatgcgtaa

SEQ ID NO: 223175 - DNA, 1230 bp, Klebsiella pneumoniae
atggatgatatttttggagaagaatgttatagaaatacaattgccgtacgcagaggcattaaaaatgtccaagcccagtttgaagatgtgagtgcattatctcagggacatgaatatatacttttatattcaaaaaacagcttatctcggcttcccaaactaagccaatctcaccttgaacaaaaaccggggaaatgggacaccttttggcgaggaacagataggccaacaatgcgttatgaattatttggtataactcccgaaaaaggccaatggcgatgggaaaaaaacagaacagctgaagccatagaaaactatcgctttttcttagaaaaaaagtctcaacagatgagtcttgatgattggttttttgataatcttacatcaacaaataaaaaattaaatttcgttcgtaagaacgatgaggatgttgttcagtattatgttccaccaagtgatggaaaaatactaagcgataactggatggatatttctttaagcggaaatgaaactattttcgacaccgaaaaaaatactgatttgttagaacgaatcatcaactggatttgtagaagttctaacgatatagttttagactttttcgctggttcaggaacaactggccatgcagtgttgaaaagcaattcaaaaaataatagtaacattcattacatgctcatccaattacccgagccaagcaataaatctgagtttatgactatctcagaattaacaaaatatcgtcttatcgaatcaggtaagaaagtaaaagatggaaaccccgactggaatggtgatgtcggttttcgtgtgtttaaactcgatacatctaacatccgtccgtgggaagccacagcagaaaccctttcagaacagattgatgcctatgtaagcccaatccttgaaggccgtaatgaagaagatttactcacagagttaatgctaaaacgtggcatcgacctgagtgtaaacattgaaacccgtcagtttgatggattaaccgtttcttgtgttgacggtggcaaattgtttacctgctttgctaatcaaatccctgcatcttccgtcgaagaactgaccaaggggatcatcgactggcataagagtttgaaggctggcaaagatactgtctgctatttccttgatgacgcatttgaaaataatgtcgctaaaacaaatctttgcgccattatggaacaacacggcctaactaacctgcacagcttgtaa

SEQ ID NO: 223176 - DNA, 546 bp, Klebsiella pneumoniae
ttgcaaaaagatgattactctgttggtgtgacctggcaacaggcaaaagattattgtcagtggctaggtaaggagtccgataaaaatattgatttaccgacagaagcacaatgggaatatgcggcaaggtcaagagggcagtatcttcctttttcgactaataatggaaatttcgagcttggttctaatatacctgaacaaaagaaattagatgaatacacagatggttatggttttcctatttatccaattgggaaatatcctccgaatccgctaggtttatacgatatggggctaagtggagccgaatggagtaatgattggtattcaactgattattattcccactcccctgtttatgatcctcaaggtccagttaagggtaatgaaaaagttttaagggggtatgttggcggagatcgtcagtatgccttgactatattcaggcaatcgtcacaacctgtgccaaaatttgctgggcgtgatgattatcaaaagtttggagttagtcctctttttgtatttcgttgcgttattaataaataa

SEQ ID NO: 223177 - DNA, 162 bp, Klebsiella pneumoniae; identical to SEQ ID NO: 186183

SEQ ID NO: 223178 - DNA, 705 bp, Klebsiella pneumoniae
atgaacccattcaaaggccggcattttcagcgtgacatcattctgtgggccgtacgctggtactgcaaatacggcatcagttaccgtgagctgcaggagatgctggctgaacgcggagtgaatgtcgatcactccacgatttatcgctgggttcagcgttatgcgcctgaaatggaaaaacggctgcgctggtactggcgtaacccttccgatctttgcccgtggcacatggatgaaacctacgtgaaggtcaatggccgctgggcgtatctgtaccgggccgtcgacagccggggccgcactgtcgatttttatctctcctcccgtcgtaacagcaaagctgcataccggtttctgggtaaaatcctcaacaacgtgaagaagtggcagatcccgcgattcatcaacacggataaagcgcccgcctatggtcgcgcgcttgctctgctcaaacgcgaaggccggtgcccgtctgacgttgaacaccgacagattaagtaccggaacaacgtgattgaatgcgatcatggcaaactgaaacggataatcggcgccacgctgggatttaaatccatgaagacggcttacgccaccatcaaaggtattgaggtgatgcgtgcactacgcaaaggccaggcctcagcattttattatggtgatcccctgggcgaaatgcgcctggtaagcagagtttttgaaatgtaa

SEQ ID NO: 223179 - DNA, 183 bp, Klebsiella pneumoniae
atgattatttatttattacatatcttagttgctagtggttcaagagtgattttaataaaagttcttcatgttaatgattggattgcacatctgacgattggtttgcttgcgggtataattattcccattctcatttatcgatacattaaaaatactaagcttaagtacttgttttctctttaa

SEQ ID NO: 223180 - DNA, 333 bp, Klebsiella pneumoniae
atgaacaacattaagattattacgctttttcatacaaataaaaaaataccatttatgacttgtattgttaaagatgttgaagagaatgaacaagtaataaaactcactttgcaaaatggtgataatatccatgtcaaagattatgactatttcttcttatcagaatcagcacatgagtgtgatcaggaacgaatgattaacacatacagaagattgatttctgaactgagccaaattagcgaagaaacaatagagtccttagttccgatgatatcgaataatatgaaaaccaatttcccgacaagcggtgtgagtgctttggaagatgattga

SEQ ID NO: 223181 - DNA, 180 bp, Klebsiella pneumoniae
atgaccagtaaaatgaaagttgttattttgcatgatagaatcattatcgacaataaaattactcgcgatgattattttaacatatctgactcagatatgttacgtcaagcaaaacgagagtcagaagttatcatgaaaaatcgctctaaaattaattctttacctgctaaagccaaataa

SEQ ID NO: 223182 - DNA, 183 bp, Klebsiella pneumoniae
atgttaatgttgaacgttgttaacggtgaaaaagaagaggatgacgccactcgcgctccggaatcaggtgataaacaaccggagcgtgataaaaagcgaagccgatactattcctgctcaggaataatggatatctggccgttacgctcgagaatagcgaatttgatcgctttcaattcataa

SEQ ID NO: 223183 - DNA, 1911 bp, Klebsiella pneumoniae; identical to SEQ ID NO: 215106

SEQ ID NO: 223184 - DNA, 2391 bp, Klebsiella pneumoniae
atgtcacagactacatttaacaaagctcagtttcaggctgcactgacgcgtcagtggcagcattttggtttacagtccgcttccgagatgacacagcgtcaatggtggcgcgcagtcagcggagcgttggcggaactcctggcggcgcagccggtagcgaaaccggcgcaaggacagcgtcacgttaactacatctcaatggagtttctgattggtcgtctgaccggcaacaacctgctcaacctgggctggtacgagggcgtcagcgacgcgctgaaaggctacgatgtcaacctcaccgatctgctggaagaagagactgacccggcgctgggtaacggtggactgggacgtctggcagcctgcttcctcgactccatggcgacggtggggcagtcggcgaccggttacggtctcaactaccagtatggcctgttccgccagtcatttgacgatggccagcagatggaagcccctgacgactgggggcgcagcagctacccgtggttccgtcataacgaagcgctggatgtccaggtaggtatcggcgggaaagtcagcaaaaacggcgaatggcagccggcgttcgtcattaccggcgaagcctgggacctgccggtgcttggctatcgcaacaacgtcgcccagccgctgcgtctgtggcaggccaaacacgctcatccgttcaacctgaccaaattcaacgatggcgatttcctgcgcgccgagcagcagggcatcgacgcggaaaaactgaccaaggtgctgtacccgaacgacaaccatcaggccggtaaaaaactgcgcctgatgcagcagtacttccagtgcgcctgctcagtggccgatatcctgcgccgtcatcatctggcaggccgcaagctggccgaactggcggattacgaagtgatccagctgaacgatacgcacccgaccatcgccatcccggagctgctgcgcgtgctgatcgacgagcaccagctgagctgggacgacgcctgggcgatcaccagcaaaacctttgcttacaccaaccacaccctgatgccggaagcgttggaatgctgggatgagaagctggtaaaagcgctgctgccgcgccatatgcagatcattaaagagatcaacgaccgctttaaacagctggtggacaaaacctggccgggcgataagcaggtctgggcgaagctggcggtggtgcatgacaaacaggttcggatggccaacatgtgcgtggtgggcggctttgctgtcaacggcgtggcggcgctgcactcggatctggtggtaaaagatctgttcccggaatataaccagctgtggccgaacaaattccataacgtgaccaacggcatcacgccgcgccgctggatcaagcagtgcaacccggcgctggcctcgctgctggatgagacgctgaaaaaagagtgggccaatgacctcgaccagctgatcaacctggaaaaatatgctgacgatgcggcgttccgtcagacttatcgcgatatcaagcaggccaacaaagttcatctggctgagtttgtgaagcagcgtaccgggattgagatcaacccgcaggcgatcttcgatatccagatcaaacgtctgcacgagtataagcgtcagcaccttaacctgctgcatatccttgcgctgtacaaagagatccgcgaaaacccgcagtccgaccgcgtaccgcgcgtcttcctgttcggcgcgaaagcggcgccgggctactatctggcgaaaaacattatttttgccatcaataaggtagcggaagcgatcaacaacgacccgaaagtcggcgataagctgaaggtggtcttcctgccggactattgtgtatcggcagcagaaaaactgatcccggcggcggatatctccgagcagatctccaccgcgggtaaagaagcctctggcaccggcaacatgaagctggcgctgaacggcgcgctgaccgtcgggacgctggatggcgctaacgtggaaatcgctgagcaggtgggcgaggagaacatctttatcttcggccacacggttgaagaggtgaaagccctgaaagcgaaaggctacgatccgctgaaatggcgtaaaaaagacaagctgctcgatgcggtgcttaaggagctggagaacggcacctacagcaacggcgacaagcatgccttcgatcagatgctgcacagcctgctgcagggcggcgatccgtacctggtgctggccgatttcgaagcctacgtagcggcgcaaaaacgggtagatgagctgtatcgcgacgaggaggcctggacccgcgcggctatcctcaacaccgcgcgctgcggcatgttcagctccgaccgctcgatccgcgattatcagcaacgtatctggcaggcgaaacgctaa

SEQ ID NO: 223185 - DNA, 1866 bp, Klebsiella pneumoniae
atgaagaaacagcataattatacggtgatgcactggggaacctggcaggtggagagcagtgagggcgagatcgtggcggttaagccggtgccctgggataaaaatccctcacgcatcggccagtcgcttcccgacgcggtgaccagccaaacgcgcattcgccgtccggcggtgcgcgccggctatctccagcacgggccggcgtcacgagaagggcgaggtaaagagccctttgtcgaagtcagctgggaggtggccctggacctgctggcgcgcgagctgcgctcggtcaaggcgcgctgcggcaatgaggcgatctacggcggctcctacggctgggccagcgctggacgctttcaccatgcgcagagccagctgcaccgctttctcaagggctttggcgggtacaccgccagcaccaatacctatagcagcgccgcgggcgagcgtattctgccgcatattctcgggccgctgagcccgctgcaccggcagcatacccatttttccgagctggcccgggagtgtcagctgtttgtcgccattggtggtctgccgctgcgcaatgcccaggtcaacggcggtggcgccaatgaccatatgctccagtactggctggataagatgcaggccaacggcacccggtttatcaatatcagtccggtgcgcaatgacctcagcgcggtgcccgaagccgagtggctggccattcggccgggcaccgataccgcactgctgctggccctgagctatgtgctgatcgctgagtctctctacgaccaggcgtttgttgccagccataccgtcgggtttgccccctatcgcgcttatctgttgggcgagcacgatggcgtagcgaaaaccccggcgtgggcggcggcgattaccggcctggacgcccagcgcatcgccgacctggcgcgggagatggcccgccaccggacgatggtgaatatctcctggtctatccagcgcgcccgtcaaggggagcaggcctactgggcgacggtggccctgaccgcgctgctgggacagctcggcaccccgggcggcggcctcgggtttggctacgcctgcaccaacctggcgggcgcggtgcgaaaagcgttttccggcccacgcttacccgccggggagaatgcggtggacagcgttatcccggtggcgcggctgtccgatatgctgctgcacccgggagaaacctatgagttcgacggtcagcagcggcgctatcccgatatccgtttagtctactgggcgggaggcaatgcgtttcatcatcatcaggacatcaaccgactgtgcgaggcctggcgccgcccggagacggtggtggtgcatgagcagtactggaccgcgcaggccaaattctccgatatcgttctgccggccaccacctcgctggagcgagaggatatcggcagcggcggtcacgacgggtttatgatcgccatgagcgcgcagatcccgccggtgggcgaagcgcgtgacgattacgccattttctgcgatctggccgggcggctgggcttcggggaagcgttcagcgaagggcgtgacgccgggcagtggctacgtcatctctatgaggagtcaagaccgcgggcgcaggaggagggtattgcgctgccctcgttcgatgacttctggcagcaaggggtgctggaatacagcgcgccggagcggccgcaaatttttctcgccgattttcgcgccgatccgcagctctatccgctctccaccccctccggcaaaattgaactcttttccgccaccgtcgccgggtttggctatcgcgaatgccctggccatccgtggtgggatgaacaggaggccgcccgccagcggcaggaggcggcgcgctag

SEQ ID NO: 223186 - DNA, 360 bp, Klebsiella pneumoniae
atgttaacgccgtttggtaagaaagtaaggaaattacgtatagacgtcggtgtcacgctgaaaagcatggctgatgctatgggcgtgacctcgtcttacctctcagcaattgaaacaggaaagcgggctgtaaccgatcctgtattgaaaagtatcattagctatttcactaatgaaggcgttcatgcaggagatgagttaacaaaagcggcgcgtgattctcaacaatctgttgagattaatctatcgggtaagaatcaaaatgctcgtgaagtagcgatggcatttgcacgtaatttcgatgaattaagtgatgatgagtttaaacgtctacgtgaattgttaactaaaaaacaataa

SEQ ID NO: 223187 - DNA, 528 bp, Klebsiella pneumoniae
ttgagcggacaagattatcgagtaccacctttaagccgcaacgcggtgcgtggtttaacaagcaaattacgctcgatgctgaaaatacatgatttgtattttcccgtaattgaaatgctggagttcgcactaccgcagatcttacctaacttttcgtttgaaacagcttctgaaaaggagatgggggggacacatgggctaactatgcctcaggactcgctgatcatccttcgtgaagatgtttatgagggagctcatgaaggaaacgggcgtgatcgtatgacggttgctcatgagattggacatctactaatgcataaaaatattgcttttgctcgagctgagccaggagtggaaattcgagcttttgaaagcagcgagtggcaggcaaagtgctttagtggagagttgctcgtcccctacagccatgcagctctactaagagccatgtctgtagaagaaatagctgaagcgtgtggggtttctgcacacgcagcagattatcaaaaacagttattaaaaaagtaa

SEQ ID NO: 223188 - DNA, 150 bp, Klebsiella pneumoniae
atgggtttaaagtcagttgtttcaaaagcggctccgaagggattccgctgggtcttctgtcgctaccgtaaggttcgcgggaagtccgcaaaagtccttgatgcgcatgattatggctacgaggcttgggctttcttggttcgttgctaa

SEQ ID NO: 223189 - DNA, 2163 bp, Klebsiella pneumoniae
atgacattatcgcaaaacaataaaatcagccagcaagaaaatgacataatagatttaggtcgtttatttggggaaattattgatcatagaaaattaattttatcaattactgctgctgttactttgttagcaattttatatgtttcgctgtcaacacctatttatcaagcaaatgcgttggttcaagtagagcaaaaacagggaaatgcaatacttaatggcttaagtcaaatacttccaagtactcaaccacaatctgcacctgaaataacacttcttcagtctaggatgattttaggtaaaactgttgatgatatggatcttcaatatagtgtcaaacctaaaagtattccttttattggagaaggtattgatagaatatggggtgagggcaaaggagaaatccacattaaacatctttatataccgatgcgtaatggggaaaatgtagctagttttgttctgactgtgaaaaataaaagtacttatgaaataaaaaaagatgatgtcgaggctgaaggcaatgtagggaccactctggaagtagggggtatttcacttttagttgatgcgataacagcaagagaaggaagtcaatttgtcgtaaattataagacaagattaaaagcgatttccgatttgcaagatgctcttagtatttcggagcaaggcaaagatacaggcatgttagaattaacattgataggtgcgaatccaaccttaatacggaatacattagacggcataacacagaattatttagagcagaatgttgctcgtcaagcagcccaagatgcgaaaagtttagacttcttaaataagcaattacctaaagttcgtgacgagcttgatattgcagaaagtaagcttaatacgtacagaaaacagaaagattcagtagatctttctatggaagcaaaaactgttttagatcagatagtaaacgttgacaatcaacttaatgaattaacattccgtgaagcagaaatttcccagctttatacaaaagaacatccaacctataaagctttaatggagaaaaaacaaacacttcaagaagaaaaatcaaagttaggtaagcgggtcagtagtatgccggctactcaacaggaagtattgagattaagtagagatgtcgaatctggtcgtgctgtttatctgcaattattaaatcgtcaacaagagctcaatatagccaagtctagtgcgattggtaacgttcgagtcattgataacgctgttaccgatcctgaacctgtaaaacccaaaaaagttttaattatagttggtgcagtaactatcggtttgattttatcaataatactagttttgttgaaagtatttttacgtagaggtattgaatcacctgaacaactggaagagcttggaattaatgtgtatgcaagtattccagtatctgagtggttaactaataaaacgtcaaaaacaaacaaaaagaaaaatgagtctgaaatattgctgatagatgaaaatccggctgatttagcagtggaagcaataagaagtttacgtacaagtctgcattttgcaatgatggaatctaaaaataatgtgttgatgatatcaggtgcaagccctaatgctggtaaaacatttgtaagtacaaatttggctgcaactattgcttctgcgggtaaaagagtactgtttatagatgccgatttacgaaaaggctatgtgcataaaattttcaaaaataatcatgaaaaaggtttatcagacatactctctggtctaattgaagtgaaatcttctatagaaaaggtaccgaatggtgcgtttgattttatatcgcgaggacaagtaccgcctaatccatcagaattattaatgcatccaagatttgaggcactattaaaatgggcttcacaggaatatgatcttgttattattgatacccctccaattctcgctgtaacagatgcagcaattatcggaaggtatgtaggaactacattacttgtagctcgctacgaagcaaatactgcaaaagagattttgattagtaaaagacgctttgaacaaagcggtgttgaaattaaaggttgtatactaaatggtgttgtcaaaaaggcgagcagctattatggttatggttataaccattatgggtattcatatggcgaacatccaaaaaaataa

SEQ ID NO: 223190 - DNA, 846 bp, Klebsiella pneumoniae
atggctaacgaacttgtgattacagccagctctcttgctgagcgaggcattgacggcgccacctggagcgccctcaaaaacagtatttaccctggcgccaaggatgagtcggtgatgatggcattggactactgccgggccagaaacctcgatccgcttctgaagcccgttcatctggtgccgatgagcgttaaggactcgaagtcggggaaaagcgagtggcgtgatgtggttatgcctggcatcgggctttatcggattcaggccgatcgctccggtgattacgctggcgcaaaagaaccagagttcggcccggacgtcactctgacgcttaccggtgttgaggtgacagtccctcaatggtgcaagtacacggtcagcaagcgcatgccgagcggggaaatcgtcgaattcagcgcgaaagaatactgggttgaaaactacgccaccgccggccgcgacactaccgcgcccaacgcaatgtggaaaaagcgcccttatggccagctggcgaagtgtgccgaggctcaggctctgcgtaaggcgtggcctgaaattggacagcagcccaccgccgaagagatggaaggtaaaacgctggaagtggatgcgcgtgacgtaacgccgcgaaccacgacagaggcgctccccctggtggccagtgaggaaacgttgcaggcaattaccgacctcctgacgtccctgaataaggactgggagcaggacttcctgcctctgtgcagcaacatcttcaagcgtgacattttccaggcatcacagctcaccgaagaagaagcgcagaaaggctttagcttcctccagaaaaaagcgcaggtggcagcatga

SEQ ID NO: 223191 - DNA, 621 bp, Klebsiella pneumoniae
atgaacgccaatccacttatgcccggtgaaaaatatgggtacttaaccgtcaaagaatactcgcacatgctgagaggtagaaggatgtatctatgcctttgtgtgtgcggtaattcctgctatagagccgcaaatcagcttaaaaacaattcaataagcagctgcggatgcatgacaggaaaaaacgccactcacggccagcgcaatacccgcgtttacaggatttggagcggaatgaaaaaccgctgcacgaacccgaacaacaaagacttcgaaaaatacagtaagcgcggtatctgcgaaagatggctgacgttcgagctatttcttgaagatatggggctacctcctacgcctaagcatcagctagatcggaagaacaatgaaggcccgtattcaaaagacaattgcagatgggcaacggttaccaagcaggcggaaaacagaagtacatcgttttactggtttgttgatgggttgcgttttgaaagcgccggagccgcggcgaatcattttggcgtgaaatcagcgaccatccacaaatggtgtcatggctacaaaaatagagggattaacatcccgccaagagccaactgccgaaaggagaggaaatatggataa

SEQ ID NO: 223192 - DNA, 771 bp, Klebsiella pneumoniae
atgagcaaaggaaccattatctgtctgtgcgatatcactggcgttatggctgagccgtgggttgaagcaggttatcgcgctgtcctggtggacccgcagcaccctgaaacttcgatcgacggtcctgttgagcgcatatcggcaaccatcattgaggcgatgccgcggctatctcagattatccgctctgataacgtcgtcatcgtcatcggcttcccaccatgcacgcacgtggctgtttccgggtcccgttggttcgagtccaagcgcgccaaagacccgcatttccaagccaaggcagcgctggtcgctgagcaatgccggatggttggcttggcggctggctgcccgtgggcattcgaaaacccggtgagcgtgttcagtagcatcttcggctcggccgattacacgttccatccgtaccagttcactgggctgtgcgcggatgacaactacacgaagcagacatgcctctggacgggtaacggcttcaaggcgccggcagagaatatgcacccgatggttgaagcggctatcgacgccgtgaagctggcctgcggccgcatggtgccgaagaaaaaggcgatcgaagccatatccggaacgtcctttgccggattggtggctgactggtatccggacaaccgaattcacgaatgtccgcccagcgacgagcgcgccaacattcgcagtgcaactcctcttggatttgcaaaggccgttttcctttcgaatgcgccccacctcaacaggaaacgggaggcagcatga

SEQ ID NO: 223193 - DNA, 765 bp, Klebsiella pneumoniae
atgaaagaacgcggaatgatttttaacgccgatatggtgagggccatcctcgacggccggaagactcagactcggcggcctatcaaatggaaacagactcggttcactgaaattggtgagcgcgaagacggtagcaaatggccgtggagcgaagatgcagagcatgcttgcgacttctggcacccatgcccgttcggcgccgtcggcgatcgcatctgggtgcgtgaaacatgggcgaccctgggcaatgaagacggctgttatgtcgattgggaagataatctttgcaaaggagatgagcgctcagcggcaaggatttaccgcgccagctgcgagcagagaccaggtgattacggcctgtggtctattcccgatgacgcctactggaaaccacataccaaagagcacaagttcgaaggagcatggcgcccgtcaatccacatgccgcgctgggccagccgcattctgctggaaatcaccgacgtgcgggttgagcggctaaacgctatcagcgaagaggacgcacaaagcgagggcgttcataccgaggtatgggaccagacagtagtcgcaaggaattacgcggcaattgatgagtttttccaattttggtccgaggacatgccccactacgtagaaatgaatcaactgtatcggtcctcattcagaagcctgtgggaatccatctatggcgccgaaaactggctggccaacccctgggtttgggttatcgagttcaagcgcgttgaaggcggtgcagcatga

SEQ ID NO: 223194 - DNA, 306 bp, Klebsiella pneumoniae
atgaaagaactgaaattttacggtgccagcgatgaccttttcgagtgcgaaggcgctatccgggaagaaatctgcatgtacagcaaccccggcgtctatcacctcaaatcatctgaaggcgagatgttggttattgcctgctatacggaagaaggctgctgggctattggtgtcggcaaggttaatgaagaaaccccgctaccggcatggcctgcgtcattcagtcagcatgagcgcggatatagcgtggtcttaacgctgcaggtacctggcgacaccgttctggttatggaggacgaatcatga

SEQ ID NO: 223195 - DNA, 210 bp, Klebsiella pneumoniae; identical to SEQ ID NO: 103436

SEQ ID NO: 223196 - DNA, 1407 bp, Klebsiella pneumoniae
atgtcaaagcaacagattggagttgtcggtatggctgtgatggggcgcaaccttgcgctgaacatcgaaagccgtggttataccgtctccgttttcaaccgctcccgtgaaaagaccgaagaagtgattgccgaaaacccaggcaagaagcttgttccttactacacagtacaagagtttgttgaatccctcgaaacaccacgtcgtatcctgttgatggtgaaggcgggggctggcaccgacagcgccatcaattccctgaagccttacctcgataaaggcgacatcatcattgatggcggcaacaccttcttccaggacaccatccgtcgtaaccgtgaactgtctgccgaaggttttaactttatcggtactggggtttccggcggcgaagagggcgctctgaaagggccttccatcatgccaggtggccagaaagaagcctatgaactggtagctccgattctgaagcagatcgcggcggtggctgaagacggcgagccgtgtgtgacctatatcggtgctgacggtgcgggccattatgtgaagatggtgcataacggcattgagtatggtgacatgcagctgattgcggaagcctatgcgctgctgaaaggcggtctggcgctctctaacgaagagctctcgcaaactttcaccgaatggaacgaaggcgagttaagcagctacctgatcgacattaccaaagatatcttcaccaagaaggatgaagagggtaaatacctcgtcgatgtcatccttgatgaagccgcaaacaaaggtaccggtaagtggaccagccagagctcactggatctcggcgagcctctgtctctgatcaccgagtccgtatttgctcgttatatctcttcgctaaaagaccagcgtgtagccgcgtcgaaagtgctgagtggtccgcaggctcagccggccggtgataaagctgaatttatcgaaaaagtgcgtcgcgcgttgtacctcggtaaaatcgtttcctatgcccagggcttctcccagctgcgtgctgcttctgatgaatacaactgggatctgaactacggtgagatcgctaagattttccgcgctggctgcatcattcgtgcgcagttcctgcaaaagatcaccgatgcttatgcgcaaaacgctggcattgctaacctcctgctggcgccatacttcaagcagatcgctgatgactatcagcaggcgctgcgtgatgtggtggcctatgccgtgcagaatggtattccggtaccgacgttttccgccgcaattgcctactacgacagctaccgttctgcagttctgccggctaacctgatccaggctcagcgtgattactttggtgcgcatacctataaacgtaccgataaagaaggtgtattccataccgaatggttggattaa

SEQ ID NO: 223197 - DNA, 1059 bp, Klebsiella pneumoniae
atggttgaatgccaaatgagccaaaaaagactgccattattagatttaacacgttggtttgccgcattagcagtggttattttccattatttttatatggtttctgatgttagaaatgattatccatatgcgcagtgtttcataaagtatgcttatcttgctgtgcagttattttttataattagtggctttgtaattttcatgtccgttgataacaagaaaggaccatttgtttttttgacttctcgatttattagattatatccagcatatattatcagtgtattcttgacatttgcttttgtttatttaatcccaataagttacccctttgattttaatgatttttttggtaatttgacaatgattcctagtttgctaggtagcaaaccggcaaacccagcatattggtctttagctattgaaatatttttttatttatacgtatttattttacttttttttgtaagtaatataaaaaaactctatgtgtttatgctgctatggttacttatttcaattttgaatatattctgtagtattcaatttctggaaaagctatttctcttaaaatattgctctttatttgttgggggggccggattgtatatgcatgcgagatttaaaaatatattttatttatatgcggcgttgctctcgcttccggtgtccatttattacgcaatcgaacattcgattaaactttcaaatatattgccatatttttatttttcaagttatactgtctcttttatagtttctattttttatgcgtgggtgtgtttttcatctaggatttataatttaaagtggattgactcaaatgttatttcattattggcaggctcaagttatgtcttatatgtaattcatgaaaccatcgggagagagctcatacaagaatactatgaacgttttgaacactttcctattctaatcgccatccttgcggtcatattatcattaattattcatgcttatttggagaagcctctaagtttgtatttgaaaaaaattaaaaagacaaatatcattagtgcggttatgagtaaaaaataa

SEQ ID NO: 223198 - DNA, 1611 bp, Klebsiella pneumoniae
atgaaatacacacggcgtactttattaaggaatattttttctttaccaatattaggttacttgggtttagagcataaagcatctctggccaacgataatactcaacttccttcatcaaaggaaagattatgttcaaattctaacccaccagatttatcgatatataatatctttgaaaaattacctggtaagacattgaaaattaacaatgaaaagcagtttgtaatgttcgaaaacacattgtggaaacctaaagtgcaaagtaactacccaatagttttaaaaggagagtctaaagatgtaattgacatattaaaccaaaatttttctttaataattacaccaaataatgatatgaacaaaacaaatacaaacattgtattggcatcgcattttggtgtaaaaggcaatgggatcccatgtggggaacaatgcgtcgcagcaataaattatattatgataaatggtggtacattgctctttcctcctggagaaattaattggggtaaaattcgtggtaactttaatgttaagaacggtcctaattttaaattattaggtacgccaggtaagacagtttttacattcgacaatattgatccaataaaaataaataaactatggggacattcagaaccagcattaattacaattggttcaaactcgactatcagttctgaatatacatcatccttcattatggaaagcataaaaattgattattcaaggcaaaaaaatcaaggcgggccaacttacaatactatgaataacggagcacatccaaccccatattcagatggcacacttgctattcatattatgtatgcagactctccaatactaaaagatatagaaataagtaacgtttatggttccggaatttgtatatggaaatgtactgatgccataatacaaaatgtaaccacgtataatgtatccgcaaatcaagttctaagtgccgatggtaaaaatgaatcagttgatcactttggatactcaatatggtcgggtgctagtgctaacactaaaatttccaattgtaaagcatttaattatcgtgtatatagctgtgatccaaaattaaaatcccctcataataatgagcaatatgacggaaaaatatgtggatatataggtatttactgcgaatatagtccaatacaaggaaataaaaacattgaaagcatacattatgaatggctttcagatgagaacacagacaaaagaggttatgctaaggtaatcaactgctttgtacgtggttacacatttggttttaagtctgaatcgctaatgtacatacattttgataattgcaaagccatttacaattacataggttttagtattcaagcatcagctttaattgagaactgttatattaacggtctcactatcgattacgaaagatgcccacaacaaggcatagaatcacaacgaggaggtgtttgtttctcatggtggagtggtgaaaataatcttcacgagcaatatcttttaaactcatatattgaatcaagaaaatatcaatgcatttcgcttggtaaaggaacagtcacaatacaacataacacgctcagaatatatgagtttaaaagatattgctcgtga

SEQ ID NO: 223199 - DNA, 141 bp, Klebsiella pneumoniae
atgagccgtgacatgctagaactcatccgcgatcgctggtggaagctccgccttttccggtgccgtggaactgtaatgaccgattatcgaattttgaaaaactttgtccgtatttatcagtctctgggagaaaaagcatga

SEQ ID NO: 223200 - DNA, 588 bp, Klebsiella pneumoniae
gtgagtatggccaagaaatcccaacgacgctgcaaaatctgccgggagaaattcactcctgcattcgaaaaccatcgctggtgctgtcctgagcatggcgctgaatatgccatgcaggaactcgataagaaacgcgcaacgcaggctcaggcgaaagcgaagaaagaacgggcagcctggcgcaagcgcaaagcagcggtgaagcctctccggcactgggaagatatgacccagcgtgtcgttaacgactatatccgcgagcgtgaccacgatctgccgtgcatcagctgcggcacgttcggcacggttcagtgggaagctgggcactaccgctcccgcggtaaagcatcacacctgcgctacaacgaggacaacattcacaagcagtgccatcactgtaacgtgcagttatcaggtaatcagcagcagtaccgcgtcgctctggtagagaaaatcggcgctgagcgcgtcgagacgctcgaaaacaacaacacccctcaccgatacaccatcgaagaactggaaggcatcaggcgccattacagcgcgctacgccgtgcgctcataaaacaacgggaggctgcatga

SEQ ID NO: 223201 - DNA, 267 bp, Klebsiella pneumoniae
atgattagcagaaaagagttattcgctgaaattagcagcgaggcggttactgaagatggcgaagtggttgggtattttgtcaaaaatagccgcatgaatctgcttgaacagatgctatgcagcaccgtcaccgatgaaaaactgcaggaaagtgcatatagggctaggttaaccgctggctggaatcttgggctggctaataacaacgacgggttcaataaatgcctggctgctcatgccgctggcatcaaggtggaggctgagtga

SEQ ID NO: 223202 - DNA, 498 bp, Klebsiella pneumoniae
atgagtgatatcaccgaactggcgcagagcctgaaagcggcagcagatagagagatgatttgccgagatggcgccgaaacttctgaaatctgggaaagaactgtaacgccggaaaacatcctcgcgctggtagaggcgctggagaaggcgcagcagcggattgttgatcttcagcagggctgtgaaaacgatccgagcattcatgaaattatcgacctgaaagagcgcatagacaacctagagtcattccgtactgcctatatggagtggggtgaaaaaactgactgggtgcaaacagctaagcgctttgatgttctgaagccgtggggcaagcatcgcgctgatgtgctgaaagaatatatccagcatttggagtcccgcaccgtcaccatgaagttaccaacgacccgcctttgggctggagttactgagtgctacgaaaaatcggacgtaatcgccgctattcgcgcggcaggtgtggaggtttctgatgattag

SEQ ID NO: 223203 - DNA, 201 bp, Klebsiella pneumoniae
atgataaccgggactactaactatgacgatgttcctgatgttccctgcacgttgtgcggcggctattacaaagccgacgagccagaaagccatgactgcgatgaagaagcccataacgaaatcgagtgtgatatctgcggtttcaaaagcactgatccggaaggcgctcactactgctgcgaggataactccgatgagtga

SEQ ID NO: 223204 - DNA, 240 bp, Klebsiella pneumoniae
atgggtaagaaatacggtcgcctgaacaaagacacctggcgctatgacctgcatgccgggtttaaagaggcatttcgcgtactgcggccacacggcgttcttatcttcaaatggaacgaaacccagataccggtgagccagattctggcgctgaccgacgagaagccagccatctggcaacgaacagggaaggcggacaaaacgcactgggtaattttcgttaagggggccggcaaatga

SEQ ID NO: 223205 - DNA, 228 bp, Klebsiella pneumoniae
atgaatacgaatctaaaaaccattatctgctcaatcatgagccagaccgagctggctaaacgactcggcacaacccctcaaacggttagcctttggctgaatagcgagacccccgctcatcgcgtaattccagtttgtgaggctctcggatggaaggttacccctcatcagatgcgtggtgacatttacccaaaccccactgacggcctgccgaaacaggaaggctga

SEQ ID NO: 223206 - DNA, 222 bp, Klebsiella pneumoniae
atgccgccagacgaagatggtgagaatgtttcatcgcagacagaacctgaagcgcctggccggaatgaactggatgacaaagagaaagcccttttagctctctttaaccagatgccggaagccgagaagaacaggctaatagtccacgcaaaagccactttaaaagaactagacctcctcaaggatgacgttctcagcatcatcaaagatattaacgattaa

SEQ ID NO: 223207 - DNA, 1431 bp, Klebsiella pneumoniae
atgtcttcgttttcgtctacagacgggcagtcaaagagcaattatgctggaatgagtgaaaggcggtcgattgattacatcccggaaagcgaacggcatggacacccttttagccagttcaccctttggtttggcggcaatctgcaaattacggcgattgtcactggcgctttagccgttgtgctgggcggcgatgtagtgtggtcgctggtcgggcttctggtcggtcagatgctgggggcggcggtgatgtctctgcatgcgctgcagggaccgcgactgggacttccgcaaatgatccttagccgcgcccagtttggggtttttggcgcggtggtgccgctggtgctggtttgcgtcatgtatatcggtttttctgccagcggcaccgtattggccgggcaggcaatggccaaactactgaatatcagccacgtagccgggatgctgatattcagtgcgattattatcgttatcgccgtcctcggttataaggtgatccacaagctgggcaaactggcgagtatcgtcggaattctcgccttcgtttatatgttcatcacgctgctactttcggccgatctcagtgcgctcgcgcacaataaccatttttcgctgccgacgtttttattagccgtatcgctctcctcatcgtggcagatcgctttttgcccctatgtatccgactattcgcgctacctgccacgcgatgtttccgccacgaaaacgtggtgctcagtgtttttcggcaccgtattgggcacccaaacgtcgatgacgctcggggttctgacagcggccattgccggcagcgcgttccctggtcacgaggtgagctatctggtgggattaggtaagagtcaggcgatggccatggttatctatttcgccatctgttttggtaaaattaccttcactaccctcaatgcgtacggcagctttatgtcgctgaccaccattgtttccgccttccgccggcaaaccgtgctgtcgcaaaagtgtcgcattgcattcgtggtgctgatggtgacggcttcctgcattatcgcgttgcttagcgaacccgctttcttaaagcatttcacgcattttcttctgtttctgctggcgttcttcgtgccgtggagcgccatctgtctgacggattattatcttatctcgaagggcgccatcgatattccggcgctaagcgacccgcagcaacgctacgggttctggaacctgtacgcgatcaccctgtatatcgtcggtgtgcttatccagttgccgttcattgagaacccgttgttccatggttcgctcacgtggatcttcgccggtaacgatgtctcatggataataggctggtttggcaccggggttctttactacgcgctgcgccgctttgaccgccggtcgctgccggcgcagagtcttttcccttccacctga

SEQ ID NO: 223208 - DNA, 465 bp, Klebsiella pneumoniae
atggagccacgccgcgtgaatggcaaaaatcactggtatcacgaaacccagtcaacaatctgcccggtggatgtcctgccgctcgtccctgaagccgcccatgttgaagaccgctttttgctggacctgacgctgccggccgcctggctacgtgcccacgctgactggctacaccccgcacgccagctggccgaactgctgtttcccgaccaggtggcggtgagtcgcctgcagacctttaccgcttacgatcgactcagcaccgcgctcaccgtcgcccaggtctacggcgtccagcggctgtgtaaccactacgccgcccgccttgctcccctgccaggccccgattcctcgcgcgagagcaaccgtcgtctggcgcaaatcacgcaatatctcgtcagcttgccggttcgccctcggttattaacgctctctcccgtagccagctggacgaagtgggcttaa

SEQ ID NO: 223209 - DNA, 639 bp, Klebsiella pneumoniae
atgaagaagttagcagcggcggcattgattcttggcacgctttctaccggcagcgtctgggcgcatgaagcgggtgagtttttcattcgtgccgggaccgccaccgtccgaccgacggagggctctgacaatgtgttaggcagccttggcagtttcaacgtcagtaacaatacccagctgggtttaacctttacctatatggcgaccgataacattggcgtggagttgcttgccgcgacgccgttccgccataaggtcggcaccgggccaaccgggactatcgccaccgtccatcagctgccgcccaccctgatggcgcagtggtactttggcgatgcgcaaagcaaggtgcgcccgtacgtgggggccggtatcaactacaccaccttctttaatgaagactttaacgataccggcaaggcggccgggctttccgatctgagcctgaaggactcctggggcgcggcggggcaggtcggcctcgattatctgattaaccgcgactggctgctgaatatgtcggtgtggtacatggatatcgataccgatgtgaaattcaaagccggcggcgtggaccagaaagtcagcacccgtctggatccgtgggtgtttatgttctccgcaggctatcggttctaa

SEQ ID NO: 223210 - DNA, 414 bp, Klebsiella pneumoniae
atgagtgaaatcaacccgtgcatgacgtgcggtgcctgttgtgcgtattttcgagtctctttctactgggcggaagccgacgatgcgggcggcctggtgccctccgcgctgaccgaaccgctgacccctttcctgcgctgcatgagcggcaccaatcagcgccagagccgctgcgcggccctgtctggcgatatcggcgacgccgttcactgcactatttatgaaaaccggccttcgccgtgtcgcgaattcgccatgtccggggaaaatggcgaggaaaacgatgcctgcaaccgggcgcgggcgcgctacggcctgccaccattgcggcctctttacaaagatatacctgccctgaccggcgcagagagtgctacgacggaacgatttgcggtacaatcgccggctagttaa

SEQ ID NO: 223211 - DNA, 1161 bp, Klebsiella pneumoniae
atgagatcgccgcaatattctgtgcccacgaccctggcgctggtcatatccagtctcctcgcccctaacgcctttgctgaagaatcagaacaagataccgaaacgatgattgtgcgcagtacggcggaagaggcgcttaagcaacagcccggggtgtcgattatcacggctgaggatattgctaagcagccgccggtcaacgatctctcagacatcatccgtaaaatgcccggggtgaacttgaccggcaacagcgccagcggcagtcggggcaacaaccgccagattgatatccgcggcatggggccggagaacaccctgatcctgatagatggggtaccggtcacgtcacgtaacgcggttcgctatagctggcgcggcgaacgcgatacccggggcgacagcaactgggtacctgccgaaatggtcgaacggattgaagttctccgcggtccggcagccgcgcgctatggttccggcgcggcgggcggagtggtcaatatcattaccaaacgtccgaccaacacctggcacggttcgctgtctttcttcaccaaccagccggaaaacaacaaagaaggcacgaccaatcgcgctaacttcaatctcagcggcccactggccggcgaggcgctgacgatgcgcctgtatggcaatatcaataaaacggaacccgacgcctgggatattaaccatgcgcaaaacggctcttacgctgcggggcgcgaaggggtccgcaataaagacattaacgcgctactgtcatggaaaatgaccccgcaacaaattctcgatttcagctacgcctatagccgtcaggggaatatctatgctggcgatacccagtacagcaacggcaatcttagcccgaacgggctggtggactccctgtacggccacgaaactaatcgcctctatcgccagtcctggggactgacctacaacggtctatgggattggggccagtccaaagccggtgtttactacgagaaaaccaacaatacccgcctgcaggaaggctctaccggccgcgtcgaaggcatgatcaacagtgaagattatgccaccagccgtctggaatcctggcgtactacctcggaattcaatgtgcctttcttctggctggcggaccagacgctgacgctgggaatggaaccatga

SEQ ID NO: 223212 - DNA, 762 bp, Klebsiella pneumoniae
atggtactgaacgccttcgacctgacgggtaaggtcgccatcgtgaccggttgcgataccggcctgggacagggaatgacgctgggcctggcgcaggccgggtgcgatatcgtcggcatcaaccgtaaaattccccatgatacggccgcccaggtgctggcgctgggccgccgctttcacgccattcaggcggatctcagccaagagaatgatatgagcggtctggtcgaccaggcggtggcggcgatgggccgggtcgatattctggtcaacaacgccggaattatccgccgccatgatgccctgaccttcacggaaagcgactgggacgcggtgatcgacctgaatctcaaagcggttttctttctcagccaggcggtcgccaggcagttcattcgccagggggaaggcgggaaaatcattaacatcgcctcgatgctctcgtttcagggcgggatccgcgtcccctcctacaccgcctcgaaaagcggcgtgctgggtttgacccgtctgctggccaacgaatgggctggccagggtatcaacgtcaacgccatagcgcccgggtatatggccaccaataacacccaggcgctgcgcgaagatgaagagcgtaaccaggcgatcctcgagcgcattcccgctggtcgctggggagcgccgaaagacctgcaggggccggtggtgtttctcgcctcatcagcggccgactatattaacggctatacgctggccgtcgatggcggatggctggcgcgctga

SEQ ID NO: 223213 - DNA, 663 bp, Klebsiella pneumoniae
atggactattcagttgatataatgaaagccttcgatactctggttagagtaaatacgaatctttacaatagatatatattaccacatataggcgttgtagactcaactgatgaggtgttttccttagacgttaaatcatatttaatattgttgcatgcagccattgaggactacatagaaggaatcagtgtcttcactagtaatgcagcttgcgagctattcaaaaatgaaggcaaaataaccttgccacttatgtttttgtttgcaaaaagtaaatcattcaaagacagagtatccgataaaaaattatcagaagaattacatgactctccgcgagattttatggttagttcgttgggggatattaacgcaaatgcagttgcaggtgcgattgataataatggaataaatgtcaggtatctcaataatcttttgcaacattgtggcattaattttgatgtgtctgaaaatgattttattagttggaaaagtttagctgactatagaggtgattatgctcatgcagtggtatttaatcatggcaaaaagcctaaggcgacaaagcttatatcaccagaggatgctagagatctaggtaatgattgcatcagattttcggaaaagataagagatgaagcattaagtagtttaggtttaaattag

SEQ ID NO: 223214 - DNA, 1224 bp, Klebsiella pneumoniae
atggaagaaaaacattcgttagaagaaaatgccatagctgtttctgaaagtgacgatctcgagattatcgagtctaatcaagatataataagtgatgatcctgttacaaaggaagacattgaaaatcttgtaatttattcgcgggattggactattgaaacaataattagccaaatagaatctgggaatattgatctcaaccctgcttttcaaaggagaaatgtctgggaaaatgataagcgttctaagctaattgagtcatttattgtagggtatcctgttccagaagttgttttggctgaaataccaggtaaaaagaaacaatatgttgttattgatggtaagcaacgccttcttgccattcatggtttttttaaacctgaaaataaatattggaaaggtaaggctgagttaaaaggattaacaattcgtaaagatttggaaggtgtttcatttgatagattagatggagatgaccttaggctgttgaataactcagatctaagatgcaccattctatcaggatatcaaacaacagctgtactttacgatgtattttatcgtttaaatactggttctgtacctttgtcgatgcaagaactaagaaattcattacataaaggagatttttctgttttcataactgagaagactaactctgaaatcccactgcatgctattatgtcattgccaggtccagataaaagatttaaagatattgaagtaatgcttaagtttttagcccttaactttaataaagacaagtataatggtaatttaaaagttttcctagacgggtttacagaatatgctaatcaatcttggtcttctaacaataaacttataaccaatgcttgtgatgagtttgatcaggcgtgtttattattgattgatatttttaacactccaaaactagtcggtagaaaatgggttcctatcaaagataattgggagtcgagatttaatcgatctgttttcgaagttttagttcagtacgcatttaatataatcaaagatggcaattctgcattattttccggtgataatgaaaaaaatgattttatagagtgtataaaacaagcattcacagggcaagaatttgcagcctctgtatcgactacgacaaaaacagttgaacaacattcgataagatttaatgttttatttggcattttaaatagcaaatttggtttgcattatactctacctcagacaattcaataa

SEQ ID NO: 223215 - DNA, 792 bp, Klebsiella pneumoniae
atgcaacgtgacatggttgatgttacggatgataggactttaacccaagggacaatttttaattgtgcttactcagcctcttaccctaacaatgaaactttaggtcttgtgatcaccgcaagatgtgatattgcaaataaagaaaaggttaagttttacaattttattccagcagttccattcagcatctggagagataaagaattacaaccaatagtaaaaaagcaagtttttaaaaatttaaaaagacaatttcttgagcttcttgaaaaagcatctttctcagaactcaatgttacaacttatggttatcacaggatatacgccgtaataaaagaaaagaatttactaaataacagggaattaacacgcctagattcacttcaaactaaaataaattgcttagatgaaaactcagcatatgaaaaaattattatccattttcgagatgaatgtgaaaaggccctcaaagatataatcgaaaataaaaaccctgactatttttttattgataatgttgatggttacaattctgttgttgtcaacctaagagaaatttatgaattgaacatctccttagcaaaaaaaataccaaatggtattgaactagataatggtgaaaattattcaggcctaaacataaatgtaacaaataagttttgcagtattgtaggccaactcaagtcaccatttattgaattacttatgcagcgttttactaataatttcgttagggttggcgttgcaaatcaccatagtaaattattaacaacaataatggatgccaaataa

SEQ ID NO: 223216 - DNA, 2271 bp, Klebsiella pneumoniae
atgaactttattgctatagaaagtaatgcagcgcggaaaatagtatcggaaaggatgcttcagtctgcagattacgacaagggccaaattttggcacgcttattaaaagatggtaaaatatccgacttcagtttagacattaaagccttgtctataaactccggaatttatattttaagtaaaaacccaaataagaaaaacctgttgatattcgataccactacatttaatggttttcaaaggagtagtagtgaagttgttaccattcttcaaaaatcgtgtagattagctattaagctatgggataaaattggtcatagtccctgcgaaaaaataattaatggtacatcattaattgcccttttaccgctctcatttaccactggaaaatcttataaagtaatacttgataaatctccggataaggaaaggcaagaaaaaaggaatgaaagtagcttcttaatttttcaagatgggtatgatacagctgagaacgaacccaagctagctaatttccgaaaggcaaaagaaggatttttggaaatagaccccctcactttatttaaaagttctgaaaaccaatcagacccatcaagttcttatttaagtgttagcgagattcatgaagcggggaatttaaacaatcctcatatgggcttagattactggacaaaaaacctaacagaaagccaaaagaaatttgttttcagcgaaagctttgggccagacattcttaaaggagctgcaggaacaggaaaaacattaagcttaatcctgagatctgttgttcaactcaaaaatgccaaaaaaacggacaaccaacttcgagcgatcttcataactcacagcatagcgactaaaaataacattgaaaatttaatagcgtctaacggtggagatgagttcattaactctggtaaattacagtcaattgaagttactactctacaagaatggtgcataaataatttaggtaatagaatatctgcaactgaatatcttgatagtgatgcattagagtcaaaacagttgcaactactttacataaatgaagcactagaggattttttcatcaaggattatgctggttcacttaatttcatttcgcctaaacttaagaagttctttggcaataacgatccttggggcatatctatattactccaagaggaaatatcaacgtatattaaaggtcgtgctggtgatgatcttaagacctatatgtcacttcccaggaccaaaaatatcatcccaatagagaacgatgatgattttaaaactatattctcgatttacaataaatatcaagaaaaacttatagcattaaacttgtttgatagtgacgacattactctatccgcgcttaaagaaacgtcaactccgatatggaaaaggcgtagaatgaccgctgggtttgatattatgtatattgatgagacacatctttttaatattaatgagctaagtttattccataatctcctcaaacccaactctaatcatattgtatttacaatggatcgaagtcaagcaaccggagatacgactataaccaaagaagatgtagccaaagaacttgatgccaacttagcaaatgagcatggtttaagtgctgtatttcgttcttctgaacatatcataaatctagcaagttgtgttttagcatctggggctacattatttcaggagttagaaaatcctttggcagaatcgatgactggccatacatctttgattgaggataaatgctgtgtcccatatataataaccaaacaaaatgcttctgaagtttacagagcatctttctcttttgttgatcatattgctcaagaattagatatttcaaaaagtgatgttttaatagtcccatgtacagatcaagttttcaaggaattaaaaaattttgctgaatcaaatgataaggaatatatatcaattgaaaggcgtggtgataatttagctgtagaagctgcagccacaaacaacctttatgtaataggagggatggattatataggtggtttggaattttcagtcgtagtgattgttggtgctgattctgacaaattccctgaacaatcgacttatactggagaatctctgcacttcattaattactcatcatttaataaattatatgtggctataacacgggctaaatatcaaattgtttttatagctgaaaagactcaaaaaataagtccattactcgaaacagctgtaaccgagggattattgacttacaatgatgaactttcaaacagactataa

SEQ ID NO: 223217 - DNA, 300 bp, Klebsiella pneumoniae
atgtcaatccctatttcagagaagttgaagcttatcagggagtcagaacggcttaatcgtaggcaattcagcgagttaacaggagtaatttacagcacactttctggctatgaggctggtacaaaaagtgcgagccttgaaccaatcatgaaaatcttccaacaccctagattcgtgaaatacacactgtggtttatgaccgatcaggtttcgcctgaagccggtcaaatcgcaccggccctcgcacactttgggcaagacttaacaacctcgcagcactcagaccaaaagactggttaa

SEQ ID NO: 223218 - DNA, 864 bp, Klebsiella pneumoniae
atggagctgaaatgctttcgcaccctctggggagtgacgaccccctggccgcaaacgctggatgaactgcagcgcgtcggctgctgcggcatcgaagcccgcgtgccgttaacggtggccgagcggcggcagctcgccgaccgcctgcaggcgtcggggctggagtatatcgccattcttttcagcggcggcggggtgctccccgcccagcatgaaacgcccgagcagcatctggcgcgcctgcagacccgcttcgccgaggccagcagcctcaacccgcgctttgtcaatttgctggcgggcaacgatcgctggccgctggcgcagcaggtcgattttctcggcaaggcgcacgagctggccgccgggtttggtttgacctgcagctttgaaacccatcgcgccacctcgctgtacagcccgtggctcaccctggagatcattcagcagctcccccagctgcgctttaccgccgacatcagccactgggtggtggtcagcgagcgcctgctggatgaccccagcgatgacttcagcgcctttatcgaccgcgtgcatcacgtgcaggctcgggtgggctacgaccaggggccgcaggtgccgcacccggcggcgcctgagtatcagccggcgctggcttttgccgagcgcttctggcagcaaatctggcgttcgcagcgccagcgcggctacccgcagaccacgctgaccccggagtttggcgccgacggctatctgcaccatctgccgttcaccaacgttccggtggccgatctctggtcgctcaacgcctggatggccacgcgccagcaggcccactttcagcagtttttatcgctcactgaacaggaaccgcagccatga

SEQ ID NO: 223219 - DNA, 846 bp, Klebsiella pneumoniae
atgaactattacatcggccactccaaaagccataagggctacgttccggaaggagaagagatctacggctccggcaagccggaccataaagaggctttcgatatcggcttccaggcagcggatgaccatccgctggtgctcgccggtacgccgctgatcggcgccaacgagtggcccgatctgccggatttccgcgcgcgggtgctggcctactacgacgcggttttcgccctcggccaccgtctgttcgacgctttcgccctcgcgctcggcctgccggaagggtatttcaaaccgatggtgacctgcccgccggctaagctgcggctgatccattacccgttcgacgccagcgtcgaagatgttcccggaattggtgcacacaccgactatgagtgcttcaccctgctgctcgccgaccagcccggccttgaagttctcaatgaagaaagcgtgtggatcgatgcacctcccgtcaagaacgccgccggagaagaggcgttcgtgatcaatatcggcgacatgctggaagtgctcagcgctggcacatttgttgctacagcccaccgggtgcgcaaagtgccgcaggagcggtactccttcccgctgtttttcgcctgcgattaccacacgctgatccgtccgctgccgacttttctcgccgccggcgaagccggtgaatatcaggagctcagcatcggggagcatatgtggagccaggccctgcaaacctatcgctacctgcgcgaaaaggtcaatcgcggtgaacttcagctaccggagcgcgcgcgcggcaccaatacgtttggccatttgaaaaaacaggctcagcaaaaaaacccctaa

SEQ ID NO: 223220 - DNA, 153 bp, Klebsiella pneumoniae
atgaaatggttcaaagcaatacctgctttttgcgcgacgctgctggtaacgacggccctcgctggctgtgcgggatcggctacaaaggagagtacgggcggctatattgacgataccgtggtggaccaccaaggtgaaaacggcgctctttaa

SEQ ID NO: 223221 - DNA, 423 bp, Klebsiella pneumoniae
atgctcaaaaccatttccccgctgatatcgccggaactgctgaaagtgctggccgaaatgggccatggggatgaaatcattttttccgatgcccatttcccggcgcacagcatggggccgcaggtgatccgcgccgatggcctgcgagtcagcgatctgctgcaggcgattatcccgctgttcgaattagacagctatgcgccgccggtggtgatgatggccgccgtcgaaggcgatgcgctcgacccgacggtggaacaacgctatcggcaggcgctctcagcgcaggccccctgcccggatatcgtgcggattgaccgctttgccttctacgaccgggcgcaaaaagcctttgcgatcgttatcacaggagagtgcgctaagtacggaaatatccttttaaaaaaaggagtcacgccgtaa

SEQ ID NO: 223222 - DNA, 216 bp, Klebsiella pneumoniae
atgcagcgtcggatcagtatctggttctactggagcagcgtatttctggcgttagggaccgtgctgttcagcggcagcctctattgtctggcgctctctcatttacgtctgtgggcgttcgtgaccccggtgggcggcgtaagcttcctcgccggttgggttttaatgttaattggtgcaattcgtctgaaacgtaagggcgttgttcatgaataa

SEQ ID NO: 223223 - DNA, 138 bp, Klebsiella pneumoniae
atgaccagccgttttatgctgatattcgccgcgattagcggctttatctttgtggctctgggcgcctttggcgcgcatgtcttaagtcaatcgctcggcgcggcggagatggcctggatccataccggcctggagtaa

SEQ ID NO: 223224 - DNA, 1227 bp, Klebsiella pneumoniae
atgcatatcgccaacgcccgcgagattgccctcgggcaaaagggacccgagacgttgggggtgaaagcgctgaatgacaccacgctgcaggtcactctgacccagccgaatgccgccttcctggcgatgctggcgcacccttcgctggtaccgatcgacaaagtgctggtggagcggtatgccgataaatggacccgaccagagcatatcgtcaccagcggcccgtataagctgtcccaatgggtggtgaatgagcggctggtggctgaacgtaatgcaaagtactgggataatgcgcataccgttattaataaagtgacttacctgccaatctcttcggaggccgccgatgtcaaccgctacaaagcaggggagattgatattgtctatacggtgccgatcaatcagtttgcgcagttgcagaaaaccatgggcgaccagctggacgtttcgccgcagctggcgacctattactacgaattcaatactacccggccgccgtttaacgacgcccgtgtgcgtcgcgcgctgaatatggcgcttgataaagatatcattgccggaaaagtgcttggccagggccagcgcccggcctggctgatcggtcagccggatatcggcggcgtgacgctgcataacccggactacgccagctggccgcgtgagaaacggattgccgaggcgaaaaaactgctggcgcaggcggggtatgatgaaagccatccgctggtctttaccctgctctataacacctctgagtcgcaccagcgtatcgccattgccgccagctctatgtggaagaaaaacctcggcgtcgaggcgaagctacagaaccaggagtggaagacgatgctggataccatgcatacgcataacttcgacgccgtccgctacgcgtggattgccgactacgacgatgccgccaccttcctcaatactttccgtaccggtgatagcgagaacaccagtcagtacagcaaccctgcttacgatgaggccctgcgcaatgcggcgaaagcctccgacgtggcgacccggggcaaatactatcagcaggcggaagatctgctggcgcaggatgttcccgccattccggtctatcactatgtacgtacccatctggtgaaaccttgggtagggggcttcacgccggataagctggggtattactacaccaaagacatgtacattaaaaaacacccatccgccagcggtgatgggcgttga

SEQ ID NO: 223225 - DNA, 1587 bp, Klebsiella pneumoniae
atgaaaaagcgcctctgggtgctccaccctctgctgctggccagcacgctgcctgcgctggcggctcagtctgatgaagacagcatcatcgttagcgcaaaccgcacccatcgcaccgtggccgaaatggcccaaaccacctgggtcattgagggccaggagattgagcagcaggtccagggcgggaaagagttcaaagacgtgctggcgcagctgatccccggcatcgacgtcagcagccaggggcggaccaactatgggatgaacatgcgcgggcgcgcgatcgtcgtgctgattgacggcgtccggctcaactcctcacgcaccgacagccgccagctcgacgccatcgatccattcaacatcgaacatatcgaagtgatctccggagcgacctcgctgtacggcgggggcagtaccggcgggcttatcaacatcgttaccaaaaaggggcagcaggatcgtcaggtcgatctcgaggtgggcagcaagagcggttttgcgaacagcaacgatcatgatgagcgcgtcgcggcggccgtcagcggcggaacagaccacgcatccggccgcttgtcggtagcctatcagcgtttcggcggctggtacgacggcaataacgatgcgctgatcctcgataatacccaaacggggctccagcactctgaccgcctcgacgtgatggggacggggacgattgagatcgatgataaccgccagctgcagctggtcacccagtattataaaagccagggcgatgatgactacggtctgtggctcgggaagaacatgtccgcggtcaccagcggcggcaaagcgtataccaccgacgggctcaattccgaccgtatccccggcaccgaacgccatctgatcagcctccagtactccgatgccgactttttcggccagaatctggtgagccaggtgtactatcgcgatgagtccctcaccttctatccgttcccgacgctcacgaaaggtcaggtcagtagcttctcctcgtcgcagcaggataccgatcagtatggggccaagctgaccctcaacagccaaccgctggcggggtgggatctcacctggggtctcgacgccgatcatgagacctttaatgccaaccaaatgttcttcgatctgccacaatcgatggcctccggcgggttgcacaacgaatcgatctacacaaccggccgctacccgggatacagtatttccaatgtcgcgccattcctgcagtccagctacgatctgaacgatatctttaccgtcagcggcggggtacgctaccagtggaccgaaaaccgggtcgacgactttgtcggctacgcccagcagcaggatatcgccaacggcaaagcgcgctccgccgacgccatcaaaggcggcaaaaccgattatgacaatttcctgtttaacgccgggatcgtggcccacctgaccgagcgtcaacaaacctggtttaacttctcgcagggtgtcgagctaccggaccctggtaaatactatggcatcggtaaatatggcgctgcggtgaatggtcatctgccgctgatctccagcgtcaacgtcgatgactcgccgctgtag

SEQ ID NO: 223226 - DNA, 636 bp, Klebsiella pneumoniae
atgacaactgacgttcaaagttgcgccaaaaaaagccgtggccgaccgaaggtgttcgacagggatgcggcgctggacaaagccatgacactcttctggcagcacggctatgaggcgacctcgctcgccgatctggtcgaggcgacaggagcaaaagcccccaccctgtatgcggaatttgtgaataaagaaggcctattccgcgcagtgttggatcgttacatttcgcgctttgccgcgaagcacgaagccgtgctgtttgccgagggaaaatccgtcgatcgcgcgttgcgtgactacttcacggcggtcgccacctgctttaccagcaaagagacgccggccggctgctttatcatcaatacctccgccgcgttggccgcctcctcgacggatatcgccaataccatcaaatcccgccatgcgatgcaggagcaggcgctaacccagtttctgcagcagcggcaggcgcagggcgaactgcccgcgggccgcgatgtcgcgcagctggcgcaatttcttaactgcgttctgcaggggatgtcgattagcgcccgggaaggcgcggatttcgacaagctgatgcaaatcaccgataccactctccgtctctggccgcaggtcctcgggtcctga

SEQ ID NO: 223227 - DNA, 999 bp, Klebsiella pneumoniae
atgaaaacacgttatcttggaaaagagaagtttcaggtttccgcattaggtctcggatgtatggggatgagttttgcctatggcggcgctgaaacgtcgcaggcgataaatacgatccataccgccatggacatgggcgtgaccttcctggataccgccgaagtatatggtcctttcgataatgaagttctggtcggaaaagcgattaaaggttttcgcgataaggtgcagattgccaccaaatttggatttcgtattttgccgaccggccagggtctggagcggatggccggcgttgacagccgtccggcacatattcgcgaatcagtggaagggtcgctgaagcgactgaatgtcgagaccatcgatctgctctatcagcaccgcgtcgatcccgcggtaccggtggaagaggtggtgggcactatggccgatctggttaaagagggtaaaattcgccatatcggtctgtcggaagtatctgctcagacgctgcgccgggcctgcaaggtacatccgatcgctgccgtgcagacggaatattcgctatggagccgcgagccggagggcggtattctccacacctgccgcgagctgggggtcggctttgtgccatacagcccgcttggccgcggcttcctgacggggacaattaccgatcccggcgttttggcagcggatgatttccgccgccatctgccgcgcttccaggccgaaaccatgcgcaaaaaccagctgctgcttgagcgcctgcagcaggtggccacccgctatgacgcgacccttgcgcagattgcccttgcctgggtgatgagcaaaggcgaggatatcgtgcctatcccgggggcgaggaaaattgctcacctgcgcgacaatgccggcgccgcgaatattaccctcgcgccggaggacatcctcaccatcgaacacattttcactgccgacaacgtcactggcttacgctatacccagggcgactttgatttaatcgaaaaataa

SEQ ID NO: 223228 - DNA, 366 bp, Klebsiella pneumoniae
gtgcgtcttggcgcctatgtcagcgccggaacccatctgacctcgctggttccgccgcagcactgggtgattgccaacctcaaagagacccagttggccgaagtacgcgttggccagccggtcaccttcaccgtagacgcgctcaacggcgagaccttccacggcaaggtgcagagtatctccccgccgaccggggtggagttcagcgccatctctccggacaacgccaccggcaatttcgtcaagatcgcccagcgcatcccggtgcgtattacggtcaacgacgggcaaaacaacagcgaacgcctgcggccggggatgtcggtgcaggtgactattgatacccgtgcggagaaacaaccatga

SEQ ID NO: 223229 - DNA, 669 bp, Klebsiella pneumoniae
atgtttgatcttattgataccgccatcaccggcgatcagtttctgctggcgctgcatgacaccctgattatggtcgccgtctcgctgggctttggcgcgctgatcggcgtcccactggggattgtgctggtggtttgccgtcccggcggcatcgtggccaacccggtggtgcatcaggcgctgaatccgctgattaacgtgctgcgctcgctgccgtttatcattttgctgattgtgatcctgccctttaccagactgctggtgggcaccactatcggcaccgcgggagccatcgtgccgctgatcgtctttgtcgccccctatattgcccgactagtggagagctcgttgctggaggtggatgaggggatcctcgaggccgcggacgccatgggcgcaaccccgctgcagactgtctggcactttatgctgccggaggcggcggcatcgctgattctggccctcaccacggcgaccatcggtctgctcggcgccacagccatggcgggtacagtgggcggcgggggaatcggggatctggctattacctatggctatcagcgcttcgacgctttcgccaccctcactaccgccctggtgctgattgtgattgtccagcttatccagacgctgggcacccgactggctcgccgactgcgccgtgaataa

SEQ ID NO: 223230 - DNA, 414 bp, Klebsiella pneumoniae
atgtcggtgatccagaaaatctgtcacaaggtggcggtgatgcaggcgggccgtatcgttgaacagggggcggtttttgatctctttgctcagccgcagcatccggtcactgccagtttcgtgcagtcggtggtgcacgaccgcctgccgcagcgggtggcgtcgttcctgcagcgcgataacggcgcccgggctttacgcctcgaatttgtcggcgcgacggcgcagcagccgattattaaccacctgatccgcgagtatgctgtcgaggtgaatatcctgtttgccagcatgtctgaagttcagggccggattctgggatttatgattgtgcagcttctcggcgagcctgacgaaaccgaacgcgccatcacccatctggtcgatgcaggagtgaaaatcacccatgtttga

SEQ ID NO: 223231 - DNA, 1005 bp, Klebsiella pneumoniae
atggaaaacattgcgctcattggtatcgatctgggtaaaaactctttccatattcattgccaggatcgtcgcgggaaggctgtttaccgtaaaaaatttacccggccaaagttgatcgaatttttggcgacatgccccgctacaaccatcgcaatggaagcctgtggcggttctcactttatggcacgcaagttggaagagttggggcattccccaaagctgatatcaccacaatttgtccgcccgttcgttaaaagcaataaaaacgactttgtcgacgccgaagctatttgtgaagctgcatcgcgtccgtctatgcgttttgtgcagcccagaacggaatctcagcaggcaatgcgggctctgcatcgtgtccgtgaatccctggttcaggataaggtaaaaacaaccaatcaaatgcatgcttttctgctggaatttggcattagcgttccccgaggagctgccgttattagccgactgagtaccattcttgaggataatagtttgcctctttacctcagccagttattgctgaaattacaacagcattatcactatcttgttgagcagattaaagatttggaatcccagttgaaacgaaagttggacgaagatgaggttggacagcgcttgctgagcattccctgcgtcggaacactgacagcgagtactatttcaactgagattggcgacgggaagcagtacgccagcagccgtgactttgcggcggcaacagggcttgtacctcggcagtacagcacgggaggtaggacgacattgcagggaattagtaagcgaggtaataaaaagatccgaactttgttggttcaatgtgccagggtattcatacaaaaactggaacaccagtctggcaaattggccgattgggtcagggatttactgtgccggaaaagcaactttgtcgtcacttgtgctctggcaaacaagctggccagaatagcctgggccctaacggcacgacagcaaacttatgtagcataa

SEQ ID NO: 223232 - DNA, 2967 bp, Klebsiella pneumoniae; identical to SEQ ID NO: 92420

SEQ ID NO: 223233 - DNA, 315 bp, Klebsiella pneumoniae; identical to SEQ ID NO: 16841

SEQ ID NO: 223234 - DNA, 333 bp, Klebsiella pneumoniae; identical to SEQ ID NO: 5122

SEQ ID NO: 223235 - DNA, 258 bp, Klebsiella pneumoniae; identical to SEQ ID NO: 5121

SEQ ID NO: 223236 - DNA, 654 bp, Klebsiella pneumoniae; identical to SEQ ID NO: 7676

SEQ ID NO: 223237 - DNA, 1014 bp, Klebsiella pneumoniae
atgagtaatgcgcacaatccgcaacactggagtcagctggatatggatgaacagatccgtttctggcagggggtagaggacggccatgtggcatcttttctggtttccccggagaagaaatctacccgtcgccggcgcggcgagcactccacaaaacccaaatgtgaaaacccgacctggtttcgaccggagcattacaaaaaactgggtggccagctggggcacgcctataaccgtcttgttcaaaaagatcgcaccactggtgaggtgcgactgcgtatgcacgtatcgcttcatccgctgtacgtcagggaacgtcgtcgggctggccgccggtatggcttccggccggaaaagcaacgtctgctggatgctatctggccagtgctgatcagcttctgtgatgccggcaagctgacggtcggtatgtgtatttctcgtctggcaaaagaactcagccagaaagacagtcatggaaaagttattccggaaacagaggtaacagtctcacgtctgtcccggttgattgacgaacaggttcgttttggtgtcctggctgtatctgaagaaaatagctgggacagggaatcccgtacctggcttcctaaatacgtctatatcaccgcgttagggtttcagatgctgggagtggatctggaaaaacttgatgcggaacaacaaaaaaagctccggcaaagcgaagagcgtcgtcgtcttatcgaggaggggattctgcgtgaagatgaggagatctccccgtgtgcagcacgtgagcgctggtaccgtcaaaaaactctcgatgcactgaggttccgtcggcagcgtggcgccgaacgtaaacgagctaaccgcctggccagatattctcgtgagcgccagattcacgaaatgtcgcttcatatcctgaagacaatgccggcagacgaggcttactggtgtacaacggagcggctgcagcagctggccattcagaacctgtatcagctggagctggccctggctccgccgtcctga

SEQ ID NO: 223238 - DNA, 552 bp, Klebsiella pneumoniae; identical to SEQ ID NO: 95276

SEQ ID NO: 223239 - DNA, 594 bp, Klebsiella pneumoniae; identical to SEQ ID NO: 61249

SEQ ID NO: 223240 - DNA, 726 bp, Klebsiella pneumoniae; identical to SEQ ID NO: 61250

SEQ ID NO: 223241 - DNA, 1728 bp, Klebsiella pneumoniae; identical to SEQ ID NO: 102224

SEQ ID NO: 223242 - DNA, 249 bp, Klebsiella pneumoniae
atggatgaagaaatgatgttttcgctcagctatgagcaaatgacgcagatggcagaagaggaaataaagcaatgcgattttcgcagggatggcacccattatgtctgggaagtgaacaaggctcatgacatcctccgcttctggtatctcctggcgctgcgcggacacacgggcctggccaccactcgggtcgaagcagactataaacggttaaaaacgctcatttctcagaggaacgagggacaatga

SEQ ID NO: 223243 - DNA, 573 bp, Klebsiella pneumoniae
atgatgcgggaaaaatcccgacgtccgtcgccgctgcagcggcgggtgctgattgtgctggccgccctcggtgcgaaacgtccggggccggtggcgacgcgggatattgagcgggtgctggagcagggcggggacgccccggtgtacgggccgaacctgcgcgcctcctgccggcgcatggaagccgcgggctggctgcgcaccctgcgcgccccgaacctgcagctggccgtcgagctgacgcaggccggtcgcggcattgcagaaccgctctaccaggaagcacgcgaggctgaaaaggcacgacaacgactgaccgacgtccggcgtctgccgttacgccagacgactgccggtgacgcggtggagctgcagctggatgacggccattacaccatcagggaagcggcctacgtgatccgtctggacggtaccacctgcctgcagctgacgtatgccggtggcatacgccggataaaagagggcgatcccctgcaggtggccagctggtatcaggcctgttttgatgcaggcctgccggtcaccgtccaggtgaatgagagccgggactga

SEQ ID NO: 223244 - DNA, 300 bp, Klebsiella pneumoniae; identical to SEQ ID NO: 102280

SEQ ID NO: 223245 - DNA, 549 bp, Klebsiella pneumoniae; identical to SEQ ID NO: 102282

SEQ ID NO: 223246 - DNA, 633 bp, Klebsiella pneumoniae; identical to SEQ ID NO: 32308

SEQ ID NO: 223247 - DNA, 621 bp, Klebsiella pneumoniae
atgctgatgcttttcctcaccgtggcgctggtgcatatcattgcgctgatgagcccggggccggactttttctttgtctcacaaacggccatcagccgctcgcgaagagaggcgatgatgggtgtgctggggatcacctgcggcgtcatggtctgggcgggagtggcactgctcggcctgaacctgatcctcgcccgtatggcgtggctgcataacattataatggtcggcgggggcctgtatctatgctggatgggctaccagatgctgcgtggcgcgctgaaaaaagagaaggtggcctcggcggagccgcaggtggagctggcccgcagcggacgcagcttcgtgaagggattgctgaccaatctggcgaatccgaaagcgattatctacttcggctcggtgttttcgctgttcgtgggtgacagcgtcggcgccggcgcgcgctggggcattttcctgctgattatcgttgagacgctggcctggtttatggtggttgccagcctgttcgccctgccggggatgcgccgcggctatcagcggatggcgaagtggatcgacggtatcgccggtacgctgtttgcgggcttcggcatccacctgattatctcgcgttaa

SEQ ID NO: 223248 - DNA, 861 bp, Klebsiella pneumoniae; identical to SEQ ID NO: 213768

SEQ ID NO: 223249 - DNA, 465 bp, Klebsiella pneumoniae
atgtctgaacttactgccgaagcagccctgaaactggtaggggagattttcgtctatcacatgccgtttaaccgcgccctcggtctcgaactggaacgctacgaaaaagcgtttgcccagcttagctttaataatcagccgatgatggtcggcaactgggcgcaaagcatcctgcatggcggggtgatcgcctccgcgctggacgttgccgctggcctggtctgcgtcggcagtacccttacccgccatgacaccatcaacgaagaagagttgcgccaacggctttcccgtatgggaaccatcgacctgcgcgtggactacctgcgtccgggccgcggcgaacgttttaccgccaccagcaccctgctgcgcgccggcaataaagtggcggttgcccgcgtggaactgcataacgaagctcaggtctatattgccagcgcaacggccacctatatggtgggttga

SEQ ID NO: 223250 - DNA, 258 bp, Klebsiella pneumoniae
atggatgcgaaacagacgcggttggggatcattctggccctcgccgcctactttatctggggtatcgcgccagcgtacttcaaacttatctactatgttcccgccgatgaaattctaacccatcgcgtgatctggtctttcttcttcatggtggcgctcatcagcgtcagccgccagtggccacaggtgaaaaagctgctgaaaacgccgcgcaagatcttcctgctggcgctctcggcagtgctggtcggcgggtaa

SEQ ID NO: 223251 - DNA, 141 bp, Klebsiella pneumoniae
atgcctgttaacggccttcatctcgtgtctgtacgttgcctggtcacaggaaagaacgcagaactgaaacgactagacggaatgagtgaaaagcccggaattattagcttcacgcgcatttatgcgggatgcttcgggtaa

SEQ ID NO: 223252 - DNA, 927 bp, Klebsiella pneumoniae
atgcgggaagaactggatttcaaatcgctacgctttttctctgcgctctaccgcttgggcaatgtttccccagcagcggacgcgctcgatatcagccagcccaccggcagccttttgctgaaaaaactacgagatcattttgctgacccgctgtttgtccgggtcgggcagcggatgatcccgacgccgcgagcggacgcgatcgcccccaccatctcgactcttctccagcttgccgataacgatttagcggtcaaacctgaatttcttccccagcagagccagcgtaattttacgatcggtatgaccgatatcagccaaatgacgctgctgcctttattgcaaattgcgctccagcagcaggcggcggacgggatcacctttacggtacagaatctggatgagcagaccctcaacgccctcgaatccgggaaatgcgatctcgcgatcggctatctgacgcagcttccggaaagcgtctaccagcaacatctcttcgatcaatcatatgtctgcctggctgcggaaaaccatcctcgcattcgcgcacagctccgcgccgaagactggcgccaggaaaagcatctggcgatccgcgtggaggggactgcccatggcgatatggataagctgcttgatgagcaccacatgccccggcgcattgcgctaacgttaccaagttttttaggtaccggtgagctggtggccgaaagcgatatgattgccgtcgtcccggaacaggtggcgcggcatatcacccggcgctatccctgccgcagctggccgctgccttttcccctcgccaaaatcgccatccgtcaggtctggcatcagcggctgcaccgcgatcccggacatatctggctacgctcgctgatcgctacgcttgccgatcccgcacagcagagtacttctattaaaatctaa

SEQ ID NO: 223253 - DNA, 2124 bp, Klebsiella pneumoniae
atgcagctatatgttgataccctgcaaaaagccaatgtttcacaagcgcagatgactttctatatggaggccattgccaacgatgccactgctttgataccgatgtttcagaatggcggcaaagcgatcagtgaaatggccgatatatcggagaagctgggtcttattctcgaccagaaaacaattcgtgcggcgcaggaggtggaaaccactggctggctggtcaattcctcgatgcaggggctaagaactcagattgctgcgggattaatgccaacgatcagcgacctaacaggcgagttcactacgttcgccgcaaaaggaatagatgttacagccgtatcccaaacactggatagctggcttaaaaatctggctaaggccgctgtaactgtcgcaggtgctttcatgggtgttaccaaggccatgggagggatggttgacttgtggaatgggattaaggatatagacctttcacaccccgttgatgcctatcatcaaatcaaagatgttttcgccaatgtttcaggccaagtaaacggtgagttagacaatatccagaaatgggtggatgaggcttgggggaaaattaatgccgccggaaaaaatggaggtaatgagttcataaagaacctgactgatatgcgtaatcaaataagttttgcgcaggggcatatcggaacattttctcctggaacaggtagtaaaattaaagcttattctgaggatgcagggcagcgactacttaaccagattaacgagcaaactgcagcatttaatgcacagttggacgctagcgataaattatcggcggtcgcaatgcagcgcctgaagtttgaagagcagataaagactattcaggagcgtcaggccaaagggctgccagttactaaagatcaacagtcgctgttatctatgtctaaagagatagagacagcgttcaaacggcttgagctaagtcagaaagctaccgcaaccctggacgattaccggaagatgcaggagcaaattgcaccgaaggagctactgcaaaaccagacgctgcaaaaacgcctagaaatactgcgtgaaatggtagcgcttaaaaagttatccccggaggctgcgggacagcaagccagtggcctgattagtaaatcagtgctgccggattcagttatctctggggtaaacgctgccggtggaaatctcacgtcaggggcgactaatagcgacttgtccgggcaggggctgaatatgatagggctgcaaatcaacccgcaactcgaaattatcgaaaagctcaagcaggcccaggctgattatgctgcctggcttaaccagcaacagcaggcgataacgcagagcacagtcctgaatgagcagcagaagcagcagcaactgctggccctccaacagcaagggcaacagaaccaactggcactaagcaccgcagttaatgccgcacagatgcaatcagcgcaaaactctttctccggtatcaccgattcgatgggggtgatgtttggtgaacaatccgcgatgtataaggctgcgtttgttactcagaaagcattcgcgattgcacaagccgctctgcaacttcctatggctatggggcaggcgctggccggtttaccgttccccgctaatattgcggccatggcttcagttgtcgggctaatggcatctataacatccagcatctccagcgctgccgccgtcggctttgcttctggtggatatactggctcaggcggaaagtatcagccggcgggtattgttcacaaaggagagtacgtcttcgaccaggcatcaacgaaccggatcggcgtgtctcagcttgaggcacttcgaaatggccaaccgcttgatgccactctcggtaagccggggttcggtacaggggtgcagaacgtcagcagcagccagaaaacgatcgttcacgctccgatagtgcaaaacaataatctgcaaggtattacgcccgagcaattgtccacaaccctaaatcaaaacaatggactaatgagtaagcagctatcgaagcaaatcaaatctgagatggccagcgaggtgattagcccaaagggtgaattcgggaaagcccttaaaagccgttatgtgcgcgggtataaggagtaa

SEQ ID NO: 223254 - DNA, 717 bp, Klebsiella pneumoniae
atgccgggtggcggctacgccttacccggcctacaaccccaaatcaccgctggcgcaggggctgctgaaactgccggtgctggcggcctcaacatcgctgagacgttcccggaaggccggggcagcccgcatggatgcgggctgagggccgtgttttgcagggacgctgcctcggcccgacccgaagcctgcagggataagtcgaagggaccgcgcagcggcgatgttgctggccggagcccgggggtacagggggcggcggcgactggccgccccctgtgcgctcccagcgccatgactgccataacgcagacaattaaccgggagcgcaatcggcccggaagtaacatagaagctgtagccctgctaagcgcagcgcgggcagggacatttccggttgcgccgatatttcgccgggtggcggctggcgtcttacccggcctaccggggcctctcacaggctcacacctcgtaggcccggtaagcgcagcgccaccgggcgatgccatcaggcacggagccgctttattgccgggtggcggctgcgccttacccggcctactcgtccggctccgactgtctgtaggcccggtaagcgcagcgccaccgggcgatagcatcaggcacggagctgcgtttatgccgggtggcggctggcgccttacccgccctacagggtttatccggactgggacgactgaacccacaggcctgtag

SEQ ID NO: 223255 - DNA, 801 bp, Klebsiella pneumoniae
atgcgccttctttacactgacacaggcttaaataacccgttgcttcccgtttattctttgacagctgcggaaatagcactggcaaatttaaatcccaccatctggtcacctgcaacggttgattttatcaaaccaggggtcgggcaaaaagtttccgcactcgcaaaccgaattgacggaggtaaattcaattctcagactagccttgaacccacgacaaaatataatgggtcaactctgcagggtattaatttttcaggtgctgcgggtctttccggggatacacctgtggcactgaatgggacaataaacacgtttgcttttatttatcagctaccatcaggtgcattatcatcaacccctacggacagaatagttatcgcgacccaggaaacaacccctcatggggtaggtattcgaacaacttcggctggtagtttccctgtgttttttaacggcggttcacagccagatgttcctttcaccccttcaaatatgggagccggtctgttttgcgccgtggttatgtgctctaacaaaaacacgggtgcttatgcaattgcataccaacggtcagatcagtctgccgtaaccagtcggcaagtaactgggtatacgatccctgaatacgccacatctcaaaaaatgaatttaggcggcgcaggagatgggtctgtttcgccactgacgtctgtactgtcagatgcaatagtgattcctggcttgtatgcctatgggactagcactcaggatgccatttttgcatacctgatggagagaattgggaaaataacaggctaa

SEQ ID NO: 223256 - DNA, 4068 bp, Klebsiella pneumoniae
atgacgcggcgactggtggtgatcggtaacggcatggcggccacccggctggtgcagcggctggttgagcgcgaccccgcgcggtttgccattaccgtcgtcggcgacgagccgcacccggcctataaccgcattcagctctcgccgctgctggcaggtgaaaaaacggcggcgcagatcccgttgctgccggcggagtggtacacccggcacggggtgtgcctgcggtctggcgaggcggtcgatgaagtcgatattcagcaacggcggctgcgcatcgcggaaacctggctgccgtgggatgagctggtgttcgccaccggttcgcggccctttatcccgccgctgcagggcattgatcgtccgcaggttatgcccttccgcactctggcggacgtggaacgtattctggcgatacccggcccggcggtggtgattggcggtggcgtgctgggggtggaagcggcggcggcgctgcgtcgtcacggcggagaggtcactcttctgcatcgcggcagcggattaatggcgccgctgaccgacgcttttgccgccgatgagctcaggcagcagcttgaagcgcgcggcattcgctgcgtgctggagtgccgcatcgccgccatcgacgccgatggcgtgcggctggcggacgggcgcgtattccgcgccgccagagtggtgctggctaccggcgtgcagcccgacagccgtctggcggcgcagtccggcgtgctgtgccagcgggggatcgtggtcgaccgtcagatggcctcctcgctgccggggatcagcgccatcggcgaatgttgcgaaattgacggccagacctgggggctggtggctccctgcctgcgtcaggccgaggtgctggcggatcgcctgtgcggcgcccccggcgagggctttgtctggcaggacgccgggacccgcctgaaggtcaccggcattgaactctttagcgctggcgagcagcaggccggcgaacaggatgacatttataccagctgggaccccatcgaccgccactatcgccgcctgctgctgcgcgatggccgcctgcgcggcgtgctgctgatgggcgactgcaccgccgccgccgcgctcaccgcgcgcctggaaagcgatgagcctgccaccgtggactggctttttgacccctcttcaacgcagccgcaggctgcaggaataatgacgatgacgaaacctgtattagtgctggtgggacatggcatggtcggccaccattttctcgaacaatgcgtgagccgcaatctgcatcagcaatatcgaatcgtggtgtttggcgaagagcgttaccccgcctacgaccgggtacatctctccgagtattttgccggacgcagcgccgagtcgctgtcgctggcggccggggacttctttattgaacacggtattgaactccgcctcggcgaggcggtggcgaccatcgaccgcgaagcacggctggtacgggacgccgaggggcatgaaatccactgggataaactggtgctggcgaccggctcgtatccctttgttccgccaatccccggtaacgatctcgcggggtgctttgtctaccgcactcttgacgatctcgaccgtatcgccgcccatgccgccgcggcgaagagcggggtggttatcggcggcgggctgctcgggctggaggcggccaacgccctgaaacagctggggctggagacgcaggtggtggagtttgccccgaacctgatggccgtccagctggataacggcggggcggcgatgctccgggagaagatcgtcgccctcggcgtgggggtgcataccagcaaagcgaccaccgccatcgtgcgcgaggccgacggcctgcggctgaactttgccgacggcggcgcgttgcggaccgacatggtggtcttctcggcggggatccgcccgcaggacgcgctggcccgcgactgcgcgctgcaggtgggcgaacgcgggggaattcacatcgacggccagtgccgcacctctgacccggacgtgctggcgataggcgaatgtgccctgtgggacaataaaatttacggtctggtggcgccgggctatcagatggcgcgcatcgccgcggccactctcgcaggagaggacgcctgctttagcggcgccgacatgagcaccaaactgaagctgctgggggtcgacgtggcctcgtttggcgatgcgcaggggcgcacgccgggctgtcagagctatcaatggaccgacggtccgcagcagatttacaaaaaaatcgtcgtcagtcaggacggcaaagccctgcttggcggcgtgctggtgggggacgccagcgactatgccacgctgctgcagatgatgctgaacggcatggcgctgccgccgcgtccggagagtctgatcctgcccgcgctggagggagccgcgccgaaggcgctcggcgtcgcggcgctgccggacagcgcgccgatctgctcctgccataacgtcagcaaaggcgatatctgccaggcggtgaacaatggggcgggggatatgtcggcgataaaaagctgcaccagagcggctaccggctgcggcggctgcagcgcgctggtgaaacaggtgatagagtatcagctggcggagcagggcgtcgaagtgaaaaaagacgtctgcgaacatttcccgtggtcgcgccaggagatctaccacctggtgcgggttaaccatatccataccttcgagcagttgattagccgctacggccaggggcacggctgcgatgtctgcaaaccgctggtggcctcggtgctggcctcctgctggaacgagtacctgctgaagccggcgcacctgccgctgcaggataccaacgaccgctatttcgccaatatccagaaggacgggagctattcggtggtgccgcggatggcggcaggggaagtgacgccggacggactgatcgccatcgggcagatcgccaaacgttaccagctctacagcaaagtgaccggcggccagcgcatcgacctgtttggcgcgcggctggaacagctgccggctatctggcgcgagctggccgacgccgggtttgaaaccggccacgcctacggcaagtcgctgcgcacggtgaaatcctgcgtcggctcaacctggtgtcgctacggcgtgcaggactccaccgggctcgcggtacggctcgagcatcgctataaagggctacgcgccccgcacaaaatcaagatggcggtctccggctgcacccgcgaatgcgctgaagcccaggggaaagatatcggggtgattgccaccgacaaaggctggaatctgtacgtctgcggcaacggcgggatgaaaccgcgtcacgccgacctgtttgccagcgatctcgacgaagcgacgctgatccgcagcatcgatcgtctgctgatgttctatatccgtaccgccgatcgcctgcagcgaaccagcacctggatggataacctggagggcggcgtcacctatctgcggcaggtggtgctggaggatagtcttggcattggcgaggagctggagcaggagatggcccggatcgtcgacagctaccagtgcgagtggcagaccaccctcaacgatccgcagcgtctggcgctgttccgctccttcgttaatagcgaccagcccgacgaggctgtgcagcgccgcgatctgcgcggtcagccgcagccgctgctgactgagacgttgcccgaaggcgaactcccatcccgaccgtggcaggcggtatgcgaccttgacgccattccggcgcaggcggggatcggcgcccgcttaggggagcggcagattgccctgttccgcttcggcgagcgggtctacgccctcgacaaccgcgagccgggcagcgcggccaacgtgctgtcgcgtgggctgttaggggacgtcggcggcgagccggtggtgatctccccgctgtacaaacagcggatacgcctgcgcgacggctggccgtgcgacggcgacgaacaggcggtacgcgcctggccggtgaaagtggaaaacggcaaagtgtgggtgggcaaccagcagctgctggcccgcgcggaggcctcctga

SEQ ID NO: 223257 - DNA, 732 bp, Klebsiella pneumoniae
atggaactaagaatttataatcgtattattttgatggtttctgtggttctgttatttttgtctgtgtttgttatttgttatgcaataaatttcaatggtgtaaaaatcgaacttggcagtttttctgattgggtaagctctctaagcacttttggaactctaatagttgccttcttggcttataagaaagctccagagtggataaatcagaaaatacatgaagatgcattcttgcacgcgaaaaaagtaatacttgaagattatccgctacttaaagaaaagattgacaatgcgggagatattgttgattttaacattatatattttgatttaattagtgatgattatgaagtgtcaatcactacggatgaatgtgacaaagcactttctgtttttcatgatatgcaaaatacgccttcaaaaataaagagaaagtttgaagtaattgctaagcttggatggagtattgatagggacattttaatcatcaatgataaacttagtgagtgctatagagaaatgcaaagaaattatgttatagcattcgtcggcatacagcgaatgctattagctcagacgctcaatgaaaaaagtcgtagagcaggtaaagtagctatcaattttgaaaggttccagagcaataagaaaaagttcgatctcctttatgatgagataatgttgaagcatcaatggattcctgactattttgaagttaagagagattatcgataa

SEQ ID NO: 223258 - DNA, 1533 bp, Klebsiella pneumoniae
atggattttgaaaatgaattgaccagtaagatccttgatcccattcacggcactattcgtttgacgacactcgagattgcctttatcaatcaccccctgttccagcgcttacgcaacattaaacagaactcttttttatataaggtgtttccctctgcggtgcacagccgcttcgaacactctctcggggtgctgcatttatcaagtgaaatactcaataatttacgcctgaatgcgatacggtatcaaaagaaatatgatgatggccatgtgtttggtcatatcgatcagataccaaaacacaacattcaggagttgagactcgctgccctgatgcatgacatcgggcacgggcctgtatcccaccagtttgagagttttatgcctggtaagcacgaattctccgatgttctccccacagcctaccattcgatcattgatgtattaagcaagccagaacagaaagttgaacatgaacagctttcgctgttgttcagcctgatgatttatcatgatctgagaaagcaaggtaaggtcgatgacgaaataaatatcgaaaatgtgttaaaaatcatcgaaaaaagatacggtgaccaacagatcattgaggaaattaatggaaaggcaacagatatcctgccgttaatgacctcgatcatctcttcctgtccgatcgatgccgaccggatggattacttgctcagagatggctatttctccggcgtcaagtgtggcatctacgattacaatcgcttgtttatgtcaattgtcccggtcgaggaacagggaaaattgtaccttgcttacaaagagagtgggattgattcgatcgctgagtttattggggcgcgctccagccttttttcgcaggtatattaccataaaacaaaccgcgcctttgcgacgatgttgagcacattatgtgagattatgcaaagcaaggatccacaaaatgtcattatcgctgacgttaccgaccgtatcgttgaccatagcgatgaaagcttcatcgacgcgctgaaggatttttatttggcgtgcagtgatgattattttttgaatgacaaggttggtgaatggatagatatcagcgataccgaggcggttaataaaaaaatacttgatgacattattaaccgacacccatggtcgaaggtctatgaggccaaacactctgtgtataaagctaacatcgctgacaaggaaaataaggcgtggaagagtcaactcaccgggttattgacttctgtattacagcctcatttcaaaccacatgaatttgccgttgatattgtctccgactgcgcctttaaagacctggataaaaccgaagttaagcttttggtgaaagatcttaagaaccgctacgaaataaaaccgttaattgaatgtggtgataagttaaatcagtatcaaatcatcaaatattgcattcgggtatttgttgaccgcgatatcaaagaacgcgtaactcctgaaataatctataaaatcaatgaaatagtggtcaagcagatcgcgttgctgaattga

SEQ ID NO: 223259 - DNA, 369 bp, Klebsiella pneumoniae
atgagcgcagaactgaagcaaaaattaattgcccttctggaagagcaattccatcagtcgaatgacaaggtcactttcgactatgtcatgcaaaagaaaatcaagtcgatgggttaccacctgcagcgtaatttcgcgatcagcctgagtggtggtcgcagagggttcgttgactgcctggtgacctcacctgacgggcagcgctgcgctattgaggttgacaataaatctccccgcaaacgctccctgattaagctccaccaactacccgaggggatgtctgggtttgtcttgctcagggatggtgcgcatccgcttcgctatgccgacgacggtatcgaagtcgtaagggcgaccaggtttaagtaa

SEQ ID NO: 223260 - DNA, 396 bp, Klebsiella pneumoniae
atgtccgatcctgtttctggcacaacggtagctgctggcgggctgatgggggccagtatgttcggccttgcaactggcattgattatggcgtggtatttggtgcgttcgctggggcagtgttctatgtcgctacggcagtaaatatcagccgcctaaagctggtgggctacttcataacttcattcatcttcggtgtgattggtgctcctctgctggggtcttacttctcaaagtggacggggtacagtgacaggccgcttgatgcactcggtgctgtaatcgttgcagccatagccattaaattgctgacgttcgttaacagtcaggatctgggtagcctgtttgggattctctctcgcttacgtggaggagggacaagcaatggtaacaagtga

SEQ ID NO: 223261 - DNA, 282 bp, Klebsiella pneumoniae
atggtaacaagtgatccgagcgcaatcgtcaatgcggtgatatgcgctgtaattgttggggcgttgatgttctatcggcgcgacgggtcaagacaccgccccatgatatcgctgatggcttacttcactgtgctggtttatgccagcatccctttccgtttcctgtttggcttgtacgagtcatcccactggctggtggtactggcaaacattcttatctgcggcgcagttctctggttcagggggaatatagcgcgtctggttgatgcactgaggcactaa

SEQ ID NO: 223262 - DNA, 261 bp, Klebsiella pneumoniae
atgtctgttgataatcagaaacttttccagaaaatcgtcgaggagctggaatcactcaaaggtgagaccgaggtactatctatcgctatatcttgcctcttcagcgagatgccatcagatagcgtcagtaaagtgagggttaaattcacaaaggccgtgaatgaactaaacacccttaaaccagcagcagctcctagtcgaaggaggtcgcgtcaagacgtgtattcaaaagcgctatcaatgatgaccaagcctgaataa

SEQ ID NO: 223263 - DNA, 705 bp, Klebsiella pneumoniae
atgacagcagcgccgctttggttgattcagaacgtacgcctggcagaccgcgacggcctgtggcaaatagccattgataagggccgctttggcgagatcacgccgatgggggaggcgcacgatgaaagctacgaggtattgaacgctcgcggcgggctagcgatcccgccttttatcgagccgcatatccatctggataccacccagacggccggcgagccgaactggaatcagtccggtactctgttcgaggggattgagcgctgggcggagcggaaagcgctgctcagccatgaggacgtcaaagcccgggcgtggaaaaccctgaagtggcagatcgccaatggcgtgcagtttgtccgcactcatgtcgatgtttccgatcccacgttaacggcgctgaaggcgatgctggaggtcaaacaggaggtggcgccatgggtcgagttacagattgtcgcttttccacaggaggggatcctctcttaccccaacggcgaggcgctgctggaggaggccctcaagctgggggcggacgtcgtcggggcgatcccgcatttgagttcacccgtgaatatggtgtggaatcgctgcatatcgccttccgtctggcgcagcaatatgaccgcccactggatattcactgcgatgaaattgacgatgagcagtcgcgctttgttgaaaccgttgccgcgctggcgctga

SEQ ID NO: 223264 - DNA, 2544 bp, Klebsiella pneumoniae
atgagcaaagtcagaatcgctattatcggtaacggcatggttggccatcgctttatcgaagagcttctcgataaggcgcctgccggacagttcgacattaccgtgttctgtgaagaaccgcgtatcgcctacgaccgcgtccacctgtcgtcttatttctcccatcacactgcggaagaactgtcgctggtacgcgaaggtttctatgagaaacacggcgtcaaggtgctggtcggcgaacgggcgatcaccatcaaccgccaggagaaagtgatccactccagcgccgggcgtaccgtgttctacgacaagctgattatggcgaccggctcatacccgtggatcccgccgattaaaggcgcggaaacccaggattgcttcgtctatcgcactattgaagatcttaacgccatcgaatcctgcgcccgccgcagcaaacgcggcgcggtagtcggcggcggcctgctcggcctggaagcggccggcgcgttgaaaaacctcggtgtggaaacccatgttatcgaattcgcgccgatgctgatggccgaacagctcgaccagatgggcggcgagcagttgcggcgcaaaatcgaaagcatgggcgtgaaagttcacaccagcaaaaacaccaaagagattgttcagcagggcaccgaggcgcgcaaaaccatgcacttcgccgacggtagcgagctgcaggtcgatttcatcgtcttctcaaccgggatccgcccgcgcgataagctggccacccagtgcgggctggcggtcgcccagcgcggcggcatcatggtcaacgatagctgccagacctccgatccggatatctatgccatcggggaatgcgccagctggaacaaccgcgtctacggtctggtcgcccccggctataaaatggcccaggtggccgtcgaccatctcctcggcagtgaaaatagcttcaccggcgccgacctcagcgccaagctgaagctgttgggtgtggacgtgggcgggatcggcgatgcccacggccgcacgccgggcgcccgtagctacgtctatctcgacgaaagcaaagaagtttataagcgcctgatcgtcagcgccgacaacaaaacgctgctcggcgcggtgctggtcggcgacaccagcgactacggcaatctgctgcagctggtgctcaacgccatcgagctgccggaaaacccggattcgctgatcctcccggcccacgccggcagcggcaagccatcgatcggcgtcgataaactgccggacagcgcgcagatctgctcctgctttgacgtcagcaaaggcgacctgatcgccgctatcaacaaaggctgccacaccgtggcggcgctgaaagcggaaaccaaagccgggaccggctgcgggggctgtattccgctggtcactcaggtgctcaacgccgagctggcgaaacagggcatcgaggtcaacaacaatctgtgcgaacacttcgcttactcccgtcaggagctgttccacctgatccgcgtggaaggcattaaaaccttcgacgaactgctggaaaaacacggtcagggctacggctgtgaagtctgtaagccgaccgtcggttccctgctggcctcctgctggaatgagtacatcctcaagccgcagcacacgccgctgcaggacagcaacgacaacttcctcgccaacattcagaaagatggtacctattcggtgatcccgcgctcagctggcggcgaaatcacgccggaagggctggtcgccgtgggccgtatcgcccgtgaattcaatctgtacaccaaaatcaccggctctcagcgcatcggcctgtttggcgcgcagaaagacgacctgccggagatctggcggcagctgattgaagcgggattcgaaaccggccacgcctacgccaaagcgctgcgaatggcgaaaacctgcgtcggcagcacctggtgccgctacggcgttggcgacagcgtcggcttcggcgtggaactggaaaaccgctacaaaggcatccgcaccccgcacaaaatgaagttcggcgtctccggctgcacccgcgaatgtgccgaggctcagggcaaagacgtcgggatcatcgccaccgagaaaggctggaacctgtacgtgtgcggtaatggcgggatgaaaccacgccacgccgatctactggccgcggacctcgatcgcgatacgctcatcaaatatctcgaccgctttatgatgttctacatccgcaccgccgataagctgacccgcactgccccgtggctggacaatatggaaggcggtatcgactatctgcgcagcgtcatcatcgatgacaagctcggtctgaacgaccatctggaagaagagctggctcgcctgcgcgccgccttcgcctgcgagtggaccgagaccgtcaacaacccggcggcgcagacccgcttcaaacactttatcaacagcgaccagcgcgacccgaacgttcaggtggtgccggaacgtgaccagcaccgcccggccacgccgtatgagcgtatcccggttactctggtggaggaaaaagcatga

SEQ ID NO: 223265 - DNA, 513 bp, Klebsiella pneumoniae
gtggcactgaatgggacaataaatacgtttgcttttatttatcagctaccatcaggtgcattaccatcaacccctacagacagaatagtcatcgcaacccaggaaacaacccctcatggggttggtattcgcactacttcatctggtaatttccccgtgttttttaacggtggcacacagccagatgttcctttcaccccatcaaatatggggtctggtttgttttgcgccgtggttatgtgcgcagatgcctcagctggaaaatatgcgatagcatatcaaaggtctgaccagacaacggtaacaaccagacaggtaactggctatacgatacctgcatacaccacgtctcaaaaaatgaatttaggcggtgctggagatggggctatttcacccctgacgtctgtgctgtcagacgcaatagtgatacctggtttgtattcctacgggaccagtgcccaggatgtcatttttgcatacctgatggagagaattgggaaaataacaggctaa

SEQ ID NO: 223266 - DNA, 222 bp, Klebsiella pneumoniae
atgtcaaaacaggtcgtttcgttgcttccaggtgatcaggtagatcttatttcagtcgcagatgatgataactacgtgacttattacggagaccaaggtgcacagcttggtatgccgattgaaacgtttgctcttgatgataaagaatatttgattgcgaagtgttcaggtaatgtagcggatgaaagaattatcgctgcaatcaggaagtatttcggttaa

SEQ ID NO: 223267 - DNA, 1293 bp, Klebsiella pneumoniae
atgagtaatatcttcctccccaaaactatgttgggaacactgctttataaaagagtgtatgagttctttgaagagcctcgtttcttttcagtagaaaatgaagttggctctttatacgtagtgtattggatctctgaagatgaaaattcagatagttggtttatcataccggtatcaccaactaaacttgagctaattgaaagaaagagaatagatattcactcggctcttactgcgcttgaacaaagttttttttacaaggttcaggctccttacaatagagatgagactcctgcttgggatgttttgtatgcagaagacttaaataattttaagttacctgctagtggattgttcattagctcagttgtacccgttcttggcaatggacgaattggcgcaccaataaaatactccacgcatgaaatacatttggaaaaaagctctaagaaaagtgaaggtaatcttgttttaggcaatgtttcaagcgtatgcgacagatttagcgaactatacaacagtcttttggatttagatggccttaaagacaaattacgtccagttgatgctcgcccaggatcgttcataatttcatttcaagcagagaagctttctttgtttgaagaattgttaaaatctttaagcgctttgatagaagcaagagctaatgtaattgatttcattaatgaaaacaggattgatattcaatcactatcaaatctttttcaggcagttgtttcttccggtacgaacatggagctcagaagcaacgagactggtgaattaatttttgtattgacaaaggctggggctgatttttatctaaaagatattaataagttatcaatgctatctgttagcggtcaccagataccgcaagccgataccttagagcgagtttttaatatcgttgaagtaaaatggcgtggtgaaccttgtagtgagttcaatacaggtctgcaggagcgccatatatattattatattcatgccgctaaggtattagggttccttgataataatagtaaggtaacatcatttggtcagcagttaattcaatcagaagacgatgttaaacttaagattgcggcgagatgttttgaaaccagtcatataggttgggcttggataaattgggcgggtgttgaaaatctctctcagttagaaccggaaactgcagaaggttttcttttagagcagtgccattctttaagtgccgaaaccgtgtctaggagatctagaactataaggcattggtgtaaggtgttaaaggagcattacacccccctttaa

SEQ ID NO: 223268 - DNA, 810 bp, Klebsiella pneumoniae
atgagcaagccatttctcaaatgggctggtggaaagtatacccagctggctgacctgttcgcgcatattccggcagggaaacgcctgatagagccattcgttggtggtgggtcggtattcctgaacagcgaaaagcacgcagattacctgctggcggacgttaacccggacctgattaatctgtatcagatgttagcggtggtgccggatgaagtggaattgaaggcccgctggatgttcgagcacatgcgctcaccagatggctatgagctgatccgttccgagttcaacgcacagacgctggatgctactgaacgcgcagctgcattcctgtatctcaaccggcattgcttcaatggcctgatgcgctacaaccaggcgaacaagttcaatgtgggctggggaggctacaaggcgccgtattacccgctgggcgaaatgaaatccttcgtcgctatggcgcataactgcgtattcatgaccgctgactaccgccgaactatcagcctggccgggaaaggggatgtggtttactgcgatccgccttacgaaccgatgccgggaacaaccggattcaccgcctacgccgctggtggttttagctgggataaccaggtggacctggcgaagcaatgcgtatcagcctttcaccgtggggctcgggtagtgatatctaactcatccgcaccgaaggttctcgacctgtaccgggagcatggttttaacctgcaattcatcaacgcgcgccgttcgatctcctgcaaaagcagtacgcgggaagtcgcaaaagacgttgtagcgatcctttaa

SEQ ID NO: 223269 - DNA, 180 bp, Klebsiella pneumoniae
atgcgagagctcaaccgatggttcagagatcactacggtgtcccggtcagggtcatacgctgggagccccagacacagcgcgttatatacctgcgtgaagggtacgagcatgaatgctttagccccctcgagcaattcagacgtaaattcagagaaataaaggacgatcatgagcactaa

SEQ ID NO: 223270 - DNA, 261 bp, Klebsiella pneumoniae
atggagccagagttcaaagagggagacactatcattgtggatcctgacttgtgtccaggtcctggggactatgttgtagccaaaaacggtagtgaatacgccacttttaaaaaataccgtgcaaggggtgtcaacgaaaatggtgaagaggttttcgaattggtcccgttaaaccctgattttgctgctttaaactctgctgttgaaaaaatttccatcatcggtgtcgttgtcgaacaccgccgccagatgcgccgctaa

SEQ ID NO: 223271 - DNA, 786 bp, Klebsiella pneumoniae
atggctaaagactcaaaggttgtatacggcgccagcggcaaaacgaacgttttaacgttcgaacctgaaagcctgcacctggttaccgacaaaacacacccgctttacgatgaacgggtccaccttcctatcgacgaagggatggttctgaacatcaaggagctgggtgtactggaacctatcatcgtctggaaagaccctgaaacggggctcacctgcgtagttgtaggccgtcagcgcgtaaaacataccctggaggcaaataaactccgtctgaaagaaggcaaagacccactgcttgttcccggagtcgttaagcgcggatcagcaaatcagatggctaaatacatggtcagcgaaaacgaaattcgccgacctgataccccgcttggccgggctaaaaaaatgtcagacgcgctcgaccgcgggctcgatgaggacgacattgcggtgttgtttggctgcagcgttcagaccgttcgtgcaacgctctcccttctcgatgccactcaggccgtcagggaagcggtggaggctggcacagtcaccgttacccaggcgcgtcagctggcatcgcttaaacccgaagagcagcgggagaaggtctatgaaatcgaagcggcaactgctggcacaaccggccatgaaaaagcccggcgtcagcgtcaaatcctcggtgaggcaaagcctcgcctgaaaacccgcaaagaaatcacaaaagccctggaatctgccgagggtgagtatgcgagcgcactccgttgggtgcttggggaggcgcaatga

SEQ ID NO: 223272 - DNA, 135 bp, Klebsiella pneumoniae
atgaactttgaacctgaaaattacagccggcgcgccctgctctggttcgcagctgtgatcgatattgccggttgggtcgctgttttcgtcgtgacctggggtatctgcatggttattgaatggtgggtagcatga

SEQ ID NO: 223273 - DNA, 285 bp, Klebsiella pneumoniae
atgagccacgctattgatgcacatctcactgacgaagtaatcaacgccgcattcgaaaacactaatttcgggcgagacgactttcgcaccattctggcggaaaccgttatgaagcgagccgtcggttatcactctggctggacggcgacgaccatttgcacacgcctcaaactgctgggtaaacaggagcggccaacaaagctcggtctgacgttcgcctttcaccactactaccgccagagcgtccgtgatgcgctgatgccaaagcaggggcgtgcagcatga

SEQ ID NO: 223274 - DNA, 741 bp, Klebsiella pneumoniae
atgactgatatcaccgaactggcgctactcgtcagtaaagcgaaagcgtctgtatttaccctggaatatatctcgcagtttgagcctgctgatatcgactccgatgacgttgatttgcggtttgaggtagatggccgagataccggcaccaacgtttctatcgtcgatgagtgcgggcaggctgcaaaggttattggcacgctggtagaggcgctggagaaggcgcagggtatggaagcctactggaaaactcaatgccgtggcataacagaccactgcgaggagttgcaggcgcgcatcgccgagctggagtcccgcaccgtgaagctgtcccctgagctttacacaatcggtgatctaatcaggacgcaggacaaccgcattaccgatcagcccatgttcgtcgttttccagaagcgtgaaattatcggaagcgacgagcactcgcctagccgaatttgctgggtatgggatggtgaagaggtcagcgagctgagagccaagcggctggaagcgctttatcaggatggtcgcgacactcgcggatatgaccgatacgcgatgcaggaagtagatgagtttgttactgcctactttaccgagcatggatgcaaagactacctacgccagaacggccataacctgcggttgccgtacatttacgcctgcggctctttccgaaataacgaatatcagctggttagaaattggctcgctggcatcaaggtggaggctgagtga

SEQ ID NO: 223275 - DNA, 213 bp, Klebsiella pneumoniae
atggctatcactgaaggattttgcgccgatttgtattgcgactgtgatggttgtcagtcagggaaaatctatccgcaggggcaggctgattttattggccggaatatgaccgacatttctcagcaggcgcgcaaagctggttggcgcatcagcaaagaccgtcagcgctgctatgcgccggggcataaaatttcacggggagccaatcaatga

SEQ ID NO: 223276 - DNA, 609 bp, Klebsiella pneumoniae
atgaccaaatcaaccataaccagagagcagttactcgaaattattgaaaccgatcacgtgcagtgcggtgaggcatcttatctagcccgcatggcgctggccgcaatagacagcgagccggtgattgttgttggcgatgatggaggggatgcgctttcttatcgccgccttatccagtcgtttgcaccaggcactaagctctatcgccacgcgcagccagcgccggaacgtgaccaggtacgccgcgagcacgccgagtggtcacaagctacgttcggcgatgttggcccggttggcccactgaagcacctcagcaaagaagcgctggaggctgctgccgagcctggcgacctgtcggaatgggccgatattcaattcctgttgtgggacgcccagcgccgtgccggtattacagatgagcagattacccaggcgatgatcgataagctggcggtaaacaagcagcgctcatggccggagccaaaagacggggaaccaaggctgcacatcaaagaacgatctcgtaaaaaagtagaccgctgtgatgtttgtactgaaggagctcgcggtgggtgtggaacgtgtatttttaacggtaattttgaatga

SEQ ID NO: 223277 - DNA, 657 bp, Klebsiella pneumoniae
atgtctcgccttggtaagtatctatcagctctatccgacctttatggttcggtggatgccgttcactttaaggatgtgagcgaagggtcggcgtgcctgaatacctgggtggataaccaagcgtcatacgatgcagttatacagcgctcaatgacacaagctgcaacatctggaagctcttacttaaaattagtttctttgctggctcaagatggttttggcgcaaaattaatcaaccaggataaagttactattcttgattttccatcaatcaatgaagaagcccctttcgtcgtaagaaagaaaggtaaggtgcaaggaaaactttacaacgttggtggcaaggatgactccgcgccagtgaagcttgagggggctaacggggagacatatcactgtgaggcaactcccgctatggccgcaaagcttggtgcattgcttttcaagcaaatacgggtttcaggtgatagtgaatggattaaaaaagatggcaagtggaagctaaaaaaattaataattgaatcctatgaagtcttagaaagctctaacttgaagactgcttttaaagcattgcagaatgctcccggtaatcaatggacagaagaagatgacactcaagccatcttaaaagctttaagggcgctaaattgcgaataa

SEQ ID NO: 223278 - DNA, 546 bp, Klebsiella pneumoniae
ttgcgaataatattcgatactaacattttagtgcaggccatcacaggaatgaaagatggatgcaagttatctaaccctgaaaatggcatggaaataccagatcccatgagaagggtagaagcactgatcgatatggttgagagcagtggcggagccgtcatcatacctaccccagttttagctgagtatctggttggtattgataagaaagatcaccaaacgcaccttaatttaattcagagacaatcttgttttgagattgctagctttgatgaaatatctgcaattgaatgcgctcagatgccatcgataaaagagttaaagcttatgatgaaatctgacacagcaagcaaagtaaaattcgaccggcaaattatttccattgctaaggcgctcaatgtagatgaggtttggacacatgacaaaggtgtattcaaccgctgcaaagaaatgggtatagtggtcaaatcacttgcagatatagacccagccccagtgcaggtactaattgatatgagtcatgacgccccctcagagcttcactaa

SEQ ID NO: 223279 - DNA, 189 bp, Klebsiella pneumoniae
gtggaacagattcaaggtgaaggtggcactgttgttggctttggtcgcattcgtaagcgttcagtgctggggtgcggtatgagcagaaacggcattcgttcactgatttactgcctgctgatctgcggcgttatctggacagcgttgattatcaaaattctgcacgctacgggggtgttcaatggctaa

SEQ ID NO: 223280 - DNA, 885 bp, Klebsiella pneumoniae; identical to SEQ ID NO: 54013

SEQ ID NO: 223281 - DNA, 1200 bp, Klebsiella pneumoniae; identical to SEQ ID NO: 6086

SEQ ID NO: 223282 - DNA, 678 bp, Klebsiella pneumoniae; identical to SEQ ID NO: 54015

SEQ ID NO: 223283 - DNA, 1530 bp, Klebsiella pneumoniae; identical to SEQ ID NO: 39200

SEQ ID NO: 223284 - DNA, 198 bp, Klebsiella pneumoniae
atgactgatatcaccgaactggcgcagagcgacatcaacaccgcgatgctctcctcaatcgaagggtttgcattccttgtcgttgattctctcgaatttgaaattggccgcgaactgaccgacgaagagtctcagcgcgtctataagcaggtagaagcggctattaacaacgcgacaagcgaaggcggtgtggaatga

SEQ ID NO: 223285 - DNA, 258 bp, Klebsiella pneumoniae
atgtcacagtggaacatcgcagccaaatcgaaagacgagcaggacaaggtcaacgtcgacctggcagcgtccggcgtcgcgtacaaagagcgcctgaacatgccggttgtcgccgaagtggtagccagagagcagcctgagcacctccgagaatacttcatggagcgcgtccgctactaccgtgagcagagcatccagctaccccgagcatccgatccgcgctatctggaaatggccagtcagaacgagaaaaaatag

SEQ ID NO: 223286 - DNA, 525 bp, Klebsiella pneumoniae
gtggaaaatttcatcaaggcaattcaaacgtctatcgagggtaaaaattggtactcggtactatttatttcactaacccttccagacatctgcggaaagatagataccccttcaagtaatagttctaaaaccagaaccatagaatggtgtgataaatatttaaccccgctatacactgttcgccttggcattgctcgagaagaacatattctcttgggtggcgctgatttttacgcgctccgttgtgcatatttacatgagggtagtgacgacgtaactacgcaaaaagcaaggcaacatattgataagtttcggttcatccagcccctaactgacgggttatgtatccataacaacaaaaaccataatacgctgcaacttcaggttgatgagttcggcaaggacataataaaagcagtgcgtaactggcttgacgatattaaagacgacccagcgaaaaaagcagaggtagactctctgctcaatattgaaatgattgatatctcaaaaggattttctgtgtag

SEQ ID NO: 223287 - DNA, 213 bp, Klebsiella pneumoniae
atgacaggcatgttaggaatgcacggcggcttaacctcgtttatgttttctttcatcgtcgcggaattcattagctttttcgcagaagtaatctgcaaggagggtacatttatgggtaataaatcttgtgggaaaacgactctgatgtatagcgttaaaggcactgcttcgtcagtactggaggctagccgcatttacaggataacctgctga

SEQ ID NO: 223288 - DNA, 462 bp, Klebsiella pneumoniae
atgatggatacactgcttactaccattgttagaatggcaacattgagcgctattgggctagaagtaccgcaaattaaaaatcaggacattaaaggcaccgatggtactcggagtacagaagagataaccaccgagtctcttcatgcctatgcgaagattgagcaagaattgtcaatcgccagaaggaccctgatttccgaaactgtagagattgaggaatactatgggaactccctcaagggtggattaggtgcaaaggttagtgccgctgattttggtttggatgccagagcagaaaaaggaaaagtaacgaaacgcgtgattaaattcaccgggttcaatgctcaaaccgagtctttgctaaatgctatcgaagcgtcattactttcaaaattgaaagccgagctatctgaaaatcgtgtgggcaaggtttctccagcgagcaacatcgatactgagtga

SEQ ID NO: 223289 - DNA, 612 bp, Klebsiella pneumoniae; identical to SEQ ID NO: 194627

SEQ ID NO: 223290 - DNA, 627 bp, Klebsiella pneumoniae
atgaatactaggccatacccgccagctaacttcatcaactccgacaactggcagccatacacccgcctcattcctgccagcgaagtgagtgagtgggtaaaccggcaaatcctcagcgataccggcaacatccataaccctgaccatgcgcacctggtcgacgctgatgtcgcgtttatgtgggcctctggctcattcgccaaaagcgggcgcattgtgctgggtcagtgtgagcaggtaatgatgcgcgccggcggctggcagaaatcccgcatggagcagcaaatgcatgaatggttcggtcgcataccgaagttcatcattaccctggctgctgactactgcgaacaatgtaacgatctggagttctgcgcactggttgagcatgagctttaccacatcgcccaggctaccgatgactatggcgcaccgaagttcaacaaagagaccgggatgccggttctgaagcttcgcggccatgacgtcgaggagttcgttggcgttgtccgccgttacggcgccagcaaagatgtgcaggaaatggtggatgcggctaacaggcccgcggaggttgctcatatcgatgttgccagggcgtgcgggacgtgcatgcagaaactggcgtga

SEQ ID NO: 223291 - DNA, 327 bp, Klebsiella pneumoniae
atggtacggaaaatcatcaaaaccacttccgacttgtttatgacagttgggacaataaaccgcgttgacgtagccacccgagggattttttctaaaggccgcgcccatgtgctcgacaaactgatcctttgccctgtaagccgatatttccttctcaagttctacgtttttggctttcgcctcggcaagttcttgtacggtggcagcatgggctttctgaagtacgtcaatttgctcgccgatgaaagcgatgcgctcgcgcaagacctcattgctctgaaccgcagagagagcgccaattccgctcttaagagaagtaatgagtaa

SEQ ID NO: 223292 - DNA, 426 bp, Klebsiella pneumoniae
atgacaactaatatcacctcactggtgcagcgtttgaaagtggcagcaaagaatggatgttgccacaccctttttccggatgattgtctggcgctggtaggggcgctggagaaggcgcatcagcggattgatgaactggagaacgatgaagttcgtcaacggctggctaacgcagagcaccaactctacatggctgaactgggtaaaaataatctgagagccagtcgtaaggtgcagttccgcaagcgcaaggcggctgatcaacgaatcgccgagctggagtcccgcaccgtgaagctgccgaagcctattagcgttttgcatcgccgagagttcactgcggcgcactgcgcaatatacgcataccccgaggcagaagttaacgcggcgttggatggcgctggcatcaagtgggaggctgagtga

SEQ ID NO: 223293 - DNA, 291 bp, Klebsiella pneumoniae
atgaccaataaccagttagcagaaaacagcgccatccaacttttgaacagcgtcaaactggcgcgcgataacgcagaacgcgccgacaatcgagttgaccactcgttttattacgcgctgacgattgctctggaagagctacaggaacgccgcaaggccgcagccaaaaccatcacaccgcctacgccagcttgtacttatgctgatcacagttatccggcatacacgaaacagcaggttcttaccatgctggaatcgctgggcgttactgtcgttgaggaggatgtatga

SEQ ID NO: 223294 - DNA, 504 bp, Klebsiella pneumoniae
atgacgccatcaatgaggaataaactgattggcgtgatcgccggcggcggtggcgccatagccattgcctctgcgctcatcactggcccaaccgggaacgatggtcttgaaggtgtgcgatacaacccttatcaggatgtggtaggcgtctggactgtctgctatggccatactggcaaagacatcatgctcggcaagaagtacaccgaggctgaatgccgcgcgctgctcagtaaagacctgaacgccgtcgcccgccagattaacccatacatccagaagccgatccccgaaacaatgcgcggggctctgtactcgttcgcctataacgtcggcgctggcaacttccagacctccacgctgctgcgcaaaatcaaccagggcgaccagaaaggtgcatgtgatcagctgcgccgctggacctacgccaagggtaagcagtggaagggtctggtaactcgccgcgagattgagcgcgaagtttgtctttgggggcagaaatga

SEQ ID NO: 223295 - DNA, 138 bp, Klebsiella pneumoniae
atgctgatactcttcattctcctgtcgatctggctctgtcgactgtcggagaagcctggctggtttaaggtcagccatattatctcaatgctggcgctcgaagatgagcatccggcgcgcggtaaggggctgcgttga

SEQ ID NO: 223296 - DNA, 195 bp, Klebsiella pneumoniae; identical to SEQ ID NO: 99358

SEQ ID NO: 223297 - DNA, 942 bp, Klebsiella pneumoniae
atgccaatgacatttgaccaggcaacagtcgacggcactggtgcctttcttgtccatgagctggagcgtcttgatcagacactgaatctgccgctggtgaatttcacctggtcgcgcgatatccagttgcgcgaagacgtttctatcgctgatgaaatcagttcgttcaccaacaccacgtttgccgctgccggtacgccgaatgccaacggcaaaaactggctgagtaaaatcccgactgcgctggcaggcgttaacgtcgacatcgcaaaaacaggcttcccgctcactttgtggggtatggagcttggctggaccgttcctgaattgcaggcagctgcgcaagttggtcgcccgatcgacacgcagaagtacgacggcatgcagctgaagtggaacatggacacggacgagcaggtttatatcggcgattccggtctgaacgttaaaggcctgctgaacctggcgcaggtaacgccgaccaacgccgcgaagacctgggcgacctccaccgctgacgaaatccgggcgagcattaatgccgggctgagtgcagcgtgggccaactcggcttactccatggtaccgacggacctgctgatcccgccggagcagttctctctgctggcaagcaccatcgtatccagtgctggtaaccagtcactgctgacctatctggaaaccaacactatcgcataccaccagaacgggcgtcctctgaacatccgtccggtgaaatgggcgaaaggtcgtggcgtgtcgaactctgatcgcatgatgttctacaccaacgacaagaaatacgttcgcttcccgatggttccgctgatgagcgtgccgatccagtatcgcggcctgtatcagctcgtaacctattacgggaagctgggtgcagtagagccggtttatccggaaactctggcctacgtcgacggcatctaa

SEQ ID NO: 223298 - DNA, 153 bp, Klebsiella pneumoniae
atgcgcccggtggatgccgggctcatcccctacaccgccctgaaagatggatcagtagacctggctgatattgcccgtatgaatgactggctggacctgaaagccgataacgaaaaccgtatagcgaaatggagagaggctaatgaacgctga

SEQ ID NO: 223299 - DNA, 507 bp, Klebsiella pneumoniae
atggcgatcggtacagggaagaagattgttttggttgttattgttgtcttaggatatttaatcggcaaccacgctaacgacgataaaaggtatgaagaattaaaaagcaaagaaccatcgtcacttagtgaagatgataagtcgtttattaaaactgttgatgatgagaggatgaaggcagaagccgaacgccgtggctatcagaaaaaaatggaagcagagaaggaaagggaaaaaccaaaacccttatcggaaaaaattctgctacaaaatgatgtgatatttgcatgcaaagatattgcaaggaactcccttaactatcctgactccttcgaagttgaaaatactaatagcgggatagataaccaaaatgggaagcaaatctattacttcacgcttgattattctggggtcaatgcttttaacgttcgaggcacgcacacaattgagtgctatggaaccataggtgacctatcgcacagcgtaactcataaaatattcaactaa

SEQ ID NO: 223300 - DNA, 756 bp, Klebsiella pneumoniae
atgcccgtagcactaaactcccagctcggcagtaaagagcaggcagacgcccagttggcgcaggcgatcatgtctgcaatgcgcgtctccatgcctggcatcattcagtcgtttgatccggatgccgtcaccgccgttgttcagccagcaattaaaggcgcagagcaggacgaatcgggctccgaggtctcggtaaacctcccgctgctggtagatgttcctgtcgttttccctcgcggcggaggctgcacactgacttttcctgttaaggctggtgatgaatgccttgttatctttgcggaccgctgtattgatttctggtggcaaagtggaggtattcaggagccggtagacgagcgcatgcatgatttatccgatgccttctgcattgtcggcccgcagtcgcaggcgaagaaaatcggcggtatcagcactacggccgcgcagctgcgtaccgacgacggttcggcgtttattgaggtggcagcaggtcatgacgtcaccgttaaaacgtcgggtaaattgacggccagcgctgacggcggcacggaaataacctctcctgagatcatccttaacggcaatgtgacgatcaacggcaacctgtcgcaagggatgggtgagagcggaggctctgcgacgatgcacggcccggtcaccgtaaccaacgacgtgactgcaggcggtaagagcctaatgacgcacacgcatggtggcgttgaacatggcaacgatagcaccggagagcctgaataa

SEQ ID NO: 223301 - DNA, 354 bp, Klebsiella pneumoniae
atgcgataccgacgtgaagatgatgacggggattacactttcggtgagggcgatgatacctggctggtaaactctccggaggccgtagcgcaggccattaaaacgcgcttcctgctctggtacggtcagtggttcctcgacaccacagagggaacaccctggattcagtccgtactgggtaagcaaaagcctgacacctacaacctggctatccgccggcgcattctggaaacgcagggtgtcagctctattaccgaatttaacaccgaagttgacggccgcacgcgccgtgtaacgttcacagcaacggtagaaaccatctacgggacaaccacagtaacctcggaggcgtaa

SEQ ID NO: 223302 - DNA, 1200 bp, Klebsiella pneumoniae
atgtctttggacctcgacacactcggcttatcggcaacggtaaccgctgaggggataagtgcgcccgactatcagaccgttcttgacaccattaccggctatttccagcagatctacggcagtgatgcctatctggagcctgacagtaaagacggccagatggtagcgctggtggcgctggccattcacgacgccaataacacggccatctcggtttacaggtcattctcgccggcgacggccctgggtgacgcactgacgagcaacgtcaaaattaacggcatcacccggcgcgcagcgacaaattcaaccgtcgatctgctgcttaccggtaccgtcggtacggctatcaccaatggctcagtgcacgacacaaacagcgtggtctggaatctgcctgcaacggtggtcattggctccgacgggacagtggtagctacggccacctgtgcaaactcgggagcggtcgccgcggtagcggggtcggtaaacggcatcaacacacctacgcgcggatgggcttcggtaactaacccgctggcggctacagtaggcgtagcagcggaaacagatgcagaactacgcgtaaggcagtcgcaaagcgtcgcgctggcgtctctcacgccatttgatgcggtagatggtgcgattgccaacgttgaaggcgtgacccgtcacaaactgtttgagaacgaccaggaggtgacggattcaaacggacttcctccgcactcgatctcggcgattgtcgagggtggtgatgcaacggaaatcgctaacactatccgcagcgttaaagggcagggcgtatccacttacggcactacgtccgtgatagtcaccgacaaatacggcaacccctacacaattcgcttttcccgcccgattgacgtgccggtttatgtgtcgataacgcttaaggcactgacgggttatagctctgaggtcggcgatgagatcaaagcggctgtggcttcgtatatcaactctctggccatcggtgacagcgtgctgctgagccgcgtttattccccggctaacctgggcgtcgtgagcggcggtaacgcgcgctattacgacatcatggagctgctgattgggcgctctgccgatgatgtagccgcggctaacctggtggttgcctatgatgagtcggcatcctgcagcgtggataacatcgcactggtggtgacgccatga

SEQ ID NO: 223303 - DNA, 774 bp, Klebsiella pneumoniae
atgagcaaatacaccgacctgatcaccaattaccacgccggaaagcccaagttcgtcgagcacgttgatttatcgacgcggccgctgattgaagtttctactgctacgtcagggttaatcaccgcttttgatgttgataccgcagtcggcgaccagttggatatcctcggcaagtggatcggcgtatcccgagcggtagcggcacccattactggagttttcctgcagtgggataaagagcgtgtcggttgggatcaggggatctggctgggcccttaccagtccactgacgcgctgacgtatctcagcgatgatatctatcgcgtcgtgctcaaggcccgcatagggataaacaactggaacggccagaacggcacgctgccggatattctggaaacggcgcttgaaggcacgggtataaaaatgattatcctggataatcaggacatgtctatatccgttttaatcgtcgtggatgatgaatatatcattcccaatattgaccggttgatatttgactctgcaattaaccacggcccgtttataccccttcctgaaggatatgaaccatcccgctacgatataaacccgatagataaacttcccgctgaatttgtttttgtcattcgcgctgggctactcactgtaaaggccgccggggtgcgaatcagggaaaccattacaccgtccaacggatataaattttttggattcgatgccgataacgattacatcgcgggttttgatgccggcgcatggggagaaacattctga

SEQ ID NO: 223304 - DNA, 774 bp, Klebsiella pneumoniae
atggctgaaaataattttaagccgtttgccgttggtgcaggtgcaaacgtgtcctcgcaaacagactgggaaaatttggtagctctgtccaccgggtttactgcggggatagcccgctctgagcagatcaacaaagcgctgcgacagggtaccgtaatggctagcgttctggggcagataattctggagcaaaccgccgaggatgtcctcgataacggggacacagctgcgctaaaggcacagctattaacggcccttacctcattacaaattgattccgtatacccggtgggcgcggtgttgttcttcgctcagaacaaaaaccccaacacacttttccctgggacggtatggaattacatcggagaaaacaaaacaattcgacttggacttcagaatggatcggatgttctgggtacagggggagcggatacggtttctctggccaaagcaaacttacctgcacaggcattgagtattaccggaactgctgcttcagtcgatctgggcacaaaaactaccgacagccagggagcgcactcacacggatggggtagctcaatgcagaaacaaggtggttcagatcaggcggtgggctctaatggcggtactgattttggcactacatcaacgagtggggcacatacccatagcgttgccttgggttctcacagccacagtgtttccggtaataccgagaacatgggtagtggtaccgcattaaatattaccaacgcctatgtaaaactgatgggctggtaccgttccgcctga

SEQ ID NO: 223305 - DNA, 3330 bp, Klebsiella pneumoniae
atgactgaacaaacctcccgcctggccattgtgattgatagctccggggcagaaaaacaggctgacagccttgcagttgcgcttgataagatgactcagtctggtgataaagccgtaaccagcatgttcaaagtgacaaaagcgactgacgaggaaaaagacgctctcaataaattgcgagcagtcattgatccggttggtgctgctattgataccgttggccgccgctttactgagctgaaaaaatacttcgacaaggggctaattgacgaggaagagtttcgctctctctccaaaatgctgaatgatacgaccgatgagttaagcggcgttgcacaagctcaacgagaagcagaaaaggccagcaaattagctgctgctcaacaggaggcgcaggctgatgcattccaaagaatgctcgataaaatcgaccctctggcagctgcgcttcgcaatcttgaacaacagcaaagtgaactcaacacggcctttaaatcgggggcaattaatacttctcaatatgatgcctacagcgatactcgccgagaagtaaccggcgaagcacaagccgagcgcgaagctgcaaatgcacatgatgaacaggtaaatgcactgcgtcgtcttgaggcccaaatagatcccgtaggtgaagcattccgccgcctgaacgagcaacagcgccagcttgatacagccaaaacatccgggatgctgtcgcccctggcttacgagcgcctcaacagcaaacttgcagaatcccgcgatgccctggagaaaacccaggcgcaattgggtaaaacaggccagtctgcagctcaaactgccaatgctatgcgcatgatccctgctcaaatgacagatattattgtcggcttatctacaggtcagtcgccattcatggtgctcatgcagcagggcggacaattgaaagatatgttcggcggtattggtcccgcgattaaaggtgttggcggatatgtgctggggttgattaatccggtcactctggctgccgcggctgttggtgttcttgggctggcctattacaaaggctctcaggagcaggacgaattttataagtctctcgttctcactggtaatctggtaggcaaaacttccggtcaactggcagatatggcggcccgtgtatcggtcgcagctaactccacaaccggtgcagcagcttcaacgctgaatcagttggtgtcatccggtaaagtagctggcgactcactggagcgcgtgacaaccgccattgttaagaccagcgaggcgacgggcattgctaccgataagctggttggtgatttcaacgatatcgccgccgaccctgttgcagctattaccaaactgaatgaccagtaccactttctgacgctggcgacctacaaccagattaaagcgcttcaggacgaaggaaatcaacaggaagctgctcgcgtggcgacagatgcttacgctaacaccatgcagcaacgtgcgaatgatattcatgagaatctggggcttctggaacgggggtggaattccgttaccaatgccataaaaggggctacagatgcactattggattttggacgagaaaaggggccatctgaaagattagcagagataagaaaagaaattgattggatcgataaggctgcaggcgggaagctattttttggtggaagaaaggctgagctcgaagatgagctaaataatctgcaatctcaaatcacaacagaaggcgttttaactgaaataatcagtagtcatgacaaagctgaacagcaaagaattaaaacgcagcaggaagcagatcgcgttaaccagcaatatctgagcaatgcggataagcgcaataaagccattaagcagcaaagcgagttcctgaaggcaggcgcaattactgcagagcaatattcaaaaaatgtttctcgtattaacgagatgtacaaagatccgaaaccacccaagacgccaaagagtaaagcatataccgaggacgcagcaacccggctgcttgatcagataaaccagcagactgctgccatgcagtcccagctggatgccagtgacaagcttaacagcgcgacacaggctcgtatcaagttcgagcagcagattgctgacctcaaatctaaaacgcagctcaccgctgaccagaagtcgatcctttcccgttcagatgaaatcctccaggcgtataagcagcaggaggcactgcaaaattccgtaaaaaccctggacgattaccggaagatgcaggaacaggtaaagacgaaggatgagcggaccaacgatctgcttaaaacccgtcttgaactgctggagaaggccaaagcaacggggcaacttaaacccggtgaatatgaaaaaacgcgggcagatatttatcaaaacaccgatatgcaactgccctcgacggttcgtaatgttgtaggaaacctgacacccacaggagggcgactctctggaacttttgaggggatgcaggggcaaatcaatgaatatgaccaggcgcagcaggagctccagcgctggctggcagctcaggaggaagcttatgcgaaggccggcgaaataactgccgagggtgaggccagaatgacgtcgattcgtcagcgtgcagcggatgcaaatcaggtcatcgaggctcagaaaaacaccatcatatctgcggccacgcagtccttgtttgacagtaccgccgacatcatgcgaacggggtttggtgagcaatcggcaatctacaaggtcgcttttgctgcgagcaaggcattcgctatcgcggactcgatggtgaaaatccagcaggctatagcaagcggtgcagtaagcgcgccttatccggccaacatcatcgctatggcctcaatcgctgcgcagaccgccagtatcgtctcaaatattcaggctgtttcaggcgttggcttcgcctccggcggttacacaggccccggtagcaagtatcagcccgcgggtattgttcacaaaggagagtacgtcttcgaccaggcgtcaacgaaccggatcggcgtgtctcagcttgaggcacttcgaaatggccaaccgctagatgcaactctggggcgtacagggtttggtactggtgttcagaacgttaacagcgacaacagcagcaagaccaccatccatgctcccattgagcagcatttccataccccgcccggtgtgacacctgatcagatggctctctccatggctcaaacgcagaagcgggcgacaacggaagcccttgatcaggttgctgcgcaagtgttgagaggagatgggaaagttggtaaggcaatgcgcagtaaatatccaggcagagggttagagtga

SEQ ID NO: 223306 - DNA, 129 bp, Klebsiella pneumoniae
atgcttggagtgaatcttgcaagtagcaaattagcccactcaggtgggcttttctacattagacaattagcagtttttcttggtttagcgttgctgattgttgaactaatttttctttcgctgatttaa

SEQ ID NO: 223307 - DNA, 1314 bp, Klebsiella pneumoniae
atgatccaatcctctagcagcgatgctgtcagcctgacaccgaaacaggcaaatatttacgtctggggatggcagcgctcagcgcgtttcagggatgctgtatgcggtcgccggtttggcaaaacattccttggcaaagcggaaatgcgcagggctgccagactggcgcagaaatggaaagtcagtgtagaggatgaaatctggtattgcgcacccacacaaaaacaggcaaagcgtgttttctggcgaaggctgaaacaatccatacctccacactggcgggcatcgaagccgaacgagacagaattatccatcactcttaaaagcggacacataatgcgatgcgtcgggttgaataactacgatgatttgcgtgggtctggcttatttttcgtgctggtggatgaatgggctgattgcccgtatgcagcatgggaggaagtattgcgcccgatgctgtcgacttgtcggtatatcgtaaatggtgtgcagtttataggtggacatgctctccggattggcacacccaagggatttaaccattgctatgattcatggcttgccggacaggacaaccgagagcctgaccataaaagctggctttatacttcggtggatggtggaaatgttccgccagaagaactggaagcagctcgccggcgaatggatcccagaacgttcaggcaggaatatgaagcttcgttcgaaaactatcagggcgttgtctattactgctttgatcgccgtaaaaatcatactgatgaaaccgttaaaccaggtgaagcgctgcatatcggtatggactttaacgtggggaaaatggcggcagtggtttatgtgctgcgtgatgggcttccacgggctgtagatgagttcatggatgtatttgatactccggcaatgattgaagcgattaagactcggtacgaggaagggaagcacacaatcaatatctatcccgatgcttcagggaaaaacaggaagtccagcaacgccagcgagtcggatatttctctgctctatgatgctggattctctgtgctggttaatgacagcaacccggcagtaagggaccggataaacgctgtcaactcaatgctatgcaatacctacggcgagcggaggatgatggttaacacggtaacttgcccgaaattcactcagtgcctggagcgacaggtctataacgataaaggcgagccagataagaaaggcggctttgaccacggcaatgatggcggtggttatccaatcgtgtacctgttccctgtcaacgctacagcgttcgacatcaccctcgatacgacattctga

SEQ ID NO: 223308 - DNA, 459 bp, Klebsiella pneumoniae
atgaaaaaacaaaacactcaatactctacattcacttcatatctttctaaaactaataagaatgtggatatgtacaggatttataatccactaaatgaaaaattgcgtttcagttcacacgataaaaatttttatgatttatattttaaaaggcattttatcacaagaagaaatattttaactgtcttttctattcattgttatttaacaaaaaatgaaagatttatagatgatagagtatccttcgtgaaatgttcaataaagttatttagaataatatttaaatcattagctaatgatattgattttaacatttctttccgtggtggaaatttgattttcatttcacagttcgggaagaaagaagaaatttcatatttcactttatcaaaaattgcaggtgatatttttgatattaaagacttttcaatgagcaatgaaaaattacttgcggcataa

SEQ ID NO: 223309 - DNA, 213 bp, Klebsiella pneumoniae
atgatattaaatgtagtcagcattcaggagagatatatgaacaaccagatcaataaagtgccttacagcagcggtgataaaccagaacttcctaaaaataaaaaagttaagttttatcacgaagacgagtatgcttttgctcatttcatgtatgacgatacagcagccgaacaagacaatgcagaaactaacagtgaaaataaaggggagtaa

SEQ ID NO: 223310 - DNA, 447 bp, Klebsiella pneumoniae
atgaaaaaagaaatagtaaatattttaaatgaagtagtagctaagtcaaaatttgcaaacacggaaaaacacttcttcaattgtgtatctcatgcaatgattatgaatgcctttattcagtttgaagaaagaaagaaattctacctccaggacgactatgcttttaatcattttatgagcgaagaaacaataacaatttttaatggctatgagttcaaaaagaataataaatttttcaaacaatttaaaagcgaaattgttaaatccgcaatgattttatctaactgtatagaaaatgagcctttaacagatatttttaaagaattgtttgaagtttactatgcacaaaacgatcagacaaaatttgcaaaatacactgatagtaaattaacaaaagaccagaaagttgaatatgtaactctgaaatttgttagtaagtacccttaa

SEQ ID NO: 223311 - DNA, 711 bp, Klebsiella pneumoniae
ttgaaaaatttaatccgtagaattgaaaaatattttaatcaggaaatggatttcaatgatatttcatcgactactattgacggaaacgaaaatcttttatctggtgctattactttcttaatgcacaaaaacattgatagtgaagtctcattatctttacttcgatatttaatcgatcatggtgttaatgttaatcataaaattgaagagtctaacagcccattaataaaagttttcctgtatcaatggaagaacagcgagtttaaagcaaaggtcattgaaatacttttatcaggtggagcagaccagaacataccaggtcacaaccttcttgaatatgcaacggcgaaagaatgtaagctcttactggcttatggtgcagatctggaaagaatcgctgataatcgctcacagacggctatctttgattgttattgtctcgataagctgtctgtgctgattgattcaggggcaaacattaatcactcaaacaaaaagggtaaaacctgcctggcttgctattacaagaaaagcgaatatgtcagattcttactggataatggcataaatgcagacattttcctgaatgatagtgattatacggaagaacaaaagaaaactgttaatgcaataattgctcaaagagataacgagcaattaaaaactgtattcgggaataaccttgaatccaaaggaatgattaggatatga

SEQ ID NO: 223312 - DNA, 291 bp, Klebsiella pneumoniae; identical to SEQ ID NO: 159103

SEQ ID NO: 223313 - DNA, 354 bp, Klebsiella pneumoniae; identical to SEQ ID NO: 159102

SEQ ID NO: 223314 - DNA, 549 bp, Klebsiella pneumoniae; identical to SEQ ID NO: 159101

SEQ ID NO: 223315 - DNA, 606 bp, Klebsiella pneumoniae; identical to SEQ ID NO: 159100

SEQ ID NO: 223316 - DNA, 1152 bp, Klebsiella pneumoniae; identical to SEQ ID NO: 159099

SEQ ID NO: 223317 - DNA, 345 bp, Klebsiella pneumoniae; identical to SEQ ID NO: 159146

SEQ ID NO: 223318 - DNA, 306 bp, Klebsiella pneumoniae; identical to SEQ ID NO: 159145

SEQ ID NO: 223319 - DNA, 1131 bp, Klebsiella pneumoniae; identical to SEQ ID NO: 159144

SEQ ID NO: 223320 - DNA, 627 bp, Klebsiella pneumoniae; identical to SEQ ID NO: 159091

SEQ ID NO: 223321 - DNA, 336 bp, Klebsiella pneumoniae
atgagcaagaaaaaaaactcatggcttgatgatatgcagtcgtttgaaaagattgccgttgaaacagctttcaatgccggtgactcttactggtcgcatgaatattttgcacatagtaataatgctgctcatgtcgtcactaatgtaaaaataagagcaaaagaagacgaaacccgtttaaccaatatccgtattcctgcacaactggaagctgttcttgcacagatcgcccctggtgttcctatcgctacggctttattggtgcttgcggatttaaaagcaagcgagcttgttaaggaaaataaagccgtaaaaatatcgaataaaggggagtga

SEQ ID NO: 223322 - DNA, 1911 bp, Klebsiella pneumoniae; identical to SEQ ID NO: 159093

SEQ ID NO: 223323 - DNA, 741 bp, Klebsiella pneumoniae; identical to SEQ ID NO: 159094

SEQ ID NO: 223324 - DNA, 1668 bp, Klebsiella pneumoniae
atgtacgatcctgatgctgtatcggaagaaactgaacaggaacaggaagaagaacagcttcaaatcgaagaaaacaatcttgataacgaatctgaaaatgaagaagagtatcaggaagacgatgaatacacggaagaagaagacgagcagaacgacgaataccaggcttcaacagtaattggagaagcacaggaagctggttcagaagatccatctaacaaactggacggactaccttcccctattcgcagaaagaaaaaagaaaaagaaataactctttatgaaagttttgtagggaaaattactacacatggtatgtatcatacctccagaaaatcagtaaaaggaaaagtagttgttaaagatattcttgttcataacttcccgattttaccagtagaagttattaaagcccttgatggcacaattgacgaatcagtaacttatattaaattggttttcaagagcatcgacggcgaatttaaagaagttattatcccttctggtgctgctaacgattttaaagaagtgaagaaagcgggttttcttgccccttccccattaaatcattcaaaagttcttgctcttattaatgatgttatttctaatggctcgttaaataaaaagacaggctattcccagtgtggctggacaagtgatttaatgcaccatatcagacccgacaatgatttgtatgtgggtaaaaaagtaaaagttacagaagttaaaggaagtgctgatttatatttcccaatgctttctgaatttgttttaaattgtcctcagatggcttttggtcttgcattcgcagcggctggatatatgcgagggtatattaccgtaacaactttaaccccgttctatatcctttacggtaaagctcatatgggtaaatctaaaacatgtcagcttatcgcaagcttgcagggcaacccgataaaagggaagggtaataatattgactggaatactactatgattggattccataaatttcttgcaaataataatcatggtgttttagttgttgacgaattagataacctgtttctaaaaaataacattgctcatgctgcaacaatgattatggatataacaaacggtggtggtcgagcttattcagaccagtacagaaacacttatcagggagaaagctggaacaactctgttattgcttcaactaatctacgtattgaagatgtggcaggtggaacaatgaaagaacaagctttgttcactcgtttaatgcaaatcgatgtcgaagattcggttcttcataactacactggcggtcaatacaggctcgaagaactcactcagatcatgaatgaaaactacgggcatttctacccaaaagcgattgaacaaatcaaagcaaagggcaaggaatataaagcaagacttaaagaactttttaatgaattaacatctgatattaagctggttgacttgcagaacgaacctcgctcactcgaaatgctggctctcgctcaggttggtgctgaactggtcggtgatgtattaggtgaaaaagaaggtgcagcttgtcaggcagccgttgacattatcattgaacgattcaagagatcggaagacgaactcatatccaaaaagcaaaataaaggctgtagaattaaacgaaagagacatacttcaaagattcggtga

SEQ ID NO: 223325 - DNA, 411 bp, Klebsiella pneumoniae
atgaaaactaaattctcacaaaaactaaggcaatatcattataatgaaaaaaaactaagaagaagatatatagagttttgtatcctttgctatgtttcatattctgttttgatcgctacggtggtctttggattcttagcagaagatatattccagttgtattctgctgtgatctttggcttgataatgtcaactctgacattcagatttagtctaatggcatatggagtaaagtatcaaacaacttacactcatggttttttcagaaccccaggggaatggcttcctgatttttcctacaatacggtatggaaagaagaatggaatgaagaacccattgatgtgttagcaatagaagaaactaaatctttaccaaacaaaaaacctaacagcttcaatgacattatgtaa

SEQ ID NO: 223326 - DNA, 252 bp, Klebsiella pneumoniae
atgactacttcacacgatttatcaactatcttaatggcatggggtgtattgtttttatgtgtatggcttactaagcattatacccgtttagaacttagtaatattctgacttctggaaaagtttctattcagtatgttgttgccaaccttgcttatcgtgctggcttcattgctttggttgttgcttgtctggcttcattagcggtgtcaatcgggttttctgtcgggtatttcggttcttattacccttaa

SEQ ID NO: 223327 - DNA, 261 bp, Klebsiella pneumoniae; identical to SEQ ID NO: 198539

SEQ ID NO: 223328 - DNA, 345 bp, Klebsiella pneumoniae
atgttgagagagcagggcggtaagaacactaaaaaacttagtgacaagtataaagcaatgctatctggtgttagtcgtgcttaccaaattgagcttaaagatataagcgatatcctggaatttgaagtaccagaagttgcaccagaagaaaatctgaaggaaatcaccccggtgaaagagccagatttcacgacagagcaccttccagagaacgagaacgggcaactcccacctgaaattgaacaacagttagacaaaatcatggaggactatgacagattcggctttaccgactgggataacataggagcttccattcaaaataaaaccaacaaaggagagtga

SEQ ID NO: 223329 - DNA, 651 bp, Klebsiella pneumoniae
atgagtcaacaggaacgggcaactatccttctcattgacgaccatccgatgctgcgcaccggcgtgaaacagttgatcagcatggcgccggacatccaggtgattggcgaggccagcaatggcgcgcaaggtatcgagctggccgagtcgctggatcctgacctgatcctgctggaccttaatatgccgggcatgaacggtctggagacgctggataagctgcgtgagaaatccctttctggccgggtagtggtcttcagcgtctccaaccatgaagaggacgttgtcaccgccctgaagcgcggcgccgatggctatttgttgaaggacatggaaccggaagatctgctgaaagcgctgcagcaggcggccgctggagagatggttttaagcgaagcgttaacgccggtgctggccgccagcctgcgcgccaaccgcgccacctccgatcgggacatcagccagctgaccccgcgcgagcgcgacattctcaagctgatagctcagggactgccgaacaaaatgatcgcccgtcgcctggatatcaccgaaagcaccgtcaaagtacacgtgaagcacatgctgaagaaaatgaagctcaaatcccgcgtggaagcggcggtatgggtccaccaggagcgaatcttctaa

SEQ ID NO: 223330 - DNA, 1389 bp, Klebsiella pneumoniae
atgagtcaatcttccctcccggagaaggctaaccgctcggtcataaccgactggcggcctgaagatcctgaattctggcaacagcgcggccatcgtgtggcaagccgcaatttatggatctccgttccctgtctgttactggcgttctgcgtttggatgttgttcagcgcggttgccgttaacctcaacaaagtaggctttcagtttacaaccgatcagctgtttatgctgaccgcgctgccggcgctgtcaggcgccttattacgcgtgccttacgcctttatggtgccgctgttcggcggccgtcgctggacggcgttcagcaccgggatcatgattgtgccgtgcgtctggctgggcttcgcggtccaggatacctctacgccgtttagcatcttcgtgattatctctctgctgtgcggcttcgccggagccaactttgcctccagtatggccaacatcagcttcttcttcccgaaagcgaagcagggcggggcgctcggcgttaacggcggacttggcaatatgggcgtcagcgtgatgcagctggtcgcgccgctggtggtctcgatctctatctttgccgtttttggcggtaacggtagcgagcaaccggacggctcgatgctgtatctggaaaacgccgcgtggatctgggtacctttcctgattattttcactctggcggcgtggttctttatgaacgacctgtcggcttcgaaagcgtcgctgagcgagcagttgccggtacttaagcgcctgcatctgtggattatggcgctgctctatctcgcgaccttcggctcctttatcggcttttccgccgggttcgcgatgctgtcaaaaactcagttcccggatgtgcagatcctgcattacgccttcttcggcccgttcattggcgcgctggcgcgttcgatgggcggggcgatctccgaccgcctcggtgggacccgcgtaacgctggtcaactttgtggtgatggctgtcttctgcgcgctgctgttcctgaccctgccgaccaacggccagggcggtaactttatcgccttcttcgcggtgtttatggtgctgttcctgaccgccgggctggggagcgcctccaccttccagatgatctccgtgatcttccgtaagctgactatggaccgcgtgaaggcccagggcggcagcgaagcgcaggcgatgcgcgaggcggcgaccgataccgcggcggcgctgggctttatctccgccattggcgctatcggcggcttctttattccgaaagcgttcggtatctcgctggatctgaccggctcgccggccggggcgatgaaagtgttcctcgtgttctatattgcctgcgtggtgatcacctgggcggtatacggtcgtaagcgtcagtaa

SEQ ID NO: 223331 - DNA, 153 bp, Klebsiella pneumoniae
atggctctcacggatatcaaagttaggactaccaagccctctgacaaacccttcaaacttactgatgggcagggtatgcacctgctgatcaatcctaatgatctcctccctgaaaacagtgctagggtaaaaatacgaagctctctgatttag

SEQ ID NO: 223332 - DNA, 642 bp, Klebsiella pneumoniae
atgataacaagcaacttctgtgccccaacttaccgttcattggatgatgctttgaaagcgtattatatcaaaatggcgagagagactacgtgtaaaatcctccagtctatttggcataaaggcgttgctggtgcaagattgtttttaaataataagccagaacatattatgcgtgattctctcgttcaggctttaaatatgacattaaaagatgccgacgttagagcagaacaaaatacagatgatacaaaacctgtagatatcaaaatatcatggtttcacagcaaagctactgctctcatcgagataaaatggattggaacctctctaaaaatcgctccgaaagaccctaaaaagccatttaccatttatgacgaaaacagggcgcgtgagggtgctaagcaattaattgagtacatagacaatgaattcacaagtagccctgaaagattacctcaagcatatttagttgtttttgatgcaagaagaaaaaaccttgtagatccagaaactcagatcaataaagatgatgctttcttctatgagaatcacgatatcgaatataatccagaatactatgaattaggttattttaataagccttatcgtttttacctgaggccaaggtattcaagcttataa

SEQ ID NO: 223333 - DNA, 210 bp, Klebsiella pneumoniae
atgtttatcaatgcagacctcggaagaatacatgacttaattgcaagcagtccaacacttcatgcaagccaagtctttggtaatattggcactgataaactttcttttttgatggatagaataaagatattttatcaacattttccagcagagagtgtaaactttaaattaatgttttatatcaaaattgaaaactttgaaacaaaataa

SEQ ID NO: 223334 - DNA, 600 bp, Klebsiella pneumoniae
atgaaacaaatactaccctccgcctactttgattcactaatgataatggacgaaatgcctgcatcgctgcgtcctatatcttttgttgaatatcatctttattcatatctatcatgcgtgctagctttatttaaaggcgaatcaataagcagctggggttataaatacaccgtaactgaatatggattcccattttcaaatgaacttcagcatgcaatagattttttattgaatagaggtttcatttacagcgatgaaagtggtttatttcatcctaatgatgatattatatctgctgaattaaataacttctctcatgataaatctttggtaaacagaagagaacttatcagtacagcattacaatgtggactcaatataccatctggcgcaataagaaatgcaattaaaaactcgcctggaatgtctttaagtaccagccttgctcaggcagcgccattactggatgatgaagataacatagatattttatatgaagaatatgatgtcatatcaaaaatgattggaaaggaaaataaagatttattatcacctgctgtaatttggttatctgcccgtgtaatgagaactgaaggataa

SEQ ID NO: 223335 - DNA, 1989 bp, Klebsiella pneumoniae
atgaccactgaaagaaataagatcaccttacctataattaaacaagttagactatatgactttgatttatacacgagcaatccaaatattataacagaagtcaataaaaatgtttattgtctgatcggagctaatggattaggaaaatctacttttcttaattctgtaacttactgtataaccggagcgattccgcttactgagaaaaatttctctacggctccagaatatgccaagaatgcgacaagaaatacaagaacaactgattattttaatggtcgaattagtgaaagtttacgtggacgagttaaagtatcagtactgttagaatgcaagaatacaagaatagaagttgtgcgccatctattttctgatggtaaagtttcaagtctttcgatcgaaaaccttgggaataataatcataccaccttaaatttaaataacagtaacgctgaggaaatggagtcattatatcagcaaaaaataattgaattaactggattaaaggattttagccaatatatatttcttttccattttatatctgtgtttgatgaatcaagacatttattactttggaacgacgatatattaactaatgcattatatatagcttttggaactgatccttctgtagctattttagctgaaaacttacagaatgaaatggagaaggaagattcaagaggacgaaatgctaagttcgcagcaaaacaaataacacgtcaaatcgatgaattgttatcagcaatgagggataagcacagcgatgatggcttatcacaagcacaaacgttagaaagacataaaaaactttgtgaaaatgttaaatatgcgcaaaatagaaccgctcatataaatttagagaaaaaagacttagaagttaaatgcgctgaattgaattcgaaatattcagcgttagaggtcgaatatagaaaagagttctcatctcgcctatctaatatgagccacttgcggtatcatccgttaataaaattaagcatagaagatcataaatgcgctctttgtaattctgaatcacatgatatatctcatcatttagaagatataatatccgaaaataaatgcccattatgcttatctaaagttattgatgattcagatgctgacaaacttgctcttcaaaaaatcaaaaaaatagatattgaaagggcaaacatcaaagaaaaacttgaaataacctatcaagcattagaccgggttatttctgagttaaatatagctgaagccaatgaacaagcagcacaagcagaacttgactcgtttgaaaacgaaaatagaggtgccattcttttaggaagctcaccaaaccctcattatttcacgcaagaaataaaagaattggaagcgcagagagacaagtttaataaaagtagcttggcattctataaaaaaagagatgagcttcgcgatcaattaagaaaacatgaaaaagaattaaaggtaaattactctatatatgcagaatcttttgttttacgatttagagaattagcagaagaattcattggaatgcccgttgatgtagttttagaacatcacaaatcgaaaaccaaatcaggatttggcttgacgttgcacatgaataaaaaactgagaacaacctcagataagctatcagagagtcagcgattttttattgacattgcattaagaatggcaataactgaatttatgtgcgatggtccagctacactacttatagatacacctgaaggctccttagatatagcgtatgaagcgagagctggctcaatgttttctaaatatgctaaacaaaacaatttcatacttatgactgcaaatcttagaagctcatatcttgttctaaggcttgctaacctacaaaaaaagcagggaatgcaaatagtaagaatgactgagtggacaaaccttacagaagtgcagaaaagtgaagagggtttgttcaccagagcctataacgatattgaagaagccatggagtaa

SEQ ID NO: 223336 - DNA, 1338 bp, Klebsiella pneumoniae
atgtcattctggcagtcagaaatcaatgaaactattactaactctttcaggttcattgccaagagtgaacacgataatttcagtaagtggctttcaaaatataatgaaaaggccccaacttcttcaaatcaggggacaatagatcttcccttccagcgttggtttcgctttaaggaagccttttctccaaagtttgtcgttgatactcttacctcattaccatatgaagtcaatacatgtttagatccattcttaggaagtggaacaactgccatcacatgtaagttgatgggaataaattcaatcgggacagaagttaacccattcttagcagacttaatctcagcaaagttaaaatacgtatctccagaaatatttttgaggggatataaaaatataatcgataatttagagattattcctgaagattttttattgacgcctggcatgcctttatcttttacagagccaggcatcaaaggtagattcatattctataaaaatacatacgctacaatcagagcattactgcgaagctctaaactaatgtctaatgatgaagcccgcttatttaaggtgttattaggctcagttcttattgagaatagcaatgcaattgtaaatggaaaaggtagaagatatagacgtaattgggaatcacgagtcaaaacaggacatgatgtaattcggtctttaaacaaagctgtgtataatgcattagaagacattcaattatttcgcacagaaaataatagcacacataccattcttaatggtgatacaagaaaactgctaaaggatattaaaaaggcagacgttattattttctcccctccttatcctaattcttttgattatacggatgtgtacaatattgagttgtggatgttagattaccttaaaaatgatattgataataagaaattaaggaaccaaacatttcgatctcatgttcaggcgaaatggaatttcgatgcagatatggaactaaactctaaaaccttaataacggtttttgataatttaaataaattgaggaaggatctttggaacaaaaatatacctgagatggtttataattattttgaagaccttcaaactatttttaaagaatttagtagaatattacctgtaaaccatcacgccatagttgctataggtgatagccaatatgcaggtgtacatattgacgttggtgtcatacttgaagaaattttgatatctcttggttttgtactccaagaaaaaggtgagatacgttcaatgaggagcagctctcagcatggcggtaaatttgagctctctgaacattgtttggttttcaagaaaataaggtaa

SEQ ID NO: 223337 - DNA, 576 bp, Klebsiella pneumoniae
atgatccgtatttccgatgctgcacaagcgcactttgccaaactgctggcaaatcaggaagaagggacgcaaattcgcgtatttgtgattaatcccggcaccccaaacgctgagtgcggcgtatcttactgcccaccggatgcggtggaagacaccgacacggcgctgaaatttgaacagctgaccgcctatgtcgatgagctcagcgcgccctatctggaagacgctgaaattgatttcgtcactgaccagctcggctcgcagctgacgctgaaagcaccgaacgccaaaatgcgcaaagtctctgacgatgccccgctgatggagcgcgtcgagtacctgctgcagtcgcagattaacccgcagctggcaggccacggcggccgcgtatcgctgatggagatcaccgacgacggtctggctatcctgcagttcggcggcggatgcaacggctgctcgatggtcgacgtgaccctgaaagaaggtattgaaaaacagctgctgaacgagtttccggagctgaaaggggttcgcgatctgaccgagcaccagcgcggcgagcactcctactactaa

SEQ ID NO: 223338 - DNA, 675 bp, Klebsiella pneumoniae
atgctaacagcacacagcttatgctggctatgccaaatgccgctggcagtcgcccgctgggggatctgctcccgctgcagccgcgccctgctcgcctgtcccccgctctgcccgcagtgcggcctgccggcggcggcatcccgtcacccctgcggccgctgcctgcaaaagccgcctccctggcatcggctggtggcggtcaatgactatcgcccgccgctgagcggtctggtgcagcagctgaaatttcaccatcgcccggagctaggccccgccctcgcgcgtctgctgctgcagcgccttctgcagcgtgacgatttgccgccagtagacgctctggtcggcgtgccgctatggcatcgccgtcgctggcgccggggttataatcagtgcgacgaactgtgccgaccgttagcccgctggcgaggatgcgtctggcatcgcgaaggcctgactcgccagcgagccggcgccgtccaacattcgctcaatgcccgccagcgcaggcagaacctgaaaaatgcctttcagcttgaatttgccgtgcagggactccatatcgctctggtggatgatgtcgtcacgaccggcagcaccgtcgctgagatatcccgcctgcttttgcgaaacggcgccgcgacggttcaggtatggtgtttgtgccgtaccttgtag

SEQ ID NO: 223339 - DNA, 774 bp, Klebsiella pneumoniae
atgaacgacatctggtggcaaacaatcggcgaaggagattgtcatcttgtgctgctgcacggctgggggctgaacgctcaggtatgggattgcatcacgccgcagctggcttcgcattttaccctccacctggtggatctgccgggctatggccgcagcggcgggtttggggcgatgtcgctggaggcgatggcgcagcgggtgctggagcaggcccctccacaggcggtgtggctgggctggagcctgggcgggctggtggccagccaggtcgcgattatgcgtccggaacgcgtgcaggcgctggtgacggttgcctcttccccctgtttcgcggctcgtgacgactggcccggcatcaagcccgaggtgctggccggatttcagcagcagctgagcgacgatttccagcgcaccgtcgagcgattcctcgccctgcaaaccatgggcacagagagcgcgcgtcaggatgcgcgggcgttaaagcaggcggtgctctcgctgccgatgccttccgccgaggcgctgaatggcggactggagatcctcagaaccgtcgatctgcgtcaggcgcttgtcaggctgccgatgccgtttctgcggctgtatggccggctggatggactggtgccgcgcaagatcgtcccgttgctggatgacctgtggccggaaagcgagtcaatcctcttcgataaggccgcgcatgcgccgtttgtttcccatcccgcggccttctgcgagccgctgctggcgctgaagaggcggctggggtaa

SEQ ID NO: 223340 - DNA, 270 bp, Klebsiella pneumoniae
atgaaacttgttacaggaatggttgcatctctggtgataggcaccctctctttcggcgcattcgccgcgaaagagatccaaaaagaagacgtggcgaagatgaatctgaccaaggtcggtagcattacgacctccaggacgacgtcgccgatggatgcccgacgcgatctgtcgaaaaaagccgatgagctgggtgggaaatactttgtggtgattgccgggcagaaaaacgaaaaaaccgtacacgcgaacgctgacgtttataaataa

SEQ ID NO: 223341 - DNA, 474 bp, Klebsiella pneumoniae
atgaaaacgccgctgatcacccgcgagggatatgaaaaactgaagcaggagatggactacctgtggcgccaggagcgtccggaagtaaccaaaaaggtgacctgggccgccagcctcggcgaccgcagcgagaacgcggactaccagtacaacaaaaagcgcctgcgggagatcgatcgccgggtccgctatctgaccaaatgtctggaacagttgaaaatcgtcgattactcgccgcaacaggaaggtaaagtcttcttcggcgcctgggtagagattgaaaacgatgaaggcgatatcaagcgctttcgcatcgtcggttacgatgaaatttttggccgcaaagactatatctccatcgactcgccgatggcgcgcgcactgttaaaaaaagaggttggcgatctggccatcgtcaacacgccggcgggcgaagccagctggtatgtcaacgagatcgaatacgttaaatag

SEQ ID NO: 223342 - DNA, 366 bp, Klebsiella pneumoniae
atgattgctccaatatttgcagtttgcgcagccagccaggcagtcagggatttgttaggttctactcccgtgcggctttatccgttcggtatgcaggacgacaatatcgtttatccctacgcagtctggcaaaacgtaggtggcttccctgaaaattatctaaaccagcggccagatgcagatcactattctctgcaggttgatgtctatggtgatactgacaccgatgtgatcgccgttgcccgcgctttgcgtgacgcaatagagggcaaggcctatatcacccgatggggtgaacaaagccgcgaccctgaaacaatgcgataccgctattccttcgatgttgactggataacgaccagataa

SEQ ID NO: 223343 - DNA, 786 bp, Klebsiella pneumoniae
atggaaaaacaattcaaaaaaacactggcaagcattcaaacccgttccaaccgctcaagctctgatacagtcagagagttctttaattgtgtgtcttacaccatgataatgaacagtcttttccagttagaacgaagagaattattttattcaggaaaaagtatatacggttttaatcagtttgctataaggtctggttttattgaaaaatcaataattttaactgacaggcataaattcaatattgaagaaaaattttataatcagtttgatactgaaatcatagaaacagctaacttaatctctcttgaaatacaaaaacaacctttgaccgacgtttttaataacatattcgaagagtgttatttaacaggaaaaaaaggtgaatggctcggtcaatatttaacacctaatgatatttcagaacttttaacagagttagcaaacttgaacaaagaaaacaattatagtattggcgatatttgtgcaggtacaggatctttaattcttccattacttaaaaaaattcataaaatggaaggatatgagggaattcaaaaaatagaaattctttataatgacattgatcctttaatggcgcaattatttacggctcagatacttacaaatatgatttatcacaatctcgattttaaatctctacatatccatataggtaatgcgattacagaatttagtaaaaacactatttttttaagagttcaacaaaatccgttagtagctcaaagagtattggaaattgataacgaaaagaaagcggcatga

SEQ ID NO: 223344 - DNA, 789 bp, Klebsiella pneumoniae
atgaaaaaacaatttaaaaaaacactggaaagcattcaaacacgatctaatcgttcaacttccaatacagttagagagttttttaattgtgtatcttacacaatgataatgaatagccttttccagttagaaaggagagaattgttttatttaggaagcaatacatatggttttaaccagcttgctataaaatcaggttttattcagaaatcaataacattaacagataggcataaattcaatatagaagaaaaattttataatcagttcgagaatgaaattatagagacagccaatttaatctcgattgaaatacaaaaacaacctttaatagatatattcaacgaactatttgaagaatgctatttagttggtaaaaaaggaaatggttttgctcaatatttaacacctaaccgagtatcaatcggtgcggtaaaatttttagcaataacaaaaaaagaaaaatatcatataggtgatatttgcgggggtacgggatcaatgattttagctttaacttcggaaatttatgaaaaagaagggttagaagggattcaaaaaatagacttattttatcaggataaagacccttttatttctcaaatatttatagctcaaattttaacgaatatggtttaccataattttgattttaaagaattacgagtttatattggtgactctataactgaatacgatactataaacactctttttttaagagttaagcaaaatccgttagtggctcaaagagtattagaaattgacagagaaaagaaagcagcataa

SEQ ID NO: 223345 - DNA, 207 bp, Klebsiella pneumoniae
atgagtggtccctatgatttaaaactgctcaaacaaaaagaattagaatttatagatgaaataaccgttgttagcgaaaaagacaaaaaagatttacttatagtaagggaatccattgcttccactattgccaaaatagaacaaaaagaaattgagcaggtaatgaatgaaaaaccagttaccattaagaagaaagcccgattgtaa

SEQ ID NO: 223346 - DNA, 633 bp, Klebsiella pneumoniae
atggagataaaagatttaatcgaaggtgtatatgttttaaagaatggcactattttagaggtaattgatataggtgtttacggtggtgttattcagatatattccaatgaagagaattatatagatgatattaggtgtacagataaagattttttaaatctctcagcaaataacacagattcagtttgtgagaaattcatttctttcataatggacaatgaagataaatacaatatatgtgaagaagagttagaggaaatgaacttctataagaataaacattaccattccaaacaaaatggcgatattgtttccagaagtaaggaatttgatgattttttaaatactgttgaaacaaaaatcagctttttaccaaaatacatatatgaagatactaatattcgttcatataatataacaccagtatactatcgcaatattaacattgaaatccatgacattatcaatattattaattttaatggcggcattacaaaggatttaactactgatgcatgggaaagtgaacatttaagcagtgataaatttgaaaaaaggatcgcttcaaaacaacagcagatattagagatattaatcccagttacaggcaataagaaaatgagaagaatatag

SEQ ID NO: 223347 - DNA, 402 bp, Klebsiella pneumoniae
atgacaaatttcaaacgatacactctctataagggaatggtaattattgataaagtagcgaccgggaaaacaaactttctaaatcgtattgttaaagaccatccagactcaattttaaacttagatagtgatttttatttcgctggtaaatcttcctacttgtcagcaataaatgaagcagaagagaaagggaagtttattatcatgtctggtagctatattggtgatacagaaaagagtgaactggtaaataaaggctatctggtgttccattcaataactcaggcgatgttttactattcagaacatttaagccctgaatcaatagcaagaaaagaacagcaagccattaaacaaataatgacgggtgaaagaatcacccgtaaaagaaacagactataa

SEQ ID NO: 223348 - DNA, 645 bp, Klebsiella pneumoniae
atgggaagaaatatagaaagtaaatcatttacaagcatatggaaagaagtcaaaagctatacctgtactgtgaatgaaacagagacatttgaaatgttattattagtaatgaaaggtcgagggtttagatttaacaaacatgagagagttatattttcaacaagaatacaaatgagaagccagcaaataaatagatgtgccttacacaaaaaattctcctacaaatcagtagaagaaaaaatgaaaactgtgtttaggacattaaagcaaattcatgataaaaacgaactggaaagaaatagactattaaacggaagggataaaataattagccgcttcaacagaatcaaaacatttaacagtatctggaaggaattaatagaattagagatcactactgacgagatagatagttatgaatgtcttatttttatcatgaaagtccgagaaattaaaatccctgactcagcattagccgcaatggagctcacctttttaaataccctgaaaaagaaaaagttatacagggaaacaaactctattccatttgaactcgattttatcaaagaagaactaaataatatatataacttactaacggatgatattaaatatgacaaatttcaaacgatacactctctataa

SEQ ID NO: 223349 - DNA, 192 bp, Klebsiella pneumoniae
atgacgaaccagaacggggaagggtactactggataaaccataatggcgagacactggggtttataaaagaagatctggacaggatttacagcgaagcaaaagagtatgggttatcggataaaaaattccatgtggtttctaattgcatggtatatgaaaaacattgcagcacaataatgataaatttctaa

SEQ ID NO: 223350 - DNA, 480 bp, Klebsiella pneumoniae
atggctatcaccacaacgctttattacccctccgcttacctgcctggaccgcttaaagagagttttggtttaactcctgtatctcctctgaaacggactcagatggtaactggccgggcacgacagcggcgtgcctacacctcgacaccaacccaaacagatctggcctggattttttctgacgcccaggcgcaggcttttgaggcgtggtttcgggatgagttatcagatggggcggcgtggttcaacataccgttattaacgcctgtagggctgaaaaattacgtgtgtcgtttcacggatatttataaaggccccacgccagaaggcggattttactggagatataccgcgccagtagaactctgggagcgcccattgccgccgtctggatgggggcattacccggaatggatcgtcggcagctcactgctggatattgcgctgaataaggagtggccgaagcatgacgcagattaa

SEQ ID NO: 223351 - DNA, 2448 bp, Klebsiella pneumoniae
atggctggcaagtcactgggaactctgactatcgacttggttgcaaaagttggtggatttgtttcagggatggataaagctgagcgtgcatcagccaagtggagcaagcaggtacaagatgatgtggcaaaatccagtgctgcactagcaggtataggggcagcagctattgcagctgggctggctgttggtgcatccggatttcaattactgaaatccacatccaggcaaatagcagaaactgaccgctgggctaaatcattacaattatctacccaggaacttcttgcttggcagtttgcagctgaaaaggctggtgtctccggtgaccaaatggctgatatcttcaaggatattggtgataagattggtgacgcggtattaaataaatcaggtgaagctgttgatgcgctcaacgctcttggattatctgcggaaaaactatcaaaagtcagtccagataaacaattgctcgctatcggtgaatctttggagaaaattagtactaatgccgagaagaccaccattcttgaaagtttgggtaacgacctttcaaaattacttcctttatttgataacaacaaccaaaaactcaaacagtttattgaccttgctaaagattatggtgttgctcctgatccatcctctattgatgatttagtaaaggttaatcaactttttgaagatatggaggctcaggttgcagggctcaaaattgagattgcagccggtttggcaaaagttgatctaactcctttgcagggctcacttgataagcttcatgacgtcctgactgaccccttggttcttcaaggaatttctgatcttgtatcggaagtcgctcaacttgctggatggcttgtaaaagcagctgcaggtgcgggccaactagcagccagcacaggaaaccgttttgcggcacttagtggcaagatcgacctaacaaatatagaccaagttaatgaacgtattgaatacctgcaaaaaattcttgaaggaaaaaaaggtttttactctcaaagtgagtctatgtttggttggattacaggggtagatgacagcgcgaaagcactaaatgatgaactgctatctcttatagaaacaagagataaattttctaaagctagtaaatcggtgctgccccttcaggtagccactgtgggaacggacaacccattttctttacctcctggtggtacgaacggaaaacctgttaaaacaccaacaagtaaaacagaaaatgcttttaacagtagattgcttgatctacaaaaacaagctgcccttattgaaactactggtaaaaaaacagctgaggttaccgagctcgaaaaaataaattttgatattaccagtggcaatcttaaaaaattgtcagaagctcaaaaagaacagcttcgcactgctgcaaaagccctggattctaaaaaggaagagcttaggcttaatcaggaaaatgcccgggttgcggaatatgtttccggcttagaaaggcagaataagttagtgcagcaaggatttgataatgaaattgttggccgttattctggtggtcgtgagcgatcacgcatgcaggataataatgatatacagcaggattttgcatatcaacaggatgatcttttaaaccagctccaatctggagatatagaccaaagtctttacgataaaaagaaagaagcattacagaattctcttgatgagaggcttaaaatacaggaggaatattacaagaagcaggatgagttacaaaatgatggtgctgctggttttatatcagggctagcaacgcaaatagaagcatcaatggatttatacaccaacatgcagcaggttggtgcacaggcatttagcagcttaacggatatgattattgactgggcagaaaccggaaagttaaatgttaaagattttgcttcgacatttctgcaatctgttggtagcacacttctttcttacgctgctgcccaagttgcaatggcgggtttgcaggcctttacagcaatgatcggcgtgccatttgttggacccgaaatagcaggaccggcagcaatagccgcaactgcggctgctggagtactggcgataggtgttggtacagcccttcagggccaggctcacgacggtatcgactctgtgcccgaaactggaacctggctcctgcagaaaggtgaacgcgttacgactgctaaaaccagcgccaaacttgatgccactctggatcgagtagcaaaccagtcaacagggggcggcgcgatttattcgcccacaatcaatatccccatcaatggtaacccttccgatgcaactttggcgctggtccgtaaagctgcagatgagggggcagaaaggggataccggaaggcggttaattcagtcgcaagcggtcagggtgatttgcataaggccttgatggggaaaactacctcggggaggaaaattagctaa

SEQ ID NO: 223352 - DNA, 264 bp, Klebsiella pneumoniae
atgaacggcatcggaggccgcaccatcgcagaggctcaggaacggatgagccgtagggaatttctggtttggctcaagtaccgtgagaagtacggaccgctcaatatcatgatgcgtaccgagtggggggcttcgctggtggcttctgtccttgcgaacatcaataaggcaaagaacacgccgccgttcaaggtaagtgactttgcaccgcatatcaacgaagcgccattatctctggaagaggccatgaaatcctgggactaa

SEQ ID NO: 223353 - DNA, 231 bp, Klebsiella pneumoniae
atgggctaccacaccactaaagctgaactgctggcgtataacgggaaatcggacccgattgctgagcgcattgcggcgcatatttgcgatcaggacggcgccccagtgtttactgcggctgacattcttgggactgctaccccggatcgtggggcgctggacggtccgattgttatggccctcctggctgcaattcatgatgtaaacgaactgggaaagactacgagctaa

SEQ ID NO: 223354 - DNA, 2535 bp, Klebsiella pneumoniae
atggctggcaagtcccttggtacattaacaattgaccttatcgcaaaggttggtggatttgttcagggaatggataaggctgaaagagcctcgcaaaaatggagtgcccaagtaaaaaaagacgccaaagaagttggtgcttctattgttgcaattggtgcagcagctgccactgcagctgtagggattggtgccgcaggtttagcagttgtgaaaaatacagcacagcaggtaacagaggctgaccgctgggcaaaatctcttaagatgtccactcaggacttacttgcatggcaatatgcagctgaacaagctgggcttaccggcgataatattgcagatatatttaaagacattaatgataaagttggcgatgcggtactgaataaatcaggtgaggccgctcaggcattagatacactcggactctcggctgagaaactgtcccagcaatcccctgataagcagttactggctattagttcagctttacaaaagataccttcccaggcaggtaaaacaaatattcttgaaagcttggggaatgacctgtcaaaaatgctgccgttgtttgataataacaatgagaagctgaaacagttcatccagctatcaaagaattttggtatcgcaccgccgcaagaagatattgataacctcgttaaggttaatcagttttttcaggatatagagactagtgcccgtggccttaaaatggaaattgcctctgggctggctacggtggacctttcgccattgcaggatgggttaaatgacattcgtgatgttttcaccgaccctgctattcttcaggggttatcagacctcgtaggcgaggctattagccttgccggtgtcgtaggtcgtattgctggtggtttgggggctattgctacctatacacggtcgcggctaggtgctgtatctggcaattataatgctgctgatgaaagtgacattgcacagcgcattgagtttcttaacaagcgaggtgaccaaagtaaggagcaaagggatgaattagagtttttatctaaacgtcttcaatttcttcgggcgattaagtcaagtatgacccccgaggaagtcgaaagaggagctaaagggttatcatcacttctttctgatatgggattgtcgccaactgataataattataaattaggaaaaggtgaatcaaatcagaaaataaccacaaaaagcaatccaaccgacaatgcttttaaaagcaggcttcttgatctgcaaaagcaagcagcacttattgagacaacaggcaaaaaaactgcagaagtaacagagcttgaaaaagtaaactttgatattaccagtggtaacttaaaagcattatcagaagcgcaaaaagagcagctccggtatgcggctaaaatcattgactcaaaaaaagaagagttacggctaaatcaggaaaacgcaaagttagctgaatttgtttctggtcttgataggcagaataaaataataaggcaagggtatgacaatgatctggctggtcggtcattgggattaaaagaccgtagccgaatgcgtgaattaaacaacattcaacaggactttgaatataaacaagcggatttattaaaacagtatcaatctggtgatattaccaagtcactttatgagtctgaaaccgatgcgttaaaatcggcacttgaagagcgcctgcagattcaagaaaattattatcatgagtctgatggtttacgtaatgactgggaatcgggcatatcaagcgcattatctgatttcgcggatagttcaactgattattatcagcaagcggctgatgcaatgacatcaatattaggttctgcaactgattcaatttctgaacatttatacgatgttatcagcggtactgaatcaatgggtgaagcaataaaaggaatcttttcagacctcgggaagtcagtgataaaagctctggttgatatggctgcacaatggatcgtatatcaaggtgttcagatgctggttaataaaagtgcccaagcctctgctattccttcaatgatcgctaatgctcaggctacagccttacaggctcaacttgctgctttcgcatcaactgccgcaatcccaattgtcggaccgggattagctccagccgcgatggctgctgcagcggctataacagaacctatggttgctgctatttctgcagcttccctttctggcatggcccacgatgggattgatgcagttcctgaaactggtacttggttacttcaaaaaggagagcgggtgaccactgcagcgaccagcgcaaaactggatgccacgctggatagagtcgctacacagtcaaccggtggtggaactatttattctcccacgatcactattcccatcaatggtaacccttccgatgcaacgttggcgctggtccgtaaagctgcagatgagggggcagaaaggggataccggaaggcggttaactcagtcgcaagcggtcagggtgatttacataaggctctgatggggaaaactacctcggggaggaaaattagctga

SEQ ID NO: 223355 - DNA, 264 bp, Klebsiella pneumoniae
atgaacggcatcggcgggcggaccattgcggaggctcaggagcgaatgagccttcgtgagtttcaggtgtgggtaaagtaccgtaataagtatggtcagcttaacgttatgatgcgaaccgagtggggggcttcgctggtggcttctgttctggctaacatcaataaggcaaagaacacgcctccgttcaaggttagtgactttgcaccgcacatcaacgaagcgccgctttctctggaagaagctatgaaaagttgggtctag

SEQ ID NO: 223356 - DNA, 486 bp, Klebsiella pneumoniae; identical to SEQ ID NO: 147760

SEQ ID NO: 223357 - DNA, 213 bp, Klebsiella pneumoniae; identical to SEQ ID NO: 147759

SEQ ID NO: 223358 - DNA, 1356 bp, Klebsiella pneumoniae
atgtttgtttatttgactattgaaaattttaggtcggttaaggaaaaatcgacattaaacttgagcgcatccggttctagtaaccatttaacaactcatatctataaaaatgatggaatgaatgttggaacgctcatgagtgctgggatttatggtgctaatgcgtctggtaaatctaacgttctcatggcttttgaagctataaaatttatcgcaacagaaagcggtgatttgaaagaaggtaaacggattccctgctatgagccatatgctctttcttcggctacgaatgaggctcctgtaaagtttgaggctgaattttattctgttgaggggaatcggttcagttatgaagttgcttttattaaaaatcggattttatttgaatcattagactattatccatctagggttaaagcaaatttatttactagagatgagagcgacacctgggaaacaatcaagtttggtgggcattataaaggaggtattaaaaaaataccattcttccctaataattcatacttagcgaaagcaggtaataatgccgcatcaccagacataattaaagaagcttataacttttttagaaagggaattagacatataggtttaaatgaaaagataagaatatcttcttttggggagagggaggacgtcgtaaatgaaacggccaaggttttatgcatggttgacactggtgtttccggtatatctgtacgggaggttgaggcggaaataccaataaaaatggatgaggaaatccctcaagaaataaaggagataattgaagaagattataaatatcgttatatgttctctcatcctactgatgaaggggggagtgtttctttccctatggggagagagtctgaaggcacccaaaaattatttgaaatcatacctctaattagatctgcgtttaatgatagtatggttgtaattgttgatgagttagataatagcttgcacccgcatattgctgacttgattgttaagttatttaatgatcctgatgtcaataaaaaaggctcacaacttgtattctcaacccataatatgcagttaatggctccagagaaaatgagaagagatcagatatggttttgtgaaaaaaataaaggtgcgtcgtctctttatagcttagatgattttgataagaaaaagataaaaacaacaacaccttacgcagcttggtatgatgagggtaggtttggtggggttcccgacataaactacttaaaggtagcctcatttatatctggtgatatatccttggtaatgccggatattgacgtcaaagaattgtctgatggtttttttgaagagtttgacggggatctttctgatgagtaa

SEQ ID NO: 223359 - DNA, 621 bp, Klebsiella pneumoniae
atgagtaaaaaacatggaaataataagaaagtcccacaagtaatgtatatatactgtgagggtgagaaaaccgaaccattataccttgaggcttatatttcagacagatctaaaagaactttaagtgtatttaaaatacctaaaacaaggaaaaatacacctgagcagttggtggatgaggcgataaagaaaaagaattcatcatcttccgcagaaggtgacgtcttttgggttgtttatgatcaagagcatctgacgccttcgtctatttcatgtcatcaaaaggcatggaataaagctaataggcatgggataaatatagcaatatcctgtgtttgttttgaattatggttattgttgcatttcggcttcacaaccaaagatttttcgtcgtatgataatttgatgtctagctccccgctaaaaaaattaataactaactatgataaaggtagtaaactaacttaccttgctataagagagaggattggtactgcgaaagataacgcaagaaagctagatatttacgctaaaactaattataaaaacacgcacgaaccttatctatttccatgttatacatcattccatgagctacttaaggcgattgacgacttttga

SEQ ID NO: 223360 - DNA, 321 bp, Klebsiella pneumoniae
atgctcacgatgtgggtgacggaagacgaacaccggcggctgctcgagcggtgcgacggcaagcagctggcggcgtggatgcgtcagacctgcctcgatgagaagccggcgcgtgccggcagactgccgtcgatatcgccggcgctgctgcgccagcttgccggtatggggaacaacctgaaccagatcgcccggaaagtgaatgccggtggtgccggtcatgaccgggtgcagattgtggccgcactgatggcaatcgacgcgggactggagcggctgcggcatgcggtgctggaaaaagggggggatgatgatcgttaa

SEQ ID NO: 223361 - DNA, 2292 bp, Klebsiella pneumoniae; identical to SEQ ID NO: 159123

SEQ ID NO: 223362 - DNA, 426 bp, Klebsiella pneumoniae
atgaatacattcaatttttttaatataaccaatcctgttgtgactattccaataacaattatcatggggtttatgtttattgttgtcctttttaatttatttaaaaacacttttttagccaaatataaaaggctcgaagagtcgggattctggaaaaacatatggcatttagcgaagtggattaaaggtaaaattaattatctggttggtgtttattttttcagtatgactctattgttttccattatggttttcatattcagagatgaaacattcaggttagatttaacggcttatatcttatgtggttttatcagtattggtttaagcattctcttttacacatacagagatattaatttcgacattaaaacttacaagcaagtaagacaagagcagaaagaaaagagaaggagaaaagtatga

SEQ ID NO: 223363 - DNA, 537 bp, Klebsiella pneumoniae
atgatcttaaaagaaagagatttagtgggttttaaactcattctcaatcagaacagaatatcatcaagccttgtcaactataagctttgcattgtggaagccgataaggagataaaaagaatcgtatcaagtaatacttttatatatgaagaggtgacttgtaaacagtatcgcaataaaaagacgggtgagtacaagttaagtgtagatgcacaggaaaatctggacagaatgttatctgtatttaataacaccagagaaatttgcaaaataatgattcagtattttataagtcagacaaacagaactgatagcataaaagaagaattaaaatccgtttcgattgaaatcactgataaggtttttaataaggttaaagctgacgaccagactttaatacttatcactcaccatgaagttatgaagcagttaatcaaaatggattggtggaaagataatgaagctaaaagaatggaaattcttaaagaaatagaaatgagaaaagaacagttagggggtgtttatggcgaaatttaa

SEQ ID NO: 223364 - DNA, 594 bp, Klebsiella pneumoniae; identical to SEQ ID NO: 198547

SEQ ID NO: 223365 - DNA, 504 bp, Klebsiella pneumoniae
atggacgatatgataatcaggtctgttaaatcagctttgaagcacagcaaaagaaagggaacgacagctatggacttcctgttaaccgatagccacacacagttgaagctggacgacagatacggggggatagctgatacagggcatatgttcgctatcctggtggaagatcactacaaggcgaagtttaaagacataacaagaaaggggaatgtagtaaccattaaggtagcaagagacatactggtagggttcaggttcagctactcgccaggctctctatccgtttactacaaaatcagggttaaaggaaaaaattataaggagggaataaaggtaattgatgggtttaacagaacatcagaaagcataataaacaacatcattaacaaagcaagacagcaaatcgtttcaataaaatttattgctggcatgactgttttagccatatctggtgtgggaatgttttatgcaatatttaatttaaatacactaatcacataa

SEQ ID NO: 223366 - DNA, 186 bp, Klebsiella pneumoniae
atgataataaaagcggaagaaatggaaaaggtaatgtatggcgacaggttgaaagaatttattccagaaaagaaaaaacctaaactactcgcagacatttatcatgctgaaaatcttttcaggaaaaaaagaatagacaaaataaatatattagataaaatagaattagtggtcaataaaaaataa

SEQ ID NO: 223367 - DNA, 249 bp, Klebsiella pneumoniae
atgcctacctgttttgtacatatcatagccttgcttgataagttcaatagctacaacttcttcgtattggtctatcggaagcttgttaatgtcgtagttgatatttttcaaaaaccttattgctttaatagcttcgtcatcatagaaatcactggcatgaaaagtcaggtcaatattttctatgccacctgcttttactatgacatcaatgattctgtctggttcgaaatcgtttctgtttctgtataa

SEQ ID NO: 223368 - DNA, 423 bp, Klebsiella pneumoniae
atgaacatcgaaatagtaaacgagctcattcagtcgctggagtcggcaggcgagctgtcgatcagagagcagaagttcctgaagctggcgaaagcgtttaagcagctggctgcggagaatgtggaggcaaaaaaaataatcagcgaatgccgggagtatttcatcgctggggtgatgaaccgtatcagaccaacgaatgaaggctacctgcatatgatttgcgacacgcttgcagacgaaacccccgccaccgaccgcatcgtagccgggattaaggctgatggggttgaggagttcattggtctcctgcagcagcatgtcgatgagggtgattttgtaggcgatgaagttgccgtaattgttggcgctatcgactgcggtaaggagtttttcgagcaactgcgcgagggggccgacaaatga

SEQ ID NO: 223369 - DNA, 627 bp, Klebsiella pneumoniae
atggaaaacattttatctaaaaaacaaaagaagcatttaaagaaaacctatcttaatacagaaaagaaaatcaggaacaggataaccagcaacagaaagactttttactgtggtatcgccgttcttgccgttctgacggcatacagcttgtttaaaccgaaggaacagcaaacagtgatcccacaggttaaccaggattatgaaaactgtatgtcctggaacaggagcaacagcataaacaggaagcaatacctttcaccggtacagattaacggggttgtggtggattcagccgtcaatgatttctgtgcaacagataagaacaggaacagagtaagctcagaacaaaacggactgtggttaatgaactttgaaaactgtatgcagcaattacagccagatcgcatgtttatagagacaatggattttactgtattcgataaaaaatatactggtgtaaaaaaagaaacagttaaccagtgtgtaaggtatgcagcaaccaacaacaaatatgatatttatgataattatctgtatgccgtttacatggctggaacttttatcaaaagcaatagtgttgatgatgttgtattttccattaaaactaacttctataaacagatatag

SEQ ID NO: 223370 - DNA, 924 bp, Klebsiella pneumoniae; identical to SEQ ID NO: 159112

SEQ ID NO: 223371 - DNA, 909 bp, Klebsiella pneumoniae; identical to SEQ ID NO: 159111

SEQ ID NO: 223372 - DNA, 612 bp, Klebsiella pneumoniae
atgtataaattacgacaagataaccaacccgtgatcgcagactgtgatttaaaagtccttgaagagtgtgtgaatcagggattagatatgagtaaatttagtaaggaaaaccatttcagtgttagggaagatagtcctatgctaacaaatgaaatatctcatttccttgaaaattttcaaaatataaatttcgttgacgaaaagaagcttgagttattcattgatagaggagtttttaatagtaaaaatgcgagtgattttaatgggtgtgttccattatattatttctgcgattcacgctatggaggaaaacttagtgatgaattacttgataagctaattaatgtttacgacaaaattgatataatagaagaacgaatatttgatcctgataatgaaagagcgaaggattttatcttcaaaagatacattgaaaccagcgaggataaacagggtgcaattgagcatgttaaggagctttttgaaaaggaaggattagatattgaacaaagtgaaagaattatggcaacaatagccagatttgacaatgcagcaatcaaggaagctttcacacaaaccgcaccaaaacccagcaccagaagaagaatgtag

SEQ ID NO: 223373 - DNA, 1962 bp, Klebsiella pneumoniae
atggccgaacttaacccgcctttgggaacgacgacgcctgaaatattcctggataacgtcaagcgcgctgacgaactggtgaacggtccggccggaacgattaacgatcgcggcggtgaaccgctcgatacctggcgccagatgatggcgaaaaacgatgagatcaggcagaacatcattccgctcagcaagcagtacatgacgattgaggctgcgcaggcggatatcgcgaatattccggcaggttcaacaacttatgtccgcagtcaggacggaagctctctggccgatgagtatatcaacctcgctggaacgctgcagccaaccggacggcggatggttcgtgacgactacgcataccaggtatcgccagacagcgtgaccctggcagcatatgatccggagactgcccgcgtggctccatttttaaatacaagcggcagattaattcaaatcggtcctgacggaaaatattacgaacttttaacccaacaagaatcagaactctatgcgctgggccgggagggttctataccgcagtttattggcggtgaaaaagtgtggcggatgacggttgattcaaccacaaaccagatcgttgaagcttatacggttggtgggaagcactggatttactcagacggtggcctggtagctgttaataacggaaatggcggtggtggtggcgacgatgatgccaaccagctccctgagtatggacttcatttgtcagggtctacggtatatccctactcagagacagtgcctgtatgttttatctttgtgactgctgggcaatccaacgctcgaggatattgtcctgacgccgatcaaaccattgtcgcagcaacgccgatatatcctgataacgctttcatgctcagcggaggggttaggcgcacagggacacgcagcactactctggtgccgctggttgaggctgtaagcgggacagataaagaaacggccgcaagcggcctcgcgaacaccttcattcgcgatatggctgcagctaccggcgtcatgccgcgcacgctatcaatcgtctgtgctcagtctggacaggcttacgagtaccagaaacggggaaaccaggtttatcagtatctgctcgattcaatcgaagactgcgtaacggcctgtagagcgcgtggctggctgccgattgttctctgcgttgactggatgcagggagagtccgacgaggactggtcaggattacgagaaggaatgtatgaatcacggatgaggcagtaccagagacaaatcaccagcgacatcatcgcaagaacgggtcaaaacgaaccgccgattatcgccattacccagctggggtatgtcaatgatgggcacaccgcatttacagggcaatatgcgagactttctgctaccaaattgcataatcatggacaattcagatgcgtaaataccctgtaccagtacgattttatttcagacggtctgcacctgacatgcgcaggacagaaccggcgcggtgctgctgtagcgagagcaattatccaggaatggtttaccagcggctggtatgggatggttccgaccggtttcgtgtggaactcaccaacgcagatacaaatcaatgtcccagcgtatacgaacctggtgctggacacgactacgatcaacacctccggtctggccaattacggctttagctacacggatgagactggtgctccacctgctatatcgagcatcgcgattagctctgacggaaagggggtattgattaacctggcgtctgctcctactggccgttttggacgggtttcctacgcaaccgtcgaaaatgcactccagagtggggctactgtgaaaccgtctggtaggaccttgggcgcacgagggtgtgtaagatcttctgccggaatcacgtgggtatacgatacatctgtaaccctctacgactggctccccgcttttcggattaacgttttctga

SEQ ID NO: 223374 - DNA, 279 bp, Klebsiella pneumoniae
atgagtaaaaacataatgcacagtcggcatgatgaatatcataaattaacccgtggagaacgaattggttatggcatgggcgactttgcgcaaaacctggttttcggcacaattgggggttttctggctttgcatatgctgacggtaaataccatcagcacggcaacggcaggctttatttttctttttgtccgtatcattaatgtgttttgggatccgatggtcggaacctacgtggataaacgaacggctttgttgaataaatcagatttcgggtaa

SEQ ID NO: 223375 - DNA, 123 bp, Klebsiella pneumoniae
atggcgctgttttctgccagcagattgcaacaattagacattatcttggtcagaattgctaacgccagttcatatgccatcggcgccatcgccaaacaaaccagcgtcaacagttacgactga

SEQ ID NO: 223376 - DNA, 465 bp, Klebsiella pneumoniae
ttgtcaaaagtgaccaactttagctttataaaaaacaatataattgtagataaaaactatttttcagagaatacaattgaaaactctttattaaaaacctttggtgaatgtcagaacctgttattaagtgacaatatcattgtcggaagtaaaaatataaagctccacttattagattgttccggtgtcattgatattttacgctgtgaacgcaatacaactgatagtgactgttcattattttacaaaattaataaattccatgcaccatggtttatctctaacaacaattggcatcagacatatgactttgaaattaacacagctgataatataagtagaaattacaaagcttcattaggcgatatgatacacttccttagccctacaccaaaaacagcaattggaattatttacactaaagatggttggaaatcattcggcaaattcgactcgctgatgtaa

SEQ ID NO: 223377 - DNA, 294 bp, Klebsiella pneumoniae
gtggccccatttttaaatacggatggtcgacttatccaaatcggtcctgatgggaaatattatgagctcctcacgccgcaggaggcggagttatacgcactgggaagcgagggacaggtgacgcagtttatcggcggtgaaaaggtgtggcgtatgatcgttgacgccgctaccaaccaaatcgttgaggcttacacggttggcggacatcactggatctattccgatagcggcctggttctggttaaccaggagagtgggggaggtggcgacgatgatacgaatcctccctga

SEQ ID NO: 223378 - DNA, 924 bp, Klebsiella pneumoniae
gtggcaaagcaaaagttcaaaatcaccaactggcccacctacaataaagccctcatcaaccgtggctccataactttctggctggatgatgaagctattcaggcctggtatgagtcagcaacaccttcttcacgaggcagacctcagcgctattctgaccttgccatcacgactgtgctggtcattaaacgcgtattcaggctgaccctgcgggctgcgcagggctttattgattccattttttctctgatgaacgttccgctacgctgcccggattacagctgtgtcagcaggcgggcaaagtcggttaatgtcagtttcaaaacgcccacccggggtgaaatcgcacacctggtaattgattccaccgggctgaaggtcttcggtgaaggcgagtggaaagtcaaaaagcatggccaggaacgccgccgtatctggcgtaagctgcatctcgccgttgacagtaaaacacatgaaatcatctgcgctgacctgtcgctgaacaatgtgacggactcagaagccttcccgggtcttatccggcagactcacagaaaaatcagggcagcatcggcagacggcgcttacgacacccggctctgtcacgatgaactgcggcgtaagaaaatcagcgcgcttatccctccccgaaaaggtgcgggttactggcccggtgaatatgcagaccgtaaccgtgcagtggctaatcagcgaatgaccgggagtaatgcgcggtggaaatggacaacagattacaaccgtcgctcgatagcggaaacggcgatgtaccgggtaaaacagctgttcgggggttcactgacgctgcgtgactacgatggtcaggttgcggaggctatggccctggtacgagcgctgaacaaaatgacgaaagcaggtatgcctgaaagcgtgcgtattgcctga

SEQ ID NO: 223379 - DNA, 588 bp, Klebsiella pneumoniae
gtgcggctggcgtcgacgcgattgcacggaaaagagcaattcaggctggtcaattgtttgtaccagtacgattttatttcagacggccttcacctgacatgcgcaggacagaaccggcgcggtgctgctgtagcgagagccgttatccaggagtggtttaccagcggctggtatggaatggttccgaccggtttcgtgtggaactcaccaacgcagatacaaattaatattccatcgtataccaacctgacgatagacacgactacgattaacaccgacggtctggccaattacggctttagctacacggatgagtctggtgctccacctgctatatcgagcgtcgcgatcagccctgacggtaaggcggtgctgattaacctggcggccgccccctctggccgttttggccgggtttcctacgcaaccgttgaaaatccgctgcagagcggggctacggtgaaaccgtctggtaagaccttgggcgcacgagggtgtgtaagatcttctgccggaatcgcgtgggtatacgatacatctgtaaccctctacgactggctccctgcttttagaattaacgttttctga

SEQ ID NO: 223380 - DNA, 258 bp, Klebsiella pneumoniae
atgagcggtaagcgttatcctgaagagtttaaaattgaagcagtcaaacaagttgttgatcgtggtcattctgtttccagtgttgcaacacgtctcgatatcaccactcacagtctttacgcctggataaagaagtacggtacggattcttccactcataatgaacagtcagatgctcaggccgagatccgccgtcttcagaaagagttgaagcggattacggacgaacgagcagacgcctgtcttctcggaacttag

SEQ ID NO: 223381 - DNA, 2190 bp, Klebsiella pneumoniae
atgtcctggcttaattcctttttagttactcttacatctgtggagccccataatgtgcctttcaccgtaatcagcatcgtaagcttggccgttgcttgctttcttttcttttatttattccgagctattaaaattgttaacagcctgaaaaaatacacccgttcaattactagcattgaaagcagttccccagaggaacagcttgcacatctgcaaaatctgtttaagcgccctgagctcaaacacgcgtggaatgagtttgaagagtcgttacatcctcaacgcgagctagaaggtggggaagaaaaaattgtccgcattcgtgccacggcgccaagctctagctacttctccgaacaacagttagtcgatatcccactcaatacggaattcttcaagcacctgcccggtattctgaccggtgtgggtattatcggtacattttacggcctgatgattggcctcaaccacttcgatcccagcactccagagcaggttaccagcagtgtcaataatttgctgcacgatgtgttgtatgctttccttggctctgccgtggctattgctgcctctattttcatcacctggctggaaaaactatccatcgccaagtgctataagtatctcgaaaaatttaccgccgctatcgacaagctctacgttagcggcgtaggtgaggaatacctcgcctcgctggtgaaatccagcaacgaaagcgcaacccaggcgcgtcatctgaaagagagcctggttaccgatcttcgtgacatgctgcttcatctcgccgaaagccagaaagttgaaaatgaacgcctcgcgaatacgttaagcaacacctaccgtgaatcaggcgcacagtttgccgatcaggtgagcggggcaattgaaaatagcctgaagtcaccgctggataaaattgcgggtgcggttcagactgccagcggcgatcaaagcggcatggtacagaacatgctgcaggatgtgctcaccgcatttatggcgaagctcgacaccacctttggccaacagtttacgaaccttaatgaaatgatggggcaaaccgtaggcgccatccagaccatgcagagcggcttctccgcactgttgcaggatatgcgtcaggtcagcgatgactcccgccagggcagcgcacagttgatggagcagctgttatccgaaatgaaatcgggccagcaggcaatgcaggctggaatgaacgatatgctcagtagccttcaggcatccgtcgccaaaatcggtgctgaaggggaaggcgccggtgaacgaatggcacgtcagttggaaaaaatgttcgctgacagcgaggcgcgagaaaaagcgcaggccgagcacatgtccgcatttattgaagctattcagaattcagtgcaacagggacaaagtgccacgatggaaaaaatggcgacctctgttgaagcgcttggtgaacagttaggtagcctgtttggtcagatcgataaaggccaacagcagatttccgcaaaccaacaggtaaatcagcaatcactgcatgagcagacacagcgagtaatgagtgaagtggacgatcaaatcaaaaagctgatcgagaccgttgccaaccagcatcagggtacgaccgaaacactgaacaaactcgcagaacaaaccagccgacagattcaggatatgcaaaacggcgcagacaaaatgcgcgttgccgccgagcgatttgaacatgcaggagatcgggtatcagaggccaaccacctcaccgcagatgttctgaacaaagcacaatcagccggttcatcgctttcacttgccactagcgaactcacgtctgtggtggcggattaccgtaataatcgggaagccgttagcaaatccatcgccatgctggagctacttgctgccaatacccagtcagaacaaaccactcgcagccagttcatcaccgatcttaagcagcatggtgagcgcctgcaaagttataaccgtgaagcgcagacctttatggaaaatgttagcgacgtgcttggcaaagggtttgaagacttctcagagggcgtttcacgtagcctggataaaacactgggcaaactggatgtcgaaatggcaaaagcctctaacttgctcgctggctctgtcgaacagatcggagaaagcgtcagcgaacttgatgatgttctgtctcgcgtacgtgcctga

SEQ ID NO: 223382 - DNA, 744 bp, Klebsiella pneumoniae
atgatgtttgcgaatgcatttggcgttaaaaagcgccatagtgatgaagctgaaaaacccttctggatttcttacgccgatctaatgaccgctatgatggtgttatttttggtcgtcatggtagcgtcattgagttctgtgacccaacgtattcagcgtgcagaacaaggtgaaaaaacgaggggacaggatatctccagattatgtgaacgcttggaattgcatgctcgcagcgtgaataaaacgattgtggttgattgccacgataaccgcatcagcttcggtgaagcaggccggttcgaccacaaccgatttttcctgaatgccgaagggcaaaaagcattacaggatgtagtgccgcttgtacttgaagcctccgacagcgaagaaggtaaaaagtggtttaagcaaatcgtcattgaaggttttactgacaccgatggctcgtatctttacaacctgcatctatccttacagcgttctgaatgggtaatgtgtagcttgctcgatagccgcagccctctgcaaaagagcatctccgcagaacaacaaatccagattcgtaagcttttccttgcgggtggcgtctcctttaacaacgctaaagagagcaaagaagccagccgtcgcgtcgagctacgcatgcagttctttgggctcaaagataaacgcgatggcactgaagaggtggattttccgcctgttgtgaataaagaagtttgccagttggtaatgccacaatga

SEQ ID NO: 223383 - DNA, 1683 bp, Klebsiella pneumoniae
atgacgccagcactaagctctcttgcacaacgtattgcagcgaagctgtcctccagccagcagaatgacaatttcctgcgtcatgattttcatgctctgacctctgcgggtctcgacatggaaaagcgatttgataaagccgagaaaatccctgcgcctccacatgagatgcggctggcggcgctgcgtcgatttcgtcttgcagaagaattgaccgaacgtgagtggcgaatggtgttttatggtcttgttgatacggatccactccaccccaatcagccgatattgctggaagatgagcagcttttccctgaggtgaacagcgctatcaaaaagcggatcgaaaccaaaacgctgaagcgccgggattgggctgcactctgtgccagctattttgcttacaggaacgaaactccggaatcaaatccgcattggtgcgtgctgcgtggccacatcgctcagggctacctggtggtgaagtccgctatccgcagagaaaaatcgtggatgaaaacgattgagttttaccacgatatttttacacctcaggcaggcggcgtaatctcccaacagttactcgcgggcgaaagcaactcactctcctcactagaaaaaatcgcgcaaatccctgacagcagctggctatggaaacgtattttcacggtgctactggctcagcttgataccctggacgatcctcactatctggacaaaatcatttggttattagggctggcagcgcagtgggtacgttttcgcgatgacatcatgacggcgacgctaacccgttactatcattcaacctatcgcgatcaggcgcattccgccctgaaacaggctgcactggaatactgggataacccgcaactcaagagtcagcagaataagtggcatcagtatgtatccgaaccagtggctgcgatggtccggggctggctggcaaaacaggacttgatgcacttctttgagctgcttcgcggcaatggtgatgtcgatcaggccaggctgcactattggctgcgtttcgccaatcagatggggttcacccgtatcgtgatggggcaggatgcctggaccgatcgtgacagcgattttgtgaaattccgggaggagaatcgtgggaggctgagccatctgcgcggtggccgtagttttgataacgcgatgatcatgcagataaacgattacatcttcgttgaattttcaggaacggggaacgcgatgtacgcttaccgcatcggcgaggctccgttcaatcccgagtctggatctctggagattaatgtgcacttaaaaagccaggggcgctgcatcctgcgattaccgcatgctcctcgggcttatggatacagcaacgttcgcatcaccggctggatgctgaaatacgatgatgaactgcacaaactgggcattcgctggatggctgaagaacccattaagtttgttgataaaaaagagtcctcccccacttcgctctctgatgtcaaaatcattaatccgctgcgggatacggccatacagcgcctgctggaaaatatttcctgcatcgtcagcgataatcggcaaaaaggtggcgtgttgtctgtacagctcaaaacaccggatgacacaacggaaagagaattactcagactcggtttcacccccgtggccaaagaaccgcaccgttactggatcaaataa

SEQ ID NO: 223384 - DNA, 3243 bp, Klebsiella pneumoniae
atgctaaaacgtctgttaagtaaactgacgggagaccgtcagcagatagaacgccacctgaagaatcagtaccgggctgaagaaaacgggctcagcttccctcaatctttggtggatgatcccgagctttgggcgctggcatcctggcttgagcaactggctgaagaagactatctaatatcactcacagaccgatggttgctgagctgggaggcgttgtatcacctgctggaagatgaagagcatgccagtagcctgcctctaattggcatacctgaagtattgcctttacgtgcaagcatgagttcacgaggagcgctaagcgataaggatttccgcgtctggattgctgaatggactacgcttccctcacgtcaaactatccgtttcagccgcaccggggctatttttactcatgaaaaccagcagcatctgttatcacgagaaaactgggcgctcttgcaggcaaccgagcagctaagcatccagcaaactcaggcccccggcgaaaccactaaccagctgggatgggccacaattcgcaaatgcgcgaaacaggccgctgcaaaatttgatgattatttagaaaaaacgcatgtcattaaacccacttcattgtcgttacgcctccgtaaggcgacagttgctgatactgccgttatcgagattgaaccccactttgaggaccaacctgcaaactggctcggcagttttgataagaacgctcaggttcatgatagctaccgtattcccggggagaacggtgaactcagccatgtcattatcccacccgaagtgaaagaagttctgaattcaatacactcaatcccaggccgtcgggtggccggtagtgaggctctttcctttgttcgcaacccctatactttcctgggtgaagatgccgccagtgttattgcccctgaagagcatgagcaggcgctgtttgatgcccatatcttcttccaccatttcagacttcaacccagtgtaaatgatgagaacaagataaacgatattacgctggtacttgaacctgtctctcccataccgcaaccggaagtgacattccttttctctgctccatgggagttggataaatttgttcaggccgtagggataagtgttgccgcacaaatgccagcaggttcctggcagggttacgagctggaactgagccaattcacggaacagcaatggcatgactgccagtcactgctgacgcgctggcaacaggaagtcgaaggtaaagaatttagcgatgtcctggatctgggcaaatatggcgatcgcgtcatcggcatcggtgagttcgaaaaaatatcctctccctggctgaccaaggcgcaaagtgaaaactggctccctgttggcatcgacttctccgaattttcggtagaaacactggatggctggcaacccgataatctgcagcatttcgatgaactgcaggagagaataacctatgccgaagcgactggcgaaacgcatatcatctctccctggaatgagactgaactgccactggatgcggcgaaaaccttcagtaagaactgggaaaaacagcaaaatgcagcacatgaatcagagagcaatgttgttgaaaaagcagcccgggcagtgctcaaaattgaacagaatattgaagaagcggtttacattaaacagcgccgaaattcactcctcaatgcacgcaatgctgaacctgaaattccactgagcctgaaagagcacatccgactcaaagaccaccagcgtgaaggtgtggcctggcttcagcagcttttccttcgttcacctcaggaaactgcaggttgcctgctcgcggatgatatggggctggggaaaacgctgcagattctgaccttcctggtgtggttcattgaaaaattccctgacgagccaccaagtctcatcgttgcccccgtctctcttttggataactgggagcgtgaactcgacaatttcttctacacctctgggatttcggtgatgaaattgtatggcgacactatcaaagcggtgaaatacccgaaacaggcgattcctgctcatctccaaagtcaggggattaaaaatttgctcaaacccggctggcagggtgaagcgaaaatcattctgacaacctacgagacgcttcgcgatcaggagttctccctggcgcgccagccatggtccatcatggtctgcgacgaggcacaaaaaataaagaacccggcggcattaatcactcatgcagccaatgcgatacaagcaagattcaaagtggcatgtaccggcacgcctgtcgaaaacacgcttgtagacctgtggagcctctttgatttcgcacagcctggcctgttaggtgcactcaatgaatttggcagacactatgttcgcccgatagagaacgaagcgggtcgggatacagggcagcttgaaagcttacgagcgttgattgaaccacaaacattacgccggactaaagaagaagttgcgcgtgatttaccgcaaaaaatcgaagtcgttagttgtaagcaactgccgctttctggccctcaaaagcaactgtatctttcttcgatagcgaactggcaacaacagcaggcacttagtgaaggaatgcagcaggcgggggcggggatgctggggttattacatcgtcttaaactcatttgtgcacacccagcagtcgttaaccctgagcctcgatatagggaagggtcgccaaagctaaactggatgttgaaaacgctagatgaaattaagcacaccagcaaagacaaagtaatcatctttactgagctgcgcgatctccagcgcgagatacagcatgctattcaacagcgattcggtttccgtccggtgatcatcaacggcgacaccagtactaagagtcatagccagaatagccgccagcgattgattgataatttccagtcccaatccggctttggcgtgattattctctccaccgtcgcagttggatttggggttaacgtgcagaaagcaaaccacgttattcatttcacccgctgttggaatccggcaaaagaagatcaggcaactgaccgcgcttaccgtatcggccagacaaaagatgtatatgtgtattatccgacggtaatggactctgaaatcacgacgtttgaagaaacattagatgaactccttcagcgtcgccgtgcattggccagagatatgttatgttctacacctgagctgagcagtgccgattttgagaatattttaaaagggacataa

SEQ ID NO: 223385 - DNA, 726 bp, Klebsiella pneumoniae
atgcctattgtcgaaaatcttcctgacttatcccactggaaaacagttcaagagttcagtatctcccaagctgctttattactggctggaattgatccatttgattttgatgaaggaaaagaacttgatcaagtaagggcttgcaaccatgaacgttggaaacaagcatggggaatgtgttcggggattttaacggctattaggcgtgggatattaacaccgatactctgctattcagagcaaatagtagaaaactggaatgggcctgattatattgaatatacaccggttaaaccaactgacagaaattgcgaaatttcaaagagtaaaactattataacaagagactcattgtatgcatggattgagaatgagaatgtcgattttgtgcgtaagccagcgccaaagaaagtaatttctatgaattacgagataatttctcctcaacatgtcatagatgttgctccagagccagccagtggcgacattctattgcttcctaagtatgagcatcagagtgaaggtttggagtttgtccaagatgccataaaggaactttggtcaacatatgatgtagatgatccacagacagcaccaactaaaaaagaagtaattgactacttaactgaaaggggggctggtaaaaatatggcggaggcggtgaaccttgttctgcgtcctgtctgtctgcagggtataggtaggcgggcaaaaaaatcaaaataa

SEQ ID NO: 223386 - DNA, 198 bp, Klebsiella pneumoniae
atgcccaaatcattaatccgattctctgaggttcagaaacgcactggctacagtaaggcgtggttgtatcgtcttatgagcgaacagcgttttcccgccgcaattaaaattggctcgcgctcgatcgcattcattgaaagcgaaattgacgagtggattaatcagcgcattgccgaatcgcgtggtgaggtagtgtaa

SEQ ID NO: 223387 - DNA, 435 bp, Klebsiella pneumoniae
atgaaaaagaaaaaccgccccgaaaagcaggcggctaactcagatattcgcacctctgatattacgccgaccaccagccctgtacaagtacctaagcgtaccccaaaaaagcatcgtgcccgcgtttatatgttgcgtaccggctttgagggatggacagaaaacgatattctgcgttactgccgcctttcgtctggcaggaactacgctagtgaaattgagcgtcgacttaatattcagttagaacgtatcgacgaaaagaaccctgacggcatcggctcacacctccgttaccgctttaccgggcgcggtgacgttctaaaagttattcaactggtaaacagtaatgctgccgctggtggttactatggcctttctaagcaggatatcgccgacattctgaatctctacccggacaaccttaccgccgcataa

SEQ ID NO: 223388 - DNA, 2115 bp, Klebsiella pneumoniae
atgaaactggcacctaacctgaaacatttgccaaaagaaaaatttactgaagcagttatttttgctggaaccgatgcgtatgcacatgcaaaaggatgggaagagggcatgggtaaacaagtcgctgaggacagaacacctcccatttatcttggaccgaagcagctggcggaactggagaacctgcaaattattgataaagggcgtcgcagtgctcgtgtttatctggctggaagcattgagccaataatgattaatgccattggggaaaaacttgctcaggcaggtgtactggaagcgaaattatataagggaattcctgaccaaaaaccggaaaactggaggcaatatctggccaggctcagagaacagggcgagcacacaacgacatcaattctgaaagccaataaatctgcgaatagtgacaacctgaagccacatgttgaaagccgagctgacggtattttttgggttgaacccaaatcagacaaagataccggggaaataactacccgtgaaagctggctgtgttctgctctggaggtcataggcactggcatagatgacagtaaaacccggtatctgatcctgcgctggcgcccattcggttcgaagggggatactgtccaggcaataccatttgctgatattggtgaacgcgaaggctggcgaacgctcaaagctggtgggttgaacgtcacaaccaaaagtggtttacgtgcaacgttggccgactggctgcagagctgtgccaatggtgaggtatggcggattgcgcatgctacgggctggcagtgtggcgcctatatcatgcctgatggcgagatcatcggtactccagatcaaccggtgctgtttagcggacgaagttctgccgcatccggttacaccaccagcggtaccgttgagagctggcgggagaacgtaggacgtctggcctttggtaattactcgatgatgactggggtggccgcagcactggccgccccgttgattggccttgctggtgcggatggcttcggtatccacctctacgaacagtcgagcgcgggtaagactaccactgcgaatgtggcctccagtctttacggcaatccagatgtactgcgtctcacctggtacggtactgcgctggggctggcgaatgaggctgccgcacataatgacgcgctgatgccgcttgacgaaatcggccagggggctgacccggtggaggtctataaatcggcctacgcgctatttaatggtacgggtaagctgcagggcgcgaaggagggggggaaccgtgatctgaagcgctggcgtactgtggccatcagtaccggtgagatggatctggaaaccttcattgcgagcgccggtcgcaaggctaaagcaggccagctggttcgcctgctgaatatcccgatgcgccgggctgttcgtttccatgagcatgccaacggcaaacaccatgccgatgccctcaaagatgcataccagcatcaccatggagtggctgggcgtgagtgggtgaaatggctggctgaccaccagcaagaggcggtgaacgctgtcagagcagcggaagagcgctggcgtagtctgatcccgtcggattacggggagcaggttcatcgtgttggcgcccggtttgccattctggaagccgcactattgttaggtaatgtgatcaccggttgggatgagcagacgtgtcgggatgctattcagtacagctataacgcctggctgcgtgaattcggtaccggcaacaaagagcatcagcaaattattgagcagacagaggcattcctgaacgcttacggcatgagccgctttgcaccgttcccgtatgacccgaccagtctccccatctccaacatggcgggataccggcagaagggcggtcatgagactgacccgatggtgttctataccttcccggcagccttcgaaggggagatcgcccgcggctttaacactcgtcagtttgcagaagtcctgaagaaagctggcatgctaacgccgccgacgtctggccgcggtttccagagaaagtctccacgcattgatgggcgacaaattcgggtttatgtcctgcagtatctgccggacgatgaccagccagagtaa

SEQ ID NO: 223389 - DNA, 1230 bp, Klebsiella pneumoniae
atggaagcgctatatccgatattgatcgtcttaggtgtggggggcgccattggtgcttatataacctatagatatctgattaataagcataaaaaagttattgagtatcttgagttgagaagtcagaaatctcttgcggctgagattgaggaaaaagaagatacgattgaaaagtataaaaataaagatattgctcgcgaaattgaacacgacaatctgaaaaaagagctcagacagattatcgagttaaatagaataaaaagtaaagaaatcctcggtaaagccgttgattttgcttttgattttgagaacgtatttcgtgagcaacatcaatcagcagaggaggaaatacagaaggttctcgatgatacctatcgctataagcgtaagactctccttgcttctgtgacgttgaagaattttgagaaaaagcttgaagatatcagaagagaaaaagagatatatcagacactgatagctaaatatgattttttccaattgcgcgatcgttctgattggaaggaagtggaaaaagaatttcgagataaagtgctggagcttcaagccgctcaggatgagcgcgaggctcagaatgaaataaaacgacaaatgcgtgaagaacgccagcgcgcagaagaacttgaaaggcaacagcaagaggctgaagccaaagaacaagagctcgaggctcggcgaaaagccgtcgaagaggccctgttggccgcagatgaagagcatcgccaggagcttgaagaaacccgccgtcagttagagcaagagattgaagatgtccataagcagtatgaacgggcaaaatcaatggcacagatgaccaagcaggggcatgtttatgttatttctaacattggttcatttggtgaaaatgtctataagataggcatgactcgccgacttgaaccgctagatcgtgttagcgaattgagcggtgcaagcgtgccgtttgagttcgatgtgcatgcaatgattagctgtgatgatgcgccagctcttgagtacgctttgcataacaaacttagtagtgaacgcatgaataaggtgaatctgcgcaaagaattctttaagacagacttgagtaagataatccaatgtgtggaggaacatcacggtaaggttgaatatgttgcggaccccgcagcattacaatattaccgctcactagaaattggcgaagaaatagcgaacgataaagaattatcagcggtatcataa

SEQ ID NO: 223390 - DNA, 387 bp, Klebsiella pneumoniae
atggctatggcccgcctggcggtagttccgccctgtaatgcggcagataacggagaggttactttctggctgggcgtggtggcattcggcaaacaggccgacgcactggcaggacacgttaaaggcgatttagtcagtgttgccggagcgatgcaggtcaatcagtgggcgggcaaggatggcggtacacagcaaggttatcaggtagtagccgacagcgtgatcagcgccagaacggtacgccccggcgggaagcgggccgagtcagtcaaagcaagcgaagccagcaggggccatgccacgcaacccgcgccgggatgggagttatataacacccctgatgattttgaccagcgcccgccgtttgatgatgaagatccattctga

SEQ ID NO: 223391 - DNA, 282 bp, Klebsiella pneumoniae
atggtaaacgacagtaaagccgaggatctggaagcgaaagggctgtaccgacgcgccgccgcgcgatggatggaagtcatgctgttatgcaccgaggacgataatcgggaatggataaagcgccgccgtgaaacgtgtctggagaacgtgaagcgaccgcccgtgaaggttgaggactttggcgacctgcataaagctgttaccgaaacgcaacaccgcatggggatagcgcaaccgaacggtaacgccttccggttaaatggcggcaagaggcaacggtag

SEQ ID NO: 223392 - DNA, 186 bp, Klebsiella pneumoniae
atgaccccacgccagatagccgcaatcacagccgctaaactggagcatgaaggccaccagcttaccccggcagaggttcgggaaatggagcgcattattgaagctgatacagcccggcgcaaacggttcggggagatgatgcgagcgcctgcctaccagtggaagaagccagcgccgcgcaggtag

SEQ ID NO: 223393 - DNA, 234 bp, Klebsiella pneumoniae
atgtattcggtagttacaaaagccctgaaagaaaaagagatacaaggtttgacaaaggattacctgatagtagtctaccttacagcaattgctatctggccagtcaccctggcgttaattggtctctctgcaggagtggcattctttacgcgccgcagggggctgggcgttgtcctcgtcgttctgttcatgctggtggtcatcactgcatgtcagtttcaacgctatatgtaa

SEQ ID NO: 223394 - DNA, 546 bp, Klebsiella pneumoniae
atgcccttacctgaacgcatgaaaccagccaaaatcagccgtcagaaactaaaggaactggcggatatggccaaagagatactgtcgcaaattgataacggcgccggcgaagatgatgaagggctaaaagcgatgattaatgactggaacaggcaggtcgttaatccgtatgaattctctgatttccgtgacttttcctcatggaccgacgcaaagaactttacccggatggcatttaatcaggagaaatacgttgcggatttaacctgggatgaactcgttcagataattagtttcgtgtgcaatgctgaaggcaaggaatcgcaacaaagctacgcgctgggattgctggagaaaaactttgatgccaatccgtccgatctcatctactggcctaatgaatggttccaggatgaagacatgcttcatgtagatttgacgcctgaagaaatagccggatacctgatggcaagatctggccggattctaagcgatgcgccacaaatcgacctgagatacccgctacctcccggcgcagcaagttaa

SEQ ID NO: 223395 - DNA, 1818 bp, Klebsiella pneumoniae
atggtagctaagtcgatcgtagacattgacgtaaatgacgacaagtttgtcgcgtttatggaaaggtttcgcgagtaccagagcgcgctggatgatttaccggaagcttggagggtagctgccgttggtattggcgaaagcagcaaacaaaccgaaaaagccaaaggtgaggcgaaggagttaggcgcggagtttaatgccgtggccgaggccattctgaccatcaacagcggtatcgatcggctcaataccaacctggaagactcgaagaaaaagcaggacgaattcaacaaaagcactcgctctgcgaagggcttcctcagcgatgcgacgaaagacgctaaatcgctggcagggcacatcagtgaagcgacagctagtcttctgtcatggggtagcattgttggcttgtttaccggcgctctcggcgtaggtagcctgtttggtatcaatactctgggagctggggcagctcagcagagatttatgtccctggggatcggtacgtcggcagggagactgagtgccatagaagccaactacaggagggcaattgggaatcctgcaggtacgctgggcgctatccgtgattctcaaatggacctgtctaagcgctggacgtttcaggcgatggggattaacaaccccgaccaggacccggccaaactgctcccgcagatgatccgcaacgcgcgcgatatcttcgtgcagaacggcagcacactgcagggtgcgcaggcgcacggcctgaccaacttcttcagtcttgaagaccttaatcgcttcaaaaatatgagcaatgaagaaattgatgcgatggagcgaagggcgaagaaggatgctgaaagattaaacattactgatgagcaaaacagaaaatggacggagttcattaatcagattgagctaagcgaaagaagcattaacagggcctttgtaatcggccttggtcctatggcgccgcaactgagtaaattgtcagatgcgttatccggcgcgatcgatacggttcttaaatcacctgatctcgggaagtggattgatgggcttgctggtggtatagagaagttcagtaattatctcgcatccccggatttcactaacgatgttaaccagtttatgacaaatatcagggaaatgggcgtaactgtcgataacgtcattaagtttcttaagggtgaaacatttaatgactggatgaataaatcggagggtagtgcaaactccgctgccgaatgggtaaaggataagactggatttgatccgagaagtgttggcccagcgatgaaagagttcttagctccatcatggagcacgattaaatcggtgtttgtttctggacaattaaaccccattttttcagctcctgccgacatcgcggataaatctcgcactatcgccgatcggttcaataatcccggtaatttgcgttcggcttatgggtacgatactcataataccaaaagcggtaagttcgccgtgttccctacgctggatgagggcgtgttagcggcgactaagcagcttcagatttatggtgcccgcggtatcaatacgattgatgaaatttccaaacgctgggctccgtcaaaggaaaacgacactcaagaatatatccgtcatgtcgtaagaactactgggtttaatgaacgtcagcaacttaaccttaacgacccgaaagtactggcaaaacttatttcggcgatggcatctaaagaaggtgccggcagcagggtgacagagagcgctgttattcagatttacaacaatactggtggtaatgcgatagtgtctgctgctcagcttggtgcccggtga

SEQ ID NO: 223396 - DNA, 459 bp, Klebsiella pneumoniae
atggcagttgcaaccctaaacagcgtggcggactatctgctgtgctttgctcaagagcacggggatgttatgacaccgctgaaactgcagaaaatggtgttttacgcagatgcctggtacatggctctgaacgatggcgaagagcttatcgccgatcggtttgaggcgtgggtacatggccccgtggcaagggatctgtacattcggtttgctgactataagtggcagccgatcaccggtgaaataaaatgcccggaactcactaaggacgttaccgagcatctggacgagatttataaagtctttggcggctactcggcttatgagctggagcagatgacccaccaggaagaaccttggctattggctcgcgcagggataccatccgatgttccgtgtcgaaatgatatcgacaaagatgtcaccgctaaattctaccgcggcatgatggatgcctga

SEQ ID NO: 223397 - DNA, 438 bp, Klebsiella pneumoniae
gtggctaaaggaaagattaaagcgagtaaaatcccggcggcgggtaaccaaatcgtcgccggaacacccaaccctaccacgtcaacgcttagcttttctttccagtacattgaccccgcgcacgctaagtttggttttgcaggacaggcgaccgcttacttttgcaaggtactggagcgactcaaagatatatcaagtctgacgccgcttgagttcacgacaaaccgaaatgcggctctcaaatcgcattgtatcgagtgggaaacgacctccgaacctaacggctttgctcaccttaacgagcagttccagagctatacgccttatcagttcgcaatatctcgcaatgagcatgggcgcatacacggttttttcattggcaatgtgttttacgtcgtgtggctcgatcccaaccatcagctataccccggcgaatag

SEQ ID NO: 223398 - DNA, 1332 bp, Klebsiella pneumoniae
atgagtacgactgagagcattgcatccagccagacaagcctttcgtcctggcgtaaatctgacaccacctggaccctgggcctgtttggcaccgctatcggcgccggggtgctgtttttcccgatccgcgccggcttcggcgggctgatcccgatcctggtgatgctggtgctggcctatcccatcgccttttattgccatcgggccctggcccggctatgcctgtcgggggctaacccctccggcaatatcaccgaaacggtggaagagcattttggcaaaaccggcggggtggtgatcacctttctgtacttcttcgccatctgcccactgctgtggatttatggcgtcacgatcaccaatacctttatgactttctgggagaaccagctgcagatgccagctctcaaccgcggggtggtggcgctgctcctgctgctgctgatggcgtttgtcatctggtttggtaaagacctgatggtcaaggtgatgagctatctggtgtggccgtttatcgccagcctggtggtgatctccctgtccctgatcccctactggaatagcgcggtgattgaccaggtcaacctcagcgatatcgccttaaccggtcacgacggcattctggtgacggtatggctgggcatctccatcatggtgttctccttcaacttctcgccgatcgtctcctcgtttgtggtctccaaacgcgaagagtatgaagcgcagtttggccgcgagtataccgaacgcaaatgctcacagatcatctcccgggccagcatgctgatggtggcggtggtgatgttcttcgccttcagctgcctgtttaccctctcaccgcagaacatggcggacgccaaggcgcagaatatcccggtgctctcctatctggcgaaccactttgcctcgatgtcgggcaccaaatccacctttgccaccctgctggagtatggcgcgtcgatcatcgccctggtggccatcttcaaatcgtttttcggccactatctcggcacgctcgaggggctgaacggtctgatcctgcgctttggctataaaggggataaaacccgggtctccagcggcaagctcaataccctgagcatggtgttcatcatgggctcgacctgggtggtggcgtatgccaaccccaatatcctcgacctgattgaggccatgggcgcgccgattatcgcctcgctgctgtgcctgctgccgatgtacgccattcgtaaagcgccttcgctggccaaataccgtggccgtctcgacaacctctttgtgaccgctatcggtctgctgaccatcctcaacattgcttacaaactgttctaa

SEQ ID NO: 223399 - DNA, 132 bp, Klebsiella pneumoniae
atggtttttaatggactttacaagttcaatgtattctgttcggtatttcaagtcgttgaccgtgtttccatgaaaaacagggcgttcaacaacgcccttaatgcaatcagttacatgcacattttccattga

SEQ ID NO: 223400 - DNA, 330 bp, Klebsiella pneumoniae
atgccaaactattctggacttactgtcacaggttgtgacactggtttcgttttgccatcagattcatcgtcaaccttccttaacgctcgtgttgaaaaatgccgcgtcggatttcttgaatacaactcaaaggaattgtacgacactctattaaaaaccctctatgaaaatcaaagtgagtttgattcacttaagaaagaagttgagtcagcagatttaaaccaaaaagagaaagatgagaaaataaaatcatcatctattttttcaaaattagccattgtggctgatgttgtcacggtttacgctttcctggccccgctactaacataa

SEQ ID NO: 223401 - DNA, 216 bp, Klebsiella pneumoniae
atgaatgtttcaacaagtcttgagggccgtattaaccatctgtaccagatgagtattgtatcagacgccaccaggagtatcccggcttgcggtgttgtgatctggctggcagatgatgtcaccgaactattactcaatgcgagatgtatctttctgctccagaaaaatcattttttcgcgtcagtgtgcctgatcgatagctggaacctgtattga

SEQ ID NO: 223402 - DNA, 396 bp, Klebsiella pneumoniae
atgaaaatgaaacttaccgcgctgatgagcggaatgattctgtccagttcggcgctgtgcttcagcgcgacagcggctgataaaatggtcatcgcccaccgcggcgccagcgggtatctgccggaacataccctgccggcgaaagcgatggcttacgctcagggggcggattaccttgagcaagacctggtgatgaccaaagacgaccggctggtggtgttacacgaccactatctcgatcgggtgactgacgttgcgcagcatttcccgcagcgggcgcgtcaagatggccgtttctacgccatcgactttaccctggacgagattaagtcgctgaagttcaccgaaggttttgagccgaaaaatggtaagaacgtgcaaacctatcccgggtga

SEQ ID NO: 223403 - DNA, 2169 bp, Klebsiella pneumoniae
atgacttcaatatccaaaaagaagcaaccagaaacagtagatgatttagactttggtcgaatggttggtgaattaatcgatcatagaaaaataatcattgctctcacttcatttgcaacattaattgctttattatatgctttttttgcgacgcctatatataaagctgatgctttaatacaggtcgaacaaaaacaagcgaatgcaatacttagcaatttaagtcagatgcttcccgatagtcagccacaatcggcccctgagattgcattgatccaatcaagaatgattctaggtaaaacagttgatgatttaaatctccaggctgtagtaagtccaaagtattttcctatttttgggcgtggatgggcaaggttaagtggagagcaccagggaaatatacaattatcacggttatatgtttcttcttctataggagatgaagaaaaccccccggaattcacgcttaaagtgaaagatagtaatagatatgttatagagtttggaggggaggaaataaatggaaaggttggggagttaattgaaaaagatggaataacactaaaaattgatgaaattaatgctaaggctggtgctgaatttactattaagtacgtgtcaaaacttaaggctatcgcagatttacaagaaaacttatcagtagctgatcaaggtaaagatactggaatattgatattatcatatctaggcgatgatccactaaaaataaaaaatatagtcgatagtattagtgagaactacttggctcagaatatatctcggcaagcagcacaagatgagaaaagcttagagtttcttaataaacagttgccaatggtccggagcgatttggattcagctgaggataagttaaatgatttcagaaagcggaatgattccgtcgatttgtcgttagaggctaaatctgtattagatcaaattgttaatgtcgacaatcaattaaatgaattaactttcagagaatcagaaatttcgcagctttacactaaagagcatccaacatataaagccttaatggaaaaaaggaaaacattacaggatgaaagagggaaattaaataagcgtgttgcaacaatgcctgagactcagcaagaaattttacgtttgagtcgtgatgttgagtcaggtagagctgtatatatgcaattattaaatcgacagcaagaattgaatattgctaaatctagtgcgataggcaatgtaagaataattgatagcgctgtaacccagcataaaccagttaaacccaaaaaaataattgttgtcctagccggtttgtttattggccttgtaatttcagtaagccttgttttagtccggattctattacgtaaaggaattgaaactccagaacaactggaggagttgggaataaatgtttatgctagtattcctgtttctgaaagcaaccccaaaaatgtaatagcaaaacgactaaataaacgagatgacagtagacctaaggttttacttgctacagaaaatcctgcggatcttgctattgaggcaataagaggtttaaggacaagtctgcactttgcaatgcttgaagcaagaaataatctcttaatgatttccggtgcaagtcctaatgctggtaaaacatttgtgagttctaacttatcttcagtaatatctcaaacaggtaaaaaggttatttttatcgatgctgatttaaggaaaggttgtactcacaaattatttaatataaaaaacacgaatggactttctgattatttatcaggaagagttgcacttgataaaatcataaataacttacagacagagggctttgattatatatctcgaggttcggttccaccaaatccagctgagttactcatgcataatcgattggcggaattacttgagtgggcgaataaatcttatgatattgtcatattagatacacctccaatcctggctgtggctgacgctgctattatcggaaactatgtgggtactactttgttggtggccagatttgaagaaaacacaccgaaagaaattgatataagtgttaagagattccaaaatagtggcgtaaatattaaaggatgtattctgaatggtgtggtaaaaaaagcaagtaataaatacgggtatggatataattattacgattattcatattcagataaaaaatag

SEQ ID NO: 223404 - DNA, 1248 bp, Klebsiella pneumoniae
atgaatctaattaaattggaaatacataaactttttgggcttcttgattatgaactcccattagataaagatgaaataaccatgcttaccggtcctaatggttatggtaagacaatgattcttaagatcattaacagtattttgtcgaataagcttaatatattatgtaagttaaagttcgaaagtatttttttacactttcagggaggtggtgtatccattcagcatggtgataaggataataccctgaatttagaacattacgatagtgattcaaatattttcgcttttgaaaatctagagttggaaacagaattagttaaaaataatgatttggttatttttcaatggagctctgaagagactaaacggacctataaaaatgtaaaagaaaagcaactaagttctgaaattttaagttttttaacatcagatgaaattgtctcttttatccgtgctgatagactccaggcggaagaagggaatgaaagtgttatagattcatgtgcctctaaacttaaaaatctaatggaaactgctcaggatgaatctgcagcattaagtcaaaaattagacgctacattccccattagactttttgaacgtctggaacaacaaaaaagattttcctctacaaatattcaagcacgtttgagtggtattcaagataaacggcgtaattatatgcattatggattgattcattctgaagataatttaatgccagataaaagcacctcgctaaatagtagcaatgaatacttaggggttcttgatctttatatagaagatgcattaggtaagctttcgccttttcaaattttgcatcagaaaattgatctttttgaatcaattcttaaagagaaaatacttgcttttaaaaatgttgttattgatagagagaacggtttttattttagaagcttaagtggagatgtagttgaacgaaactcgctttcatcaggtgaacaaaaccaaatagttcttttattcaatttgatttttgatctagccactcaaaaagtgattctaatcgatgaacccgaaatatctttgcacgtcgcttggcagcaaacatttttggattctttgaagaaaattcaaaaaataaatgagtatgaaaaagttataattgctactcattcacctcaggtaatcagtaaaaactggccattaacatatgatctttttgagattctaaaaaataaagatagtctgcataatgaagcagaaggacgtgctgaatga

SEQ ID NO: 223405 - DNA, 861 bp, Klebsiella pneumoniae
atgatatctttacgagatgcacttggggaagacgattggctcagtagcatgatgttgttatttagaaacgaaatgcataagcataatatacttattatcgtagaaggcattactgatattaagttcttcaatgcctatcgcctcgataatcgatttatctatgaatcacctgaaaatggcaagcgtgaagtaatttccgctgtaaaccaactacgagaagctgggaatgatgccgtgtatggcatctgtgatgcagattttgatggcttatctggcattagccataatggtgttttttttactgatgctcatgatttagaaatgatgttagtgaaaggaggtgtggtcgataaatttataatgacacacacagaacggaaattgatccaaggtaatttagccgaggttttttgtcgcgatgttaaaataaatatcctttgcgcttgttatcgacttgggcttcttaaatggtttaattatcttaatcatagcaaacttaatttcaaggggatgaattacagggagtttattaatataaataaaacagaagttattgttgatgatatggaatatattagatatgtcctttctagaagtagagctgttgcagagcaattaaatgcaggtgttttacttgagggaatgcgtaagcttgagttgatgtcgcctgagcatttttccatttgtaatggacatgacttcacctgtattcttaagatgatgtatgaaactgatatttcagttaatagaaacatgcggctggatgaaattgataattatttgcgactttgttatgatcaaccaacatttaaaacaacaaggttgcatacatctctaaatcaattattagccttacactaa

SEQ ID NO: 223406 - DNA, 216 bp, Klebsiella pneumoniae
atgaaaacattcaatcaaattaaaagcctgatcggattttgccagaccgatgaatttttccttgaatacctgcaaatgctccaggctgcgggagttattcatcccgttgaaagcgatattgatagcgacagcaaaaccgtcagtgaagatttttacaatcgccttgccagtgtgtatggcattgaagcagaggaaacactatggcaacaggactga

SEQ ID NO: 223407 - DNA, 2742 bp, Klebsiella pneumoniae
atggatatcacactttatagacgtaaaacagcaatggttcttcatgaaattgaatactctttaggaaatttcattttggatgaggatatttcaatagaagatatcccacaagatattgtaaaaaatgttgttgctagagagtctcaacggaagcaattttcagaaataataaaacccaaagatattattgaatcaacatatcttgacgaactcttcagtattgcgatagagataactaaaaataactcgcttaatgaatatattcagtatattagagatcaatttataataaatgatatttacaatataagaaatgtcatttcgcatcctaaccgtcaattcgttatatcgtattggtataaagttgcagctatagcctcagacccgattattaatattttaaagttggataaggtacattctgcattaatttcagcagaagaaaataacttgtccgatccacctgatgagtggtacgataagaccatgtgggagttgcctaataatcttcctgaagtattcgaacatggtataacaggtctggtcgggcgtcaaaaagaacaagaccttcttattgattgtttgaaaaataggagagtgagcaacatagccattgttgctcctggcggaattggtaaaaccgcattagccttagaccttttgagccgacaagtaaaaaaccctgatacaaaaaattatttcgattcttgtatattctcaacacttaaaacagaaaagctaacatctgagggtgttataaagcttgattcaatcgaatctcttatcgaactcaaagattctattgttttagctgcaaataaaatatacgatgaatcgtatttaacatacgatgaattatgtgataacaagtctgaagagaaaatccttttattcatagataatttagagacacttttaattaactcggccaaggattttgaagaatttacctatgatttaccaccggcttggcgagttttaattacaagcaggatttcaataggtgatgcacgaattattagtcttgaacctcttaaacaaaaacacgcacttcatttagcgaggacatatttattaaaaagaaacaggaaaaaccttcctgaagaagttttaaagaatcttgttggtaaatgttttaataaccctttagcaataagattaagtattgatttatatctaacagggaaagaaattcctgagtcgataagtgtagcgaataaagaaatcgcttcattctcctatagtaatttgattgatgcattatccgatatctcggtgaatatattagaggcgctgtttatatctgataacaacaatcgcattactttatgcgaaatgctttccctttctttagaggaaatagttgaaagcatcgctcaattgagtaatacaagtctaataaatagaaacactagcgaaggtggggagatatattcgctaagtgaatcaatacgtgaacttttagtgactacaccgcgtaatatacatctgcgtgagaaactcttagatgatcttaaacgtagaaaagcgattacaaaacaaattgaacatgagcaaaggcaaaatagcatccctccttatcattgggactatattcctaacagtctgaatgagaatttgataccattcataaaggatgttaataagtcctttaaagggatgaatattccaagtaaatctaaagcaatagccttaatgaataagtgtagagatatggatcatctctatagcgaaatttcaatatttaaccgaagctatggtcgagtcgcatcatctttgaacgcatctccaattgcaataactaagttcaaaaaagctcttcaactcgatcctagcgatgtaaactcaagtatattcctagcaatgcactaccataacaacggcgattacagtttagcttatgatatttatgaagaattaataaatgaagggtggtgtaatgaaaatgaatatgtgcctgaattcacgcaaagagtttataatggctattatttggctttgctatttgacctacggtatcaagacattattgagaaaagtaagaaatggaaggacttaaaacactctcgcggtatagttggagtatttagagcaacagccctaaaacgtatggcagaagactttattcaaaaagaccctgatcaatccaagtctttactgtcccgcgccatgagaacattgaacgatgtaattcgcgttgatggttatataaaaccagcatgtgaacaaacaaaaagtgttttcaatgagctagctgtaatactgaaaatgcctacttttaaacaagacaaaattttctctaacgaatccctagagtttattgctgcgcatctcagtaacatcacagcatacgtaaaaatagatggtgatgatgaaattactaaattgattcgtaggctttctaatatagaaaccccgaaaaacccatttacttcattttctattcctaagcatgcacagtctgatctatataatcctattgatgaagaatatgcaatacaaaaaggtcttgaaatcgttcaaatctctaacatccctaaatctaaagatggaaaggcatcaccattgtatatattcgcaaaaaaagatactaaagattattacttaagatatgagtttttaaaaaatggtgggtatgctgaatggtttaatttgaaacagggcgatagtgttgcaataaggccactcaaagaaaaacctaaaggaaagtcattgttagcctctgagatatatctactttag

SEQ ID NO: 223408 - DNA, 141 bp, Klebsiella pneumoniae
atgagcaatccggaacagtcaagcacagcgaacgggaaaacgctgtgtgtctactccaacagtatctacacatttaccttcgtcacggagtcgcagcattgcccgtacagcaaaagcttcgacatagtcgatagtaaatga

SEQ ID NO: 223409 - DNA, 795 bp, Klebsiella pneumoniae
atggctaaaaattcgaaagacgcttacggcgccagcggcaaaagcaatgttctgtttttcgaaccggaaagtttgcatctggttaccgatacaacacacccgctttacgacgaacgagtacacctaccgcttaatgaagcggtgatcctcaacatcatggaacttggggtactcgaaccgattatcgtgtggaaggacccggagacggggaaaacctgtgtggtggcaggtcggcagcgcgtaaagaacgctaaggaagcaaacgccaggagaaagcgggcagggctggaaccttggccggtacccggtatagctaagcgcggctcagcaattcaaatggccaaatacatggtcagcgaaaacgagataacgcaaccagataccccactgggccgggccaaaaaaatggttcagcagatggaatacggtcatgacgaaaatgacattgccctgctttttggctgcagcgtaaaaacggtccaggcaaccgtggctctactggatgctacacaggcagtccaggcggcggttgaggctggaacagtcactgtcactcaagcgcgtcagatggtcgatatgccacctgaaaagcaacgggaaacggtcaaacaattagaggcagctgcagagggtgtaactggccacgagaaagctcgccgtcagcgcgctgtcctcggcgacacaaagccgcgtctcaaatcccgtaaggaaatcacccagcaacttcaaaccgccagtggcgaatacgctgaggctttgcggtgggtgcttggtgatgaaaacacaccagtttaa

SEQ ID NO: 223410 - DNA, 840 bp, Klebsiella pneumoniae
atgcgccgggtatcggatgatgccaggttgctggcgctgtacctgctcaccgggcaacacacaaacatgatcggatgcttcaggctgcctgatggatacgtttcggaagaccttgcctggactcctgaaagggtttcgaaagggtttgatgagctatcggctaacggtttcgcaacgcgtgattcgtcatcgaaatgggtgctaattcgtaactttctgacctggaattcagttgaaaacccaaaccagggaattgcagcacttcgtttgtttgatcaggtcccggacaaatctacggtgaagccagagctggcgcgggttttagcctcggcaatatcccacattggtatcgcaaaactaaagggttccgaaagggttctcgaaccgttccttaaccaggaacaggatcaggagcaggaacaggatcaggaagaagatagttcggggcatggcttcgccacacccccagacgttcagaaccaggacgaaggcgataaacctgatccccaaaaaatttacccgaatgagttcgagcagatctggtcggtttatcccaagcgggcagggggtaacagcaaatccgatgccttcaaagcctggaatgcccgaatcagggatggaaccactacggcggaaatcctcgcaggtgtggagcgttacgcggctttcgttaaagccgagggaatcctgaacacgcagtacgtgaaacaggcgaaaacattttttggtcccggtatgcatttcagcgaaccgtgggcgattcagcaggcgccaggaactcgagatcccaatcagatttcggaacctgacaaaaccatcccagcgggattcagggggtag

SEQ ID NO: 223411 - DNA, 192 bp, Klebsiella pneumoniae
atgacaatcgtaaaaacccatactggcaccgtgatcaccaaagacggtccgcaggtaaaaaactgcaccagacagagcggatgtgggtcgtcggcaaaaacgagttttaccacaaagaaaccggacgccgtcactttgcagaaaatacgcgccgccgactgttgctcgacaccatcgagcctatcgaggtga

SEQ ID NO: 223412 - DNA, 189 bp, Klebsiella pneumoniae
atgagcaacacattgcaagtgcactgcattaaagataccgagggatattggactgatggtgaaatgtatccggcccgccagttatggcgagctattgcatatttcatgcaggtgcatgaaaaccctacacaaagcgggcaggcatggcggggatacgagcgcccgctagatatcatatttcatcactaa

SEQ ID NO: 223413 - DNA, 1065 bp, Klebsiella pneumoniae
gtggctgagaacggaccgatagaagagttggcaaagatagtatcatcgaagatttttgagcgctttaaatggagcatatcaggaccgtgcgatcaggactttggatgtattgacgaaggtaatcataaacctctcgacaaaaagcaggctcatacgcatcctgtcgatgtagtttttagctataaagatccttatttaaataaaactattttattgaatactgacctcaaaagttattctaagggttctattaaccctgacatgattgagaaagcgttaacttccctaggttatacaatttcctgtgctcaatatagcccagaatggcgagaaaaatataacatatgcgtaggggatagcgaggttagagggttattatttgtttataatcatgataatgattttgaacatgatttttatgatttcttcgatcctccaaaaccagtgggtaaaaaaagaaaacccaaggcggttaaattagataatataaaagtgtctgaaggtcaacaaatacatataatcgaacctaaatctattagctatatgctatctataatcgctgatatgaatgagttaattagagataatcaattcccgagagaggcatacggtttctattatcctcaactgacatatcataaggtaattgtcacagatgattacttgcctgcaacgattgaatctttgacagctccatttttaattattaaacatgatgcagtttattcttataatcgtgatttaaagaaagaagtggaagtttatcctggagggtatgttgtttattataaccgatcaggttctacagatatggagttttattatctttttgatcttttaactaattaccagattctgaatggaaaaaataacataagaatacgcatcgctacaaaagatcgaaatgattcaataagatcacattttaatagagcccttcagaaatatgcgtttgattggaattatgatgatagtgcaaagcaaaaattactttctatggaaatttatttagttcctacggttaaagagttttacagtactgaatcaacatcttgggattattaa

SEQ ID NO: 223414 - DNA, 1125 bp, Klebsiella pneumoniae
atgagcaatatttatagtgtgacggataaggttttatgtgatgctcttaatcagtcacaagtgacacaaaatgagatgagagagctttttctttctcgaggtataattatttcaaaaaatactgatagaaaattattagctaaaaatttctcaaaatttacacatgattactatgatcatcagaaaattgcagagatattaggaagtgagccacgaagggagcgctctacttcaaggttagtatctaatatgcctgaaaaaacaattttattgaaagcggcagatactctcaaaaaagagcttacagatcataaagacctctgccatgtggttgctgatagaagtggtatgataaatgtccatataacttatatgtcaaccaatttttcaaaaagcgatttcaaacaagtagttaaaaagcaagctgttatcgaggtggaaccaacagaaggtggttatgtgattcgccgcccagataacgaacaaaccgaagtttatgagaatcaactacttgctattgtagagaggttatcaaaagaaaaagcaattgaggacgggaaaccaatttctgaagctactctcgatatccaagaaataagtctagaacatattgattcgccccagtccagaactgatttctttactaaattaataaatgggctggagggttatgatctagatgatgtaacagatgcttatgtttaccatccaaaaccagaagagattgaagaggaagatggcgaaacagatataggtgtacatgttagtaaggcatcgctgaaaggtgaaggtgtgctgaaatctgaagaaatcaactccctttatgaacgtggcttttatatatgcaaaataaaatggcgagttaaagagaaaggagcggatccaaacatttttgagtttgaagcacagtttaatgatgctcaaaacttcaaggggttttcatatatagccaagggtattaaaaaatacaaaggaggaggtgagtataataaaacaacagttcaattgaatgatgggcaaaagttattttttagtcgtatgattgaaaaagcagcccgttccattataattgaattaaataaacaggctcaggggaagaaagatggaaaatctcatcaggattaa

SEQ ID NO: 223415 - DNA, 702 bp, Klebsiella pneumoniae
atggaaaatctcatcaggattaaatggaatagattgaaatctaatcttacattgagtgagattgcttttcatataaagagtaataaatactctgaagagtttggttatggttattctgatgttgacttctcaactgacgggctatctgctacgtatactgaagctaagctgaataaacagacttcaattgatcctttgggtaacgaaaacgaacaagagtttattacctatgagtcaattcagttctctatatctaagctcataggtaggttgtatttattgaccgtttacaatccatctaagtcaataaaggctttgacagagcggcttagtgcggattcaggttataaaatagggtttggcatagtagatattaagctgtctgagtatttggattcgctgcgcgaaaagtatgacttgaatcttgttagtataaaaaaggtgaaggttagtaatttgatagtgaatgataattcgaaagcgaccgtagagattacatcgaagaaaaatgcttttgatgatgtgaaagacctcatcggggacaaggcttattcacttgataaggtcaaggcggcaggatatgttcttggaaatcgttgtgaatttgaaatatccaagaatggttctgtctgtgttaacgagagtatggtcaagtatttaactgagacaatcgtttatcatattcttgacagagaaatctaa

SEQ ID NO: 223416 - DNA, 255 bp, Klebsiella pneumoniae
atgaaaagcgccaagagacagggcaacttccgtaacctgtttatgttctcacctaacggtaagaaggacggcattcaaattattccgcagtcagaagtggctgcaaaagatgagtttcttaacattaagaatgtaagccgtgacgacatgatggcagctcaccgcgtgccacctcagatgatgggcattatgccgagtaatgttgggggatttggggatgcgcagaccgctagttgcgtgcttgtacgtaaataa

SEQ ID NO: 223417 - DNA, 927 bp, Klebsiella pneumoniae
atgaaaagtgatgtagtcgttattggtagtctgaactatgacattctagtccagcaggatcggcttccggaactgggcgaaacatttactggcaatgagttaatgctcatgccaggtgggaagggggctaatcaggcggtgcagtgttctagacttggactgaacgtcagcatggttgggtgtgtcggaaatgacatttatggtagcgagctgatcaactctttacgtgagaataatgtatcggtagagaatgtaaacaagcggggtaccaccacaggtatcggtatcgtccagatccttgaatcaggtgactactgcagcaccattatcaaaggcgctaattaccttatcagtgaagatgacatcactgagtcactcttcgaaggacagccactggttattcttcagtcagaaattccggcccccgttgttgagtatattatcggcgttgccagcacccaccattgccgcattatccttaataacgccccggcacgggatgtctccgcccacgccctgagtctggtggactacctggttgttaatgagacagaagccgccttcatgagcggtgccgatgtatcttcgattgatgacgctcattcttgtgcaaccggactgcataaacgagtgaagggacaggtaatcattaccctcggtgaaaaaggggcggtattgtcccaggaacatggcactcgacatttcccggctgtattctgtccggatgttgttgataccaccggtgccggcgattcatttattggaggtattgcctactgcattgttaatggtttttcgctgacggacgcgatcccctttgctgctgaaattagctcttgttcaatacagaaatatggcgggcaaaactcttttcccatgctaccggacgtttctcatgcccttaaaaactccagcttgttagattaa

SEQ ID NO: 223418 - DNA, 882 bp, Klebsiella pneumoniae
atgcacagcaggctgaagggtaatgaagtatttttacttgcgagaatgctggctcctgaactaggtaaaaaagagagagctatcgcccgctttatagatgataaccctcagtccctggcacgtatgtcaatcacagaaattgctaattatttgaaggttagcgtatcgagcataaccaaagtctccaaaaaactgggatttaccgggtttcatgatttgaagttaagcgtctctaataacatgaacgccgttgaaaacactgttgacattccggttattcccgattcggaaaagtatgttgaaagtgttcttgaaagtacttttcttaattctgttcttgccctgcaagaatcgttaaatgtcattgattgtgccgtcatcaaatcggttgcatatctattcattaataagcctgaagaagccagaatatttattgctggctgtggcggttcaagtgcaatctgtgatgatttcaatcataagctactaaaaattggtatcttctcatcagtatttagtgatagtcataaacagttgatgactgcatcgctgatgcggcaaggtgatattcttctggccgtgtcccactccggacaaacgtcggatattatccagatggtaaatatggcaaatgagagcggcgcagaaacgatttgtttaactaattatccgaacagtccgcttagccttattgcccgacattcaattatttcggcagtaaaaaataacccgatcacgggcgagaatgctaccacccgaatagtacatctgaatattcttgacgctatttttaccattattgccagtaaaaccagtgtcaaaagtaaaaatagcttactcagcaccagaaatgcggtagcgtccaagcgtaccgccagttaa

SEQ ID NO: 223419 - DNA, 954 bp, Klebsiella pneumoniae
atgaaattttcctcccgaattaattctttccgttcaagacctgaactattcgatgcgaaaaacaaaatggatacgtgtgatctcattacccgtatgggtagtgcggaaggattaacacatatcgaacttaactatcctgagcattttattggccaggataaagaactgattaaaaaatgtattgctgataatggtctgcaggtaggtggtattgcgctgcgctacaataaagactttattgatggcgagtttaccaacccgaatcctgcgttgcgcagtaaagccattgagacgacgctggaagccgctgagatgtgtaaatttctcgagggcaataccgtcaccttatggtttggatatgacggctatgattacccgttccagcaagattacttccgcgcgtatgagctgctcgttgatgccttacgcatcgtgacccaggcacatggggatatacagttcagctttgaatacaaaccttatgagccgcgtactttctcctttattggggatgtttcctcaaccttgatgttgattgatgatgttggcagtgacaatctgggtatcaccctcgatttctgccatatgataatgaagaaggaaaatccggccttctccctgttccagtcagctcgtaaaaaccgcctcgtcggtttccatcttaatgacggctacggtcatttcgatgatggcctgatgctgggttccgtacatctcctccagactctggaatatatctactacgcgaaacgcgttggttttagtggcctgatttatttcgataccttcccgagccgcgaagatccggtcgcggagtgcgctcagaatatccgtatgtacaaagcactgtctgactttattgaccgtctcagcattcctgaaattgagcaaatgatccaaagccaggacgccctgaaagtacagggtatgttactgaaaatgatcgccgaataa

SEQ ID NO: 223420 - DNA, 1236 bp, Klebsiella pneumoniae
atgtttgaaaagataggtttacccaggaatttattatggggatatatcggcctgaccatctttatgattggcgatggtgttgagcaggcgtggatctcaatctggcttgtagagaaggggctgtctgttgcacaggcatcctacctgatcaccgcgtatggtgttactgttacgctggcagcctgggttactggcgttctggttcagacgctaggcccgcgtaaagtcatgttttacggtctggtaacctttatcattggcagtatcggttttatcagtgttggccttaaacacatggaaatggcgtggatgcttcctttctacgcattacgcgggattggatatcctctgttcgcttactcattcctgatatggattaactacagcacgcctgttgcgcgcagggcgactgcagttggctggttctggtttacgttctcattagggctaagtgtgattgggcccttcttctcttcgatggcgttaccggtgctgggtgagatccacgtgctctgggtcggcttactgtttgtcctggtcgggtctgttctcgggatctgggtcaaccgtgatgttgttcctgcttcagaaattcacccattcagcgcgggtgaattactgaaagggatcaccattctgcagcggccggtcatcgcgatgggcctggtggtgaaatccgtaaacggtatcgcgcagtacgggctggccaccttcctgcctctgtacctgatcagttatggctacagtaaaacagagtggctgcatatgtggtctgcagtattcctggtggctatttttgccaatctgttctttgggttctttggtgacaaatttggctggcggaaaaccattatgtgggtcgggggatttggttatgccgctgttctcattctggtgtgggcggtcccccaggtactgggtcataatttctatgtgatggcatttgtactttgcctttgcggcgtgaccatggcgggctatgttcctttgtcagcgttatttccgatgcttgccccggacagtaaaggagccgctatgtcagtactgaaccttggtgcaggcctgggagccttcatcgctcccgctattacagcattgttctattcatctcttggcgcaggtggtgttctaggcatctatgccggtttatatatcctcagtggcgtgcttacacctttcctcaaaacgccggaggagcttaatcagcaggctgaactgaaagataaggtcgcataa

SEQ ID NO: 223421 - DNA, 141 bp, Klebsiella pneumoniae
atggtcacgtccgcagcggttaaagaactttttgatttctatgaccgacgcccgcttgtccaggtaccggaagccgccctgaagtggatgataaaggatgtgtctggcaaggagtctggtaaaattaccggtgtcttctga

SEQ ID NO: 223422 - DNA, 942 bp, Klebsiella pneumoniae
atgccacaaaacgccaactatgctccgatcctgcctctcatcaccacgccgaggctgaatcacttcatcaccacatttcgaccaatacaggattgcgaaatttacggggtctacatctggacacagcatgccgccagttcaatctacccgttactgcagaatcttgaaatcacgttacgcaacagcatcgaccgtgaggccactcgtcggttcgggcagaaatggtgggacaacccgggcttacagtgtcgaaaccgaatacaaaacacgactttctacagcaaaataacccaagccatcgacaagctgaattcagactgggttcaggagcagcgcctgaagagagtcgtcaatccaggtaaccccccggtctggtcgcatgatcaaatcatcgccgctactgatttcagcgcctggcatttcattctgaaagatgaatttgccgccccccgcggacggaacccaggtaatcatcagcactttctgtggccccagtctttcggacgctgtttcaagaactacgcgacgttttcacgtagtagcggggatgcgcgtcagaaactgcaaaaccgactcatcgagctgagaaaataccgcaaccggctgtttcatcatcaacctatctgggtgaaagccccgaatgtcacggatgctgcgacggcaattgacacgatcagggtgaagataaaacgtatagagcaggccattaacgccatcgatcctgacgtagaaaatatcatggccattaccggcctgttttcacacgctctacgtatttgctctttgcaggagctagggatttacacgttctctcgcgtccctcgtcgtttgacacgtcggcaaaagcgaagcctacgtaaagtgatttcggcccgctctcaggagctttcacaaaccttcgagtacggggaaaaactctacaggcttcatccggcccggtaa

SEQ ID NO: 223423 - DNA, 3336 bp, Klebsiella pneumoniae
atgcatactgcgcgctatggtttctggggctatcttcttcttattatagggctggcaggaatttgtgccttattgattttcattaatcaggatttgttggcaaggagaggagtatccgcccaacaggcgtggtcactatggggagggatatttgcaatcctgttattcggactggtgtgttcaccattctggtggctcaggaaacaaaagaaagagcagacgatttatcggcctgaagtgccggccaaaaatgaaaagcgactatctgatgatttttacatccttcttaaatcaaaacttcggtcccgctatggcctgctctggcgacataaagtccgcctgctattggtgatgggggaatcgacgcaggtggaagcgattgcaccaggattaacggcgcagcgctggcaggaaggcgagcacacagtgttaatatacggaggctccgcgtcggcagccccggatacgacacttttgacatccctgaaaagactgcgccatttccgtccgctggacggcattatctggccgctgacggaaaaacaatgttgccagacggcgcaactggataaaggttggcgtgagctggctacctgcggacaattgctcggttttcaggccccgttatatctgtggcaagtttgtgatggcggtggttatcaggctggacgtacgctacaaagcgtcggttgcctgttgcctgaacactgcgtgccggaacaactggcgtcgcagctggaagcgcggacactgcagttgaccgcacagggagtacagcagttactgaataacgaccaccacgatttcctgttacggcttgcccatcagctcgctgaaggcggtattgttaaatggaagacggcgctaaaaccgctccttgccggtggcgcgttttcttgcctgcaactgcgtggtctgatgttcagccctccgcttacccccgcgccagaggccgcgatccacgcatggttgccatcgccggtatggttgggcgtgactggcgataatgcgcgggggcgcagagtgggttttccgtggtggcgcactatgttagcgatctgcgcctgtgtgctggcggtatgggtggccggaatgatgacctcctttttcgccaaccgtgccctgattcaggaaatcgggatacaggcgacgcgggcgcgcgatatccgcctgccgctttcagaacaactggccgcactgcataccttacagagccaactcgagcgtctgcagtaccgtattcgccacggtgcgccgtggtatcagcgtttcggtcttgaacgtaacgcgcacctgctcagcgccgcctttccttgttatgcccaggcagcaaaccggctggtgcgcgatgtcgcagccgcgtatctgcagcaacaattgaacgcctttatcgccctgccgccgaacagtccgcaacgcaccgcaacgggagaacagcgttataaacagcttaaggcgctgctgatgatgtcccgcccggaaaaatctgacgccgcctttttcagcaccacgctgatggcagagcatctacgctatgcagctgtaccggaaggtacccggcaaagcgtgctgccatcgctgctgaccttctggatggctaatctgccggagcatccacagtggaaaatcgccccgcagccgcaactgaccagcgcggtacgcaaaattctgctgcgccagattggggtgcgcaatgcggaaaacactctctatcagaacgtcctgaaacaggtctcccgtaactacgccgatattacgctggcagacatgaccggcgacacgctggcagacccgcttttcagtaccgaacagaccgtaccgggaatgtttacccgtcaggcatgggaaggacaggtaaaagaggcaatagaacaagtggtcaccgcccggcgcgaggaaatcgactgggtgctcagtgaccgtcggcaggacgcatccgccgatatctcgcctgaggtgctgcgcgcccgcctgaccacacgctacttcaccgatttcgccggtagctggcaggccttcctcaacagtattcgctggaataaagaggactcgctttccggcgtgcttgaccagttaacgctgatggctgatgcccgccagtcgccgctgattgcgctcacggataccgtggcatggcaggcggcaaccggaagggaaagcgcaggcctgtcggattcattggtaaagtcggcaaaagcactgtttaacggcaaggaaaatacgtcgcatgccgtccgtaaagatgaaacaccggcgggaccaatggacaaaacgtttgccccgctgttgcgactgatcggggatacaaccggagggcggggtgatactcagctcagcctgcaaacctggctgacccgcgtcacccgtgtgcgcctcaagctacaacaggtgattaacgcccccgacccgcaggagatgacccagcagctggggcagaccgtatttcaggggaaaacggtcgatcttaccgatacccgcgattatggccgtctgatagccgccagtctgggtgaagaatggagtggttttggccagtcgttgtttgttagcccggtggagcaggcatggcgacaggtgctgacgcccgcagcggatagccttaaccggcagtggcagcgcgctattgtcaacctctgggagcaggattttgccgggcgctacccgttcaaagacacagcgaatgacgcctcacttcccctgctggcgcagtacctgcgtgacgacgggcggataaatcagtttattgccaccaacctcaccggaatgttgaaacgcgaaggccggtactgggtggctgacaccatgaacacgcagggactggcgatcaacccggcgtttttacgcgccctgaatcgcctgcgcgatgtggccgacacagcctttgccagcggcgatgccggggtacattttgaactgatggcaaaaccggcacgtgacgtgatgaaaacgcatctggtgattgacggccagcaactggaatatttcaaccagaaagaacgctggcagcgtttcagctggccgcatgagcagtggcagcccggcgcatcgctgagctggaccagtacgcagaatatggaacgtattctggccgacttccggggaagctggagttttattcgtctgctggaacaggcgcaggtcacacagctggacagcagcagctttaagctgcagtggcaagcgccggacggtctgccgctgcattacctgatgcgcgtcgagcagggcaaaggcccgttggcgcttctgacgctgaaaaacttccgcctgcctgggcagctattcctgacagagaaaggggcggcggacaggagggaatatggagaggatgagtga

SEQ ID NO: 223424 - DNA, 1149 bp, Klebsiella pneumoniae
atgggatggatgatacccgtagtaccggaaataagcccccttcctaaaccaaattacagacgttggattatattgttaattcccatattaaccataggtggactgtgcgggctatttatctttaatcttgttacatatggtgacgtattgatatatggcatattaccaacattattcctctggttatgcaccatgggcgttgtgattaataaatatgaacaatccgttgcctcctgcctggcgtggaatactgaaaaagagcaaataaaagaacactggcggaaatggagtcaaaaacaattagcagtagttggcaatgttatttacactccagatggcgaaggaatagattcattactgggaccacttaaggatattcctgcatatccacaaaaagcgagacccctctcttttccattgcgcaacactatcactgcaataacgagtaacatccatcaaaacctggagcatcagtatccaggttatcgcaactatttgcagacaatttatatattacagtctaaaaacaaagagtgtaaaacaatagagcaagcggttctctcgcagtgggatctggttccagagacagtcaactccattgaatgcattgagtcattctatgataatgaaaatttcgacggtttggttttagtcatttgcctacaacgctggtcaggagatgcctctggcaaacacagtgaattagtttctggtcagttaatttcttcttattcatttgcaaaacgacatgccatccccgttatcgctggtataggtcgaaccatgacattagaacccgaggggctggaatcgaatttaaatacactagttgaatacaatcaattaaataaaaataagttacaacacatctgggtttctaatattaacaatgaactaatagaaaacattatgcagtatgctaaccaatacgaatgggaactgccaaggagacagccgttgcacatgattgaccattcttttggcccaggaagtgagttagcatttccattatccctggcgatattaactgaagccaccaggaaaacgagcaaagaacagttggttatttgtcaaaaatcacaagaaattgaaacaaagtggctttgtttaattacaccaggccactattttgagcgtgaggaaaaataa

SEQ ID NO: 223425 - DNA, 1104 bp, Klebsiella pneumoniae
atgataaagaaatggtttttgcttaatggcccacatcgcctgagaaacggcctgctgctgacgacggtgatatttatcacgggatggctggcattcaaacccggcgcgtatcagtattcattaaatgacagggagaaagtgatggtcacctcattattgcagcaccccgaaacgcggtactttggtttttattctgtggcgcttccggctgaatttacgccagccgggatggtgatgtttatccagggttcagagatgaccacggtggaaacaaaacggcaatacttccctccatttcagcagttcttgatacgacatgaagaagaactcagaaacatgcagcctcaacttcctcaagatgcgccttatcttaaacagatttatcaacttccttctgacatgaaaggaaaaatatttgaatatataaacacaaattcaatttccgatgtattcagaacgcttgaggcctgtaggtggaacgatggagtatcctttattataaaaatgaaagctcaggattctcgtgataaaaaatatgacactaaaagaaaaatatttagtctgaaatataacatccctgagaaaaaatcacaattactggctattctgtcagggttgcaaccccgccaggataatcagcgcccctcaggcaatcagctagctattcagtatgggcaggttgatgcctcactgctcgggcagtatgaaacttccataaactatcaaaacagcaaagaagtcactatcacattaaagacagataaccatagttataccggcaccccgttgctggataaggacgcccgggtggtggaaacagaatacggagaaaccctgtacaaaggcaaacgtaaggtcaacggccttgagatttcagaatggtggacgaaacagactgatagttattatgcaaaaccagccataatttataattttgaactggttatccatcaagataagaaagaagggaataagctactggagttgtcgatggattacaccgttgacctgttgcacgcggataacgcattaaccgagaacgaactggtagcgctgtgggagaatataaccgaaacaattaaatatcactccagccagtggtaa

SEQ ID NO: 223426 - DNA, 1782 bp, Klebsiella pneumoniae
atgtctacgacgatgcatatggatcgtgccgataaaaataaagttggcaccgcggaaattgaggacctgcgggtaattccggttatttttctgccaggaataatgggaacgaatcttaaagaaaactctgaagagaagaatgcaaaagctgtatggcgatacgatagcgaaacctccttgttgggctggacacttccatcttcggggccaaaggagagaaaacagctacttcatcctgaacgggtgaaaatagacaaccggggaagaattctgctgtcgtctggaatacaggagcaggtctcagccattcatccctacccctcctccaattatgatgaggagggaaagaagcgttatgctgaagcgctgaataagataatggataataacgagccggaaaaagaactctttggctcgcggcatgatcgaggctggggagaggtagccgccccaagctacggcgcttttcttgatgcgctacagactgcactgtaccgggataagccaacgataaaagacaatacgctgagtgcgatttatcaaaaattagttgatgaaccactggggctggaatttggcgtggattccctggatgaaacataccttgaagtcatgaaactgtatcagtttccagtacatgtcgtgggctacaactggctaggctccaatgtactgtcggcaaaaagacttagcgaagaagttgataggattattgacaagtatcaaactcagggcatgaagtgcagcaaagtcattctggtgacccattctatgggaggactagtggcacgatattattccgaatgcctggagggcagagataagatttacggtattgttcacggtgtgatgccgtctgttggcgcggcagcgacctatacccgcatgaagcgcggtacagaaaatacagagtccggtttggctggcgctgtaggatatcttaccagccatatccttggccgcaacgcagcagagatggtggcgattggctctcagtcttccggcgcgctggagttactccctgccaacgattatggtgacgactggcttaaggtcgttgaccgtgacggtagtacattaacgctgcccgcagatcttccggtcggagaggacgataagaaagaagattgtctttatagtggactatatctgaaccgagagaaatggtggaaactaatggatgaaaatctgttgaatccgtttaacactacattgaattcaagtcaaattaatacagattgggaagcttatagtaacttactggctgatgttcaggcatttcatgaaaatctgatggggaaatatcatccccagacctactcattttatggaaaatcaaaagggggggaattacccgcagcgcatcggactcaggagacggcggtctggagcggggcgctggcaagcggccaaataggtgagacgccgccggcgcctaaaatgaatgacgaacgcctttatttaagtgaagtcagcgccgttcgaacggtgaaagatgaactttccccggaagagcaggcatggaaattcaagggcgataacgacgtggtatacggctgggtaggacaacgttttacactacgggatgcctgtgaaaatggcgacggtacggtacctttgcgcgccgggcaaatcgttcatgagaatattcgggagcgtctggcagtacaggttctccatgaagccgcttaccgggatactctcagtcaagcttttgccttacgctctattataaaaattgcccagcaggtcaattatgataaagaaatggtttttgcttaa

SEQ ID NO: 223427 - DNA, 2481 bp, Klebsiella pneumoniae
atggatgtacagaacttcgaccactcacaccacgcgttaaaaatccgcggcctgagcagcggcgtggacgtactgtcctttgaaggcaaggagcaattaagcgccccattccgctatgacattcagtttaccagcagcgataagtctattgcgccggagtcggtgctgatgcaggacggggcattcagcctgaccgccccgccggtgcaagggataccgacgcagactcccctgcgtacgttgtacggggtgatcaccggatttaagcaattgtcttcctcacgggacgaggcgcggtatgaggtgcggctggagccccgtctggcgctactgtcccgcagccatcagaacgcgatttatcagaaccagacggtgccgcaaatcgtggagaaaatactccgcgagcggcatgagatgcgcggtcaggactttgtgtttaacctgaaaggcgactacccgtcacgcgagcaggtcatgcagtacgacgaagacgatctgacattcatctcacggttgctgtcggtggtgggtatctggttccggttcagtaccgacgcccgactgaaaatcggggttatcgagttttacgacgaccagagtggctatgagcgcggcctgacgctgccgctgcgtcacccttcggggatgagcgacagcggaaccgaagcagtgtgggatctgaacacggcctacagcgtggtatcgaggtccgtcacgacgcgggattacaactaccgtgaagcgatggcggagatgacaacaggccagtttgacgtaacaggcggggataacaccacctacggtgaagcctatcattacgctgacaattttctgaaaacgggtgacaaagcgacgccggagagtggtgcattctatgcgcgtatccgccacgaacgctacctgaacggacgcgccatcctgaagggacagagcaccagttctctgctgatgccggggctggagataaaggtcgagggtaatgatgcgccagaggtattccgcaagggcattctgataaccgggattaccgcaagcgcagcacgagaccgcagttacgaactggcattcaccgccatcccctattccgaacgctacggctaccgccctcctctcatccgcaggcctgtgatggcagggacactcccggcgcgggtgaccagcaccacggcaaatgatgtctacgctcatatcgacaaagacgggcgctatcgagtgaacctggactttgaccgggatacgtggaaaccgggtttcgagagcctgtgggtacggcagtcacgcccctatgcgggagatacttacggtctgcacctgccgctgctggcgggaaccgaggttagcatcgcgtttgaggatggcaacccggacaggccatatatcgccggggtgaaacacgactcggcgcacaccgaccatgtgaccatccagaactataagcgcaacgtgctgcgcaccccggcgaataacaaaatccggctggacgatgagcggggtaaggagcacatcaaggtcagcacagagtacggcggaaagagccagctgaacctgggacatctggtggatgctgggaagcagcagcgcggtgagggtttcgaactgcgcaccgatatgtggggtgcgataagagcgaaaaaaggtgtctttatcagcgccgatgagcaggaaaaggcgcaggggcaggcgctgatgatggatgaagcgttaagccagctccaggaagcgctgtctttagtggaagcactacatagcgccgctgaagtggcaaaatcagagctggcggatttacagacacaaaaaacgctattgtcagaaacgctgaccgagctgaaaaaatcagcgctactgctttctgctcccgcggggattgcacaggttacgcccaaaagcctgcaattatcctcaggggaaaacctgattagcaccagtgggaaaaatacggatttcagcgtatttaaaaaattcactgtagctgcgggagaagcagtaagtctgtttgctcaaaagcttggtattaaaattttcgccagcaaaggcaaagtggagattcaggcacaaagcgatgaaatgctcctggatgcatgtaaagatctgcgcataagcagtagcgacggaaaaattcttattagcgcaaaaaatgaaatcatcctaaccagtggtggtggatatattcgaattggaggtggcacggtggaatgtgccgcaccagataaaattatagagcgtggagcggtttggcaaaaattcagtggtcagagtatcagtcaggccatgcaggaatgggattccactgattttgccatcacccctgagatcctctggatgcaaaccggcaaaccggcaaagaatcaaaaggtacgcgttacccgcggcgatggcactaccgttgaaatgacgactgacgatcaagggaaactacctgtgcagagcgggctttttgttgaatcaataaaaattgatctcttagataatcaggaagattaa

SEQ ID NO: 223428 - DNA, 1272 bp, Klebsiella pneumoniae
atggcaatcgataaacgtgcggggcagcctgcgcaacagagtgatttgattaacgtcgcccaactgactgctcagtactacgtgctgaagcctgaagtcggtaatgcggagcatgcggtaaaattcggcacctctggccatcgcggtagcgcggcgcgccacaacttcaacgaaccgcatatcctggccatcgcccaggccattgcggaagatcgtgcgaaaaacgggatcaccggtccgtgctatgtcggcaaagatacccacgccctctccgagccggcgtttatttcggtgctggaagtgttaaccgccaacggcgtcgacgtgatcgtgcaggaaaacaacggcttcaccccgacgccggcggtctccaacgcgattctggtgcataacaaaaaaggcggtccgctggcggacggcattgtgatcaccccgtcacacaacccgccggaagatggtggtatcaagtacaatccgccaaacggcggcccggctgataccaacgtcaccaaagtggtggaaaaccgcgccaacgaactgctggccgcgggcctgcagggcgtgaaacgcatttctctggacgcggcgctggcttctggccacgttaaagaacaggatctggtgcagccgttcattgaggggctggcggatatcgtcgatatggccgcaatccagaaagccggcctgacgctgggcgtcgatccgctgggcgggtccggtatcgaatactggaaacgcattggcgagcactacaagctcaatctgaccattgttaacgatcaggtggatcagaccttccgctttatgcacctcgataaagacggcgccatccgcatggattgctcctcagagtgtgcgatggccggcctgctggcgcttcgcgataagttcgatctggcgtttgctaacgacccggattacgaccgccacgggattgtcaccccggcggggttgatgaacccgaaccactacctggcggtagcgatcaactacctgttccagcatcgtccgcagtggggcaaagaggtggcggtgggtaaaacgctggtctcctccgcgatgattgaccgcgtggtgaacgatctgggccgcaagctggtggaagtgccggtgggctttaagtggtttgtcgacggcctgttcgatggcagcttcggcttcggcggcgaagagagcgccgggcctccttcctgcgcttcgacggcacgccgtggtccaccgataaagacggcatcatcatgtgcctgctggcggcggagatcaccgcggtga

SEQ ID NO: 223429 - DNA, 2688 bp, Klebsiella pneumoniae
atgagtgacgagccgctgcgcccggaccctgaccgcctgctgcagcacaccgccgccccgcatcgcggcaaactgaaagtgttctttggcgcctgcgccggggtggggaaaacctgggcgatgctggcggaagcgcagcggctgcgcgcccaggggctggatattctgattggcgtggcggagacccacggccgtaaagagaccgccgcgatgctgcagggcctgagcactctgccgccgcggcggcttgcccatcgcgggcggtacgtctatgagttcgatctcgacgccgccctcgcccgccgtccggcgctgattctggtggatgagctggcgcacagcaatgcgccaggctcccgccatccaaagcgctggcaggatgtggatgaactgctggaggccgggatagatgttttcactaccgttaacgtccagcatctggaaagcctgaatgacgtcgtcagcgggatcaccggcgtgcaggtgcgggagacggttcccgatcccttctttgacgccgcggacgacgtggtgctggtggacctcccccctgacgatctgcgccagcggctcaatgagggcaaagtctacatcggcggccaggccgagcgcgctatcgaaaactttttccgcaagggcaatctgattgcgctgcgcgagctggccctgcgccgcaccgccgaccgcgtcgatgagcagatgcgcgcctggcgcgaccgccagggccaggagaaagtctggcacacccgcgatgcgatcctgctctgtatcgggcacaacaccggcagcgaaaagctggtgcgcgccgccgcccggctcgccgcccgcctgggcagcgtctggcatgcggtgtatgtcgagaccccttccctgcaccggctgccggaaggccggcggcgggctattctcgccgcgctgcgtctggcccaggagctgggggccgaaaccgccaccctctccgacccgtcggaagagaaagcggtcctccattacgcccgcgaacataacctcggcaaaatagtcattggccgccaaagcaagcgccgctggtgggatcgcagcggcttcgccgatcgtctggctcgccatgcgccggacctcgatctggtggtgatcgccctcgatgagaaacccttcccccttgccgcacgcgccagcgacagccgtccggcgctggagaaatggcgcctgcagctgcagggctgcgcggtggcggtggcgctatgcgccatcattaccctggtggccatgcagtggttgatggctttcgaagccgccaacctggtgatgctctatctgctgggggtggtgatcatcgccctggtttatggccgctggccgtcggtgctggcgacggtgatcaacgtcatcagcttcgatctcttttttgtcgccccgcgcgggacgctggcggtgtcggatgtccagtatctgctcaccttcggcgtgatgctcaccgtgggcctgcttatcggcaacctcaccgccggcgtgcgctaccaggcgcgggtggcgcgctaccgtgaacgccgtacccgccatctgtatgagatgtctaaagcgctggcggtgggtcgtagccagcaggatatcgccaccaccagcgagcggtttatcgcctccacctttcaggcccgcagccagctgctgctcccggacgcccagggaaaactgctgcccttaacccaccagccagggctgaccccgtgggatgacgccatcgcccgctggagctttgataagggccaacctgccggcgccggcaccgataccctgcccggcgtgccgtatcagatcttgcccctgaagagcgccgcccgcacctggggactactggtggtggaaccggagaatctgcgccagctgatgatcccggagcagcagcggctgctggagacctttaccctgctggtggccagcgctctggagcgcctcaccctgaccgccagcgaagagcaggcccgtctgaccagcgagcgggaaagcctgcgtaactcgctgctcgccgccctgtcgcacgatctgcgtactccgctaaccgtgctgtttggccaggcggaaattctgaccctcgatctggccagcgaaggttcaaaacatgccccgcaggccaacgaaatccgccagcatgtgctcaacaccacccggctggtgaacaacctgttggatatggcgcggatccagtccggcggctttaatctgaataaggagtggctgacgctggaggaagtggtcggcagcgcgctgcgcatgctcgagccaagcctcggcggccagcatattcaactggatttacccgatcccctccagctggtgcatgtcgacgggccgctgttcgagcgggtgctgatcaacctgctggaaaatgcccataagtatgccggcgcccgggcgagcatcggcattcgcgccgaggcggacgcccggcagctgtcgctggaggtatgggataacggtcctgggatcccggcaggccaggagcagactatctttgataaattcgcccgcggcaacaaagagtcggcgatccctggcgtcgggctgggccttgccatctgtcaggccatcgtcgacgtccacggcgggaccatctccgccagcaaccggcccgagggcggcgcctcattccgtgttacactgccgggagaaacgccccctgaactggaagagctacctgaggaattgtga

SEQ ID NO: 223430 - DNA, 759 bp, Klebsiella pneumoniae
gtgactccgactccgacagcgattcggatgctgacagcgattcggactctgacagtgattccgactctgacagtgactctgactccgacagcgattcggattccgacagtgattccgactcggacagtgactcggattccgacagtgactccgactctgacagtgattccgactctgacagcgactctgactcggacagcgattcggatgctgacagtgattcggactctgacagcgattcggactccgacagtgattcggattcggactccgactccgactctgacagcgattcggattctgacagcgactctgactctgacagcgactcggacagcgattccgattcggacagtgactcggattctgacagcgactccgactctgattccgacagcgattcggattccgacagcgactccgactctgattccgacagcgattcggattccgacagtgattccgatgctgacagcgattcggattccgacagcgattcggactccgacagcgactcggattccgacagcgactcggattctgacagcgactcggactctgacagcgattcggattctgacagtgattcggactctgacagtgattcggactctgacagcgactcggattctgacagtgattcagactctgacagcgattccgactccgacagcgactcggactctgactccgattccgattcggataccgaaccgcaggcaaataatgatacccatacggcggctatcgataccgtag

SEQ ID NO: 223431 - DNA, 351 bp, Klebsiella pneumoniae
gtgatccacaccggcggcactctgtgccgggagaaccgctcctgcgtgggcgaatcggcggcgcgtacgttacgccacctggctatcgatacggcctttatctccgccagcggctgggacagtcgcgggatattcacccctgatgagaacaaggttaccgtcaaggagaccgtcagccaggtcagcgcgagaagcatcctgctgtgcgacagttcgaaatacaatcaggtggccacgtttatggcgttacctttgacccggttcaccaccatcattaccgaccggcatctttccgatgccgccgccagtcatatcgcccggcacgcctgcgaggtgctgcgggccggataa

SEQ ID NO: 223432 - DNA, 861 bp, Klebsiella pneumoniae
atgcgttatattcgcctgtgtattatctccctgttagccaccctgccgctggcggtacacgccagcccgcagccgcttgagcaaattaaactaagcgaaagccagctgtcgggccgcgtaggcatgatagaaatggatctggccagcggccgcacgctgaccgcctggcgcgccgatgaacgctttcccatgatgagcacctttaaagtagtgctctgcggcgcagtgctggcgcgggtggatgccggtgacgaacagctggagcgaaagatccactatcgccagcaggatctggtggactactcgccggtcagcgaaaaacaccttgccgacggcatgacggtcggcgaactctgcgccgccgccattaccatgagcgataacagcgccgccaatctgctactggccaccgtcggcggccccgcaggattgactgcctttttgcgccagatcggcgacaacgtcacccgccttgaccgctgggaaacggaactgaatgaggcgcttcccggcgacgcccgcgacaccactaccccggccagcatggccgcgaccctgcgcaagctgctgaccagccagcgtctgagcgcccgttcgcaacggcagctgctgcagtggatggtggacgatcgggtcgccggaccgttgatccgctccgtgctgccggcgggctggtttatcgccgataagaccggagctggcgagcggggtgcgcgcgggattgtcgccctgcttggcccgaataacaaagcagagcgcattgtggtgatttatctgcgggataccccggcgagcatggccgagcgaaatcagcaaatcgccgggatcggcgcggcgctgatcgagcactggcaacgctaa

SEQ ID NO: 223433 - DNA, 879 bp, Klebsiella pneumoniae
atggacctgactcagctagagatgtttaacgctgtcgccagcaccggcagcattacccaggcggcgcagagagtgcatcgcgtgccgtccaacctcaccacccgcatccgccagctggaggccgacctcggcgttgagctgtttatccgcgagaaccagcgcctgcgcctgtcgcctgcgggacacagctttttgcgctatagccagcagatcctcgccctggtggacgaggcgcgaatggtggtggcgggcgacgaaccccaggggctgttttcacttggttcgctggagagcaccgcggcggtacggatccccagcactctggcccactttaatcagcgctacccgaaaattcatctggcgctctcaaccggcccttccgggacgatgatcgacggcgtactggagggcgccctgagcgccgcgtttgtcgacggcccgctggtgcatccgggcctggaggggctgccggtgttccctgaagagatgatgatcgtcgccccctacggccacgcacccatcacccgcgccagcgaagtgaacggggccaacgtctacgcctttcgcgccaactgttcctatcgccggcattttgagagctggtttcatgccgacagagcgaccccgggcaggatccacgagatggagtcttaccacgggatgctggcctgcgtcatcgccggcgccggcctggcgttgatcccgcgcagcatgctggagagtatgcccggccatcagcaggtttccgcctggccgctggccgaagaatggcgctggctcaccacctggctggtgtggcgccggggcgccaaaacccgccaactggaggcgtttatagcgctgctgaacgaagatcggcaaacagtggtttctccataa

SEQ ID NO: 223434 - DNA, 1425 bp, Klebsiella pneumoniae
atgtcttcactgtcgattcggtcatttacgctgtttcgtgaagaacaacccgtgcgcgatgcattggtcttatttacgttaacgctactgctgcattttcttggcgctatgctgcgtctggtgcaggagctctctttcttctggccgctcaatgcagtgatggccgggatttttgcacgctatgtatggcttaaccgcagctatttttatgccgtctgttttgcggcaatgctggtctatgacggattaacctcgcgctggggaatgggctttgcctcattgctgattaacttttccaatattgtctttattgtgacgctggcgcagctggtgctgtgggataaacgtcgcgccgactccatgccgggcccgataaacgcgcttaatttattctgtttctgcctgttagccgccttactgtgcgcagcggtcggcgcgctggggtcggtggatgttgaacgcgccaccttcgttccccagctggcggactggtttagcgaacagttctcgacggcggtattaatcctgccctttattctgaccctgacgctgccttcggcattaagcggttttcgctttcgccagctgctgccggtgctggcgctggtcctgtcaattgcgcttggcgtggcggtaggcggcgcgggcagcattaccttcccgttaccggctttgatctggtgcgctgtacgctatccgctgccgctgacctgtctgctgacttttctcactggcatcggcgaaatactgctggtcgctaattcgttaattcacttttcgccagatgcgcgaatgcagccgtggcagctgttctccacccgcctcggaattgccgccatgctgattagcccggtgattgtcgcatccagtgtcgaagcgattaacacgctggtgaagcagctggccctgcgcgccgattttgactttcagacccgcgtctattcccgttccggactgagcgaagcgttgaagcgtcagacgctgccggcggataagctgctgacggtgatggtgctggatatcgatggcttcaaacgggtgaatgatgctctgggccatgaaggcggcgattgcgtgctgacccagtttgcccagcaggttcgacagctggtgggtgagcaggggatggtggcccgtatcggtggcgaagagtttgcggtggccgccgtcgtcgacagcgcccagcagggttatttgctggcggaaaagatccgtcacggggtggagtcgcagcctttcggcctgggccagaacccgatccacctgaccatcagtctgggactggagacgcgcgaggtaggccacgcgcgcatcaccgagctgtttaaccagctgctgttggcggcggacgatgagatggtgaaagccaaacagagcggtcgtaaccaaatttgtatgccgacgctgaccgaaagcgcgccataa

SEQ ID NO: 223435 - DNA, 195 bp, Klebsiella pneumoniae; identical to SEQ ID NO: 212252

SEQ ID NO: 223436 - DNA, 630 bp, Klebsiella pneumoniae
atgcagctctcccccagtcaactattaatttcagttgttgaacgtgccaaagtatatctgtgcaattctaatttttggattttattagctgttttttcttctaactccatgctgtcatggggtgtcgtaacttggcttccaacatatttaaataccgagcgcggtttttcatgggcaaatgtcggttggatgtccgcgcttccttttatatttggacttttgttcaaggtgcttgctgggtttattgtcgacaaaactgacaggaaaggcatggtaatgtttgtctcggccatgttgtgtgctgcaagcatcctgactggagtgaatattagtaataattttttcgctgcaatcgttatctccttcggtatcggcgcctcctcaatgcaactaccctgtgtgtttaccctcttgcaatcaatggttcctgcagaagcgatgtcgtctgcagcgggggctttaaatggtatggccgttggtttcggggcattatcacctgtattaattggttttatattgagtgttactcataacttttactttgttatgtatattctaatagggatagttgtaattggcggtttgttttcattgctttttagtcgtgacagaagtcggcttttaaactaa

SEQ ID NO: 223437 - DNA, 876 bp, Klebsiella pneumoniae; identical to SEQ ID NO: 216438

SEQ ID NO: 223438 - DNA, 234 bp, Klebsiella pneumoniae
atggcagcgatgtccgctgtgttattttatttgcggtttgcctggtggatcaaaatgccacccatattcgcctgttggcacaagtgtctgggtcactggcggatgaagacattatcgctaaattacttgttgaatctgatccacataaaatcattgcgcttttcaattcagaaactgaaaacgccgatgcttaataccaacttgctaatatcgatttgtaatttattaaattaa

SEQ ID NO: 223439 - DNA, 162 bp, Klebsiella pneumoniae; identical to SEQ ID NO: 138601

SEQ ID NO: 223440 - DNA, 669 bp, Klebsiella pneumoniae
atgattttcaataaagttattgaacgcattagtatactaaaaaatagatgccgatcttctgaatgtagcatcattggtgttttgtttaggatgctaatgtttcgattggtctacaaaaaaaacattttaacttctccgaaagtgaaaataaagaatataaaaaatataaaattccacaaaaatagtaatttaattgtcgggttgtcaaatgttaatcacgtaaataataattcgatatgttatataaataaccgcggtgaaatgcatgtgtcaggaaatgtgtttatagctaaaagtgttcgggttgacattgctgactctagtaagattattttaaacgactgttatattgggcctgaaacagatctcatttcttattctggcattagcattggaatagggagtatggtttcttggagggttcaatttctggatgaagattttcatttggtttcctataatgataagaaacctaaagacggtaaaattaccataggtgaaaattgccttatagggaacaatgttgccattaataaaggttgtattatcgctgatggttgcgttgttgcgagtcattcagtcgttaatggtgttttccttgagaaaaattgtcttatagctggcgttccagcaagggttatcaaaagaaatatatcatggcaacactaa

SEQ ID NO: 223441 - DNA, 1740 bp, Klebsiella pneumoniae
atgaaattactcatgtcaaaaagatattttttaaaaaaattaattccaagtctaactctattccctgtccttaccagctatgcaagctcgaataaggatgtcatcgagtcccctcagagtaagagatatactattgaaagtattaaacaatacatatctttatttattggtgagtgtgtttttattagtggccaagaagctactcaggatgactctttcttttattcgggatattttgtaagtatacctgttattgcagatgaactaattgacaatgtaatttatattcgtggtaaaaattgtacatggaagagaaagattgatgattttattgatgtcagctggtttggtgctattggtgatggtattaatgatgattcaaatgctatatcgcgggctaatattgcggcacacaacgaatgcttacctcttaaattcattccagggcacatctatcaggttaaaaaaacatatgaaatagatgtatcgaaaacatcatggttttcgtcggatctgtcaacattaaaatggtttaatgattttaacgcagattttgcaataagattattctcgagccagaaagattattctaaacgatttcaaaatgtcaaagtcgctatcaagagtattgcaataattggcgctggaattaaaaatttactggatagttgtgcaataaaaattggtggggatgaaagaaatagttcgctcttcacgattgattcagtatcgattcaggggtggcgtactacactagcttttgataataattcatggcgcataaaattttgtgattgccattttttatggggaaatattattgctcctcccggcaataagaattctggagagtgcatggtatttgataattgtatgtttgctgataatcggagttatactgaattacattatggtgattggttcttttcaaaatgttcatttgataatcatgaggttaaattgtttggtgatgcaaatgtctttataaaccaatcgcacatggaaaacccagggcgaaaaacgacagattttacaattgttagtattaactcaataaatagctttgcttcagttattgacagttttatttttataagtccgacacctaaaataataaatacgccattgttttatgtgataagtgacaatgaaaatggtttatatgtgcgtaatttacgattccaggcaactgaaaactacaatccatcaaaaggcacggaaaatgctctagtactagtaggcggtgatgggaagtcttatctcgaaaacgttagagtctcattaaataataagtcatatttagccttaaacaaaaatgattcttctgtgttgatgaactcaagatttaaggatggattgagatattgggatttcaatgatggtgtttcactccaggcgcgtatttcttccaatgattctgaaaccattgtattttcaaaaaacggcgctagtttatcacaaagtgtattggtgaaatcgacaggtatactgtcgggtggaatgatgttgaagattgttagtggtgacttaaaactaactcttgagtgttatgattctctcgataataatattactacgcgagaatggaattgttctgcctctgactatagtgattggtcatgggtacggtttggtgaaaaattaccggataatattaggaaaattaaattctattgtaaaagttttgggcaaattgttgatgtcaaacttagtactatattaatggatatcatttcttaa

SEQ ID NO: 223442 - DNA, 1014 bp, Klebsiella pneumoniae
atgataatgacagttttacgccagcagccgcgcgccgcgggtctggtgctggggttgatcgcggcgaattttctggcctggtgctgggcgctgcaggcctttggcgacagcggcgcgctgatggccgccagcctgctggcctggggctacggcctgcgccacgcggtggacgccgaccatattgcggcgattgataacgtgacccgcaagatgatgcagcaggggcggcggcctttcgccgtcggggcgtggttttcgctgggccactcatcgattgtggtgctggcctcggcggcgattgccgcgaccgccaccgccttcagcacgcagatgagctggctgcatgataccggtagcgttatcggcaccgccgtgtcggccctgtttttactggcgatggcctttatcaacctggtgattttacgcagcgtgtggcgcagctttcgggcatggaagcgcggagagccggtgagcgacgaaatcgtcagcggcggcggggtgatgagctggctgtttggcaagaccttccgcctgatcagccgcagctggcagatgtacctggtcggtttcctgtttggtctcggttttgataccgccaccgaaatcggcgtactgggtatctccgccgccggcgcgtcgagcgggatttccgtctggtcgattatggtctttccggcactgttcgccagcggtatggcgctggtggatacgcttgataatgtgctgatggtcggcgcctacggctgggcgttcagcaaaccgcagcgtaagctctattacaatatgaccatcaccggtacctcggtggtggtagcgctgtttatcggcggcctggaagcgctggggttgctgatggataagtttgcgctcagcggcggaatatggcgctgggtaggggcgttaaacgacaacctcggcgacgccggatttgtggtggtcgggttgtttgtcgcctgttgggcgctatcggtgcttaactatcgctggcgcggctacgacaatctggcgcgctag

SEQ ID NO: 223443 - DNA, 273 bp, Klebsiella pneumoniae
atgaccggggatcagcccgtcataggggtcgggcaggtcgctatccgccgggaagcgcaccacatccccggcgcgcgcaatcgcctccagccgcgggtgtccttccagggcaaagcgccgaccgagcacatcctgcgccaggccatcgatcgccagcggcacaaactgatgcgcctcatagcgcagcagcgccgaggcatcgcagccaagaatttgccgcagggtagtaatcaggcgcgaaaagcggtcggtgtgaccaatatcgctttgtaa

SEQ ID NO: 223444 - DNA, 1677 bp, Klebsiella pneumoniae
atgctgagccatcctgctgaaaagtaccgtccctatccgccgatcgccctgcctgaccgccgctggccagaccggcaaatcagccacgccccgcgctggctgtcgactgacctgcgcgacggcaaccaggcgctggcggagcccatggacagcgcccgcaaactgcagttctgggatctgctgctggagtgcggctttaaagagattgaagtcgccttcccttccgcctcacaaaccgatttcaactttgtccgccagctgattgacgaacagcgcatcccggaggatgtcaccatccaggtgctgacccaggcgcgagacccgctgatcctgcgcacctttgaggcgctgcgcggcgcccgccgggctaccgtccacctctacaatgccatcgcgccgctgttccgcgagctggttttcggcatggacaaggccgaggtgatcgccctcgcgacccgcgccacccggcttatccgtcagcagtgcgaacagcagccggagacccgctggcaatatgaatattcgcctgaaaccttctgcttcaccgagcccgagtttgcgcttgagatttgcgaagcggtggcggatgtctggcagccctgcgccgagcgaccgatgatcgtcaatctgccggcgacggtggaagtcaacacccccaacgtctatgccgatcagatcgagtatttttgccgccacttctcccgccgcggcgaggtctgcatcagcgtgcacccgcataacgatcgcggcaccggcgtcgccagcgccgagctggcggtgatggccggcgccgatcgggtagaaggctgcctgtttggcaacggcgaacgcaccggcaacgtctgtctggtgactttggcgatgaacctctacagccagggcatcgaccctgagcttcgcttcgagcagatgaaccgggtggtggaggtggtggaaaactgcaaccagatccccgttcacccgcgccacccgtgggcgggaagtctggcttacaccgccttctccggctcccatcaggatgcgatcaaaaaagggtttgatgcccgtcagcctggcgatccgtggcagatgccctacctgcccattgacccgcaagatataggctgcagctatgaggcggtgatccgcgtcaacagccagtcggggaagagcggcagcgcctggcttatcgaacaaaatcatggtctgaaactgccccgcgggctgcagcaggacttcagccagcacgttcagcaggccaccgatagcgacggcaaagagatgacccaccatgcgctgtggcagctgttccgcacgcgctacgggctgcaggcgcagccggcgctgacgctgctcgattatcagagcgccagccagcaggatggccagctttccctgcaggcaacgctgcgtcaccacggcgaaacccgacgcctgcagggccagggcaacggcctgctctccgccgcagccagcgggctcagcgcgctgtttcggcagccgtttatgatcaaggactatcatgagcataccctcggcgcgcgcagcgacagccggtcggtggcctatatccgctgcgtttttccgcaaggagaaagctactggggcgtgggtatcgataatgacgtggcgcgcgcctcgctgcaggcgctgtgcaatgcgctcagcgccgccgatcaggccgggggacgaaaatag

SEQ ID NO: 223445 - DNA, 1173 bp, Klebsiella pneumoniae
atgagtgcaaatgcggagagccaaaccccgcagcaaccaggcagcaaaaaaggaaagcgtaaaggcgcccttctgttgctgacattgctcttcattattattgccgtggcatatgggatttactggtttctggtactgcgtcactacgaagagaccgacgatgcctacgtggcagggaatcaggtacaaattatggctcaggtcgcgggcagcgtgaccaaagtctgggctgacaacacggactacgtgcagaaaggcgatccgctggtcacgctcgatcggaccgatgcccaacaggcgtttgaaaaggctaagacccaactggccgccagcgtgcgtcagacccgccagcagatgatcaacagcaagcagctgcaggcaaatatcgacgtcaaaaaaaccgccctcgcccaggcgcaggctgacctgaaccgccgcatcccgctgggcgccgcgaacctcattggccgcgaagagctgcagcacgcccgcgataccgtcgccagcgcacaggccgaactcgacgtggcaatccagcagtacaacgccaaccaggcgatcgtgctgggcaccaggctggaacagcagccggcggtgctccaggcggccaccgaagtgcgtaacgcctggctggccctgcagcgtacgcagatcgtcagcccgattagcggctacgtttcccgtcgctcggtacagcctggcgcgcagattggcaccaccacgccgctgatggcggtggtcccggcgaccaacctgtggatcgatgctaactttaaagagactcagctggcgcatatgcgtatcggccagccggccaccgtgatcagcgatatctatggcgatgacgtgaaatacaccggtaaagtggtcggtctggatatgggcaccggcagcgccttctctctgctgccggcgcagaatgccaccggcaactggatcaaagtggtacagcgtctgccggttcgtatcgagctggatgaaaaacaactagcggaacacccgctgcgcatcggcctctcgacgctggtggaagtcaacaccaccgatcgcgatggtgaaatgctggccagccaggtgcggagctccccggtttacgagagcaatgcccgcgaaatcgctctcgatccggttaataagctgatagacgagatcattcaggccaacgccggataa

SEQ ID NO: 223446 - DNA, 282 bp, Klebsiella pneumoniae; identical to SEQ ID NO: 138026

SEQ ID NO: 223447 - DNA, 1068 bp, Klebsiella pneumoniae
atggctgatcagaccaatccatggggcagcgccccgtcaaccgacagcgccgcgcaggctgccgacgcctggggtggcgcctctactgccgcgccggctaatggcggcggcgccgactggctgcacagcgccccggcgccgcagccggaacagttcaatatcatggatccgttccataagaccctgatcccgctcgacagttgggtgacccacgccatcgactggatcgtgctgcacttccgtccgctgttccaggggatccgcgtgccgatcgactacatcctcagcgccttccagcagctgctgttggggatgccggcgccggtggcgattatcgtcttcgcgctaatcgcctggcagatctccagcctcggcatgggggtcgccactctggtatcgctgattgccatcggcgccatcggcgcgtggtcgcaagccatggtcactctggcgctggtcctcaccgccctgctgttctgcatggttatcggcttgccgctggggatctggctagcgcgcagcccgcgggcggcgaaaatcatccgcccgctgttggatgccatgcagaccacgccggcgttcgtctatctggtgccgatcgtgatgctgttcggcatcggcaacgtaccgggcgtggtggtgacgattatcttcgccctgccgccgatcgtccgtctgaccatcctcgggataaaccaggtgcctgcggatctgatcgaagcgtcgcgctcatttggcgccagcccgcgccagctgctgtttaaggtgcagctgccgctggccatgcccaccattatggccggggttaaccagaccctgatgctggccctgtcgatggtagtgatcgcctcgatgatcgccgtcggcggcctcggccagatggtgctgcgcggtatcggtcgcctggatatgggcctggcgaccgtcggcggggtggggatcgtgatcctggcgattattcttgaccgcctcacccaggccgtcggtcgcgacgcccgcagtcgcggcaaccgccgctggtacaccaccggcccgctggggcttatcactcgccctttctgtcgataa

SEQ ID NO: 223448 - DNA, 846 bp, Klebsiella pneumoniae
ttgaacaattggtcaccagagcatacaaaagacatcaaaagttggtttaagattgatacatatcgcaaatttgaagacctctcattgatccagttctaccatgagatatgggcccggaacttgttctttaaggagtatcgggaagagtttgagagcagaactcttatgggttacttctcaaagattttcagtggcaacccttttttaatcgaagaagggcaactgggatacatgactcctgctaacaaacttttccagcctccccatttttttctaacaaccctggatcgtctcgctgaaacgagcattattgcaatgcaacgtggaggttttctttggcatgaaggtgacaattattctataaacgcagagcttcgagaggtatcactttcagacattatgccagatcagtttacacgaacagtcatgttcgagatagatttggccagtggcacagacgaagagattgcagagtcgcttaaagcggcattaccgcaatggcgtaaagttaagggtattgatgaaaacccattggaatctgttcgttttggatacggaactatcaagaaactcatcagttatcgtgtaatacctatgctggatatcctggtgtgggcagccgttaaaaaaatccgtgtctctgacgacaggttatccagactactatatacagacgatgacgaagaaagcgaaatgaggcagtccagccaaatcaaagataccgacaggcctttggctcttaaatcctgcacaactgactttatccgacaattcaattacttcatgaacaaaaatagtcatttgaaagaaatgaaagttaatgatgttatgaaactatcggattga

SEQ ID NO: 223449 - DNA, 402 bp, Klebsiella pneumoniae
atgagtgagtctcttaaaatattaaacaacattcgtacacttcgtgctcagtctcgtgagttttctcttgaaaatcttgaagaaatgctggagaaactgactacggtggttgaagatcgtcggcaagaagaagttacatttcggaaagataaggaagaacgacaggccaagctcgaagcttttcgtcagcaactccttgaggatggcattgatccagcagaattgctttctggtctgagttcttcctctaagccaaaatccagccgtgaaccacgaccggctaaatacaaatacattgatgaaaacggtgatgagaagtcttggacaggtcaggggcgaactccgaaagctatcaccgctgctattgaaagtggtaagaagctggaagatttcgctatctaa

SEQ ID NO: 223450 - DNA, 639 bp, Klebsiella pneumoniae
atgaaaattaaacattggttagtatcatttttaataagcttcagtcatattgcttttgcagatactgtattagatgaggttactaaaagcgtcaatagtgtttgcctggctcctggtagcgaagggcaaaaatgggatgttcaggttcttgccactggtgatgttaaagttggacttaagtttgcaggaaaagtagcggctgatgcaaaggttgctcttacaaagagtgagtgggatggtgtacaacaagttcttagggaacatcagcaaatggataatgccagttatcgagattgtgtagaaaaaattacacctttatttttaggtaatatcaaagaagaacgaaacatatcctcacaaatattaaataaagaagaaagtgaactaaaactgccaataagtataatcggtggtggtcaaaaggtggtcttctctcctgattttattatagagatggaagaagcttctggcggtggagtgaataaaaaaggattatcaattatagttacacctgagaatggacgattatatcttactgaaggtgtgccagttaacgtggcaattaaaggtaagaattatttgcttgaatttagatttaataaaaagatgcagcctgtctatacgttaatgaaccaatag

SEQ ID NO: 223451 - DNA, 183 bp, Klebsiella pneumoniae
atgagatatttttattgtgataaatttgaaagtatgatgatctatgtcatttatcgcattagagttattatcaaacactccggtcttttttttctcatcatatatcttggtgcttttattctcataaactttcaattcatacttaatagtttcgcccgaataactgttataggggttttttaa

SEQ ID NO: 223452 - DNA, 675 bp, Klebsiella pneumoniae
atggagcagaacacttttgttgatcggtttttccacagcagcttggagctaacagatttcaggaaaactggtgagcgcgatattaatacattattcagctttctaaacaatttacattcattacaagacagattccgtgagcagtttcatagtaatatttcacagcacccggagtttaaattactgaggatattaagaaactatcatcatcatgtcggtgacgttgatgaatttagggtttacaatgttaggaatgaatttacacttagccattccgagatgattattatcccattatatatagttgccaaagcgatactcaacgcaaaaaaacggcataatgcagaaagagaaatacaatccatatcagagtttatcgatgattttgagtatatctcagcgaatgattcgtttttttcggaaaggcgccctatcattaacaatggtaaaacgtactatccaggatttgatatttataaatgtgtttacaatattacaaatatcattgctgacatctgtcgaaaaattcccgagctatcacaaaaaaaatgcattattaatttagacgacacatacactagtaaaaacaacatagaaaaacgtaatttattatgtcatgccggagaggttccattccttactactgaaggctatataatacctgaacaaaactaa

SEQ ID NO: 223453 - DNA, 720 bp, Klebsiella pneumoniae
atgcttaagaatttagcaaggatgaaacatgctattacggaatgggccattaaagagagcatattggatgatgctacttttttaacccaaaaggaatggaacgaccgtggagaaaaaatccacaacgatgcattaatggtcctagtaattgacggaagtgggatatttagtttgttgaacaacggttgtgacacaaccgaatttgatgatctggttgagtcatttggcttctggtatgaacggggctatagctggagccttggcttttaccctacggacaattatgactacagaaggctgaatggtaactatacatccaaacttctagatccgaggtggttaaggaaagcagcattagttaaggcagcagctggacaccagtgcgaggattgtggaaagcaaggacgccttgaggctcatcactgctattacacgacgatgagtcttggttatgagccatgggagtatccacttagtgcatttcgggctttgtgtcctacctgccataccacacgacctattcctgaaataagggcaagggcattccttgcacgactgaatcagtcccaactctcaagactactcgatggcttagataatggcttcaaccgatttgaagccgattcctttattgactttatgcggaaagctagttttcataaaacgcatatggatgaagctcttttacttctgaaaaaaaacaccgatatatatgactaa

SEQ ID NO: 223454 - DNA, 618 bp, Klebsiella pneumoniae
atgtcagtatctaaagatttcctgctttcggtatatgagcggtgcaatgaacatttgaaagaacaatcgaccaagcgtgatcaggcaatagctttttatttggttgttatatcgttttatttcggctcatactcagcaattagcaagttactggtaagtccgtactcccctattttttttaatgtggttatatgtctgattagtggtatgacaatcagaacgttgtctggtttacgttcatggcatatgcaatatgctaactcggcgttagcgcttaataaagtgatatcgaaaaacatctttgaattagatgctcttaatttagagattaagtctttcttcgctaagaaagaaaaggaatatcatgaaatgtcgcttgctaaaattttctctggtattgaaaatcgagtcattcttgggatgactcttatttccgggtttccggttgtgatgttagttaaagaggttatgtctttactcaaagtaagtaataaagaaatcatagtgttagttgagtgcgcgttttacctggcatatgttgtatattatttctacaatactataatgataattcgcgagtcagcaaatcataaaacttggattgtaaattttgaataa

SEQ ID NO: 223455 - DNA, 645 bp, Klebsiella pneumoniae
atggaagtctttaaatatttcaaagagaagtctcacaaggatgattatctaaatggtaaaatcaggctaggcactttgaattattacagaggaattgaaaatgaaaagcaaggtgatgttttagaggggctttcaaaatataaagtgccatatcaggagttcgataagaccgcatgggatgaagtcatcaaagttcaaccacaattcgcacaacttgttgaagttgccgagggtggaacagttattatgcgagactgtgaaacagaaagctactgccatgatgaatatatagtatgcgcaacaactgtcagaaatgatgactatttcaaggaggactttggggagttctgtatcaaaatagaacaaccagattttttttgtgatttagttgccgatcaactgtgcttaaaattcaaaaaagatatcagatatatcaataaacctgtttcatatactaaagttgagttaacgaactttttgcagcaacaagatcctgtttttacaaaacccaaaataccttatgaaggtcaaaatgaatttcgattcttttggttaatgaacccacttaatgattctggtgagcaaacgctcaccattgacattggtcagaactgggctaaaaaaatttttgtagatttgaagtaa

SEQ ID NO: 223456 - DNA, 486 bp, Klebsiella pneumoniae
atgcatataacctttaaggatattcagcagcgacataatgaattgcaggcaaaattcagtcatcgtaaatctgaattgcaagaatcggcgagcaagttagtttatgaatatgtagactctctatccttgccatccgagacatggattgatgccaataaagtacgccgcccatatgtctgtgtgggtaaaattaacgaaaaaggttggttccagcagatgcctattgctggatttgatctcgataacgagtacagattgaacttcaaaatctcgaccgtcgttgacgactctgagtatgatggcggctcagatcacttagtttccgtatccatgtggaaatccaatgggcggttgaatgttgagttagatggaggtaaaaaatcattcttggtttcagatccaagtgataacaatgaattctttgaagtttgtcgtggtatcaaggagttagtaattgcaggtgttactgaccctcgcttagattga

SEQ ID NO: 223457 - DNA, 348 bp, Klebsiella pneumoniae
gtgaagatgatcattttcgctttgctcgtgctggtggctgtgctcgttctgttacttctgcgcaaatatacccggctggagttcgtaggccatgccagcctgctgctgaaaacttggtctgtaaagcttggagctatcggcgcgctggttggtgtatgggcgcagtcgttcccggatgctgcgctgcacgcctgggcgatgctgccgccggatatcaaaaatatcctgccgccaaacatcgttgcgttgattagccctgcgctggtggtgctggctgtgctatcgcaatacgtacgtcagccagcattgaaagaaaaggccgacgaactgaaggagccgcagcagtga

SEQ ID NO: 223458 - DNA, 405 bp, Klebsiella pneumoniae
atgcgagacctgcccagggaaacagcaaagcaaatcctgctgagcgattactggaccggcccccggttcgaccaggtagcgagtttgtctacgttactggcagaggaactttgcgacaccggcgtgaacatggggcccagcgtcgccagtaagttctttcagcgctggctgaccgcaatgaatatgcgtggaaagctgtatcccgatctgatcccggatggtgccattggcccccgaaccatcaccgcgcttaagggatatctttccgcccgcgggaaagagggtgaacaggttctgttgcgtgcgctgaactgcagccagggtgccagatatctcgaactagctgagggccgcgaagccaacgaggattttctctacggctgggttaaggagcgtgtcctgtga

SEQ ID NO: 223459 - DNA, 312 bp, Klebsiella pneumoniae
atggcaaagcatatgcaagacaaagaaagcatggccggaatcacatggctggctctgctgatcattgctggctggggcggccttgtccgattcctgatggatgtgaagcagggaaaagcgaaatggagttggataaatgcttttgcgcagattgtggtttcggcgtttaccggggtcattggtgggctcatcagcattgaaggtggcctgagtatttacatgatactggccactgccggtatcagtggcgctatgggttccgtagcgctcacgtatttctgggaacgaattaccggagtgaaagcacaatga

SEQ ID NO: 223460 - DNA, 822 bp, Klebsiella pneumoniae
atgaatttctcttatactaaacaagatggactgacaaagaagtgtcttgtcagaggctttaaagttaacacagcatctactgatattctttttgatcaaatagcaaagtctacaacctttcagataggctctgtcatcaaaatcagtgcagataaacaccttatgctgaaggcatttgaaacaaacgccaattgccactatcttcatgtagccctttacaaccctaaagcacaagtttctataactcctttaaaaaaagctgcaagcgatttactggatgtagagaaccttgatgatcttcatgcgttcttaatgataaaaggcaaccagatagcatcacttatgcagatctcaactaattggtgcgaagttaagattgctaaaatttttaatcaatttggtatatcgataacgccaacagccattctaaaaaacaatgttattcagaaaattaaagaggacaaattaaaagctctgcatctcaacattgacgttgatgaatctgatttcgttcaagcaccaagtgtgttagagtcaatattcaaaaaagaaccaacaattagagccaagggtatctctggtcacttaacaatagatgctaaaggtaatgcagaattagctcagtctattgagaataatcctgctacatgggttaatgatttggacagagatttttatattgaaacaaaaaaaggcgacaagttttatagtgacgatttgaaagtaactaaggtttactttacagtaccatatggttctaagtctataaatgcgaaatatgctaaagaaatcctagaggattttgtagcaaaagagctataa

SEQ ID NO: 223461 - DNA, 486 bp, Klebsiella pneumoniae
atgctaaaaaatattaacacaacagggctgatcgtatcagcgctaaacatcatagcctcgttaagtttctcgatttttttaactggaagcctaactaataacactgatgcattaaatcttgtagccaatgtattctcaatactatctggttttttgcttttagtaataactatgtcaggtgagaactcaacgttgcttagtaacatgagcgcactggacgcggcaaatcaagaaagaagattcttgatgcgctttaacaaatactacgctctttttttactttacatactcacattggctttgatttttatattctatttgataacaaaagataaaaccaataactcagcaatattaacgagcttaaaatctataattggccattcaattgcatttctaacatgcttctcatttatccagtcaacattcatcccacttaaaataaaagagctatttaaggaaaaaagagaacttaataagaagtaa

SEQ ID NO: 223462 - DNA, 981 bp, Klebsiella pneumoniae
atgagagcactactaacccctgagattgccccacgcatgggcgttgttcttattcgcccaggtgctgatctcatgccgatgttcaggagagggcgggtactgattgagcctgcaccggaaaaatacagcgactacgcaaccggcgccatccctcccgccacgcagccactggcagaagacccggttttgaaaccagtcttcgaaaacaaagacgtcattctgcgcgcgggtggtatcagctcgctggaggccgagctggagcgtcgttttgaatgccagtacccgcacggttcgtggcacagcgaaaattttacgctgtttcggcatgagcctggcagcatccgcctttgctgggcctgcgataacctggtgcgtgatcagtacacagagacgctggcaggcattgcgcgtgagaacctggtatcctggctgataacggtcatccgctcacagctggggttcaacgaagaccatcaactgacgatcccagagttgtgctggtggctggtgataaacaatctggcgcacgtaatccctgaatcgctggcccggaaagccctgcgattgccggaaataaagcatcaaccagtgatgaaggagagcgatattgtgccggagccagcggcgagcgaagtggtgcagaaaaagattctcggtcttcgcgtagatcctgaaacgccggaatcattcatgctgcgaccaaagcgccgccgctgggtaaacgagagctggacgcgctgggttaagtctcagcagtgtgtctgctgtaacaaacaagcagatgatccccatcacctgataggccacggacaaggtggaatgggaacaaaagcgcatgacctgtttgtgttgccgctttgcagagcgcatcacgacgagttgcacgctgacaccgtggcatttgaggagaagcacggctcacagctggagctgctgtttcgatttctggatcgttcgctggcaattggcgttctggcttaa

SEQ ID NO: 223463 - DNA, 360 bp, Klebsiella pneumoniae
atgtcttcatgttacgcagtagttttaaacggtaataccgaaattaaatacttcccgttccacgactcacgtagcgctgacgatgctgaagctatggcggatgagtggcgctacaaggcgatcgacgctattggagcggaagagtcttctcgcttccacttgcgcgtagttcgcccaaaggtcgtttttcagcttccatccggagccgtggtggagtgtgaccttgatgacgtagacatcaacccgcgagcctgcgccgacctggattaccacctctgcgcattcgggttcaatcgtggtcttgactattgcggtaactgggacttagacggcgctgaaattatcgaatacatcgcataa

SEQ ID NO: 223464 - DNA, 789 bp, Klebsiella pneumoniae
atggctaaagactcaaaggttgtatacggcgccagcggcaaaacgaacgttttaacgttcgaacctgaaagcctgcatctggttaccgacaaaactcacccactttacgatgaacgggtccaccttcctatcgacgaaggaatggttctgaacataaaagagctgggtgtactggaacctatcatcgtctggaaagaccctgaaacggggctcacctgcgtagttgtaggccgtcagcgcgtaaaacataccctggaggcaaataaactccgtctgaaagaaggcaaagacccactgcttgttcccggagtcgttaagcgcggatcagcaaatcagatggctaaatacatggtcagcgaaaacgaaattcgccgacctgatacaccgcttggccgggctaaaaaaatgtcagacgcgctcgaccgcgggctcgatgaggacgacattgcggtgttgtttggctgcagcgttcagaccgttcgtgcaacgctttccctgctggacgccacccaggctgtaaaggatgccgttgaatccggaacggtcacagtaacccaagctcgtcagctcgcatcactggaaccagaagcccagcgcgagaaggtgaaagagattgagacggcaaccgctgggactagaggtcatgaaaaagcccgtcggcagcgtcaggttctgggtgaagcaaagccacgcctgaaaacccgtaaagaaattaacaaagccctggaatctgctgagggcgagtatgccagcgctctccgctgggtactgggggaggaaacattatga

SEQ ID NO: 223465 - DNA, 240 bp, Klebsiella pneumoniae
atgactgatatcacccgactgttagccagcctcaaacgccgttcagcccacgtaaaagagtttggtgacgacattacgtttgtaaagctcgaagacctcgacgcgctggtagaagcggttgaactggcacgaaacaaagccgcagattgggaggaaaaagcaatcatcaactatgcggaacgcacagccatgattcagcatattgccgaactggagactaagacagaaagaaaaaagtag

SEQ ID NO: 223466 - DNA, 951 bp, Klebsiella pneumoniae
atgaatattagagaagagtttaaatttgaagaagggcaagatgtaataatagaatttgagcgtattctaaaaaataacgatattaatgtaagtattgactcagatatggagtcaaaattcttatctgtctttgatattctttttcatttcaacagtggtaagcctctggattcaaatgttgacaaacgggctttgtttagggatttttctgcactgtacgatctcgctttaaaagttgtcaacgttgaaagtaacagtgcttttaatcaacttattccgcatttgaacttattgaatggttgtgcaatttctcaaaacacaagttctctcattacggatcaggattctaataagattattgaactctatctagcatgtttatgtatgagattaagcaataacgtatcattagatcatccgcagaactctcgtggtgataatccagatgttattgcggaaattaacagagtaaattgggggtttgcatgtaaaactgttcatactataaatcctcaaacgatatatgagaatattaaaaaggcaatagatcaaatagataagtcaaaatctgatgttggtataactgttattaaccttaagaatgttatagatcataacaagatatggccaaaagatactactttcctatctgtcgataccccgctgaaccaacttgttaacaatattgatatggttaagacatcattgttagagactattggtaaggatgaactcttgagtgtttttgaagggaaaaagtcattgccaggtgttatttttattgggcaaagcgtatcctctgttttccttccggaaacaaattcaccaactgctacaagattgaatgtaatgcgtttgttttctttggatgacggagggtttacagatgatcaatttaatactctgaatacaattaatcattacatgcagttggcaaatcgtgatttttaa

SEQ ID NO: 223467 - DNA, 267 bp, Klebsiella pneumoniae
atgaaaaagacccgctataccgaagaacagattgcgtttgctctgaaacaggccgaaaccggcacccgcgacggggaagtctgccgaaagatgggcatttctgaagccactttttataacgggaagaagaaattcgccggtctgggcgtgaccgaactgcggcgtctgcggcaactggaggatgaaaatctgcggctgaagaaactggtggctgacctgagtctggacaaggagatgctgcaggaggtactgaaacaaaagttctga

SEQ ID NO: 223468 - DNA, 1008 bp, Klebsiella pneumoniae
atgggcaacagaatgtggatgattcgtggcgatggcggcaagctctatgacgattttcgcgataagcaaattgtaggcatcggttggtctcagctggctccattagtcaaacccggcctgtcccgagcccagttactggccttataccaggaggcagatcccttaacaaagctgggaacagcccgttctggtgcatcgcaggtctggcgttttgtgaatgagatccaaaagggtgattgggttattacctattcgccagccaatcgtacttatctgctaggtaaggttacatctgatttccagtaccaccctgaatgggtagaagaggggatgggaatcgctcgacaggttaaatggaatactgaagaaatcgatcgcgatcgattgtctgttgctaccaaaaacacattgggctccacgctaacggttttccagcttccagaatatgctctagaagagcttttgcaggataagaaacccactgcagatgtaattactcagaatccaattgctatggatgaagatgaagtcgtttctgatccgctccgcgatatggaaatgctggcgtttgagggtatcaaagatcgtatcaactctcttgactgggacgagatgcaaaatctggttgccggagttttacgcagtatgggctataaaacgcaggtctcacctgcgggagccgatcggggtaaagacattattgcttcacctgatgggttcggttttgaaaatccgcgtatcatcgttgaagtaaagcaccgcagggaacagatgggaagccaacagatccgtagctttattggcggtcgccataaagacgatcgcgggctttatgtcagtaccggtggttttacaaaagatgctcgctatgaggctgatcgttcgacgatacctctgacgctctggacacttgatgatcttgtccgagcgcttattgagaactacgagcaagtcgatatcgagaccaaactcttggtgcctctgaagaaaactttcctacctgcctga

SEQ ID NO: 223469 - DNA, 3288 bp, Klebsiella pneumoniae
ttgagtcaatcagaatgcatttcttgggtaaaatgtacttcctggctaagtaactttcttaatcgtagaggattgagacaacctgatagccgtcccctatatgaatatcatgcgaccaatgatgaatacaataatctaacacaactacttcgtgcagttggtcaagtacagagttatatcgatgataaaggttacgctgcctgttttgtccttttttgctctgaatggtatcgcagagattatgagcgccattgtggttggatgtgggaccctatatatagagcattgggagtatcattaacgtcgactgaattaaggattattatccctaaagggatggaaggttactggaaccgcccaatccgattttacgaatcggaacgacgtaattttctcggaacattgttcagtgaggggggattaccattccgcttactgaaagaatcggatagccattttcagaatgtattctcccggattctcaatcaatatgggcaggcacaactggcaggattttccatactttctctagtaagaactgtcatagaaaaatcagccctgccaactgtttttagcgaagacacttctgtagaactcatcagccatatagcggaaaaactcagctcgctggttctaatgtacaacctgagcaatcataccgaacccgtgaagcagcttgataaagtgcatccaaaatggcgtgatgagttccctatgcctttggatgatgaaacaggtactcgctttcttaatgggttgctatgtactgcctccgtagaggctaaatcccacttacaaaaaaataagggttccggttgtcaattctattggtcggaaaaccatcccaatcaaatccaggcgataatttcgctgcctgatgaactcaccttcccaatcatcagcactccctcaacgacgcgatttgaacttgccatttatgaagatggtgaagaagtcacctgtctcggccccgcctatgcatccctggagaacgcccatgccaaagttcgcctgcgtaaaagtgagtcgagatttgtcagacgccagccagctgcgagcttaacgattgttgcacgaactggaggaatgattgttggcaccataaaacttgaagatagtgaaatcgccgttggcgaggtaccacttacttttgttgatgatgaggaacgctggttattgcaagggcaagcttcttgtactgtacgtaatagcaatgttcttattgccttacctcaagaaaaaaccactatttcagggtgtgaaggctctccaggtacagcgtcgttattaggactcagaacactgtccgtaaaaggacgccaagatataaccatttccggagatgaaacatacaggatccgcaccgggagggaacaatctaatcagagcggatttgattttgatggaaaacatgttacctggaattgccatcctgatgaaacattccttggtgtacctaaagttacggcgaaaaacctgaatgctgaagatatacaattcaaacgttacctgagtggcatatcgttagatgaatgtcaggtacaagagatgatgggtacgcaatatgtttctgtcagaaatactcacaatgaaactctactgcgtcgaaaaattgggatcttgccggcagattttaacattgaaataaagggtggtgagctagccaatgaaggttccattgttatctcaacgcaacatccctgcatgtctgtcttaaaagataaaacattagaggttgctcgcaaacgctcagcaggacaaacagaaatattacttaaagcagaaggaatacctcctgcgtttgtctctttgcagatttacccaaatttgggtgcagccccagtagagatgactctacctttccctgcaaaaggttgcctggcccttgatgcaaatggatgcactctggataaaaatattactctgcatgatttgctgggttcgagagcctttttatttggtaaaaatggcgatccgacacgtttttcactggaattacatttacgttccaaaagtgggttacaggcatggcatgaatggtgttataccgcgggggaacaccccgtcgaactcaatttatacagcctgagagagcatattgaaaacttactgtctcttgagacaggaattgaccaggttgttgagatgcaaatcaaaggcgcaggtgctgtaatgagctggcagattcgccgctataaatacagtttacgctatgattatgaaagagaacttctcgtcagccagtcaacccattatcgtaccgagcaaatgtcttcacctgtcatcatgttattgagtgagccggagagaaaaatcaccccattatcatcaagaatgagcgaaggtgtaccgacaggtgaatatgaactgagttcggttattaacaaaaatgggccgtggttagtcgtccccaaacagggtgaggaaatggcgtttcgcccctgcttcattcgtggggaaccgtcgttacctgtggatgaaagtagtattcgttcattgcagaaagcgacccagctttttaatccccagtctgaagttaataccattacactggtacttgaacagatggctaacgatcccgctcattccggctggcaatttatgcgttgcctgtacgaccaatttggttatctgccgctggcaacctttgaagtttggcgtgcgctagtacagcatccacgagcactggcgatgtcgctatttaaatttgagatgtcagctgagtatctgagccgcattgaaaatgagttccctattttatgggagttcttccccatcttcgaaatcaaaactgcagccgatcgatttaaattgttcctgagccaaaagggtgcaccggaagaaacccagaatttactggtgaagagcttgtatcagcgattggggctcgtttttccgacatatgccgacgaaattgagaaatggttaagttatggacaattccctccgcccattccagagttcttcattcgcgagtggtatcaggagcttttacgtgagcatagtgaagctcgctggccagagtacggcagcaagcggctgcatagctggatgacatcacaaaaaaatccagtgatcagcattaatcctgacgcagaataccgctattccgttgcctggttacccgtcttcgccgcagctgtagcaagcggcaatacctcttttgaagccgtatttgaccgtaaaccgggtgccgtatttttcctgagacaggtcagggacttcgattcccgctggtttaaggccatcttccagtgcagcctgttgcgttattttgctcaaaaataa

SEQ ID NO: 223470 - DNA, 6321 bp, Klebsiella pneumoniae
atgactacacgctatttttcgtcacttattgaacaatcgttgtctcgttcaactgaagcaacactgagtatcatgggggtcacaaacccgcagttgcgtgagcacctcgcgcaacaaatgggcgccgattgtgggaaatcaggctcattccttgcttctcccgttttccaacaaatgtttggctggaaagcgtcaaacaaaacgatgcgtagcctgacggaaggcaaggcattgctcagtaaagctgtggttgattcgctggatgatcagaacaatggacgctatcgttttggtgctgactggaaaccctttactcaccagctagccagttggaaggctctgctggaaaaaaaacattctgtggtagtgaccagcggtacgggttcaggcaaaaccgaatgttttatggtgccggtgctggaagacctctaccgggaattacatgaaaatggcaacaacccacttatcggcgtcagggcccttttcctctatccacttaacgccttaattaattcgcaacgtgagcgcctggacgcctggacacgtggttttggttccggaatccgatactgcctctacaacggaaataccgaaaatctacacgccgcagtgaaaagcgaacaggtaaaaagaccgaatgaagtactctcgcgcgaaaaaatgcgtgaagaacccgctccaattctggtgaccaacggcacaatgctggaatatatgatggtccgccagatcgacgctccaattatccagcaatctaaatcacaaaaatcattacgctggatcgtattggatgaagcgcatacctatgtcggctcgcaggccgctgaactggcgctgcagttacgccgcgtgatgacggcctttggtgtgactccagatgatgttcgctttgtagcaacctctgcaaccattgccggaagcgatgccgaaaagcaattaaaaaaattcctctctgaattatccggtataccgcaagagcgcattgacgtactggacggaagccgggttattccggaactggaaccatgcaaacacgtttttattccgttagaagaaattgagcaaatccctgatacagacatgaaaggcgtaagcccagagcgctttgatgcacttacgcattcacctgaagcgtattacttgcgcgacatgctagttactcaaccgaatccaatgaagttggatgatatgacgcagcggttgaactcgctaacaaaacagcattatagccagcaggatgtgttgcgctggattgacgtctgctctggcacacaacccaatactaaggatcccgcatttcttaaggtcagggcgcacatattccaacgcaatacccagggggtgtgggcctgtgttgataaagaatgcagattaaagcacggtaccccgctggaaaagggttggccttttggctatgtgtatgtgaacaaacgccaaaattgcgattgtggaagcccggtttacgagctggcattctgtaatgaatgtaatgagccacatcttctggcgcgggacaaaaagggaaaacttgtccaatgggaaaataaaggcggtgatgagttctctttgcaagatgatgtgcatattgaacatgatgccgcagaagaaaaagttgataaagagagtcgttttcagcccccactcattatcgccgcagagaagaccagcgcggcgggttatacccaacagcgtctggaccgtcagacgcgtcgtattggtgttattaacaatgacagcatcccgctaattattaacgacattgaacaagtatgtagtgccagtagctgtggctacagaggcacgagcggaaaacaaccgttccgccgtgccttattaggtgggccattttacgtcaccaatattgtgccaaccgttctggaatattgtcaggattttattagtgaagaaggaaaagagggcgtcggacctgattcgttaccaggtcgaggccgtcgacttattacctttaccgacagccggcaaggaacggcccgaatggcggtgcgcatgcagcaagaagctgagcgcagccgcttacgcggtagtgtggtcgaaatcctgagctggcatcaacgaacacagacttctgcaacaccgaatgccaatgccgatctggaaaagttagcgacgagggcaaaacaggcccgccatgaggcgaaagaatatagaagctggggaatgccggaacaagcaaaactggctgaagcgcaagccgaacagcttgaacaggctattcaggccgcgaccggtggcaaagctgcgactattctggtttcgcggacctggattgaaatggttaatgaacttaaagaaaaagccgatattcgcggccctattctgcaatataaccactatctgaagcctgaaattttcaatgagaatggcgggccgctaaagctttctgaaatgttgttattccgggagtttatgcgccggcccaaacgaactaacagcctggaaacgcagggattagttcaggttggttatcaggggctggagaagagccataagatgccggtgcattggcaagagaaagggctgacgctggatgactggaaggattttcttaaggttacgctggatctgtacgtacgtgaaagcaacttcacacaactggacgatgagttgaaaaactggattggtagccgtttttcatcgaaattcgtccgtaacccggacacaaaagatcccgaagataatcagaacagacgctggccacaaattcgtaatggcaatatatcccatcgtttagtgaagatattaatgcttggcgcaggattcaaaaccgtaaatacggcgacgatggatattatcaatacgtggctgaaagaagcgtggacccaacttaccggcccacttgcagtgctgaaacctgatggtaaccgtttctatctaccaaaagagcacatgactttttctttaatcacagatgcctggatttgtccggtaaccaataagattctggatacggcctttaaaggcttaaccccttatctgcccacccacatttcgtttgaacaccttaccaagacacaatatgacgcttttgtcgcgcaaaaggtcaccatgccggaaatctggaagctggatcgttcgcaagaagactacgctccgggtctggcgaaggtacgtgactgggttagtaaagagccactaatcgcacaattacgttcggaaaacgtctggacggatattaacgatcgtgtcgtggaaggcggattttactaccgcacagccgagcactctgctcagcaatcgtcagaacgtttgcaaagctacgaaaagatgttcaaaaacggacagcttaatgttctcaactgttccaccaccatggaaatgggggttgatatcggtggcattaccgccgtggtgatgaacaacgtaccgccacatccggcaaactatttacagcgtgccgggcgagccgggcgtagtcaggaatcacgtgcgatttcttatactctgtgcaaaggaaacccgcacgaccagcaggttttttccaacccactctggccgtttgagaccatgatccccgcgccgatggtggcaatgaattccgcccggttggtgcaacgccacgtcaatgcgttattactgtccgactttttatgtcacgtcattggcgaaacagataaagaaaaaaccagtcttgatagcctctggtttttcggtgaagacgacgggcaatcaaaatgtgaacactttaaagtctggctcgagcgtccggttcttgatatcgacgcggcgctggaacggctggtgaaaggtacagcattacatggcgccagacccgacctgttgcgggataaaacaatccatgcgattacgttcctgcaacagcgatggctttccgtctaccgcgatcttgtagcccaggaacgagaatcgcagccgcaaacgccttatcgcaagcgcatagaactggagaaaaaacgacactgtggcgagtatttgctgcgtgacctggcggccaggactttcctgccgggatacggcttcccgacagatgtggtgacgtttgataacttcactatggaagactatatccgtgaaaaatcacagaaaagccgggataaaaaagatcgcgaagataatgtgtcacgttataagggacttccctcgcgtaacctgggggttgccatccgtgaatatgcaccaggtgcagagatcatactggatggccgggtcttccgctctgctggcgtctcactgcactggcacaatattaatgccgataccaatgaagcccagcgtctggattgcgcctggcgctgtcacaaatgcgggaccataggctatgaagaggggttgagcagttccgggacgctattttgcaccaacagcgcctgtggtgaaaaaatcatcatggataatcgtcgccaggtgctgcagccagccgggtttgtaactgatgcacacgcgccggtgacgaacaatattgaaaccatgaaatttatcccggttgtccctgcctgggtatttgttaaagcagaacccgtatcgctacctaacccgataatggggtatatggcatctggcgctgatgggcatgttttccagcaaagccttggagaaggtgggcatggttacgcactttgtctgagctgcggtcgcgcagagtcgatgttgaacgcaaacgatgcgccgaaaagtatggaagcccactacccgccgcgtccgggaaaagcagatcgcgacagccagaatcaacgtctaatttgccccggctcgacggcgctcatgaagaacgtcacgctgggggcattggcacgaacggatgtctttgaaatggttctacgcaagccgcaaaacggtgaatatctcccggatagcacggaagaagggcggattgttgccatgactctggcggtagcactacgtcaggcgctggccggggttttgggtatctccgcggcagaactgggctacgccgtgcgtccggtcagactggaagatggacaatcagtattagccgttcaactctacgatgtgattagcggtggtgcaggttttgcatccagtgcgccaatgcacattgaggccattctgttgggaatggtgaagcagttgggttgccaccactgcgatacggcatgcagtgaatgcctcctcgactcccagactcgccacgatcacgatttgctggatcgtaaagcagcacaggcatggcttggtgatgacttctcgtactacatcggtttgccggatgatgaaacattctcgctaccggatgcccgatattgcccgggagccattggcgatacccttcgtcgggcgattaacgagggtgctgaaaaactcacactgtggatgaatgggccactcaatgagtgggatctttatgcccgtcaattccgggcggctattcagaactaccggattaaagacaatgttgcggtcgaccttgtcattcctgctggcgtcgatgatccggagctgttgcatgagctttcgcagtttactgctttgggcgtgcgtttgtgtcatagcgaacaggctctggaattgccgattgttgcgcaagtcgcctttgccgatcgcgtaatgacgctggcttcacgcagccagcaggcaactatcccagggccaggctggcacctgaatgacgaactggtcgttcgcagcctcggctataacacggtaaaactgaacgagtttgttttgccggggaaagcagcgaacgcggttgagcgtgtcaaagacatagagattcataaacagttaaatggtccactttcgcagttcggacaacgcttctgggatttgctgtgtaacaaccatgaagaagcacagtcactgatgaaaaaccagcgaatcacaagcgttcactataccgatcgctatctgcaaaacccggttgcgctggcactgctgggggcgatactgaaaccgctaaaaacaaagctgaccgatgacgcggagcttgagcttgatactctgtttaagcccaaagatcgttcaggaaatcgcccctctcatgactggatgagcgaagcggattttcaggatttcgccgaccagtggtttactgcggcaatgggcagagcggtagaactgacggtgttcgattcgccacgtgatattccacatcatcgtaagctgacggtgacctttgaagatagtcagatgttgaagattcgcttcgaccagggaatgggatactggcgtatcgacttcccgtatgcatggcgtaactttgactttactgatgatgtgacttatcagctagtaaaactggcgcaagcctgccaggagggcaaagtccttaatagcgaggaaagctgggcaacggatgtgctggtagaggtgatgccgtcttaa

SEQ ID NO: 223471 - DNA, 312 bp, Klebsiella pneumoniae
atgtcagatataaaatcttatccaattcccttaccacctctccaagaacaacacgaaatcgtccgccgtgtcgaactactcttcgcctacgccgacaccattgaaaagcaggtcaacagcgccctgacccgcgtcaacagcctcacccagtcaatcctggcaaaagccttccgcggcgagcttaccgctcagtggcgggctgaaaacccggatctgatcagcggtgaaaacagcgccgccgccctgctggaaaaaattaaggccgaacgcgccgccagcggcggtaaaaaaacctcgcgtaaaaaagcgtaa

SEQ ID NO: 223472 - DNA, 276 bp, Klebsiella pneumoniae
atgtgggcagtctacaatatgagatgcaacatgactcaattgttgttcttgccaatggcgatttccatccagcctatctgcaagttttccattcactgccgcagccagcaccgcctgacgaaaacgtttcaggatttgtgggatttgctcaagacgtgctttggtgctgtctacctgcgccagcagtatatcgagtttttcggcgatgattttttgttcggaaaaaggagcaaaacgaaccgggatcttccgcatatttgcttgcgtaagttttaa

SEQ ID NO: 223473 - DNA, 1590 bp, Klebsiella pneumoniae
atgaacaataacgatctggtcgccaaactgtggaaactgtgcgacaacctgcgcgacggcggcgtctcctatcaaaactacgttaacgaacttgcctcgctgctgtttttgaaaatgtgcaaagagaccggccaggaagcggattacctgccggaaggctaccgctgggatgacctgaaatcccgcattggccaggatcagatgcagttctaccgtaacctgctggttcagttaggctctgatgagaaaaagctggtgcaggcggtcttccataatgtcagcaccaccattgagcaccccaaacagttaactgaactggttagctatatggattcgctggactggtataacggtagtcatggtaagtctcgcgatgacttcggtgatatgtatgaagggctgctgcaaaagaacgctaatgaaaccaaatctggggcaggccagtactttaccccgcgtccgctgatcaaaaccattatccatctgctgaagccgcagccgcgcgaagtggtgcaagacccggctgcgggtacggcggggtttttgattgaagccgaccgctacgtgaagtcacaaaccaacgatctggatgatcttgatggcgacacccaggatttccagatccaccgcgcgtttatcggcctcgaactggtgcccggcacccgccgtctggcgctgatgaactgcctgctgcacgatattgaaggcaacctcgaccacggcggcgctatccgtctgggcaacacgctgggcagcgacggtgaaaacctgccgaaggcgcatattgttgccaccaacccaccgtttggcagcgccgcgggcaccaacattacccgcaccttcgtgcacccgaccagcaacaaacagctgtgctttatgcagcatatcattgaaaccctgcaccccggggggcgcgcggcggtggtggtgccggataacgtgctgtttgaaggcggtaagggcaccgatattcgtcgcgacctgatggacaaatgccatctgcacaccatcctgcgtctgccgaccggcatcttttacgcccagggcgtaaaaaccaacgtgctgttctttaccaaaggcacggtagccaatccgaatcaggataaacactgcaccgacgacgtgtgggtgtacgacctgcgtaccaatatgccgagcttcggcaagcgcacgccgtttaccgaacagcatctgctgccgtttgaaaatgtctacggtgatgatccgcacggcttaagcccgcgtaccgaaggcgagtggagctttaacgccgaagagacggaacttgccgacagcgaagagaacaagaacaccgaccagcaccttgccaccagccgctggcgcaagttcagccgtgagtggatccgcacggcaaaatccgattcgctggatatctcctggctgaaggataaagacagcattgacgccgacagcctgccggagccggatgtgctggccgcagaagcgatgggtgagctggtgcaggcgctgggcgagctggatgcgctgatgcgcgagctgggggcgagcgatgaggcggatgcgcagcgtcagttgctggaagaagcgtttggtgaggtgaaggcatga

SEQ ID NO: 223474 - DNA, 3513 bp, Klebsiella pneumoniae
atgatgactaaatccaattttgagttcctgaagggcgtcaacgatttcacctatgccatcgcctgtgcggcggaaaataattacccggatgatcccaacaccacgctggtgaaaatgcgtatgtttggcgaagcgacggctaaacaccttggcctgctgctggatatccccctctgtgagaatcaacacgatcttctgcgtgaactgggcaaaatttcctttgttgatgacaacatcctttctgtattccataaattgcgccgaattggtaaccaggccgtccacgaataccataatgatttggatgatgctcagatgtgcctgcgcctgggtttccgtcttgccgtctggtattaccggttggtaaccaaagattacgactttcctgtgccggtttttgtgctgcctgagcacggtgaggatcgctaccacgccgaagttctcaccctcaaacagcaactggaacagcagacacaggaaaaagtacaaagccaggcagaactggaagctcagcagcaacgattaattgcactcaacggctacattgccgttctcgaaggcaaacagcaggaaaccgaagcacaaaccaaagcacgcgtggccgcactggaagcgcaactcgccgccaaaaacgccgagttagcaaaacaaaccgaacaggaacgcaaggcatatcataaagagattaccgaccaggctatcaagcgcacactgaatctcagcgaggaagaaagccgcttcctgattgatgcccaactgcgtaaagcgggctggcaggccgatagtaaaacgttacgtttctccaaaggtgagcgtccagaaccgggtgtaaataaagccattgccgaatggccaactggcaaagatgaaaccgggaagcaaggttttgcggattatgttctgttcgtgggccttaagcctatcgcagtggtcgaagcaaaacgtaaaaatatcgatgttcccggcaaactcaacgaatcgtatcgctacagtaaatacttcgataacgcgttcttacgcgacacgttgttagaacactactctcctgatgaagtacatgaagcggtacctgcttacgaaattagctggcaggacaccagcggcacacagcgttttaaaatccccttttgctactccaccaacggtcgtgaatatcgcgcggcaatgaagaccaaaagcggtatctggtatcgcgacgtccgccataccaccaatatgtcgaaagcgctgccggaatggcatcgcccggaagagctgctggatatgctgggcagcgacccgcaaaaacagaatcagtggtttgccgataaccccggaatgagcgaactgggtctgcgttattaccaggaggatgccgttcgcgcggtagagaaggccattgttaacggccaacaagagatcctgctggcaatggcgaccggtaccggtaaaacccgtaccgccattgccctgatgttccgcctgatccagtcgcagcgtttcaaacgcgtcttgttcctggttgatcgtcgctcgctcggcgagcaggcgctgggatcgtttgaagatacacggattaacggcgacacttttaacagcattttcgatatcaaaggattgactgataaattcccggaagacagcaccaaaattcacgtcgccacggttcagtcgctggttaaacgcacgttgcaatcagatgaaccgatgccggtcggccgttacgactgtattgtcgtcgatgaagcacaccgcggttacattctcgataaagagcagaccgaaggcgagctgcagtttcgcagccagctggattacgtttccgcctaccgtcgcattctcgatcacttcgatgcggtaaaaattgccctgaccgccacgccagcgctgcacacggtcgatattttcggcgagccggtttaccgctacacctaccgtacggcggtgatcgacggctacctgatcgatcaggatccgcctattcagatcgttacccgcaatgcgcaggatggggtctatctttccgagggtgaacaggtggaacgcctgaacccacagggcgagctgatcaacgacacgctggctgacgatcaggattttgaggttgccgattttaaccgcggcctggtgatcccggcgtttaaccgtgcggtatgcggtgagctcaccaaatacctggatcccaccgggcaacaaaaaacgctggtgttctgcgtcaccaacgcccatgccgacatggtggttgacgagctgcgcaccgcgtttaagaaaaagtatccgcagctggagcacgacgcgattatcaagatcaccggtgatgccgataaagacgcgaagaaagtgcaaagcatgatcgtccgcttcaacaaagagcggctacccaatattgtggttaccgtcgatctgttgaccaccggcgtggatatcccgtcaatctgtaatattgtgttcctgcgcaaagtcaaaagccgcattctctacgagcagatgaagggccgtgccacgcgtctgtgcccgtcggtggggaaaaccagctttaagattttcgactgtgttgatatctacagctcgctggaaagcgtcgataccatgcgcccggtggttgtgcgtccacaggtggaactgcaaacgctggtcaatgaaattaccgactcagaaacctacaaaaccattgaagcggatggccgcagttttgccgagcacagccatgaacagttggtcgctaagctgcagagaatcatcggcctcgccatttataaccgcgatcgcagcgaagcggtggataagcaggttcgccgtctggacgagctgtgcctggatgccgcgggcgtcaactttggcggtctggcctcacgcctgcgggaaaaaggaccgcactggagcgccgagatttttaataagcttcccggctttatcgcccgcctggaaaggctgaaaaccgatatcaacactctgcgcgatgcccctattttcctcgatattgacgatgaggtggtgagcgtcaaatcgctgtacggcgattacgacacgccgcaggatttcctcgaagcgtttgatgagctggtgcaacgctccccgaacacccagcccgcgctgcaggcggtgattaatcgcccgcgcgacctcacccgtaaagggctggtggaattgcaggagtggtttgaccgccagcattttgaagagtcatccctgcgcagcgcgtggaaagcgacgcgcaatcaggatatcgccgcccggctgatcggccacatccgccgtgcggcggtgggggatgcgctcaaaccgttcgacgagcgtgtcgatcacgcgctgacgcgtatcaaggccgagaacgactggagcgatgaacagctaagctggctcgaccgtttagcgcaggcgctaaaagagaaggtggtgctcgacgacgatgttttcaaaaccggcaatttccaccgccgcggcggtaagccaatgttacagcgtgcctttgacgacgacctcgacagcgtgctggataagttcagcgattacatctgggatgagctcgcctga

SEQ ID NO: 223475 - DNA, 732 bp, Klebsiella pneumoniae
atgaagcttaataaagtcatggctgtgatggtcgtcagctctgcgctggtgttatctggatgtagtgcaatgggaaccgctattaaaaagagaaatctggaagtaaaaacccagatgagcgaaacaatctggctggaaccttcaaataacaagacggtttatctgcaaatcaaaaatacctctgataaggatatgagtggcctgcaggcaaaaattgccagcgccgtcacttcaaagggatatcaggtcgtcagtaacccggatacggcgggctactggatccaggcaaacgtgctcaaggccgataaaatggaccttcgtgagtctcagggctggttaagccggggttatgagggggcagtgactggcgccgctcttggggcggggattaccgcttacaactccagttctgcgggagcaaccctgggggtagggcttgcggctggtctggtcgggatggctgctgacgcgatggtggaagatgtgaactacaccatgatcaccgatgttcagatcgcagaaagaaccaaaactcaggttcagactgataacgtggccgtattgcgtcagggaacatccggtgcaaaagtgcagacaagtacggaaacaggtaatcagcacaaataccagactcgcgtcgtctcgaacgctaataaagttaacctcaagttccctgaagcccagcctgttcttgaagaccagctggcaaaatcgatcgcaaatattctgtag

SEQ ID NO: 223476 - DNA, 348 bp, Klebsiella pneumoniae; identical to SEQ ID NO: 139677

SEQ ID NO: 223477 - DNA, 702 bp, Klebsiella pneumoniae
atgtgtgcgatggatcgtagtagtgatgacagcttaagtcaatcggttagggatgctcttcttcacataaaggggttgtataacatctcgcctgtctctgtttgcgtaagaaaccaacaacgtgatgtactatattccaacacatcatttgaacaaatgtatgacttttttaaaacagaatgtgtagcaggtagtttttctggaacgttttatgaattagagttgatgttttcccaattagaacttgattgcatggtgctaggtaaaggctgtgttttaagtaaaattttttcgtgtggaaaatcgaattttcaaattcggattgagtgtatcagtcttttggatgatgatttttattttttttggcaaataaatcttctgataacggttccattacccagccggaaaatggaggttatcaaatcaaaaggtaattcagattttgatgaggctatttcaaagataagtgatttgaatataattcctctttcattttatgttcttggctttagctatttggatatatcaagttatatctgtgtgtctgaaaaaattgtgaaaaaaagaatcgatcgttcgaaagagaaagtactggagatctatccttcttttagctcatttatatcggattgttacaagaccaggaaaatatattttttcattgagaatgtttacgaatatataatgttaatgaagtgttaa

SEQ ID NO: 223478 - DNA, 393 bp, Klebsiella pneumoniae; identical to SEQ ID NO: 100984

SEQ ID NO: 223479 - DNA, 231 bp, Klebsiella pneumoniae
atgaacctatccattctttcaccttccactgaggctgtaaagccccgtcgtcatccacgtatccagcgagacgatattgcggcccaggagattgatccggcgctgaaagccttcgggcggcatattgcccgcagtattcgtaaggggcgcggcgttcatatccccgcgatgaacaacaccgccttcgggcaggtactccgcacgcttgaacttaaacgcgcatgtaactga

SEQ ID NO: 223480 - DNA, 351 bp, Klebsiella pneumoniae
atgaaaaaagaaatctcccgcaacccctctttcacgccttcgcctaagctgcgagcacatctgaactcccacagggaaggggtgactgaaaggctgaataatatctttgatcgctatgcgcatctggttcgggtctgtgcccttcctctcgatgacgacgaaacacaggttctgcttaatgtgctgagtggctccgttgtggaacccgcctttattgaatatctggctcaggaaattctggactcggatgattatctggaagggatacccgcagctaaatcactgtacgaaaagtgtcagtcagcgacctatccgcaattgctggccaccgtcgaacgtctggaacgataa

SEQ ID NO: 223481 - DNA, 273 bp, Klebsiella pneumoniae
atgaacttcacgataaaatcccgtaaaaccggcgaaattttcagtttttacgcacccgagagtggcgtttatgtccacctggagtccccgggacactctggtaacacaggtgctcagatttgctgtggtggagggttcatggggagtacgctttcctgtggcgcttctgaggacgatctggccagtgttgcccgtaaatggtaccgacagttcgtgagggagcggcgcaaattcttaatgatgtcgggccagtattctgaggataacccatga

SEQ ID NO: 223482 - DNA, 1206 bp, Klebsiella pneumoniae
atgttgatgcaacatgtcggagtaggctattttgggtattaccgagcaactgcttatgcgatgaaacactcccttatgcccgagattgcgaagttaagaatgaaggccctgaacttctgggataagcatggtatccgtgccgcagctgatgcttttggcgtatcaacacgaacgctctactggtggcgccagttgcttcgcaccggtggtcctcaggcgcttattccaagaagcaaagcccccctggttcgccgttcaaggcactggcaccctgatgtgatcaaggaaatcaggcgcctgagaactgagctacccaatctcggcaaagagcagatttttgtcaggctgaaggcatggtgtgaactgcgacattttacctgtcccagtacatcaaccattggaaggatcattgccggagcgcacgataaaatgcggatggttcccgttcgcctcagtgccagaggcaaagtcaggttgataaaaaaacgctcagtgaagcccagaaggcctaaacagtaccgcccggtaaaaacaggcgaactcatagggatggacgcgattgaactcagaatgggggatctgcgccgctatattattaccatgatcgacgagcacagcgactacgcgctcgccctggcagttccttcactcaacagcgatatcaccagccatttcttcagcaaggccacaaagctctttcctgttgctatcaaacaggttgttactgacaacggtaaggaattccttggaaactttgataaaacgttgcaggaagcctcgattaaacacatctggacctatccgtacacaccgaaaatgaatgcgacctgtgagcgatttaaccggacacttagagaacaatttattgaattcaatgaattgttgctttttgacgacctgaatttgtttaatcaaagaatggctgaatatctggtgctgtataacagcaaaaggccacataaatcactcgaactgatgacgccagtggactatattttacgtgagagtaaaaattgcaatatgtggtggacccatacagcaaagcagaagtgtcaccatcggtgcgaaacagagatgtcatgctttggttcagagaatgcgtttgaccgcctcgctatatacttccgagcgttctcttttcccaacagaaatcacgaaaacgacaactttctcgtctataacctggtatacaaggcgatagcctga

SEQ ID NO: 223483 - DNA, 924 bp, Klebsiella pneumoniae; identical to SEQ ID NO: 101354

SEQ ID NO: 223484 - DNA, 573 bp, Klebsiella pneumoniae; identical to SEQ ID NO: 26658

SEQ ID NO: 223485 - DNA, 2124 bp, Klebsiella pneumoniae
atgactaatgaaatatttaccactattatatccagactaaatttttcattgcgccataaaacgccagttatattacagtcggaggcaacagagtgtgggatcgcttgcctggcgatggtttgcggtcactatggtctggatattgatctgtttaatttccgccagcgctttggcagcgcttcgcagggagtaacgatgatgtcattaagcaaaacggcagatcatgccggcttgaaaagccgtgctctgtcgttagacctgaatgagattcgtcagcttaaactgccctgtatcctgcattggggaatgaatcactatgtggttctcaccaaagtacgtaaatcaagtttcattgtacacgatccggcattgggtaaacgagtcattggcaatcaggagatgtccaattattttaccggtatcgccctggaactctggccggatcaaaactttcaacaggaaaaagccaaatctcgcctgcgtctgttggatctgatgcgtaatattatcggattgaagtcaacgctactgaaaattttcgccttctcggtcgtggttgaagcgattggcttattgctgccgataggcactcaactggtgactgaccacgtgatcatggcccatgatcagagcctgctatccgtaatctgtatcggtctggtcttcttcaccctgttccgcacctttatcagtatgctccgggcctggacatcgttaacattaaatacgttaactaatattcaatggaaaaccacgcttttcgatcatctggccagtctgccactatccttttttgaaaagcgtcatttaggagatatccagtcgcgtttttcctctctggacaccatacgctcgacgtttacgaatagtattgtcagcggcattattgactcgatcatgactattggtctgctgatcatgctgacactgtatgggggctggctgacctgggtggtcgttggttttaccctatgctatgcgattatgcgctttgctacctaccgcttttatcgtcgcgtagcggaagaacaagtgattaaaggcgcacgctccagctcgcattttatggagtctctgtatggaatctcgaccatcaaggccttaaacctgaaagagcgtcgctcccagcattggctcaatattaatattgaagcctgcaatgccggaatcaaacaaacgcgcttcgacatgatgtttggtggaatcaatacttttataactactatcgatcaggtcgcggttctttggctgggtgccattatggttattgataataatatgactctcggtatgtttatggccttcaacgcctaccgtggccagttttcacagcgagcttctagtctgattgatctctgtatgcaactccgtatgctttctttacataatgaacgtttgtcagagatcgtcttcagcgaaccggagcaggagcttcctgcaagagaagttttctctgctgactcgggtgcaaaactagaagtaaaaaatctctgttatcaatacgatcccttttctcagcctatattttctaatttaaatattacggtagaacctggggaatctgttgcgttaatcggaccttccggtgttggtaaaaccacgctgttaaaagtgatgtgcggtttgctttcacctactagcggagatgtattagccgataacctcgatatcactaaaattggtttgaataactatcgtcacggtaccgcctgcgtactgcaagaggaccgccttttctccgggtcgcttatcgataatatcagcggcttcgaagataatgccgatattaattttgtgatggaatgcgccaggcgctgtaacattcatgacgaaattatgaagatgccaatgggctatgaaaccattgttggtgaactggggttaggtatttccggcgggcaaaagcagcgtattctgatcgctcgagctttgtatcgtaaaccaagcattctgtttatggatgaggccaccagccatctcgacttaaagaatgaatcagttatcaatcagtcaatctcggcgttaagcattacccggattatcgttgcccatcggccatccactattgcctctgcagatcgcgttatcgatctgtcgcagacaaagaatctcgcgccagcataa

SEQ ID NO: 223486 - DNA, 1287 bp, Klebsiella pneumoniae
atgacaagaagattatatcgcaaggaagcgattgagtacaaaagagtatattggaaagggaaagctttattgctggctggaatgccgacttggttaatcatagtattatctttgctattccttggtttgcttatatcagccatgatcttttgtagctttactcagcggatagatgttaatggggaggttatcaccttacctcattctgtaaatgtttatgcgccacaacaaggttttatcgtatcacaatatgtgaaagttggtgatctggttaaaaaaggacaacctctctatgaaatagatatctctcgtgacacgactactggaaatgttagttctgtacagatagaagttaataaagaaaagatagccaatgctgaagaaataataaacaagctttctcaaaacaagcaagaaacattgtcttcaatagaaaagcaacttaaagccaataaagaatcattgaaagagatcaatcgtcttcttgctaatgccttagctggattaaagaaaatgcacgataatttatccagctatgatagttatcttagagatggactcatcacaaaagatcaatataactatcaacattcattatatttccaacaacagagcacatatcaatctcttgtaagtcaaaagatgcaattagaatcgcaaatcacacaatataatagcgataaaataactaaaatcgctgattttgacaatcagataacagcacaacagaatcaaataaatgatttcaaaaaccaattagttgaatcaaatgccaaaggcaatgctattataaaagctacgacagaaggacgcattgagtcactctcggtaactaaaggacagatggttgataatggcagtagcttggctcaaatcaagcctacaggtaacattgagtattatcttatattatggctgccgaataatagcataccttatgtaaaacctggtgatgttataaatattcgctatgatgcttttccttctgataaatttggacaattccctggcgaagtcatatcaatatcttccgtccccgcagcgaggcaggaaatgtcagaatatactaacgtgagtaatggaactaatcagcaagaactggcactttataaaacaattgtaaagattaaaaataaaactttttcttataatgggaaaacacttaagctctcaaatggacttaaagcacgggcagttgttttccttgaaaaacgtcctctttacatgtggatgtttactcctttttataaaatgtctcaaagtgtaagtgggccgatccatgactaa

SEQ ID NO: 223487 - DNA, 366 bp, Klebsiella pneumoniae
atgcgtgagttaaacgtttttgaaatgcaggaaatttctggtggctatagctgggatacctcaagctttatgtccactcttaccagcctggtaacgaatggtgtagaagcagtaggttccgcaatagcattcggaactgtagcggctatgtggggtgcttttgctgcaggtggtaaggctggtgacggcggtggcatccttgggtttggtatcatcgccgaactaggtggggtcatctttggtgccattggcggctttattggtggcgccgtcagcggtattgcacttggctgggaacaaactgtaaaatatatcgcagattcttatacttctgctcttgacggcacattcacaccttgggcataa

SEQ ID NO: 223488 - DNA, 1008 bp, Klebsiella pneumoniae
atgaaaaaaatatttttattctcggctttattgattatcgcttgtggtcaagcagaagcaacttgtaatatcaaagatatcgccaaaagggttaattttaacatgccaagcaatgttaaaatatctactgatccaactataccggtaggaagcatactctatacaaaattgatgggtatcggcggttctgcacccgcatttacttgcgacaactcatctaagaatagatacactaccgtgatcactgccagcgaagttccaggagtgactggcattatgggtaaacctgtttatgaaacgggaattccaggcattggttatcagattagtgatttacttactggctcggtctatggaatgatacccgcggttgcaggaagcataccggttccaggaacaactgaaaatacactttatcgctattggttaatcaaaactggaactattgacttaagtcagtccccaaccaatagcagcgtatcattttatgttgctgatagcgattataaagccacaatgccatctagcttactattatcaataaatatgaaatttgtaagccctgtacctcgcgaaaactcatgtgaaataacatcaactaaaaccgtaaacctctcaagaattgataaagtgacacttttgtctacttcaccgggaagtaaaacctcaaaagaaaaatcctttaccttgaatattaactgcgaacaaaagtcaactggaaatacgatttactattggtttaaccctcgttcgagtactgatggcactcccggcgttctccttaacagcgattcaacaagtagcggaggtgcacaaaacgtcaacactataataaaagaaaatggtatccctgttaatttttatgattatgaagctaagtcatttatagtagatgccaacaagctcaataaagagattaatcttaccgcagattactatcgtactaccgatgacattactattggcaccgtcagagggttgttagaggtcgtcattcaagaggaataa

SEQ ID NO: 223489 - DNA, 924 bp, Klebsiella pneumoniae; identical to SEQ ID NO: 220209

SEQ ID NO: 223490 - DNA, 234 bp, Klebsiella pneumoniae; identical to SEQ ID NO: 193227

SEQ ID NO: 223491 - DNA, 1044 bp, Klebsiella pneumoniae
atgaacgtaacccgaaaagagcagcgcattattcagcgcgcgctgaatgcctggcaggccagcggggagttaaccccctcggacagccagcggctggcgcaaacgatgcgcgtctcccccttcgactggcggcgcctgagccgctatgccttctggaccgcgctggcctgcgtgctgatttccctgggtagtctgttcgccgacagcgagctggtggcgtggctgctgagcctgttcagccactcggcgctgatgcggatcctgctgcctgcgctgctggcagtcgcctgctacggctggggttttcgccgccagcggcgggagacgcagtggcattacagcacagaggcgattttgtttctgggcgtcgtctttaccgccgtggcgctatggcagcttggcgaacggctggataacggcagcggccatatcgcaccgctgtttctggccggatgcgtgatttactgcgccatcggctatattgcccgctccgggctggtgtggctcttttttctgctggcgctgggcaactggttcggcgcggaaaccggctacgtctcggggtggggcgcctactggctgggcatgaactacccgattcgcttcgtcctgttcggcggcgcgctgctggcgctctgctacggcgcgcaatccctgcttcgccagcggcagctgtttaccgtcagcaaggcgatgggcctcacgtacctgtttattgcgctgtggatcctgtcgattttcggcaattacgacgcagacagctggtaccaggtgagccaggcgcgactcctgccgtgggggctgctgtttgccgcggcggccggcgtctgcatttttatcagcctgaaaaccgatgatggaatgctgcgcggcttcgggctaaccttcctggcgatcaatctctatacccgcttctttgagtttttctggaacgggatgcacaaggtgctgtttttcctgatccttgccgtctcgctggcggtgattggccgctatgccgagcgcatctggcatgccggcgaagggcaggtggagaaaaaataa

SEQ ID NO: 223492 - DNA, 900 bp, Klebsiella pneumoniae
atgaatatattagctcgccaatgtggctacactgatgtatatcatccctcactgggcttaacaccgaaagagatttcttccatagagcggtaccttgatgccattcgaagtgatctattgttcgctaaaagtgtcattctcgtagaaggtgatgctgagcttattcttatacccgcaatgataaaagaaactttgggtattagcttagatgagttagggataagtctcattaaagtggatggaactgttttcaaacatgtttctaatctttttcacgaaaaacgtttgaaaagaaagtgtgctattctgacagatcttgattcggcttatgttagtgtcgctgacgatgagtttgatgataagttcgttcaatctttagaggctgctgaagatgatggtttacgaagaaaagatgaattagacagttatatcgaaggtaatgaatttgtttcggtatattatgctgaaaatacctttgaaacagaactggttcgatacgatgataacaaagacttgtttattaaagtgatgaggactaattacgaaaaggacgcctattttaaaaaggctgaatctgatgtaaattcatcagaccacaggattcgatatcgaagggttctaaagtttgcaaaaaaaataggtaagggctggttagctacagaaatgatagaacaccttagtgttgataaccgtgttcctgattatatattacaggctattaagtttgtcattcgtgatagaaacgtcgaactaatatatcaaaaaatgcttgattataatatgtctttgatgggagctaaagaatttgattgcataaatgaagaaaatagttttacaagcaaaatgacggaatataagaaacacttcaatgatagctttgtaagattattggagctataa

SEQ ID NO: 223493 - DNA, 1752 bp, Klebsiella pneumoniae
atgccatatagagacttaacttcagagcaaatggatgctgtagaatttaacgataatttattattaacagcatgtccaggatcaggtaaaactaaaacattagtttctaaactttgttatattttggaaaacaaagaatttttaggtataggtaagaaaaaagtagtagccctgacatatactaatgttgcagcagataccattcttgaaagaataatgtcatttggtataaatagtgattcattatggattggcactatacatagcttttgtctaaattggattataaaacccaacatagatagaattcctaggctttgtaaaggctttaatataattgatgagcacgaaaaagagtttctattaaatgatttaaaggaacaatatgatttatccccttatgataaaattgatacaattttagatttcaattttacacccatatattgtcgtgatattcctgagtataatgtagtgaaagcatatcatgcgtatttatatgagaacagattaatcgacttcgatcttattttgaacttaacatgtaatttattatcaaaatatgatgtactttgtgaacgtttatctttacttatgggatatattttagttgatgagtatcaagatacttctcttgtacagtatgagatcttaaggttaatagtatcaaagaaaaatactgtggttacctttattggggataaagaacaagctatatatacaggattgggagcagttgtaaaaaataagaatcaactacaagattattttgaccttaaagaattgactgaaatgaggctgacaggctgttttcgtagtagtcaattaattattgatttttacaaaaagtacaaggatgatgtttatcatataaattcagtttcagaaattaaagaatttccttctgtgatactaaaagaaaagaatgttgatataacacaactttctatttatgttgctggtataattaaaactcatttggaacaaggcattcatccaggtgagattgctgtattgtgtccaagctggtttgatgtaataaaactatcgaatgagattgtatcttcaaatcctgagattgaaatcgacggagttatgatatcaccaatacctaaaaacaatgaaaacttgtggcttaatcttatcaagcttattttaattaaaaaaaaaccatctaattacatcgttagacaaaaattatttcgtgatttattagtggagctaaaaacgttagctccaaatatcgaagcagaatcgcctaagaaaatattaaaagaagtaaataaaatagcattttcattaaattatgattgccatattgagatttggttaaacgaactcatcacacgcttctgtgattttatagaattagatatgagtaatgatagttatccctataaggaaatggtttctttagttaatgccactaaaaaaagaatggataaatataatatgaactataaagcaaatgatcttcactctttttttaattttaaaagcggggtaaaaataaccacctgtcattctacgaaaggtgatgagtatgaggttgttatttgcacgggcttattgaacggaaaaataccgaactggaatgatattatagaatgtagtgcagagcatcaaaattatgttgctcgtagactattgtatgttattgcatcgcgtgcaaagaaacatttatatatgatatctgaaacaggtcataaaactcaaaaaggttatccatacaagatcactccgcaactttaa

SEQ ID NO: 223494 - DNA, 1254 bp, Klebsiella pneumoniae
atgaatcttaagctgcagctcaaaatactgtcgttcctgcagttctgcctttgggggagctggctcaccacgcttggctcgtacatgtttgtcacgctgaagtttgacggcgcggcaatcggcgcagtgtatagctcgctcggtatcgccgcggtgttgatgccggcgctgctcggcatcgtcgccgataagtggatcagcgccaaatgggtatacgccatctgccacctggtcggcgcgttaacgctgtacctcgcggcgcaggtcaccacgccgggcgagatgttcctcgtgatcctgcttaactcgctggcctatatgccgacgcttggcttgatcaataccatctcctactaccgcctgcagtcggcggggctggatattgtcaccgatttcccgccaattcgtatctggggcaccatcggctttatcctcgccatgtggggcgtgagcttctccggctttgaactgagccatatgcagctgtacattggcgcgacgctgtcggtcctgctgactctgttcaccctgacgctgccgcatattccggtcgccaacgcccagcgcaatcaaagctggacggagatgctcggcctgaacgcttttgcgctgtttaaaaacaagcgtatggctatcttctttatcttctcgatgatgctcggcgccgagctgcaaatcactaacatgttcggtaacaccttcctgcacagcttcgataaagatccgctgtttgccggcagctttatcgtcgagcacgcgtcagtgctgatgtcgatttcgcagatttccgaaacgctgtttatcctgaccatcccattcttccttagccgctacggcattaagaacgtgatgcttatcagtattgtggcgtggatgctgcgctttggcctgttcgcctttggcgacccgacgccgttcggcactgtactgctggtgctgtcgatgatcgtctacggctgcgccttcgacttctttaacatctccggttcggtgttcgttgagaaagaggtgcgcccggaaatccgcgccagcgctcaggggatgttcctgatgatgaccaacggcttcggctgtattctcggcgggatggtgagcggcaaagtcgtcgaacactttaccgtcgaggggatcactgactggcagagcgtgtggctgattttcgccggctattcgctggtgctggcctttgccttcgtggcgctgttcaaatacaaacacgtcagacaaccgaccgccgcccagcagagcgtgtga

SEQ ID NO: 223495 - DNA, 624 bp, Klebsiella pneumoniae
gtgctgggtcgctctcgcggcggttttggcaccaaaatccacctgtcgacagacggaagcggtctgccgttaaacatcgtgctgagtcccggacaagcccatgaaagcctgttcgctcaacgtctgctggacggtattggtgttcagcgccagaacggcagtatgaagcgccgtggtcatgcggtactggcagataaagcctactccggacatgcgttacgtaacgaactgaagaacaagggtataaaaaccgttatccctcgcaaatcaaatgagaaaatggcgtcagatggtcgttcacagctcgatcgtgatacttactgtaatcgcaatgttgttgaacgttgcttttgcagccttaaagaatatcgtcgcatcgccacacgctacgacaaaacagcgaggaattatctggcaatggtgaaactgggctgcatccgaaaaggttatgtaattaagggacacagcctaaaacagcttcagcgaagctctgagcgcagtaatccgctacatgacggggtattacagtgccacccgccctcactggtaaaacggcggattacgctaaatgaatcggaacggctgtattacttacagtctaatgtagtggccagtattagttga

SEQ ID NO: 223496 - DNA, 303 bp, Klebsiella pneumoniae
atgagaaataaactgctgctcgcagggttagtattgacccttacgggttgtgttagctataaatgggttaagcctgacttcgacgatgaacaggccgatattgatgaaacttattgcaaggcaagggccctgaaggatttgccaccagataatctgttaactggtgcttatcagaaaaggggaaagaaaggtaatacagatgatataaccttctcaagctcggatgcgaatgaggtaaaccgaaatattcttgtcaaaaactgtatgtatcagaaaggctggaaacaaattgcacaaaagtaa

SEQ ID NO: 223497 - DNA, 1548 bp, Klebsiella pneumoniae
atgatgcaattgagtatcaggtttgtcaccatcagcattcttctcccggtatgtctggtaatttcaatatcgacaggtatggccgtccgggaactggaaagagacactgccgtaaccgccagtgtgctgctgcgccaggttgaccatgtcacttccattgcccggcatacaaccactattacagcacgcatggcagggcaaccctgtcaaacaatactcgaaaaccttactcaaaatggcgcacttaccccttatatccgtagtacagggcttatccggaatgatgttctaatctgttcatcggtcactggtgcccggcaacagacaaccccggcggtctatggcattactctctcagttgcgccaggtacatttaagattagagcaatagaaggcaccagcagcataccgggacaaacggccatcatttacgcgtccggcaccattaaccgcctaacagcatttagcgtggttgacgcacagtattttactgatcttatgaattcactggacgatacgaaccactcggtactgctactgcgattcagtgacggtcctgttatctctgttctggatagggatcccccgcataccagagccttcatcggcgaatttagatctgcctacagtcaggctcatttacaagtcataacacctattcatgcactcggacattacgtactgcgatacatgatgttcctcggcccgatgtccctgttactgactctggctgcgctttacttattgcagcgctggcaaaaacgaaaaatgtcactggcagaggaaataagaaagggaatggctgcgggggaattctctgtgcattatcagcccatgtgtgaaactgctacaggaaaatgtaccggggctgaggccttacttcgctggaaacggggggacgggagttcgatgtctccagcggtcttcatacgcgcagctgaagaggagggcgtaattataagtcttacgcaacatcttttctcgctgatagcggatgacttcagtcaaaggaaaatcaatgctccctttcatttgggagttaatattgcagctgctcatctgggagacagcggatttacagctgatgtgatgcagctcaggggggcactcgacacttccttccggcttgtactggaaattactgagcggagcctggtggaagatacagcagtggcttcgaagaaattagaaattgttcgtgaaaaaggctgccggattgccgtggatgacttcggtacagggtattgttcactgaacctgctacagagcctgccggttgattatctcaagatcgataaatgctttatagataccctgacctctgccggggcagaagcaccggtactggacaccatcattagtctaagcaagcgtctgggcctgaccacgattgcggaaggcgtcagcacaacacaccagagaaactggctcttagaaaaccaggtgccttatgttcagggatacctttacggcaggccaatggccgtgcctgaattcatggcatggtatgttgcaaacgaaagtaacaatcctgttaaaaaaggatga

SEQ ID NO: 223498 - DNA, 909 bp, Klebsiella pneumoniae
atggatataaatcaactacgttgttttgcggtgttaggtgatgagcttcactttggccgggcagcccgtaaacttgaaatgatgcctgcgtcactcagccgttttattaaacagctggaagacgagctggggataagacttctgaaccgttcgacccggaatgtgtcgctgacgcctgaaggcgccgagttcctgaatggagctaaatccgtgattgctgagttcgatgcattacggctgcggtttcgtaaaagtacaccgtcgcaaaacaaaacattgcggatcggtgccatcgacagcgccgccagagggttactgccggaattactgaaccttttcgtcaggcaatatcctgatgcggatatccatattacggaagataaaacgtacagtcttattccccggcttatctccgggtggctggatgtggtctttgtgcgtccacctgaacatattgatgtcacgctgacgacgcgttttatcgcttatgaaacctgcgtactcgccgttcctgccggtcaccggctggtcagccatgacgaagtcagtattgccgatttctttaatgaacccgttatcgttccggaaaggcgcaccaggccccacagccatgatttgacgatgaatgtattcaaagctggcggtagcttcccccacatcgcacagtatgctgaggaaaaacagactatcctgagtttagttgcagccggcctgggagtggcgctggttccttcatcctataaaaatatgaatgcagacggggttaaatatcttgccctctcaccggaaaagagtactgaagggcttccattgagtgttatttggcatcatggaaatacaaatgtttatgttaatgctctgctggatatgctgtccgaaaatattgaagcactgacacgtaacctctag

SEQ ID NO: 223499 - DNA, 252 bp, Klebsiella pneumoniae
atgaataacgacctcgaaaaaaaggttatgcgaaaggttaccctgcgcattattccttttatcatgctgctgtatttcatcgcttttctggaccgggtgaacattggttttgccgctctgaccatgaatcaggacctggggttttcgcccaccgtttttgggctgggtgcgggcattttcttcctcggttactttttgtttgaagtgccgtcgaacttaatcctgcataaagtggggcccgcatctggatag

SEQ ID NO: 223500 - DNA, 1080 bp, Klebsiella pneumoniae
atgatcacatggggcctggtctctggctgcatggcgtttgtgcaggggacaacaagcttctacattctgcgttttctgctcggcgtggcggaagccggtttcttcccgggcattatcctttatctcagctactggttcccggcagccagacgcgcgcaggttactgccatctttatggccgctgcaccgctttccaccgcgctgggatcgcctatttcagccgctctcctcgaaatgcacggtttcctcggctacgcaggatggcagtggatgtttgtgctggaagccctgccggcactggtgcttggggttgtggttctgttcttccttaccgatcgtccggccaaggccagatggctgactgacgaagagcgtgcgtggcttgaaaacacgatgcaggccgaggaaatggcccgggcggcaaaacagagccactgcagcgcatggaaagggctggcggataaacgcgtgctggctctggcgctggtctatttcggtacgtctgccggcctgtacacgcttgggatctggtccccgcaaatcatccgcagcttcggtgctacctcgctggagatcggtttcctcaacgctttcccggctgtcatcggcgtaatcgccatgatcctgtgggcacggcattcagaccgcaccaaagagcgcagctggcatgtgattggcgcctgcctgctggcggcagccggtctgatttacgccggtaacgtcagcacactctttaccgtgatcgtcgccttaacgctggtcaccgtgggcatcagcgcatcgaaaccgccactgtggagtatgcctacagtgttcctgagcggcccggcagcagcagcgggtatcgccacgattaactctatcggcaacctcggcggctttgttggcccgatgatgattggcgtgatccgccagcaaaccggtagctacacctggggcctgtactttgtcgccggactgctggcgctttcggccctcattgtcctgattctttctgccagggctgacaagcctcaattccgttttcaaggcggacccctaacagactccttcactgaaagacgggtcattccggactga

SEQ ID NO: 223501 - DNA, 3087 bp, Klebsiella pneumoniae
atgaagcagggctttaatctttcggcctgggcgctgaaacaacagcagctgatggcctttctgatgctgctcattatggccaccggcattatcagttacgaacagctttcccgcaatgaagatccggcgtttaccatcaaaacggctgtggtttctgcgcagtggccgggcgcgaaccttagcgacacggtaaatctggttactgacacgctggagaaaaagcttcaggaaatcccgtggcttgactatgtccagagtgagacgcacgccgggcgctgcgttatttttattaatcttcgcgatagcacgcctcctgatcaggtcgcagacatctggtaccaggtacggaagaagatgcaggacactgctccttcattacctcagggcgtacaggggcctgtggtcaacgacgaatttgaagacacttttggtacgatttacgggtttactgccgacggatttactatgcgggaactgcgggatcgggtggacagcatccgccgggatctgatgagtctgccggacgttggaaaaattcagctgttgggagagcaggaagagcagctggtagtcgccttctccccacgccagctgtccgccatgggtctggatttacaacaggtcgccgatgcgttgcgcgcgcagaatgtggtcgaacctgcgggtaccgcccgcacggccggtgacaatgttgccctgcgcgtcagcggagctttcagtagcgaagagagtctgcgtgcggtgacgcttcgggtgaacaaccgttatataccgcttacagacattgccagcattgtacgccgatctgcagagccaccggctccgctttttcgcgtcaatggccagcctgcaattggccttgccatctcgatggcgccaaccggaaatatgcttgaattcgggcaggcgctgcggtcgcgcatgaacagcgaagcagcacagctgccgcacggtattgaaatgaccaaaattgccgatcagtctgcggtggttgaggaggctgtcagcgggtttgtgcacgtactcggggaggcggtaattatcgtactggctgtctcttttgtttcactgggtctgcgtgcagggcttgtggtggccgccgcgatacctctggtgctcgccatgacgttcatctgtatgtatcttgccggcatcggcttgcagcggatctccctgggcgcgctgattattgcgctgggtctgctggttgatgacgcgatgataacggtggaaaccatggtagcccgactcgaagctggcgattcccttgccagcgcagcgacatatgccttcacttccacggcattcccgatgttgactggcacactggtgatgattgcaggatttattccggtcggctttgcagcctcaagcgccggggaatactgttacaccctttttgctgtggtacttattgcactgatcagctcatggattgtggctgtactgttttccccattaaccggcagctggctgttacctggcacgctgcagaaacaccacactggcaccggacgcctgggcagattttaccagcgcctgcttaccagagttttacaacacaggctactgacgcttggtatagcgttgctggctctgttgctggctggtctgggaacgacttatatgcagggtgagttctttccggcctcagatcgccctgagcttctggtgagtctgtctctcccggcgaatgcatctcaggaagcgactctccgtcagacagcgcgtctggagcaagcagtatcagccagccacgatgttgaccactactcctcttatgttggaaccggtgcgatacgtttttacctgcctatggatgttctgcttgatgatgaaaataccgctcagctggtcgtggtagccaaaagcctggcggcccgcgaaaggcttcgacattatctcgataaggtgctcgccagggatttcagcgacatcacaacacgagtttctccacttgagcttggtccccccgtcggctggcccattcgctatcgcgttagcgggcctgattacaggcgcgtccagatgctggcagagcagctttcggctgcactgggcgcatcctccctgacacgagaggtgaaccagacagcaggagaacccgagcgcgttatcacgttaaaggtaaaccagacggcagcaagggcagcggggctctcatctgatcagatagctcgttatctgaacacggtctggtcaggcacgcttattactactgttcgcgacaggaaccggttgatagatgtagtactgcagggcaacacagatgaaaggcgtaatcttgacagtctctccgggctgctactgacgtcgtcgacgggcgcaaaaatccccctggcgcaggtggccacaccagaatgggggcttgaggatccggttatctggcggcgccagcgtctgccctttattacagtacagacggatctggcccccggtttgcgcgctgaaactgtatcaaatggtctcaagccgctcattaatcatctgagagcggggttgcctgagggttacagcatcagtgaggatggtgctgttgccgagtctgacaaaggtaacagttcggtatttgccattttaccggtcactctgctctgcatgctgctgttgctgatgattcagttaaagcgagtttcacgcatgtttcttgccctgctgatggcaccctttggtttacccgggattgttctcgccatgctgccaaccggaactccaatgggctttgtggctttgctgggcattattgcccttgccggcatgatcatccgcaacgccgtcattctcatcattgaagcagacaataaccggaagtcagggatgcactttaatgaggcgataggtgctgccgccattcaccgggcacgacctatactactcacggcaagtgcagccattctgggtatgatccctatttcccgacagattttctgggggccgatggcttttgcgattatcggtggacttcttgtagccaccctggtgacgctaacggttttaccggcagccatgagtctggttatgcagatggaggatcgttcagctacaggtaaatcagccaatgctgcgagcgtaacagaggggcagtaa

SEQ ID NO: 223502 - DNA, 1170 bp, Klebsiella pneumoniae
atgcctgatgaacatcacgtcctgcttaaagaggacgtcaggaacctgccggatacccggtatcttctctcactgatgcctctgctgggctgtttagttctgatgaccattatgctggccggctgcgatggcaaaaaacaacccacttctttacctctgcgtccggtcaggttcgtgactgtcggtccgcgtgagtctcccggggtacagacgctgaccggcgaaatcagggcgcatgatgagacgtccctgagtttcaggctggacggacgcatactgacgcgcagcgctgacctaggcagccggtttcggcagggtgatgcgcttgctgttctggacagtccaacagcgcaaaatcagttaaccagcgctcaggcagacgtcagcagcagccgggccgcggaaaaagtggcggcgcttaatctgcatcgcatgcgtcttctgatgccgtccggggccattgcgcgggcgcagttggacaccgccgcagccgactggcaggccgcactttcacgccttcagagcagtgaagcggcgctgaaaaatgcgcaggagaacgtgcgctggacgaccctaacggcgccggtaaacggcttggtcacgggcgtcagcgcgtctgcggggcaggtggtcagcgccggacaaaccgtgtttaccgtggcctccagtaatgcccgggacgtcgtatttgacgtggccagtcccggaatcgtatcccgtcagcctggtgccacttttcatgtggcattgcttcaggatgcttccgttattgcacaggcgcatctgcgtgacatcagcccgcaggccgacccgcaaacgcgcagctggcgggtgcgcatcacgcttgataatccgccgcctgacatggtgatgggagccagcgtctctgtaacgcttcccatcgcggactcagcgggtgaaaaggtgataacgcttccggcctcttctcttacgcgcctgtcagaagctcctgctgttttcattctggatccggctaataataaggtctaccggcgagccgtacatattgcaggttactctgcggacgctgtttttatccgggctggagtatcacccggagatcgtgtggtaacggcgggcgtcagaagcctgcgtgacggtgagcacgtggctggcatacaggaggaccaggatgaagcagggctttaa

SEQ ID NO: 223503 - DNA, 1173 bp, Klebsiella pneumoniae
atgaaagtaaaacaaccccagacgctctggcgctggctttgcctgcgcattctcacgcttgccatcggcacagttttactgatagccctgtgcatgtggctgcgatttactgtgcagtatctttggaccacgcaccgtatgccggaagcggtactgaatgaatttcttacgctccgggaacatccggaactcaatccagcccggtaccatgagattatcgataaatggtggggcataagcttttccagtccttccatcgcgtcgtcggactggctgactgtcggtgttctggtgctggtcaccatcccgtttattgcttattttgggttgcgtcatgcccggcccctgtcggcgcagttcagccagctcagaatagctgcagatgaggtgactgacggtcattttggtgcccaggcagagttaacgcctgaagcacccgccgaacttgtgcagtttgcgcaaaattttaatgccatgactcgccagctggcacgctatgaaaaagagcttcgcgcctcacatgttgctatggcgcatgagttacgatcgccattgactgcggccatggtgcgactgcaggcgctgctcgatggtgtattcactcctgaacaacggcatcttgctctcatcatgggccagcttagctgcctgagccggcttattgatgaacttcacctgctctccattgcagacgccggtcagctcagtctggaaaaggtgcgatgctgtccgtcagatattttgcgcgaacgcctgttgtggataaagccccagctggatgaagctggcattaatgtcgtttcagacatgcctgaaacgtcggtgctgaacgtcgatccctttcgtctgggccaggtgtttaccattttgatggaaaacgcgctgcgttatgccggcaaaggcaccactctgtttcttagcacccgaagcataaacggaaattacgaaataatttttcaggatacaggccccggcgtttcgcaggaattccttgatgtcatgttcgagcgctttgtgcgcggtgatacttcccgcgcacgacactctggcggcagtgggctgggcctgtctatcgcacaggcaatatgtcatgcacatggcggaaccatcgaggccagtcttccttcggggggcggtttgcggatgcgaatcgtactgcaggctactgcataa

SEQ ID NO: 223504 - DNA, 699 bp, Klebsiella pneumoniae
atgcagagcaaaaatattctgattatcgaggatgacgccgatgcggcagaggtgctggaagcctatctgcgtcgggaaagttacaccgttcgcgtcatggcggacggtctctcagggcttgagcaggctcaacgctggcagccagacctgatagttctggacgtcatgttgcccggcctgaacggcactgaagtgctggcgaaaatcaggcgtagtagcgacgttcccgtcattatggtgacggctatcggggatacgcccgatcgtatcggtgcgctgcgctatggggcggatgattacgtggttaagccttatcatcctggtgaagtcgttgcgcgtgtgcaggccgtgctgcgtcgtagcggtggcagcagagatccgcaggaagaggtgttgcgctggcaggggatggaggtcaatacgggagcgatgacagtcactgtggctgacagtaaaggcagggtaaccagtgttgacgttacacccacagaattcaatctgctggtcacaatgatgcgcgccccggttcgcgcgctgagccgtcagtttcttctggagcagtgtctgccggacagcgacgcgctggaacgcgtggtggacacccatatttataatctgcgtaaaaagctcgagtcagccgggcagtctgacgtgctgctgaacgtgcgtggcgtgggttacaggtttcgtcagccatga

SEQ ID NO: 223505 - DNA, 783 bp, Klebsiella pneumoniae
atgatacccggaaaaatgctgatgtatatggccggtctggccctgacaacctcagctacagcccaggctgacagcagtgactcgcagaatggcgtggcaataggtgctggcgcacagtatgcgccccgttacagtggatcagaaaagatgcgtctccaggtggtaccgttctttcaggccagagaggatgccttcttcgcggatgcccggaaagggattggctatgacctgcagagtgacagcggactgtatctggagcataccctgggttacaaccttggacgggatgacaaagattcagactggcgcgacggtgccagcagcctgaaaggtatgggaaaaatcagggcgaccgttaacacggcgctggcagcaggctggcagtttactccctggttcagcgctgagggaaaggcaaccctgccgctcagcgatgatcagggtgttaattatcaggcctccgtcactcttttgccgctgcagagtgatacggacaccgtcgcgttccagaccgcggccctgtttggcgacgcacgctacatgaatacctggtatggcgtcagcgatgtgcagagcagccgtagccgctatacgcgttacaaagcaacaggcggattttgcggtgttgaaactacagtgacgtggagccatcagtttgatccacactgggcctcactcgtgagcgcagactacacatggcttggcgatcatgccgcagacagcccaatagtatcccggcgtaatgaagccacgggcaccgtgggttttacttattcattctga

SEQ ID NO: 223506 - DNA, 1509 bp, Klebsiella pneumoniae
atgaaaaaaagggtatatctgcagatcctgttgccggtgctgatgacgcttattgttctgtcagtaactaactattttattgttttgtcccagaaggactaccagtcgagggtggctgaacggttattacaatactccgaacgggtagcagggcagttagcagatgctattgaagttgctgaaagctcaggtattgcaggctgtacaccagccggtatcaatcttttgagaaccatccgacaaaaaaataaatacattgatgatataggtatcgtcaacggcaaccgcattctctgtacggctggatggggaacattaaggagcagtattctcctgtcgtctcctccctaccagacgccgagcggatatttattgtacccggtcagaaaggacaatgttcatcttcgcaaccccggaaccgtaacgataaaacataatattgcagtagtatctcctgcgctgacgtttgccaacgtcctgaatgtgaatcccgacttttacattgccctggccgtgcgtaacgggcaaaagcagctcttttccctggggaaaaattatcttgccctgcaggcgacatcgggttctccttttcgtatcagtacccgccattgcagccagatccgcgatttatgtgtcacaacgaataaaccggacggtggggttatgtcactctcctggatgctgattttccttctgagcctgttcgggataattaccggttgctggatggtctcgcttatcgattcagctcttgaagctaaaaactcgctagaaaaacggtttatccgggcggtcaagaaaaaagatttttatattgagtaccagccgatcgttcaggccagcgacagagttgtggtggcgtatgaagccctggtcagatggcaggaccggtattttggccgggtatctccggagctgtttattggcctggccagcaggctaaaactgtaccagaaactatcaggatttgtgacggaaaccgctctggatgaaatgcaggaacatctgagaagaaatccttcactccggctttcactgaacgtaggtgataatgaaatgaatgactgtcagttcctggaacaactggtatcaggctgccgccgccttaaaattcagctccaacagatcaaactggagatcactgaaagttcacgatctgaatcaggtttgattgccgcattttgccagcgagccagggaatatggttttaatatttccctggatgatttcggtacaggaaccgcgaatatcgaatggctgacggtactggattttgatgagataaaaatagaccgaatttttattgccaatattgatgaccccgtgaagcgcgccttactggtttctgtggtgaaaggattacgtggcaccggaaaaccactggtgtttgagggggtggaaacacccgcccagtttaaatttatccgttatctggataagaaagcgctgatacaggggtggtttacaggaaaacctgcgccaatcgctgccttgaacatacaggtttaa

SEQ ID NO: 223507 - DNA, 426 bp, Klebsiella pneumoniae
atgttttctagtgagatcagtgaattcagatatcagctcacaaggcttgcaaggcaacttcggcgaatttctcagaacgatccccagtcgtggtcgcgcatgctggtcgtcagtgcaatagacaggatgggaaataatgtcaccccgtctgagctggctatggcagaagatatctacagctctaaccttgcagtgattctcagacagcttgaagaagagggcatggttgagagaaagactgatgccacggaccgcagaaagacgagagtccgtcttacagaaaaaggctgctcagtactggctgaaagccggaaacgccgcgatgactggctggcacaggcctttgatgaggctctgtcccctgaagaagcaacacacttgttaaaaatgacgccattgctgaataaactagcagaccatacttaa

SEQ ID NO: 223508 - DNA, 765 bp, Klebsiella pneumoniae
atgtcacggtttatctgtaacactcttctgcttacaaacgatgacggctttgatgcgccaggcttgaagatactggagaaagtgtgtcaacgcctggcaaaagaagtctgggtggtagcgccagcttgcgacagaagcggaacctcacagtctctttctttacacactcctttaaggttccgtcaaaagggcgttcatcgctatgttgtcgagggaacgcctgcagactgtgttgcaatggcggtgcgacatctcatgattgattcaccccctgattttattctttcaggtattaataggggggcgaatattggtaacgaaacgatcttttcgggcaccgtgggggcagcgatgacaggtgtgcttcttggttttcgtgctatcgccttgagccagtattttaacaacaggcataatattcactgggacactgcagaacatgcgtcggaaatcgtactgaagtacctgattcagggccggtgggactacggaacctgctttaatgtcaaccttcctgacgtagaacccgacagcataaaagatattgccatcacacgtcagggggaaggcaatctgaataacatcggcgttatagtgcgtgaggatcttcgagctattccttacgcatggctgaatctggaaagaagtgaaaatgctgaaccatcagacagtgaaggttctgcagtgagggcggggcatatcagtgtcacacctctgcatttcgacagaacgcattacagagacagattaatacattcacattga

SEQ ID NO: 223509 - DNA, 927 bp, Klebsiella pneumoniae
gtggaaaaggatctgccggtggcgctgcgtccggaaaccttcgacggctatatggcggatgtcgaacggctggtcagccgctatcacgacccccggcccgagtctctgcgccgggtggtgatggcgcccactaccgtcctgcactccgcgccgggcgcccagctgcgggagatggcgaagctggcccgccagctggggatccggttgcacagccatttatcggaaaccgtcgattatctcgacgccgcgcggcagaaattcgccatgacgccggtgcagttctgcgcggagcacgactggctgggaaatgacgtgtggtttgcccatctggtgaagctgctgccggaggagattgccctgctgggccgcaccggaaccggcatcgcccactgcccgcaaagcaacggccggctgggcagcggtatcgccgatctgctggcgttagagcaggccggggtcccggtctcgctgggggtggacggcgccgcctcgaatgaagcggcggatatgcaaagcgaagcccatgccgcatggctgctgcagcgcgcgcgcaaggggatgctggcgcagccgcgctacgccgggggcacctttgagggtggggccgatgcggccacggtggaggatgtagtgcgctggggcagcgccggaggggcgcagatcctcggcttagcgcagagcggcaccctgcaggtcggcatgcaggcggaccttgccatttaccggctggacgatccgcgctacttcggcctgcacgatatggccattgggccggtggcctgcggtgggcgcgccgcgctgaaggcgctactgctcaatggccgccccatcgtggaagacgacgccattcccggtctcgaccttgacgcgatgcgtcacgacgcgctggcggccgtccgtaccctccaacagcgcgccgctgtttaa

SEQ ID NO: 223510 - DNA, 438 bp, Klebsiella pneumoniae
atgtctgaccgtgccactaccacagcttccttaacgttcgagtcgctttatggcacccatcacggctggttgaaaagttggctgacgcgcaaactccagtctgcctttgatgcagatgacattgcccaggacacttttttgcgggtaatgagcagcgaaacgctctcgacgatccgcgatcctcgctctttcctgtgcactatcgccaaacgcgtgatggtggacctgtttcgccgaaacgcgctggaaaaagcgtatctggagatgctggcgcttatgccggaggggggagcgccttcacctgaggaacgcgaaagccagctcgagaccctacaactcgtcgacagcatgctggacgggctaaacggaaaaacacgtgaagcgtttctgctttcgcaactggatggcctgacatacagcgggcactgttgcaaatag

SEQ ID NO: 223511 - DNA, 849 bp, Klebsiella pneumoniae; identical to SEQ ID NO: 180697

SEQ ID NO: 223512 - DNA, 312 bp, Klebsiella pneumoniae
atgaaagctaagaaaaccaaaggcaacaaatccaaaaccaacaaaccccaaattattacaataaataacaatagcgtgataaatggaaaactgatgtgtactgtaatcatgtatgaagacgatcttaaagcctgttttgagacacttccaaataaatatggagaaccaatagtaggtgattacaagggagtattgatgagttttttgtgcaattcaatctggtatggattcggtaattctattgttgatgtagttcttgatgatgctattagagagcaagtcaaaaaacttgaagaacaaaataaaatgtaa

SEQ ID NO: 223513 - DNA, 297 bp, Klebsiella pneumoniae; identical to SEQ ID NO: 150208

SEQ ID NO: 223514 - DNA, 207 bp, Klebsiella pneumoniae; identical to SEQ ID NO: 150209

SEQ ID NO: 223515 - DNA, 879 bp, Klebsiella pneumoniae; identical to SEQ ID NO: 150210

SEQ ID NO: 223516 - DNA, 903 bp, Klebsiella pneumoniae; identical to SEQ ID NO: 150211

SEQ ID NO: 223517 - DNA, 342 bp, Klebsiella pneumoniae
atggataaagcatgggacggtaatttccgagatatcccgttggagcacttcgaaaaaatgaagtcaaaagcccgaacgctagctgaggtgaaaataagcccttccgatgtaaaagcgaatgataaaaatattttcatccgtatcgggatgtcaggcactggtgttaggcctaactatcaggttgaactcccaaatggcttggtcatagcaattaacgggataaaccacgaaaggtttggtgtagaagagttcgataaacaatgggtttctaaggcttatagcatcgagaaacttaacaatatgcgcatatttggcggagttttagaaacagagaatgcttag

SEQ ID NO: 223518 - DNA, 609 bp, Klebsiella pneumoniae
atgaagaaagttatcttattcctttgccaaggattagaagagtatgaggctagtgtattcacagatactattggctggacaacaacatacggattagaacccatagaattagtgacagttggtctacgtcaaaaagttaaatgcgcctggaatttcactatcgaaccagaatatcaactacatgaaattgatgatgatggctttgacgccatagccattcctggggggatgagtcgggccggtttttatgaagatgcatttgatgagcgccttctaaggcttattcaaaaatttaacgcaaaaaacaagattattgcttctgtttgcgtaggtgccttagcaattgccaagagtggcgctttacaaggaagaacgggcacaacgtatcatctgagcagtaaacgtcaagctcagttgctagaaatgggagtccatgttgttcagcaccctatagtggtggacggaaatattattacgtctcaaagtccggcaacagctattaatgtagcatttactttaatagaaaagctgacatctagagctaatgttgaacgaataaaagaaggtatgggatttgcccccctctctatcgatccatccggaatgtag

SEQ ID NO: 223519 - DNA, 783 bp, Klebsiella pneumoniae
atgaaaatatctgattttatatgttctcctttaggttggaatgaaaactcaccattttatttacgtgataactttctgttatcacaaaatataaattccgtagatgatgtatgcgtagtagaacccggcattaaaataatggggattgattatttagtacctaagtttttggatgaaatggagaaagtagattgggaaaaaatgggattaactttctgcgacaaaaatgaattttcattatcagaatatgaaatgttattgtccaaaattgagtctttattatttttttcaaaaaacatgcatagttcgataaaggcatttgcaattaacttccatccattattatctgagtgtgaagattttgatgtgagtttcagtgatccttgcataccattcgatgtattcactaatgtcccaaaatatgaagagaaatacgctgctgaaagatttgttgaagggattattcatgaaactctgcatttacagttaacagctatggagcatttattacctttgttccatgataaattgttaactgataatgtattttccccctggaaaggagagggccgaaatgaacgtggtttactacatgcagtctatgttttctcaaatattaaaaatttttggttgaaggtgcatgcgcaatctaatcatataaatgactttgcagtaaaaaggattaatgaaattcaaaaggaactatcaacggcaggacatatattaaaaagtgatgcattaactcctgaaggtagaatgcttgcctgcttgtgtttattataa

SEQ ID NO: 223520 - DNA, 591 bp, Klebsiella pneumoniae
atgttaaaaaatctatggaagagtgagatagaaattttcccatttaatcatttcttttgtaattcctgtattagttctaatgtcaccgagggtattttgcaatggttgatatctactaattcttggaaaagggttaatgaatatttttatgaccagtatgaatttagtttatatgatgcgaaattaccagatgagattcttttcctcaaggagaattttttttgtgatgaattgaaaagttttatagaaaataaatttgatgtggttctgaaaaataaagtggatattgttgcgcataaattaatatcaggcgacaaaataaaaattcataatgattttattgaagggcaagagtcacatcgtattttgtttcattttaataaaaattggaaagaagagaatggtggttattttatgatcttttctaaggatgagccggaatccttagaaaaaataattcctccacttcatggttcagttcaaggatttgagatatcacagaactcacatcatgcggttagtcaggtatacgattttgaaagatatactataatttactcattttacaggaagggaaatgaaaatatctga

SEQ ID NO: 223521 - DNA, 1119 bp, Klebsiella pneumoniae
atgcttgatacaattttaatcaagacggccagtaggtgcaatttggattgcacctactgctatgtatatcgcggggctgatacaagctggcaggatcaaccctataggatgaatgatgccacgatagaaaaagtggtagaaaggattacggaatatagtcttttgcaggtaactggatttgccatagttttacatggaggtgaaccacttcttttgggggaaagaagacttgagactttattatcaggtttaagaagaggtttaaatcctcaaaaataccctataagtatacaaaccaatggtgttttgataactgagaaaattttgaacttatgttcaaaatatagagtaagcatttcggttagtattgacggaacaagaaaagctaatgatatcgcgaggtttacacgtggtggtaacagtagttttgaggatgtaattaatggaattgaaaaattaagctcacaccaagatcacaccttcttgtttgcagggacattatcagttatacaaccgaatattcctgctgaggatacatatcattatctgaagagtataaactctccaagtatagattttctatttcaggatggaaattatgataggatgccttatggaaaaaaagatcttcaaactactgaatatggtgagtggttagctaaagtatttgaactctatatggaagatagcaatcctgtaccgataaaaatactggatgatattctcaagatttatttgggcggttctccaataaaagaagggaaaggaaataatgagtttggtattttgataattgaatctgatggcgagattagaaagaatgatacactgagagcatcatttgaaggtgtcgattttttcaaaggacgtccgtcggtacataatacttcattaatggaagtagtagaaagtgaagaatatataatttatacgaaatcatcttcacctttatcagcagaatgccagttgtgtgaatataaagatgtatgtggtggtggaatgccattatatcgatggagtaaaactagggagtttgataacccatcaatatattgtgcggatcataagatagtgattagtacagttaaaaaattcttgcagcggtctaaattattatga

SEQ ID NO: 223522 - DNA, 1200 bp, Klebsiella pneumoniae
atgaaaaagacaactataaatacatttattatgagtggtggagaaagatattgtcttgtattagataaaggcagcgggattcccctttattatcctgctttatatataactactcaaatcagaaacaaaagtgattcaatatcaacagttgagttggtggccggtgccatctcattattctgtaatttcttatctgaaagagatatcaatattgaggaaagaattatttcaggaaagtatctgagcattaatgaaatagatgcattaagagattatagtgagaagaagacccggttaaaaaaaattcttccatatactgtcaggaagaggaatgttgtaaaccgtgcaaccaaacacttcagattaaccaatatagcaaactatttgagttggttaagtcagatacttaaacagcaacaaggaagtataaatgaattcgtcgataagattagagagagaagaccaaaactaagaaggcgcagccgtcaagaccaaccagaaaaatctcttgatggaaaccaaattaatcatttattagaagtcataaaatgtggagcggcatttaatccattcggtgaaaatcttcagataagaaaccgacttattattctggtgctttattctttgggaataaggtcgggagagcttcttaatattcgtatatcggatattaactttagtgattccagtctggctatccgtcgtcgggctgatgataagaacgatccacgagttaaacaaccattggttaagacgatggaaagaaaactacctctatcttcggcattggcaaaagaattgcacaattacattaccagtgtccgtaggaagtttaagaatgccagaaagcatgagtaccttttcgtaacccataagtctggcccaacacaaggtatgcctttatcgagcatggcttaccataaagttatcgatagcatcagaaatgtcatgcctgagctttgcaatcttacggggcacaaactcagacatacctggaactatgaattctctaaaaaattagatgagatgcctgagcgagtaagtgaggctgaacaagaaaaaatgcgttctaatcttatgggatggactcccggctctggaactgcacagatatataacaaaagatttattcaggataaatcacataaagtcgcaataaaactacaggaagatattaataaaaaaggggaggttgaatga

SEQ ID NO: 223523 - DNA, 1542 bp, Klebsiella pneumoniae
atgaattcagtacataaagtgttaatgagtaaagatcttattccagctaaaatggatgggtattatttttcaccacaagaagatgtatgggtacttgacagaaacaatcagataaataaaaaagcagttactgatgttcttaacgacaatttaaaagaaggatatctaaatacaattgcactatttgcgagggattatagcgcaagttttgcctccaagatacatggagcatttcttgcttttataaaggaagagcaatgcgtatatgtcagtaaagcttcagttttaaatttcagaagcaaaaagcatgttaaggatgaattattatttcgtctgaggatatttatcactaaatggtactctcttggctacaatggaatagcttcggaagctgtacagataatgaaaacatggaaacttgttaacggaaagccaggtgatgtcgttaaaagaaaagaacccatacaaggtcctttgactgatattgaattgcaagaatttaacgagggagcaataagagcgtacgagaaaaaagaaatatctctttttatgttaactatggcacttattatcagccacacaggtcgtagacccttgcaagtaactcagatgaagataacagatatccttaaggtttcaaaagaagagggtgaaatttattatcttttaaatataccacgaattaaacaaggattaggattcagagaagagtttcgaacgttcagaatcaccaaagatctatatgaactggtttgtaaacaagccaaagattctttggcaatgctgtctgaatttatgggtagacaacttactactgaagagagtaaagatgtgccactttttatttcaaaaaataaaatcggattaattgataaaagtgttagtttagacttttatttaaaaactgatgtattgcatcattatagagggaaattaacagaggttttgaaagttgtcatcaagaaggaaaatgtcttctcagaaaggactggggaatccttacatataaatgccagaaggtttcgttatacgttaggaacacgagcagcaagagaaggctatggagaattcattatcgcagagctacttgatcactccacgattaagagtgtaggagtctatgttcagaatcatgttgataatgcttataagattgataaaactatggggcaggcattgactggaatatcatgcgtgttcagaggtcaagtaaaaagaaaagaagatattgaatatgacataactctaggtataaaaattaaaaataatgatggcgaagacactggcagttgtcagcaatgttccacatgttcagctaatgtccccattccttgttatacatgtatgcattttaccccctggctggatggaccgcatgaaaaggtttatcagtatttgattggcgaaagagaacgaatatacagcataactaacgacagaattgtaacggaatcgctcgacagaacgatcattgctgtaaaggaagtaattaaccactgcaacataatgcgaagctcacacaaggggaataaatccatatga

SEQ ID NO: 223524 - DNA, 2007 bp, Klebsiella pneumoniae
atgaccgatagtaatgtattattcttcaggaaaaagattgatataaatgcagagttaaatctgaaagagtttatccgattttgcagatacgatcttaccgctttagggagtgattttaactgggagtcttacgagtggagaggtgtcgctgtttttaccaaaataaatttaaaacgtaaggtaaaaacagataaagaacaattactcgatgaggagtatatcgattttgctaaagcttatatgagatatcagtcggctttaaccaaaagcagatggaagctgtcagcttcattgaccatattaaaagttgtcgaacaaacattactgatggccaataaaaatgcaaatatcaccggggtcagcatacctgttcttgatgaagccatccaaaccatcaagagtctttacaaagaacatccggcctatgattatggactggaacttcagaaatttgtgaagttccttggtgaaaatggtctattgatcgcgggtgtcctttcatgggtcagcccaataaaaccaccggaacctgttaaccgtgtgtctaaaaaagcagatgaagcaaggttaagtaaacttccggatgaaacggctttgaatgctatggcagagatcttctcactgcctgatgaggcattgagttgccgggatatttttactacttcaatttttgcgctcctgatgtgtgctcccagtcggatatcggagattttggcacttccctgtgattgcgagattacggaaacagactctaacggggtggaaaggtatgggctaaggttttactccctcaagggttatggtgcggacattaaatggattccagacgttatggttcccgttgccaggagggcaatagaaaggttaaagaaactttcaaaaaatgcccgtgaattcgcacagtgggtggaggagaatccatctacattcttcagacgggatagccttcctgaaacaggagaaaacgaaatattaaaaccctggcagatatgtgaaggattaggatataaccttgaaagaaaaaatgggaacgtaaagtttttatctggagtgagtttttataatagccagaaaaattacaccatgaactcattatgggaaattatcctgtccagattaccagaaggttttccatggtatgataaaaataaaggcataaaatacagcaatgcactttgcctggtgaatacccatcaactggagaaaagaaatgaaactatcatttacgagttacagaaaccaactaaaaatattttcatgatagatatttctgagaataagtatgaggggctaaggtttgaaaacatatttaccagacatcgctatattggcccggaaggaaaagctctgcatttgagaagccatcagcctcgtcatttactcaatacgattggacagcgaaacgggatgtcagatctcgacctggcgaagtggtccggaagaacactggttacccaaaacccggtttacaaccacgtatcagaagatgacatgctccgtaaggccgagacactggatatcagcactatcggctcacaggccttcatgattgattccgtagagcccaaccttcctgttactccgggtatgatcaatctctgggaacatggtgcagttcatgtcaccgagttcggctactgtgttcatgactatatgatgagcccctgcgacaagttcagggattgtatcaactgcaacgagcaagtttgtgtgaaaggcgaagaagagaagctccagcggctcaaggaaaggcacaatatgacagaagggcttctcttcagagccagggagtcaatgacggaagaagaactgggtgctgaccgatgggttcagcatcatgaactgacccttactcgattgaatgaattgatcgcaatcctttcaaataacgaaataccagacggttcacgtataaaacccggtggggaaagtttcactcagcttgggcgagtattaaataaatttgaaaatctcgaaaataatgggaatgataaatatatagagtaa

SEQ ID NO: 223525 - DNA, 399 bp, Klebsiella pneumoniae
atggcaaaacatcttaaccgaaatgatataggtacaatcataaatacaataattgtttgggataatgacaaaattacatgggatgaaatatgtaatgctgttgaaccattaatcggtaaaaaaccgacaagacaatctctgaacatgaataaagatattgttgaagcctatcagaacagaaagaaaggtatccgggctacggataatgaggtcaggaaaccagccagtctgaagattgctgctgcgagaattgcaaatcttgagaaaagagttcatcacctcgaagaacagaataaaaatttaaaagaacagtttgtgaagtggcaatataatgcttataagcatggaatggaagaacaccagttgaatgaagatctacccaccattgagcgacattga

SEQ ID NO: 223526 - DNA, 315 bp, Klebsiella pneumoniae; identical to SEQ ID NO: 150203

SEQ ID NO: 223527 - DNA, 279 bp, Klebsiella pneumoniae; identical to SEQ ID NO: 150204

SEQ ID NO: 223528 - DNA, 1185 bp, Klebsiella pneumoniae
atgaagggtatgcggaagatcaagaggggtaagaactttgctggtgtggtccaatatgcattgaagccaggttcacatcataaaagtgatccaatcgtcattggcgggaacatgttaggtgattcagcctgtgaactgatcgcagaattcgatagcaccaagcatcttcgccaggatgtcgcaaaaccagtttggcacaactcgctacgattgcctgatggagaaatattatcgaatgaccaatgggtaaccatcgctgacgactacatgaagaggatagggttcagtgatactcatctccgttgctatgtgcttcatgacgacgatggccagcatatacacatcattgccagcaggatcgacatggccggtgggaagctctacttgggtaggaacgaaaatcttataagcacacggatcattagtgaactcgaaatcgctcacggtctgacagtgaccaaggcagcaccttccattacaccaaagcaacagaagcgaataaaagtttcccgtaatgaacagatgctttcagaacggactggccttccctcccctaaagaagctctacaacaaatacttgataaaagtttgactgataaacctgaccttttaacttttatcaaaaggctggaagaagccgaagtcggctggacagcgaatgtcgcttctaccgggaaaatgaacgggttctcattctcataccgcgatatagctttcaaagcttcgcaattgggtaagggctactcttgggcaaatcttagtaacaggctcaactacaacctaggcgatctagaagctctgcgatccagcacaccggcaaaagaccaccctgctcctgctcctgctcctgctcctgctcctgctcctgctcctgctcctgctcctgctcctgcaaaagatgttgcaacaacggatattccaatggaaagcataagtgaaaaaattgctgaactcgaactgcgactcagaaaagacagaagaaaagaaatagtagaaaagattcttcaaaaaaacgcagtacaacagcaaaagcatctcaggcttatcggctggcttccatttcttagaaggcttgcagagcttctccgaagctatggtgtgagcattcttcacaagcccctccctggattctcaaaactctatacaacccgacctctacataaagaaagaaaaattcatttatag

SEQ ID NO: 223529 - DNA, 378 bp, Klebsiella pneumoniae
atgaatcaatctaatatcatcccacgatcattgcgaacacactgtgtcagtgtccgtcttaataactcggaacttcaattactcaacacaaaacgaggttctacatctaaaggcgaatggttacgtatggcttccttgcagaagctccccatgaatgtacctcctgtaaacatcgaaacatggaagactctgggtgagatcaatcagaagctaaaccgtatcgctcttcatatcgatagtaagagtaaagatagccagcttactcatacagagcttttcgctgtgaagcgacaattggaagagcttcgccagcacctgctaaatgctgacacatggagcaaaccctatgaagggtatgcggaagatcaagaggggtaa

SEQ ID NO: 223530 - DNA, 696 bp, Klebsiella pneumoniae; identical to SEQ ID NO: 150207

SEQ ID NO: 223531 - DNA, 1389 bp, Klebsiella pneumoniae
atggaattgatgccattcaattttgacagattgcctaatggacaggtgtttataagcaacctcgctggttttcatcacttcattgatgagcaagagctgcttgatctttctgatgagcaaatcagtgcggaacaatcaaacgcacttgaaagcaagctgttcataaccaacgaaagctcatcagctattgctccctatgctttaagttctgcttttgcaaaacgattgatgaatgaactggccatcaggccaattttcatgattgtgcccacattacgttgcgaccatacctgcaagtattgtcaggtcagtcgagcttcagtgaacgcctctggttatgatttagatcccgctctcatccctgatatcatttctactatcaaaaaactatcaactccaccttacaagatagagatacagggtggagagccactcttgcggttcgatttaattcagtctatctatgagcaatgtgctgaaacgctgggaagcaccgattttgagatggtggtagcatcaagcctgtctgtcttgaatgaggatatgcttgaatggtcgagagataggaacataacgttctctgtttcgcttgatggtgaggaagttgttcacaacagtaatcgaattcttggtcatgggcttgcgtacagtagaacagtgtcaggggtagaggctatcaaacggtctttaggcgctggtcgcgttgcaacggttactacagttactaaagatctcattaggcatcctgaatcaattgtccaggctcacttgtctcttggcctaaaggacatgtttatccgacctgttagcccctatgggtttgcacaaaaagcatcgttcacattttctatggaggaatacttcagtttctatgcctcgttgatagatgaaatccttaagatgaataatgaagggataagggttgtggaacattcggcctccattcatctgaaaaggatcttcaatcccggctttagtggttatgcggatttaaagtcgccaagcggggtcgtgcttaacagtattcttttcaattatgacggtcgagtatatggtagcgatgagagccgtatgttgcagaaggtgaaccctgaaacggagttcagtgcgggtgaggttaaaacgctatcattttctaaaagttcttactataacgcagtgttgagttcatcgttcaattttgctctgccaggttgtgatacatgtgcatatcaaccattttgcggtgcagatccatgccagaacataagtgtacagggtgagcctgttggtgataggagtcgttcaacgttttgtcagtatcacaaggggatgttcaggtatctgatgaactgcatctcagaaggtggtccgaaggctgagatgctaaaaggatgggcatatgtctga

SEQ ID NO: 223532 - DNA, 273 bp, Klebsiella pneumoniae
atgtgcgaaaggacgttaaaaaaagatgtttattctgaatgggttatacgcaatagcctgtactggatgacttcgcttactcagtggaaactttgtgaagatatatcctcctggacaatctcttttgaaaacgatggtcccgaatgcctctatgaattcgagaggctgctgaatgattatgctttgcgagaaaaactacagcataaaacgggggcgttgagagattctattgtccataaagtgcttcgcagtgtcgatgaaaggctttcgtga

SEQ ID NO: 223533 - DNA, 1896 bp, Klebsiella pneumoniae
gtgcgtagcccggacagcagcgcgctggctgacgagtacatgaatgtggctgggacgctgacagcaaccgggcgtagaatgccttctcaagcggccatccaggcagttcttgactatatctcatctctcattgctactgatgatgctgattctcctttactgacacttaatgatgaggcggggtttcgtctggcggcattcggcctgaatgcaattcagagcaatgcgatgacggctgaatatgatgagtttattgatggttttgtgttccgggatagtgtcggattcgttattcagcaaatagggactcctctgctcagctctgttgacagtgttcagcctgtcgttgagcagcagcgattggtgactgaggcattcagtgctgaatctgacgcggatatttctggttttgtatttcgcgacagtgtgggatttgtcctgatgaatctcaatggtgagcaaagcgatcagaataacgatggggtagatgacatttcacgcagaaatgcagcaaatcttgccgctgctgctgccgcacgagacgaaattaatacgcgtattgctcgcccggtttacgattacaatattctgatcacagacggccagtcgctgagtaacgggactgagggatgggcagcactgagcaaggacattcgcgctactctgaacattaatatgctcggtgactccgtccggccaaaaaatgagaacggttcaacatttacgccgttaaacggagctgaaatcagatcagcccatgcggtggtgcaggatttaatcgcccctcctgacggcggaaaccttatgaccgatgaggctgtggccgcactgcctcgtggggctaacaatttcggtgaaaccgtcgatattggcgcgatgtggatgtggcgggaaatgcagttacagttccggggagtggtaacggatgagcgcaaaattgtggctgttaactgcggtgtgggcgggcagattattgaacacctctctaaaggccattcctggggattctacaaccggatcatttcagccgttacccagattaaagccattgctgatgccgaagggaaaacctgcggcgtggtgggttttttatatcttggcaatgaatataactatgacagcacaaaaggaggggcgacagaccgcgcagaatacagagcactcctgagaaagctcattgatgatgtcattaccgatactaccgctatcaccgggcagacagagccccccctgactgtgctgtatcagaccagcggcaactggacgcgcgacagcacgaatatgagcattggcgaggctcagctcgatatctgtgcagcagatgcaaacgtaatgatggcatcaccggcgtatgctgtcaccgacaagggtggccatcttgacgcgaacggctaccgctggctgggaatgcagttcggaaaagtgctccatcgtgcaattgatcgtcgccagaactggcgtccactgcaacccctgtcagtcacgctgagcggaacattcctgcgtgcggatttcctggtgtggagcccgccgcttcagtttcgatcgtgctacgtgggttcatctccgacgacgtatgccgcaaaaggattcagagtcactgacgacgccggggacgttccggtgacgcgggtcgacattgtagccgataccgtagtcgatattacgctggggcgtgaaacgaccggcgatgtttatctatggtacgccagccagaccggaagtaacggtaacggaaatctgtttgacagcgacacaacggtcgctgttgcgaattacgaatttcatgaagggacggggcaatatccggaatcaaatattccagagctggtaaaccgtccatacccactgaataacccctgtgtggcatttcgtcgccaggcaatcgctatttaa

SEQ ID NO: 223534 - DNA, 1086 bp, Klebsiella pneumoniae
gtgcagcgcgataccgttggcgatagcggtcataccgaactcgcgcacgccgtagtggatgtagttcccggcagcgtcttcgttgatcggcttagaaccggaccacagggtcaggttggacggcgcgagatctgcggagccgccgaggaattccggcagcagcgggccgaaggcttcgatggcgttctgcgaggctttacggctggcgattttcgccgggttggcctgcagcttcgcgatgaactcgttagctttcgcgtcgaagtcagacggcatctcgcctttcatacggcgggtgaattcggctgcttcctgcgggaaggctttggcgtaagccgcaaacttctcgttccatgcggcttctttcgcctggccggcttctttggcatcccactgggcatagatgtcagacgggatgtcaaacggcgcgtgtttccagcccagcgcttcgcgggtcagggcgatttcggcgtcgcccagcggcgcgccgtgggagtcgtgggtaccggctttgttcggcgaaccgaaaccgatgatggttttgcacatcagcagggacggtttgtcggtgaccgcccgtgcttcttctaccgcgcgtttgatggcgtcagcgtcgtgaccgtccacgccgcgcaccacgtgccagccgtaggcttcaaagcgtttggcggtgtcgtcggtgaaccagccttcaacgtggccgtcgatggagatgccgttgtcatcatagaacgccaccagtttacccagtttcagggtaccggccagggagcacacttcgtgagaaatgccttccatcatgcagccgtcgcccatgaaggcgtaggtgtagtggtcgacgatatcgtgtcccggacggttgaactgcgccgccagggttttctcggcgatagccatcccgaccgcgttagcgataccctggcccagcggaccggtggtggtttccacgcctgcggtgtagccgacttccgggtgacccggggttttggagtgcagctggcggaagtttttcagctcttcaatcggcagatcgtagccagtgaggtgcagcaggctgtaaatcagcatcgaaccatggccatttga

SEQ ID NO: 223535 - DNA, 390 bp, Klebsiella pneumoniae
gtggatcacgccgcactggctggcatcgatcagcagctgggttatctcaaaatcattggtgaccacctggagatcgttccggtcgaggatcgcccgcgccagcgccagggtggtagtcccggcatccagatagatgcaactgtttttagcgatatgactcgccgccagcgcgccgatcgcctgtttctcctcactctgcagcgtgcttttcaccagatgactgggttccgcagccagccggctgacggcgcgcacgccgcccgagacgctgaccagcagcccctgctcctccagtttactgacgtcccgacggatggtcatatgggacacgccgaggatctccgtcagctcgttaatgcttaccgccccacgctgctccaccagggctaa

SEQ ID NO: 223536 - DNA, 576 bp, Klebsiella pneumoniae
atgcatccttttaaatatgataaattcgacttgcacaattgcaatgtgctttttgtgggcaatttattcatgccaaataatttgcaaggacttatctggtatcttaacaaagttcatccaatggtaataaaggaaaatcctgatataaaattaactatagcaggtaatgctaagaatgggatttctgaagaattgaaaaaagctataagtatatatgatggtaatgctataaatttaattactagtcctagtgatgaagaactccaagcgatctacgatggaaactgcatttttattaatccaatgcttaatggtgctggagtgaaattaaaaaatctagatgcgatgagaaacactatgtttgtcgttagtacaagcattggaagtgagggcactggaactaatcatggagaacagttagtaatagccaatgacgaagtgctatttgcaaagcacataattaattattctaaaaatatatcaggtatgaaagaaatagcatttaatgccttttcatttatacaggaaaattatgattcgaagaaagttttctcgagtattttcaaagagaactga

SEQ ID NO: 223537 - DNA, 732 bp, Klebsiella pneumoniae
atggacacaaaaaaatggaagaaaaaagcatatatatatattgagcgtattctagcaaaacagacagattgtattattgcaaatagttactatgagtataaatgtgctgttgatgcaggaataagtaaaaataaaataaaggttgtatataatgcagtttcgctagatggacaagaaaaattagaacgtataaagaaatgcaatgaaaacgaggtccagaaggagaaaataaatatactgtttgtgggacgttttgataaacaaaaggggtatgattatttactcaatgtaatcaaggttgccgacgtttctaaatatacatttaatatcattggcgattctgtacatgatgttttcgaaaaaatagaaaaagaaaatgtggtatattatggctgggttgacaataaagaattgccagcatatttttgcgagaatgatgtcttgcttatgcctagtcgatgggaatcgtttggattagttgcggtagaggcgcaattatatggagtgccagtaatagcaaataatgtggcttctttaccagaagttatttcagatggcttaacaggtatgcttgttaacttcgaagacgctaataaagttgttgagataatggattcacatactatccatttttggaatgaaaaaaaagaagcatgccgtgaattcgcatctaataaattcaggaaaagcgatatggtaaatagctatgtgcaaatatataagagctattaa

SEQ ID NO: 223538 - DNA, 180 bp, Klebsiella pneumoniae
atgaggaacttgttcctgaacttgaagaccccgatgagcttggtgagctgtatgtttttggataataaggagtgctgccaccatagtacccgccacctgatgatgatcggtgagaactatggctccgatgggagctatgactacgatgtcctgcaatgtagaatggaacttcggtgttaa

SEQ ID NO: 223539 - DNA, 825 bp, Klebsiella pneumoniae
atggcacgcaagctggaagagttagggcattttccaaagctgatatcaccgcaatttgtccgcccattcgttaaaagcaacaaaaatgacttcgttgatgctgaagctatctgtgaagcagcatcacgtccatctatgcgtttcgtgcagcccagaaccgaatctcagcaggcaatgcgagctctgcatcgtgtccgtgaatccctggttcaggataaggtgaaaacaactaatcagatgcatgcttttctgctggaatttggtatcagcgttccgcgaggtgctgccgttattagtcgactgagtacccttcttgaggacagtagtttgcctctttatctcagccagttactgctgaaattacaacagcattatcactatcttgttgagcagattaaagatctggaatctcagttgaaacgaaagttggacgaagatgaggttggacagcgcttgctgagtattccctgcgttggaacgctgactgccagtactatttcaactgagattggcgacgggaagcagtacgccagcagccgtgactttgcggcggcaacagggctggtaccccgacagtacagcacgggaggtcggacgacattgttagggattagcaagcggggcaacaaaaagatccgaactttgttggttcagtgtgccagggtattcatacaaaaactggaacaccagtctggcaagttggccgactgggtcagggagttgttgtgtcggaaaagcaactttgtcgtcacctgtgctctggcaaacaagctggccagaatagcctgggcactgacggcgcgacagcaaacttacgaagcataa

SEQ ID NO: 223540 - DNA, 615 bp, Klebsiella pneumoniae
gtgacgctgattgacctcggcacgctggcgcgtgaaggctatgaagcgccgctggcggtagcctatatttcgctggtgaacaccatcaataatctggcggaacgcgatcagttcgacgatcgggaaatcgtgttcgccaccgatgaggcccatatgatcaccaccaacccgttgctggctccctacgtggtgaaggtggtcaagatgtggcgaaagctgggagcatggctttggctggcgacgcagaaccttgatgacttccccaatgcggcgaaaaagatgctcaacatgatcgagtggtggctgtgcctggtgatgccgccggaagaggtggagcagatagcgcgctttaaaaagctgacggaggagcagaaggccatgctgctgtcggccaataaagcgaagcactgctataccgagggtgtggtgctcgccagccggattgaggcgctgtttcgcgccgtgccgcccagcctgtatctggcgctggggatgacggagaaagaggagaaggcgcagcgcagggcgttgatgaatgaatacggtattagcgagttgggggccgcgaagcgggttgcccggcagatggatgaattgcgggggatccttcgctag

SEQ ID NO: 223541 - DNA, 282 bp, Klebsiella pneumoniae
atgcactccctacactctgcggcatcgtacctgtacaccaactatgagaacgttatgtcacaacccgggaaaggatttttagtctggctggccggcctgagcgtgctgggctttctggccaccgatatgtacctgccggcgtttgccgccatgcagcaggatctcaacacctccgccgcctccattagcgccagcctgagcctgttcctcgcggcttcgcgctgggccagctgttctggggaccgctgtcggaccgctatggacgtaaaccggtgctgctga

SEQ ID NO: 223542 - DNA, 1167 bp, Klebsiella pneumoniae; identical to SEQ ID NO: 210849

SEQ ID NO: 223543 - DNA, 2622 bp, Klebsiella pneumoniae
atgccagtcgtacctaccgtcaccggccgccaggtcgaaagccgcggcgtatccacccagggatttcaggctgtaaatcagccaaatattactgatgcgctaactcaggtcggctctcaggctctggatgtatttggtcaggcaaaacagcgggcgaatgtcgctcttactcaagaggcatcactgaagctgaatgccgttggcaacgatctgctgaataaccctgattccggttttatgaatctacagggtaaaaatgcgatcggaaaaggccatgagtatgtgcagcagttcgattcgcaggtacaaagtattgctgcaagcctgcctgatgagcaggcgagaaatgcattcctacagcaggcacagcagcagaggatccagtttgcaacaacagctggacgccatgaagttggtcaggtgcgtcagtacgaggcaggtatgcaggaaggtacacttcgtgcattgtctcagcaggctctttctcctggcatgttcgcgccagcattgattaatgcccgtgattccatcattgcctacggtaaagcccacgggcagagcgatgaagaaatcgagtcgaatttcgtgcagtggagggagcaggcagccaaccgcgccagcgaagcatggtatacgcctacctatcaacagatgatggggccggaaggcaagatcgaagttacggacacgccgagtgaatcgcagctcttttccgccatgatctggcaggagtccggcggcaaccagtacggcaaagacggtacgcctctggtgtcgcctaagggggccgtgggcgtggcgcaggtgatggaagataccgggccggaagccgcccggctggctggtgttccgtgggaccgtgataagtggctgaatgacccacgctataacgcaaagcttggccaggcatacttcggcgcacaaatgaagaagtatgacaataacccggttctggcggtggcggcgtataacgctggacctggtgcagtagatggatggatcgaaaagtttggcgatccgcgtactggtgctatcagtaatgagcagttcgctgctgcgatcccttacgatgaaacccgcaattatgtggcgaaagtaaccggcagtgccccggccatcccaggaacagcgacaatgcaaaatctcatcaaccagccattctgggatgcaatgagtccacagaacaaatctgcgatgatgagtaaggttgctggaatgtacgacatgcaggccgccgcaggacgagtatcactgcagagtcgtatgcaggatgacatggcgaagctggaatccggtcagccagtcaatcctatctctgagcgggaatggctggcggtgatgccgttgcaggccagcccggcggaacgcattcagatgcgtgagtccttccagcagtaccagcaggcgatgacgctgcaacctgtttatcaaactattgtacagggttctgcgcagcagggtatcgcagcggtccaagcgatggcaccaaaggaagatgacccggacttcaaattcaagcagagcctttacgcaactgctcaggccaagctgaatcaggtgatgaaggcgcgcgagtctgaccctggtacctggctgcaaaccaactcgccggttgtaaaaaacgcctttgagcagtaccagaataatcaggcgtcaggtgaatatctggtttcccgcctcgaggccgagaaagaccggcttggcataaacagtaagaaggtacttcctgactccatgatcaacagcctgatttctaagatcgacaacaatcaggaatcaagcgttaccgccattcagtcggtggcgcagtcattcgggaaatactctgaccaggttatgcaacaggtgcagaaaagcgcgtatccggcgttgcaggtcataatggcgaccaataacccgcgagccgcaaacgcactctggcaaaaccgcagtgttaaaacttctgacctccgtggaagtttcgagaagaccgacgccgacagcgcagattcatcttggaatgaccaggccaaagatttcgccgggacgatggttgtgcagcctggcgggtcagccgtgtggaacaatttcaacgagcaaggtaagcggctgacctatatctatatgcaacgtggcatgtcgtcggacgatgctgcgaaaaaggcctatcaggacgttctcggcgaacagtatcagactaacggcacatggcgtatgccgaacactgctgggcaggatatacgcgacgtgagagacggcgctgatgtgtacctgaaaaacctgtcagcggaccagattatgccgcttataggcgatgcccgcttgcctgatgatgttaaccgcgagcagagcatttcacgcattcgtgataatgctcagtgggtgacaaacagcgatgaaactgggcttactctgatgatgaacggtctgctggtcaacaatgctcagggacagccgatcaccgtgccgtttgctgatctggcgaaacttggcgctggcaaccgcaccacctggaacagcctgaccaaattcgtgcagacgccggttaagtacacgcctggccagtcgaagaattacacggcggaaagtcagcgcgacaacctgatcaacattatccagaacggccagcagacgggacgataa

SEQ ID NO: 223544 - DNA, 1707 bp, Klebsiella pneumoniae
atgccaatttatacagatgatcctgggcagggtataaaccagccgttgtcgaatgccccggcagggctgggtgaatcgcttctttcctcactaaaagaggggttcaacgaagggcctgtcgtatcaggctatcggttttcccaggccgagaggctggcgaatgatcccaattcgaccattgtcgccaaatcggatgccgatgctcgcctgaaagagtacggcgtgaaaagcattaacgtaccggaaagtggcgtaacacagtcgtatcttgaccatgtgatcagcgagcgccgggaatcgctggcgaaacagcagatcgccatgtcggccccgtccggatgggtagccactccgcttaactttgcagcaaatcttgccggttccatggctgatccaggaaacgtggcgctggcgctggtcccgttcggtggagaagcgaaggcggcaaccatgcttgggcgtttcggcgagcgtttggctaccggcgcgcggcttggcgctggccaggccattgccaccgtgccactcacggcacaggcagcagcagcagaaggcgacgacttcacctatggcaatgcgctggagagcaccttctttaataccctggctggcgggctgatgcacgcaggcggcgggctgatagctgatgtagtgcgttcccgcagggcgggcgctggtgaaaaccctgccaccccggcagacgctcagcccgtaactgatgctcagccaacgccggtggtcacgcctgacaacatcccggcaggtgtcaatattcctgagtccggtaccaacgccgatctatcagcagcaatcgcgcgagatgcagagtcttatgcctatagccgcgcctatgatgatgtcgtgccggaatatctggcacgccagcaggagctacagaccgggcgcatcgacaacgttgcagatttgcgcactgaaatggcggccaatagccgacaaagtgaatcacttgacgctacgctggcccagcgcacgacggagtatcaggcgcaacgcatgaacttcaaggctgcgcgagctagggcactgcgtgatattcagagtgagaaagacgctatcaccgcgcgtaatcaggaaattaaccagatgcttgaacgcaacgctgtcgcagaacaggcgcgcggcagagaatcgcagttatcccgtaaagagataccggaagacctcgcgccgttaatcgaccagcgcgcacagcagatcagagatagcatgcagatgtcgcctgtcgctggtgctgtacgtacagcgtcggcagcggtgcgggaggctgactggagtgtaaaccagcaggcataccgcagcgcactggcgcacatgatggaaggccgctctccagacattgagccattctatgatctgcataaaccagcgctacgcgagcgtgctatccagcgcatacagaatcctgtgcgacaggctgatgaaggctcccgcgccgtcagtgaaagcgccgatcgtgtgtggcaggatacgcagaaggctgaccatgaaatcacagcggccacagccgatctggaaaatgaattcaatatcagtgacgcactactgaacgacattgcctctgacaatcctgatctggctgcgtcaatgcgtgagaacattgctgcgatccgtgcggaggccagtgacgactctatcggcaaagcgtatcgcgctttcgccgcctgtatgattaaccggggactgtaa

SEQ ID NO: 223545 - DNA, 2547 bp, Klebsiella pneumoniae
atggctaacgaatttctgacgcaatgtgaaatgaccgtcaatacggcagcagggcgcaaactttctgaggacgaaatggaatcgctggtacgtgacatgaacgacacaaccaaccggatcctggctggcaatgaagccctgacgctggaagaggctgcgatgcgtgccgcgcaagagcttggcaaccgtgatcaactggcaaaagtaatcgaggcacgcaacaaagctataaacacacgcattgcagcgcagcgccttggcgagcttcgtaggacttggaaagacaggcctgacatcggacttgaggcaatgctggttggccgtaatgacgcgcgtaccggctcacgccgatctgtatcgtctgaggtggcccagctgcgcggtaagtatcacgccggtatcaactacgatttcgaccaggccggactggttaaatttattgccagcggcagcaacgaccgggagatcgctgacgctatgtggcgcatcggtcgcggacagaaaacggacggaatgacgccgcaatcagtaagcgccgctaagatcataatgaagtggcaggaaactgcgcgcgtggatgaaaaccgtgctggtgcgtggattggcaagatgccgggctatatcgtccggcagtctcatgacatcctgaaaattcgtgccgccgggtatgagtcctggcgcaatgccattcttccgcgactggatgatgccacctttgacgggatcacagacagagaagggttcctgcgtggtgtctacgacggccttgcctctggtgttcacctgacatctgaaaatccagactggatgaatggcttcaagggatctgcgaatgtggcgaagcgcgccagccaggagcgcgtgctgcacttcaaagacggtgtgaactggcacgaatacaatgagcaattcgggaccggaagcctgcgagaagcagtattcggtggcctgaacagtgcagcgcgcacgacgggcatgatgcgcgtgctaggcaccaacccgcagaacatgttcaagtacctgacagacaccatcgcaaaagatgtgagcaagcagagcaacccggcagcgctggctgacttcatgaccaaagtgcgtcggctgaaccgcacggtgatgcctcaggttgatggatcgctgaatatccccggtagtgtcggctgggccaatgcctccgctaacgtgcgcggctggctgcgtatgagtcagctcggcggcgcggttatatcttctttcaacgacgtgccgatctctgcaaccgaaatgcgttatcagggccagaactttatgcaggcgctgaccggcgctatgaagggccgtttctcccgttataccagtgatgagcagaaggagatcctgtcatccatcggagtttactccgacacgatgacgcaggagataatccgtcgcatgtccggcgatgacagcatgagcgggaagatgggccgcgcgcagcagttgttcttcaaatacaacctcatgaacttctggacagaatcaggccgtaacagcaatgccatgatgatcaccaactggctggcgaagaacgccgatcagcagttcactgcgcttccggaagacctgcgccgcgttcttgacctgcacggtatcggtgatgctgagtggaacatctaccgcagcatggacatgtcagacagcgagggtcgcaaattcatgacgaccagcggcatccgtgcagttccggatgaggtgatcggtgactatgtagcgtctaaaggcctgaaggtcaccgagcgctctattgcggacgccagagagactctggagagccagctgcgcgggtacattctggaccgactgaacatcgccatgtcagagcctggcgatcgcacgcaggcgtttatgaagatgggtacggttcctggcacggtggcgggggaagcggtgcgcttcgccgggcagtacaaatctttcaccgccagtttcatgcagaacgtgctgggccgtgaggtcttcggacgcggctacactcccgccgggctgggggagtctaaaaccggatcgctgaccaatgcgttgttacgaaatggaaagggagccttccttggagctgcaaacctctttgtttgggcaactatgtttggttatatctccatgcaggcaaaactcatgctgaaagggcagactccacgcccggcagatgccaagacatttctcgcagccgcatctcagggtggcgggcttggcatcttgggcgacttcatgtttggcgaagtaaaccgcatgggagcagggcctgttacgtcgctgatggggcctgcagcatcgaacgctgacagcattatcacgctgctccagcagaccacgcgcggcgatgcggacctgggtgactggtatcgcacagctctggacaatactcctttccttaatgtgttctggctgcgtacggcgatgaatggtttaatattaaaccgtatacaggatgctctggacccaggatcgcttgagcgctaccagcgccggattgaacgtgagcagggtaacgacttcctgatcccaccatcacagttcatgctagggaaataa

SEQ ID NO: 223546 - DNA, 588 bp, Klebsiella pneumoniae; identical to SEQ ID NO: 210308

SEQ ID NO: 223547 - DNA, 2526 bp, Klebsiella pneumoniae; identical to SEQ ID NO: 210310

SEQ ID NO: 223548 - DNA, 2961 bp, Klebsiella pneumoniae
atgaaactacattttgaatctgaccttacctatcagcaaaacgccataacttcggtctgtgatttgtttgtgggacaggagaagtgggagagcgaaatgactgtgctggccccagctcagggtgcactctcatttgaaggcgcaacaggttcaatgcctgtaaacccacagatacccgaagatgatgttctgctgaaaaacttaaacaatgttcagttgaagaatcagcttccaccttcacctgtgctcgacagccatgattttactgtcgagatggaaacagggacaggtaaaacgtatgtttatcttcgcaccatgcttgagttgaataaacgatatggcatgagcaaatttatcatcgtagttccttccgttgccatcaaggaaggcgtttataaaacactacaaatcactgaagaacattttaaaagcctctatgcgggaattccatacgaatactatctgtatgactcgtctaaacctgcggatgtgcgaaattttgcaaccagctctgttatgcagatcatggtaatgacagttggtgcgattaacaaaaaagacgttaataagctctatcagtccagtgaaaaaacaaccgttgacgatctggataagccaattgatctgatacgtgctacacgcccaattattattgtagatgaaccgcaaagtgttgatggtggcttaaatggtgcgggtaaaaccgcacttgatgctatgcacccaatgttcaccttacgctattcagcgacacatgtgcataaacatcatatggtgtatcgcctcgatgccattgatgcttacaatcagaaactggtcaaacaaattgaagttgccgggcttgaagtccagaatgcaagcaatagcccctatgtaaaactggtcagtattaacagtaagaagaatagcattagcgcgactgttattgttgatatagccgataaaaaagggggcgtgaatcgttctgagattaccgtgtatgacggtacggcacttgatgacgaaacggggcgtgatatttatcagggatacaggataagcgagatccgcacgggcaaagaaggctatctgacactggaaacgccttctaatacctactatatgcaagttggtgatgtcgtgggtgatattgacccgatgctcatccagcgtcatatgattaggcgtacaattcgtgaacatattgataaagaacttcgactgaattcccagcaaatcaaggttctcaccctgttcttcattgataaggttgatttctatcgccagactaatgaagaaggacttcgtgaaccgggtgaatatgctcgtatctttgaagaagaatatctaaaagtgatcaaaagccccgcatataaagatttgctcccttctcatccagaacatgctaaagacgttcatgatggttatttctccattgataaaaaaggtggatgggctgaaacaaccgaaagcaataatgcaggccgcgaaaatgcggaacgcggttataacctcatcatgaaaaataaagagaagcttttgagtttctcgaatccggtgaggtttattttttcacactctgctttgaaagaaggctgggataaccccaatgtgttccagatctgtagccttcgagagatgggaagtgaacgagaacgtcgtcaaacattagggcgtggtcttcgtctgtgcgttaaccaagaaggtgaacgtgttcgtgatgacagcattaacattctgactgtcgttgccagtgaaaattacgaagcctacgctgaacgattacagtctgaaattgagagcgaaacgggtatccgttttggtattatcgaaaaagatgcattcgcccatctgatcttctctgattcctcacaaggtgtaggaatcaccggttcgcatgacatctggtctgaactacagactgaaggttatctggaaaaatcgggaaaaatcactaaaaccctgaaagaaactcttctcgatggcacttttgctgttagcgaaaggttccttcctcttcaggagcaaattgaggctatcctgcgtaaatcagcagggcgactcaatataaataatgctgatgagcgtaaagtaatcaaataccggaaagaggtcttaaacagccctgaattcgaagcgttatggcagcgcatttgccaaaaaacactgtatcgtctggcatttgatgaagatgtattgatcaagtcctgtataaaatcactttctgaaatgcagcctgtagcaaaagcaatggtcagtttcagcaaagcaacaatcaaacaaagtcaatctggacttgatgtcaaagctcagtctaatgggacaacaagcgctgttatagatgttgcagagcagccactgccagatattcttggtgttctacaggaaaaaaccggactgacaagacgcagtttaagcaccatcctgaaagagagtggaagactcgctgattttgctaaaaatccacagcagtttatcagtgaagctataggccgaatcaactactgcaaacgcctgtcaattgttgatggtattaaatattatccactaaaaggagaggtgtatgcgcaaagtctctttatggataaagagctaacaggatatgcccgtaatctttttgaaacctcgtctaagtcagtttacgaatacgttcctaaagattctgaagtcgaaagccgtttcgctcaggaactcgaagaacaggatgaagttaagctttatgtgaagcttcccggttggtttaaaattccgactccactgggaacttacaatcctgactgggccttagttattgaagacaatggtgaagaacatatttactttgttgtagaaacaaaaagtaaacacattggtcttggtaatgaagaagatgcgaaaattacttgtggaacagctcatttcagtgctttaaaagaagaaaacactaatgcagcaaaatatatcagagcgacaaatcttacagaagtaataagcagcatttga

SEQ ID NO: 223549 - DNA, 1851 bp, Klebsiella pneumoniae; identical to SEQ ID NO: 221213

SEQ ID NO: 223550 - DNA, 1281 bp, Klebsiella pneumoniae
atgacacaaatactgggacccggagagggaaaaacatcatcagccgcaaaagagccggttgttgaacgtaaacccgcacaggtattttttgaatcgatggcgctggccgcctcaatgagtggttattatgcagggccaacagccacaacgctgggaaattcgctttcattgggggcggggactgcggcaggtgtcggagaaggcgtcgcgggcgcacgggtgctggctgcgcctaatcccctcaccgttgctctgctggctatcttctattctccgtcactgaatgaaggtgagacggaaacgctacaaaatatacgtggcgaccagctctatcagaatctgatccatggccagatgatggtgggcgcttttacccgtgtaaattcaacggtcattgagggggattatgtcccggaatatgaactccgggaaatagcccgacaaaacggcacagtgcgcacgagggtacgctttcgtattgaagaagatcctgagtcaggggaactggtttcccgcagctatgaggtgggggaaaaaagtgggttggatcgggtccgggtgcggtttgcaaaacagctggataaagagacatggggttttgaagatccttcaattaaaggcacatttgtctggtcccggtctgccgggcagggaaaatttgagtggggttccagccagacgactgttcatgacgggagcgctggcggctctaccacaccgcctacacccattccggaaccgcggagcatctgggggttgcctaacccggccccggaatcgttaccgcccgtaccgggaacgccgatcccggaggaacagggaccaaatattgaaacattgcccatcgaagaccgggatttcgatgactttattattgttgacccgatgggggttgtcccggcaatctatgtgtattttaagaaagcccctgtggaagagtatgaggttgactattatgaaaattttgaaggccgttcaaggcagggaaaatatcaagtcgatcatattccatctagagatgcggttcgtgtatatttagaggatttatatcctgatgagggaagtaaatatatagataagatggttgataaggttgcttcagttgctattccaatagctgttcatcaaaaatgtagtgaaacctatggcgggcgtaataatcgtaaggtagagacagaaagcggcgagatgataactaaaaaagagctagatgctcgtgacttagaagctgccgtcaatgccaactgggatgcgaatgctgaatgccttaagaatgaatag

SEQ ID NO: 223551 - DNA, 396 bp, Klebsiella pneumoniae
atgcgcaatcgtacattcgctgacctcgatcgggtggtcgcgctcggcggcgggcatggtttgggccgggtgatgtcctccctctcctcgctcggctcacggctgaccggcattgtcaccaccaccgataacgggggttccaccgggcggatccgtcgttcggaaggtggcattgcctggggcgatatgcgcaattgcatcaatcagttaattgccgagccgagcgtagcgtcggcgatgtttgagtatcgttttggcggtaacggcgagctttccgggcataacctcggaaatttgatgttaaaggcgctggatcacctgagcgtgcggccgttagaggcgatcaatttgatcagaaacctgctgaaagtggacgctttcctgatcccgatgtaa

SEQ ID NO: 223552 - DNA, 816 bp, Klebsiella pneumoniae
gtggagaatctgctgtatgccgcccgaaaacgggggctggaacccggtatcttctgcgccatccacacgtatggccgtcgtctcaactggcatccgcatgtacatgtgtctgtaacctgtggaggtctgaataagcatggtcagtggaaaaagctgagcttcctgaaagacgcgatgcgttcacggtggatgtggaatatgcggcagctgcttctgaaagcgtggtcagaggggatggcaatgccggagtcgttgtcacatatcacgacggaatcacagtggagaagcctggtgctgaaatccggcggaaaatactggcatgtgtacatgtcgaagaagacagccggagggcggaatacggcacgctacctaggtcgttatctgaagaagccaccaatagcggcttcccgactggctcattacaacggaggggcaagcctgagcttccgttacctggaccacaaaacgggagaaacggcgacggaaacgctgacacagcgtgagctggtcgcgaggctgaaacagcacatcccggagaagttttttaagatggtgaggtacttcgggttccttgccaaccgtgtgtgtggagagaagctgccgcaggtgtaccgtgcactggggatggataaaccggaaccagtggcgaaagtgtgctatgcacaaatggtgaaacagttcctgagtcgtgacccgttcgaatgcgtgctgtgtggctgccggatggtataccgccgggccattgcggggctgaatgtatcagggctgaagaaaaacgcgcgggatatcagtctactgaggtatatgccggcctga

SEQ ID NO: 223553 - DNA, 3426 bp, Klebsiella pneumoniae; identical to SEQ ID NO: 211730

SEQ ID NO: 223554 - DNA, 768 bp, Klebsiella pneumoniae; identical to SEQ ID NO: 212721

SEQ ID NO: 223555 - DNA, 900 bp, Klebsiella pneumoniae
atgattactacagagcagcattttaatgaagcaaaagacttgctaaattttttatgtagttggaataataacttgagcggttacgtttttagagggcattcagatgagagctttcaattattaccatcagtcttgagagataactcaaggtatttagctgataatcaatatccaagaaccaaagtgcctgggcagttgcgaaattcagatcgtgaatggcatcaaattcagcatgagcgaataattctgagggacttttacaagttagcagataatcatggccttaaagttcctaacgtagaaaaattacgtaattctttaataggaagatatgactataattttacacagcaaggtagaatcgaatggctttctcaagatatattagaagtcgcagcattagcccagcactatggtatacctacacgtttattggattggtcatatgatccttttgtttcttcctactttgcagcaagtggcgtcactgatgattcaggtaatttggcagtatggtgcttcaatgctgaatatttgtccacgtggttaaatctcaactcgcgattaaaattaaaattaattatccctccatactctgaaaacagcaatttatctgcgcaacgaggcttatttacacacatgcctgttgaattcgatttttcaaataatgataatgcttcaatccctgttgaccggactcctttagatatcaaacttgataatatacttcctccagagccatacacgcaaaatagagaaaaaatatttttaaaactcacattaccatgctccaaagcaaaagatcttctaaaattcttacttcaacaaggttatggggaagcccgcatttaccctggatataagggaatagctaatcaagttatgagaaaatacaaatag

SEQ ID NO: 223556 - DNA, 993 bp, Klebsiella pneumoniae
atgataccgtatactactgtcattgtaacgtattcaaatagagggcatttattaagttcggttgtatcgtcaacagtaagttcaggatgtgaccatgtaataattattgataatggcagcgatgtagaaagtaagaaactaattaatgagttgcctgcgctatataatctagtaaagtttactgtatcaactaatgatagaaatgaaggttcagctatcgcttttagccatggaatggatttggcatccaatacaaaaaatgaattcgttttattccttgatgatgataatcttcttgaagaaggggctgttcagcgtgcaataaatattgcatcgcaggaatctgagtgtaagagtgtattctttttattaagagaggataggcctcattatatggaatttattagaactagacgtaaagaggtattactcggcgaagaaaattcatttatggcatttacattaaaaaaatacattaaaaatattttttcaaaaaaaattaatataaatgaaaaacactattttggaaaggatagtgttgaatatctttccgtgccatgtggcccatatggtggtatgctgactaggaagtctatattgaataaaggcatgcgaccaatgaaggatatgattctttatttcgatgacacgaaatatacgtatgatctatcttctgccggcataaagttatatttattaacaaactgcctcattaaggatattgatgattcatggtctgcaatcaaaactagcaaactatcatcacctatattcagtgctggtgattttaaaatacaccacaccataagaaatagagtgttctttgaaatgaccgtaactaccacaaggaaaagtatatatataatgaatattttttcttttatgcttatattgtttttaaaggctcttttaagcaacaacttaaaagtatatcttaaaattcttagatcgatatgtgatgggtttgacttttatgaaaaaaataaaaaatag

SEQ ID NO: 223557 - DNA, 738 bp, Klebsiella pneumoniae; identical to SEQ ID NO: 214128

SEQ ID NO: 223558 - DNA, 1479 bp, Klebsiella pneumoniae
atgagtgataatgatacaatcccgaagaagtctacaagccagattaacaaagcggtattctttacatctgctttgctaattttccttcttgtcgcctttgccgccgtattcccggatgtcgccgacaaaaattttaaactactacagcaacaaatcttcacgaatgccagctggttctacatccttgctgtggccctgattttactaagtgtcacgttccttggactctcacgctacggtgatatcaagctgggcccggaccatgcgcagcctgatttcagctaccattcctggtttgcgatgcttttttcggcagggatggggatcggcctgatgttctttggcgttgccgaacctgtaatgcattatctttcgcctcccgttggcacgccagaaaccgttgcggcagccaaggaagcaatgcgtctgaccttcttccactggggactgcacgcatgggcaatttatgccattgtggcgctgattctggcgttcttcagttaccgtcacggtctgcctttaactctgcgctccgcactctatcccattattggcgatcgcatatacgggcctgtaggccatgcggttgatattttcgctgttataggcacggtctttggcgtcgcgacatcgctgggttacggcgttttgcaggtgaatgccggtttgaaccatcttttcggggtgcccatcaatgaaacggtgcaggttattctgatcgtggtcatcacggggttagcgacgatttcagtggtgtccggcctggataagggaatacgtatcctgtctgagctcaatctgggtctggcgttgttgctcctggcgctggtcctgtgtctgggaccaaccgtgcttctgctgaagtcatttgtggaaaatacgggcggttatctttcggaactggtgagtaaaacgttcaacctttacgcgtatgagcctaagtcgagcaaatggctggggggctggacattactgtactggggatggtggctttcatggtcgccgtttgtggggatgttcatcgcacgggtctcccgcgggcgaaccattcgcgagtttgtcaccggcgtgctgtttgttcccgcgggttttacgctaatgtggatgacagtgtttggtaacagcgcgatctatctcattatgaaccagggggccacagacctcgccaatactgttcagcaggatgtggcgctggccctgtttaatttcctggagcatttcccgttctcttccgtgctgtcattcatcgcaatggcgatggtcatcgtcttctttgtcacgtctgctgactcgggggcaatggtagttgatactctggcaacaggtggagtggcaaacacacccgtctggcagcgaatattttgggcctcgctcatgggcattgtcgcaattgcgcttctccttgccggagggctaagtgcgctgcaaacagtgacaatagcgagtgcattgcctttctcagtgatcttgtcgcggtag

SEQ ID NO: 223559 - DNA, 294 bp, Klebsiella pneumoniae; identical to SEQ ID NO: 102300

SEQ ID NO: 223560 - DNA, 483 bp, Klebsiella pneumoniae; identical to SEQ ID NO: 157455

SEQ ID NO: 223561 - DNA, 633 bp, Klebsiella pneumoniae
atgatctgcggcggtgatgtcttctgccttgatggtgaatgtgacaaagccacgtccgggaagagcaacgactttgggcaggcggtgtctgagctggcggcactggctgccgcggggaaggacgtcgcggcactgaacggggtggatgtccgggcattcaccggaaaagcgaagttctgtaagaagtttgctgccggcttcagtaactgctgcaaagacagcggctggggccaggatgtggggctggcacgctgcagcagcgaggaaaaggcgctggccaaagcgaaaaaagacaagctgacggtcagtataggggaattctgctctaaaaaggttctggggatttgcctggagaaaaaaaggagctattgccagttcgactcaaaactggcgcagatcgttcagcagcagggcagaaacggccagctgcatatcggttttggcggcgccagcagtcctgactgtcggggcattaccgtcgcggaactccaggggattgattttaacaagctggatttcaccaactttatggacgacctgatgaaaaatcaaaaaataccggaaaacgatgtgctcaccaataagaccagagaacgaattaaggaaatcatgagtcagcaatccgcgcaataa

SEQ ID NO: 223562 - DNA, 753 bp, Klebsiella pneumoniae; identical to SEQ ID NO: 152528

SEQ ID NO: 223563 - DNA, 549 bp, Klebsiella pneumoniae; identical to SEQ ID NO: 111106

SEQ ID NO: 223564 - DNA, 594 bp, Klebsiella pneumoniae
atgagtgaagaaaaacgccctgtactgagcctgaaacgaaaaccggcggagaacagtacggcacccgcggaggcgacacctgtccctggtgtggtgcgccgtaagaaggtcgtggtggtttcgtccccgccggcctggaaggcaaagaaagagaaacttgagaaggttaaacaagcggcagaagccgccgcgcgtaacgcggcgccggcgccggttaaagcagtaaagacgccacctccggtgcgttatcttcgcctgctgccgccggaacaggccattatgaccctgaaggcgttctggccacagctgttcgacggaaactccccccgtctgctggcgacgggcatgcgcgaacagctgtttgccgacattgtgaaccgcgacctgccgctgtcgcataaacaggtgattaagtgcctgaagagtctgacccggtctgcgggctatctgtcccggatgaaggtgggggcctcccgctatgacctgcagggaaatgctgtggccaccgtcactgctgaagaagcgcagtacgccagtgagcgcatgatgaaggagctgctgcgagctgaacgaaagatgagtcagaccctttaa

SEQ ID NO: 223565 - DNA, 768 bp, Klebsiella pneumoniae
atgatgaaaaatgaaacccttaacacgcttattctgcgtcacggcgaccggatgctgcgccaggctggctggcccgacactgttgatatggcacccgtcgcccccgaaaccgtacccggctggcttgccgcctgcggctctctcagtggcgtggaaatcctcacacttacggaacagctttgtcagccgctgacgtatggccgggcagcgttgttgctcgccagcgcccggcggctggcgggaaccccggctcgtctgcacctctttccggtgcaggcacatccgcatccggagcggctggctgactgtcaggttatccgcctgccttacgctcaggagtggctgacggcggcggaatgtgacgatctgctggccttcctgaaagcctccctcacgcagatatcggaaatcgtccaccgggatacgaagcgcatcgccgccgcgctgacgccgtccgtcaatccccgtctgatggacaggcggatcggtgactggcgcttgctggccgtggagtatgatcatgataactgcctggacgaagacgaaaccgacaggctggataaggtcctcgatgccattctgattcgcgatgcgcgattctgcccggttctgctcaccctggttaacgagcgggaggaaactatcaggagcgcaggggttatcactgatcagctgcgttttacggacattccggtccggcgctggtttgatcgccgggttttaagggatgtggtgagagaggcccgcgccatcaaaactcaggactga

SEQ ID NO: 223566 - DNA, 339 bp, Klebsiella pneumoniae; identical to SEQ ID NO: 137918

SEQ ID NO: 223567 - DNA, 429 bp, Klebsiella pneumoniae
ttgcgctaccttggacgcctgtcaggccccttcctcgaccgcttcgatctttccttagagatcccattgccgccgccaggaatactgagtcagggctcgcagggcgaagaatcgagcgcaacggtccggcagcgggtgctggcggcgcgtgaacgacaaatgctcaggcaaaataaactcaatgcccatcttgagaatcgtgaaatgaagaactgctgtcgcttaaggcgggaggatgctgtctggctggaacagacgctaacgcagctggggctttctattcgcgcctggcagcgtctgttaaaggttgcgagaaccattgccgatctggcagaggttgaagagattgaacgctgtcatttgcaggaggcgctcagctatcgggcaatagatcggatgctcaaccatctgcagaaaatgatggcgtaa

SEQ ID NO: 223568 - DNA, 408 bp, Klebsiella pneumoniae; identical to SEQ ID NO: 214917

SEQ ID NO: 223569 - DNA, 249 bp, Klebsiella pneumoniae
atgaggaagaggaagaggaagaggaagagcatcaacatcaacatcaacatcaacatcaacatcaacaacaatagcagcaagaggcaaagccagaagctgaagcagattcagattcagattcagattcagattcagagccagaggcagcggaagaggcagtgtgccactacaaggcttgttcatccgctcctgccaggcaacagcggcggccgctttatcgacagagactttgtcctgctcgtcttttga

SEQ ID NO: 223570 - DNA, 306 bp, Klebsiella pneumoniae; identical to SEQ ID NO: 139665

SEQ ID NO: 223571 - DNA, 702 bp, Klebsiella pneumoniae
atgtgtgcgatggatcgtagtggtgatgacagagtaagtcaatcagtaaaggatgttcttcttcacataaaagaactgtatcattcttcaccagtttctgtgtgtgtcagaaactctgaaagagaattcctctataaaaacacttcatttgaccagttgtatgcttatctattaaataaagaaaactctaatttcaaaaatgttgtaccaatagaggttgatgtgttcctcttgaggctagaggttgagtgtagcttacttgggaatggtggtgttttaagtaagtccttttctaataaaggaactggttttaacgtttatatggaatgccgccaggcagaaaacggtgagattatcgtgatttggatgcttaatttgttaatagttaggcctcttgcaggatttagagtttttaaacaggacctacactccagtaaaaaatttgatgaattaataagccgtttaactgataaaaacctcataacactttccttttatatgtccgggtttgatgtttcagaaatatcaattgctatgaacgttgaaacaaaaaccattgattcaagaatcgagagatcaaaaaaactaattaagcagtattacccctcatttattcagtttaaatatgaatgtttccgtaacaaggcaatatacttttttattgaacaaacactcgattatcttttgttaaaactttgttaa

SEQ ID NO: 223572 - DNA, 393 bp, Klebsiella pneumoniae
atggcaaaagttcaggcttatgtcagcgatgaagtggctgaaaaaattaacgcaattgtggagaagaggcgagttgagggggctaaagataaggatgtcagtttttccagcatatcgacaatgttgcttgagctaggtttgcgagtttatgaagctcagatggaacgtaaagaatcaggttttaatcaaatggcgttcaataaggcattgcttgagtacgttgttaaaactcagttttcagtgaataaagttctgggtattgagtgcctgagtccccatgttaaagacgatccccgttggcaatggaagggtatggttcagaatatccaggaagatgttcaggaggttatgctccggtttttccctgatgaagataacgaggtcgaggaatag

SEQ ID NO: 223573 - DNA, 483 bp, Klebsiella pneumoniae
atggcgtttgctgccctgttattaatatccacgcctgtatgggccacggattgttttgatctggcgggacgggattaccggattgatccggatctgctccgggctatttcatggcaagaatcgaagtgggtggtgaatgccatcggtaaaaatccgggaacaggatacggtgccggactgatgcagatcgattcgcagcaccatgcccggttatcggagttcggtattaaaccggaacatcttctgacggatgcctgcctgaatatttataccggtgcgtattatctggcgctggcgtttaagaagtggggcgtcagctgggaggcggtcggcgcctacaacgcgggatttcgcagaacggacagacaggcgatgcggcgactggcatatgcgagaaagattgaggctgtataccgggccatcaaggcaaataaaaacgccggacaatcccgggcggttaaaaacgaaagacctcatgaatga

SEQ ID NO: 223574 - DNA, 543 bp, Klebsiella pneumoniae
atgcacacaataaacgtcaaccccaacgtcaacaccgccactcgtgaatcagacgaacaatttaaaacagacaaatatctgcgttatgccgtcaccgatggcgatgagcgtctggattttatcccggccctcttttttacgccgtcagcctataatatggcggcaggctggttacgccagcattcggattacgatggcggattctggtcttactggattattccgcagggtgtcggcgggaatattaccccaggccgcattcagttcatcaccacgcagaccgggtacattgcacctgaaggggagcagcgttacaggatgcatatccccggaaactattttgagggtgaagtcagcgccgatgcagcaggaattattgctacactaatgattatgaactggctgtcatggcaggtggcggatatggggccggaatatgcccgagtctgtaaacatctggtttcccgtcaggatgcgctgaaagattatatcagcattattcatcatcccgaacggcatttaatctggcgggcgattgattaa

SEQ ID NO: 223575 - DNA, 858 bp, Klebsiella pneumoniae; identical to SEQ ID NO: 102269

SEQ ID NO: 223576 - DNA, 963 bp, Klebsiella pneumoniae
atgcggacacgctttagtctacggttatctccctttacttcatttcctttctcacaggccagaaaacataactggcctgaatattctctctgggaccacggtcccacctgcatcgtcggtcaggttatctgcctgggaccacggtctcacctgcgtcatcggtcaggttatctgcctgggaccacggtcccacctgcgtcgtcggtcaggttatctgtctgggaccacggtcccacctgcgtcatctgtcaggtaatctgtctgggaccacggtcccacctgcgtcatctgtcaggtaatctgtctgggaccacggtcccacctgcgtcatcggtcaggttatctgactgggaccacgggcccacctgcgtcgtcggtcaggttatctgcctgggaccacggtcccacctgcgtcatcggtcagcttatctgtctgggaccacggtctcacctgcgtcatcggtcagcttatctgtctgggaccacggtcccacctgcgtcgtcggtcaggttatctgtctgggaccacggtcccacctgcgtcatcggtcaggtaatctgcctgggaccacggtcccacctgtatcgccggtcaggttatctccctgggaccacggtcccacctgcgtcatcggtcaggttatctgcctgggaccatggtcccacctgcgtcgtcggtcagcttatctgcctgggaccacggtcccacctgcgtcatctgtcagcttatctgcctgggaccacggtcccacctgcatcgtcggcacattattagttagggataacggttcaatcaatgcctgtcacgaacaggtattggcttgtcgccagcaacccgatgagctgagtaatcacgcagcagggcggctattacaggcgatggtgaaagctctattgggatctgaacgaagcatgttgagtgaaatttgcaaaatttcgcagagtatgcagcttaatctttaa

SEQ ID NO: 223577 - DNA, 972 bp, Klebsiella pneumoniae; identical to SEQ ID NO: 214758

SEQ ID NO: 223578 - DNA, 1167 bp, Klebsiella pneumoniae; identical to SEQ ID NO: 214759

SEQ ID NO: 223579 - DNA, 1011 bp, Klebsiella pneumoniae; identical to SEQ ID NO: 214760

SEQ ID NO: 223580 - DNA, 516 bp, Klebsiella pneumoniae
atggccttaccacgcaagttaaaacacctgaatatttttaatgccggtaacaactggatgggcattgctgaatccgtcaccctgccgaaattcacccgcaagctggaaaactaccgcggcggcggtatgcccggttcagtcggtattgatctggggctggatgatggcgcgctggatacggaaatgaccatcggcggcactgaggcgcttctgtttaaacagatgggcaaagccacggtggacggcgtgcagctgcgctttaccgggtctattcagcgtgacgacaccggcgaagttcaggccgttgagctggtcgtccgtgggcgccacaaagaggtggattccggcgagtggaaaaccggcgagagcaattccaccaaggtcagcagcgttaactgttacgcgaagctgaccattaacggtgaagtgctctatgaggtcgatgcgatcaacatgattgaagttgttgatggtgttgacctgatggaagaacaccgtaacgccatcggtctgtaa

SEQ ID NO: 223581 - DNA, 1173 bp, Klebsiella pneumoniae
atggcgcaagactatcaccatggcgtgcgcgttgttgaagttaacgacggcacccgctctatcacgacggtgagcacggcgattgtgggcatggtatgcaccggcgatgatgccgatgcctccatgttcccgctcaataagcctgtactgcttaccgatgtactgaccgccagcggtaaagcgggcgagtccggtacgctggcccgctcactggacgcgatcgcagaccaggcaaaacccgtcaccgtagtggtgcgcgttgcccagggcgaaaccgaagcggaaaccacctcaaatattatcggcggcgtgactgccgacggtaagaaaaccggcatgaaggcgctactttccgcgcagtcgcagctgggcgtgaaaccgcgcattctcggcgtgccggggcatgatacgcaggccgtatccactgagctgctgagcgtggcgcagagcctgcgggcctttgcgtatatgtcagcttacggctgtaaaaccgtggcagaggcgatcacttaccgcgacaacttcagccagcgtgaaggaatgattatctggcctgacttcataaactttgacacggtgctgcaggcggatgcgaccgcctacgctaccgcccgcgcccttggcttgcgcgctaaaatcgacgagcagaccggctggcacaaaaccctttctaacgtgggcgtcaacggcgtaaccggcttgtctgcggatgtgttctgggatctgcaggacccggcaactgatgccggactgctgaaccagaacgacgtcaccaccttgatcaggaaggatggtttccgcttctggggttcccgctgcctgagcgatgacccgttattccagtttgaaaactacacccgtaccgcgcaggtgctggcagacaccatggcggaggcgcatatgtgggcggtggacatgccgcttaacccttcgctggctcgcgacattatcgaaggtatccgcgccaaaatgcgcagcctggtaaatcagggctacctcattggcggtgattgctggattgatgacagtgtgaatgacaaagacacgctgaaagccgggaaactctggatcgactacgactatacgccagtgcctccactggaaaacctgatgctgcgccagcgcatcactgaccgttacctggtggatttcaccacccgcgtaagcgcataa

SEQ ID NO: 223582 - DNA, 1074 bp, Klebsiella pneumoniae; identical to SEQ ID NO: 213426

SEQ ID NO: 223583 - DNA, 1119 bp, Klebsiella pneumoniae; identical to SEQ ID NO: 213425

SEQ ID NO: 223584 - DNA, 909 bp, Klebsiella pneumoniae; identical to SEQ ID NO: 213422

SEQ ID NO: 223585 - DNA, 891 bp, Klebsiella pneumoniae; identical to SEQ ID NO: 214895

SEQ ID NO: 223586 - DNA, 849 bp, Klebsiella pneumoniae
atgaacctggacgaaagaatcaccctggtcgaaaaacagctgcaggagctgtcacagccagcgctggacatcccaaacaccgaagtcattaagcagttagtggtctgcgaaaagcacggcgactatgagcaacgccagcgcgtatcaactggccttgtccgtctgccaggtgcgccgacaagctgcccgggatgcctgaaagatgagctcgttttcctgcgaaacgagaaggccaaaacggatgacagaactcgcactgcgaatgttgaacgcctgatgctggagctcaaggtcccggcccggtttgaagcctgcacgctggataactacctgccggtgagcgaagacgcggagtttgcgctgaaagtctgccgagcgtatgccacccgctggccagatcgacggaagaacggcggcggcctggttatgtgcggcaaacccggcacgggaaaaaaccacctggcttatgcaattgcgaaaagcgttatcgcagaacaccagagcccggttgtgttcaccaccgcgctgaaaatcgcccgggagtttaaatccacctggtcaaagacggcgacccgctccgaggaagacgtgatccgcttcttcaccaagccggacctgctgattatcgacgaggtaggcattcagttcggcagcaaagccgaggagatgatcatgtttgaaatcatcaacacccgctacgagcgcctgaaaccgacgatcctgatcagcaacctgccgaaggatgagctgacgcagtttatcggcgagcgcgtcatcgaccgcatgaacgacggcggaggctgcacgatttcgtttacctgggacagctatcgggagaaccggtcatga

SEQ ID NO: 223587 - DNA, 1029 bp, Klebsiella pneumoniae
atgagcgaatcgttgaaggatgttgtttcatcagttaaagatgcaataattacaccagtccaagaggcttttgtatatagggcaaaaaatccattttttggaagtttgattatatcctgggtttactggaactggaataaaattgcttacatgctactttcggatgatgatgttttaaagaaaatagaatttataaaaaaatcaatccctgacaatacccttataccatttacgtcttttagcataccccacacacatagcttatggtttcctttatttttctcaatatttttcacccttagctaccctgttttctcttgggttcttacactaattcataagggtatttctttccgcattgagaaagtagattctgaaaaggaggttaagagactccagcttcagggtgctataattacagagtttgaaaaaaatgaggggctcagagcagttgaaagatcgaaaacagaggagacaaaattctcaacagcagaaagagcagcagagtcaaaatataacattaaagaattgcaaacccagcatgccacgctaaaaactgaagtcgctcaacttgaaaagcagaagcaaagtatggaaacgattttaagcgagcaagaaaagagaagaaaaggagttgttgaagaaataaccttactccaagaaaaagtcgcaccagaaagggaaagcgtccagagaattgagcgaataataaatagaaatatagaattagaaaaccttttaaccacaaaggaatctctgattaatagcaaacttgatgaaacaaatcaaaaatatgcattttacttcagcaacatggtaatgcttgatatgtataaagttgagtgcgaaaattacagaaaaatatttaaggaattagaagaaaaaaccactcagatttttagttatgttgaatctgatgaccctaccagaggtaggagcaatgaagggtatttcatgttaaaaagcgatataaaggaactagtaagcaaagggctagatcacgagcagaaatttagaaattctcactaa

SEQ ID NO: 223588 - DNA, 468 bp, Klebsiella pneumoniae
gtgaagcaacaattctgccttatcaacgaccacgttaagcgtaacgtcgtcaacttcatccagtctctgcctgtagaccaccgatcgccgctgattatcgaggcgcgcgaagaaagccgcaccgacaaacagaatcgtctcatgtggccacttttgaaagacctgagcgatcaggtgatctggcacggtgaaaagctggagccagcggagtggaaagacctcattaccgtactggtcagccagatgcaaaacccggagcgtaagcagaaatccgcccctggcatcaacggcggcctcgtctacttcggcgttcgcacctctcaatccagcaagcgctacatggtcgaggtaatcgaggcgatctactggttcggcaccgagcacaatgtgaagtttagcgagaagtccagcagtcggattgcgtgggcccaggaatggagggcttcgcatgcacagtctgctcgctaa

SEQ ID NO: 223589 - DNA, 168 bp, Klebsiella pneumoniae
atgcacagtctgctcgctaaggtcatggagcgcggtattttccgcgtgccagcgcgccgcaagcgcaaggtagaagtaaagccttccgatatccccacctttcactatacggctcacctggcagatgtccgctggttgcgccgcgctgccagaaggaaaatcgcatga

SEQ ID NO: 223590 - DNA, 669 bp, Klebsiella pneumoniae
atgagcctttaccgaagcattaatggagctatctggcgcaacatctgggttgttggcgatctgcatggttgccatacgctgctgatgaacgagctggaaagggtcagttttgacccattgtgtgacctactgatctcggtaggtgaccttatcgatcgcggtgcggaaaacgtcgaatgccttgagctaatcgcaatgccctggtttatggctgtaagagggaaccatgagcagatgatgctcgacggactatcctcttccggaaacgtgtatcactggctcgctaacggtggcggatggttctttaaccttgactacgacaaagaacgcctggctatcgcgttggcccatttagttgcaggtttgccactcatcatcgaggtaatgaccgagggtaagagggtggtggtctgccatgctgattaccctcataacgaatatgcgtatgacaagcccgtcgatgcagaacaggtgatctggaatcgtgagagagtgagcgcggctcaggatgggatagtgaatgaaatatccggtgccgacctgtttatttttgggcacaccccggcacatcagccaatccagtacgccaatcagatgtatatcgataccggggctgtattctgcggccgtctgaccttggtgcagatccagggtggtgatcatgcgtaa

SEQ ID NO: 223591 - DNA, 693 bp, Klebsiella pneumoniae
atgattaatacccaatacctccagtatgttcgccagcagctgatagtggccaccgccgatctgagcggtgcgacgaaagggcaactggtagcctttgcagaaaacgcgcaattcaccgctacggcgcgcagccggggaaggaagaaggtttatagcgaagtaaagcaaaaaatggttaacccggatgggccgccgatgagcggcagccagtcccgcgctaagggttcatcaatcgctctcgttctgcccgttgaatattcgacggcaagttggcgacgggctctgctgtcgctggaagaccaccagaaagcgtggctgctgtggaactacagcgataatatccgctgggaacaccaggagacgatcacccggtgggcatgggggcaattcaacgaaaagctggccggcgtgcgcattgcaaagaaaacagtcgatcgcctgcgccaacttatctggctggccgcgcaggatgtcaaagccgagctggcagggcgggaggcgtatgaatatcaggcgctggcggagctggttggtgtagcaaagtccacatggacagaaacctacctccctcattggctggcgctgcgcagcagttttgtgaagcttgatagcgacgctctcatatcggtaacgcgatcacgttcacaacaaaaggcgacaaatttagatgtaagtcttgcaaaaccgaactga

SEQ ID NO: 223592 - DNA, 528 bp, Klebsiella pneumoniae
gtgccacgggcaaagatcggaagggttacgccagtaccagcgcagccgtttttccatttcaggcgcataacgctgaacccagcggtaaatcgtggagtgatcgacattcactccgcgttcagccagcatctcctgcagctcacggtaactgatgccgtatttgcagtaccagcgtacggcccacagaatgatgtcacgctgaaaatgccggcctttgaatgggttcatgtgcagctccatcagcaaaaggggatgataagtttatcaccaccgactatttgcaacagtgccgtctgctttatattcctgccagccatgctgaagatccctgcaaagttattatgtgcatggcgggcaagctcaccggcgatagcggcggaagcgagtgtaacagtgctgaagctgctttcttcaatatcgttaaaaagaacaagcacggctttttacccaaccacacgaaggatgccaggaaggcttttcttaatgaatgcccggataatggcgaaggtggaagtaaccagtcgatga

SEQ ID NO: 223593 - DNA, 1944 bp, Klebsiella pneumoniae
atggcctttaacccggagctggggagcacgtctcccgctgtgttgctcgataacgccgagcgcctggataagctggtcaatgggccagccgcagatgttcccggccgtggcggtgatcctctttattcatggcgccagatgatggcgaaaaatgatgagatacggcagaacatcattccgctcagcaagcaataccagacactggcagcggcgcaggcggatatcgcgaatatccccgaggggagcaccacgtattaccgcagcccggacgacatcgccctcgcgattgaggtcatgaacgttggcgggacactgcaacctaccggtcgaaaaatgccatcacaggaatatgtcgaacctgtcgatgaatatgtgacaaccagactatttagcgaggtgcttccaggcattcccttccttctacaggatgaggaaagcggtgtcattatgttcggcgaggatagtggagcaactcacgttccagggttatcactgaaatacggttccgatctggtgtattccgtcacacaaatacccggcgtagcgcatgttgaactggatgaaaatggaaacgttttgcgttgggttgacgactccggtgagactcatgacgcctcaccgggtagtggtgcagaacctacacccgttgcggtatcttccccggttatttctccccaggtctatgaaaatgccctggtgagtgagattggctataaccagtggatcaataacgtcgctgtgaagttcgggcgggattattttttcagtggcgttcggctggggacgaccgggcctgagcgaatcctgggaaacctggctatctgccgccgacagggtgagcgtggaaaatttgggtgctatgaatttggccctcgcgctgctgttctgggcgatacggcatcaacggacgaccatgatgcaccgtcgattttgctcgatacgcgcgccggtgctgaagttcccatacagatttttcagtctgatcactcaggggcgaatgtctggcttcggaagtggtcatcgcagacgttagatcctgcgaatatttccgggccagaggttgtatctgacacgtcaaatatgacctatgcccagtcctacagaaacccatttaatcagaatgagattctggtatttgcccgtcggggatctacgaattcggcgcgctgggtcgcacatcactcaacagacaacggcaggacatggcaatccaatgcatttatcggcggttccgatttgtatatgaccacttgccagagtgtggacgggaacgccattcatctcgcgatccaacagcatccacgttcgaccgacacgcgcgtgttatatatgaaaatcaaatggagtgataaatccctcatcaattatagtggaatcacagcgctgcctgatattatgacttatggatatattgaccccttcttaaatggcatccctgatgtagtctttgaagcctctttaccaaccaacacaaaacggttgtttgaagtcaaggatgatggagtgtcgatattatttcttatcgctgaattcaatgcatccaactattcttatcgacgaatgaaaatgtcacagttttcgggagggacacctgtaatacatgatataggcgactgcggttctccaatgaataatgatgatgcgacgttttatgtgccaggcggcactatcatttctgcaactgatgttctcgtttgtaactgggtgaaaattcccgcccttggtcagttaacccgatatgtctatgacggttctgcctggaatgggaccctgctggacgaggttaaagatggccggaaaatctgtaggccgctggttttccgagaatactatcaggacaatggcatcctgaaataccatgatacaaatactgtcgtctacttgcgagggacatataacgcctatcgtgatttcgatttagatgctgtattaataaatatctga

SEQ ID NO: 223594 - DNA, 126 bp, Klebsiella pneumoniae
atgacatcaattattaaaatgcgcggtgctgtgttggcaacccctgtgctaacactgaatgatattccgttctcacgccagaaatgtattaactggctgggagctgacagcgtgacaatttcatag

SEQ ID NO: 223595 - DNA, 195 bp, Klebsiella pneumoniae
atgacgcggattactgttaaaatcgacactgtttcttccgtaaccgtagtattttacagacagtcggataactgggagagcttaaatccgtatgaacgtgacgacatgatctcccggtgggtaaatgaaaacattgaggcacaaagagctctcaatggcagcactggctaccttctcagctggaaagtaaattaa

SEQ ID NO: 223596 - DNA, 732 bp, Klebsiella pneumoniae
atgggtaacggaacacgaattttattaaatgcagacggaattattactgactgggcgaaacagcattttgagcctgtatcttcgcctctttcagcaatagcaaatccgaaagttgcatttgatttactgaccccggtggataattcgcgtcatggtttttctgtgcagcagggtgtgcagaaactgaaacaatacgggctcgaattccccggaaccgctggcagtcagaccacgtttaaagagccaggactgacagggctttccttcctgacggcctttcgtttgagcgcagttgatgtatttcagtatgtgctcgattgccgggatttgacgcccggatcaggtcatggttttgccattacattcaacccgaccgggcagcggcttgagctgcgggtaggatggcctgacggaagtcagggcatttattatcagtcagggatgagtattatcgtcaataagtggtatgtggcatgcggtgtcatttctcctaaccgcaatcacaaattaacgttgtcagatgggactgcaatcgccgccagcccggcaggttaccttgcaaacgtggcgggtagccccctcatgctgggagccagtgccgctggttcgtcaatgctgaagggagatattggattcttcggcgcctggggtaatgaatttactgcgggggatatcgcgaccgccattgcactcggcatcaatatcatgacaggcaggggacagacggtatga

SEQ ID NO: 223597 - DNA, 939 bp, Klebsiella pneumoniae; identical to SEQ ID NO: 210305

SEQ ID NO: 223598 - DNA, 342 bp, Klebsiella pneumoniae
ttgcacagccactatctgaccgcgctctcctgcctgcaggggctcgatccgcacaactgtatccgcccctttaccccctatgtggtgatgcgcgtcggcgacgtcccggtggttccctactaccggccgggcgatgaccgtattgcccaggcgctggccgggctggcgccccgctataacgcctttttactggccaaccacggaccggtggttactggctcatcgctgcgcgaagccaccaacaataccgaggaactggaagagaccgcacggctgatatttaccctcggcaaccgcgagatccgctacctgaccgctgacgaagtaaaagaactgagataa

SEQ ID NO: 223599 - DNA, 840 bp, Klebsiella pneumoniae; identical to SEQ ID NO: 6027

SEQ ID NO: 223600 - DNA, 780 bp, Klebsiella pneumoniae; identical to SEQ ID NO: 15299

SEQ ID NO: 223601 - DNA, 1077 bp, Klebsiella pneumoniae
atgaagtcggaactggcggaagttgcgaacgatatggtagatacaaataagaaatatttgatctggaacaataaaggcggcgttgggaaaacgtttttgacctataatcttgctgtcgagtatgcaatagcgcattcggatgaagatgtagtcgttatagatgcctgccctcaatcaaatgtttctgagattattttgggcggcaatggagttggagaagaaaatcttaacaacctccgtgatagaaatactactatagctggttacattaaagagcgctttagcaactctccacttgcacgcctggggaatgagtcttcatattttgttaaggctcattctgtaaatccaaaaatgccaaacaatctttatcttttaccaggtgacgtagacttagatatttgttcaaggcttattgcgcatattggatcctcaccggttaaagaagcttggaaaaaaagtcgatcacttttgatagacctcatcgcttcatttgaggcagataaaactatttccgagaggcctaaaacgttttttattgactgcaaccctagttttgcaagctacacagaacttggagttgtcgcatcaaatcgagtaattattccatgtacagccgatgctgcctcaattcgtggtatcaaaaacttagttaaattgatttatggagtttctattgatagcactgaacaagacgaaatgttccttgatttcaacaaggaagcaaaacaaagtaaaatagaattccccaagctacatctattcgtccaaaaccgatctcgaaccaacgaaagcgacgctgcaaaagcattcaagtcgcacgctgaagaaataaaaagaatcacatctgaattattaaaaacacaccctcatttatttactgatgaaagcattgatgatcgcgttaagcacgttaaagatggcaacactcttgccgcaatcattaatcatgaaggctgcccattaagcaatcttcaacacaaaagttacactatttatggtatggcaacacaagcaaataaagctcaaattgatgctttagaagctgatgtaaatggtgttgtctcctgtatctga

SEQ ID NO: 223602 - DNA, 354 bp, Klebsiella pneumoniae
gtgattccaatagaacgacatcagcgtattttagccctggtggagcagcgtggggcggtaagcattaacgagctgacggagatcctcggcgtgtcccatatgaccatccgtcgggacgtcagtaaactggaggagcaggggctgctggtcagcgtctcgggcggcgtacgcgccgtcagccggctggccgcggaacccagtcatctggtgaaaagcacgctgcagagtgaggagaaacaggcgatcggcgcgctggcggcgagtcatatcgctaaaaacagttgcatctatctggatgccgggactaccaccctggcgctggcgcgggcgatcctcgaccggaacgatctctag

SEQ ID NO: 223603 - DNA, 2802 bp, Klebsiella pneumoniae
atgaatcatattccttccggcgtccggcattttaccgccagacagctcgggattcgtgatatcaccgttcttgcagaatacggtcagagggaaaatacccgccgtgagcatgcagcgctgatacgtcagcactatcagtatcgtgaatttgcctggccctggacatttcgccttacccgtcttttatatacccggagctggataagcaacgaacgtcctggcctgcttttcgacctggcgacagggtggcttatgcaacatcgtattattctccccggagccaccacgctgacccggttgatttcagaggtaagggaaaaggcgacgttgcgcctgtggaacaaactggcactgataccgtcagccgaacagcgttcacagctggagatgctgctggggccaactgattgcagccgcctgtctttactggaatcactgaaaaagggccctgtgaccatcagtggtccggcgtttaatgaagcaattgaacgctggaaaactctgaacgattttggcctgcatgctgaaaacctgagtacactcccggctgtgcgcctgaaaaatctcgcacgttatgctggtatgacttcggtgttcaatattgccaggatgtcaccgcagaaaaggatggcggttctggttgcctttgtccttgcatgggaaacgctggcgctggatgatgcactggacgttctggacgccatgctggccgttatcatccgtgacgccagaaagattgggcagaaaaaacggctccgctcgctgaaggatctggataaatctgcattggcgctcgccagcgcatgttcgtacctgctgaaagaagaaacaccggacgaatcgattcgtgctgaggtgttcagctacatcccaaggcaaaagctggctgaaatcatcacgcttgtccgtgaaattgcccggccctcagacgataattttcatgaagaaatggtggagcagtacgggcgcgttcgtcgtttcctgccccatctgctgaataccgttaaattttcatccgcacctgccggggttaccactctgaatgcctgtgactacctcagccgggagttcagctcacggcggcagttttttgacgacgcaccaacggaaattatcagtcggtcatggaaacggctggtgattaacaaggaaaaacatatcacccgcaggggatacacgctctgctttctcagtaaactgcaggatagtctgaggcggagggatgtctacgttaccggcagtaaccggtggggagatcctcgtgcaagattactacagggtgctgactggcaggcaaaccggattaaggtttatcgttctttggggcacccgacagacccgcaggaagcaataaaatctctgggccatcagcttgatagtcgttacagacaggttgctgcacgtcttggcgaaaatgaggctgtcgaactcgatgtttctggcccgaagccccggttgacaatttctcccctcgccagtcttgatgagccggacagtctgaaacgactgagcaaaatgatcagtgatctgctccctccggtggatttaacggagttgctgctcgaaattaacgcccataccggatttgctgatgagtttttccatgccagtgaagccagtgccagagttgatgatctgcccgtcagcatcagcgccgtgctgatggctgaagcctgcaatatcggtctggaaccactgatcagatcaaatgttcctgcactgacccgacaccggctgaactggacaaaagcgaactatctgcgggctgaaactatcaccagcgctaatgccagactggttgattttcaggcaacgctgccactggcacagatatggggtggaggagaagtggcatctgcagatggaatgcgctttgttacgccagtcagaacaatcaatgccggaccgaaccgcaaatactttggtaataacagagggatcacctggtacaactttgtgtccgatcagtattccggctttcatggcatcgttataccggggacgctgagggactctatctttgtgctggaaggccttctggaacaggagaccgggctgaatccaaccgaaattatgaccgatacggcaggtgccagcgatcttgtctttggccttttctggctgctgggataccagttttctccacgcctggctgatgccggtgcttcggttttctggcgaatggaccatgatgccgactatggcgtgctgaatgatattgccagagggcaatcagatccccgaaaaatagtccttcagtgggacgaaatgatccggaccgcaggctccctgaagctgggcaaagtacaggcctcagtgctggtccgttcattgctgaaaagtgaacgtccctccggactgactcaggcaatcattgaagtggggcgcatcaacaaaacgctgtatctgcttaattatattgatgatgaagattaccgccggcgcattctgacccagcttaatcggggagaaagccgtcatgcagttgccagagccatctgtcacggtcaaaaaggtgagataagaaaacgatataccgacggtcaggaagatcagttgggagctctggggctggtcactaacgccgtcgtgttatggaacactatttatatgcaggcagctctggatcatctccgggcgcagggtgaaacactgaatgatgaagatatcgcacgcctctccccgctttgccacggacatatcaatatgctcggccattattccttcacgctggcagaactggtgaccaaaggtcatctgagaccattaaaagaggcgtcagaggcagaaaacgttgcttaa

SEQ ID NO: 223604 - DNA, 228 bp, Klebsiella pneumoniae; identical to SEQ ID NO: 213970

SEQ ID NO: 223605 - DNA, 564 bp, Klebsiella pneumoniae
atgaatgacacgggcatgtttacgctgatgagcgaggcgcagcgcaaggagtgggacacgcagctctacagcgacgactgccccgaaatcacactcgacaacgtgatcgccacgttccgggcgcttaacgccagcaagggagaaacgtttgagcagggcgtgattgacgtgttccgcaacctctcatgggactataaaacgcataacccgtgctttctgggaaaaaaaattatcattgatggtgtcctggataatcatcgcgggctgtatttttccgtgcgcacgtatgcacagaaccgcatcgatgaccttgcccgcccgttctggatcctcgacggaaagaccatacccgataatcgcgtctccgagggggcaaacctgagcgcgtttatcagtcagggcggtgcgaagagcgtgggggaggtgtttacgtgcgagtatttcacggtacgcacatacaaaaaaggctccgcgcacgtcacctttacccggccagacctggtggagaaggtgaacgacattatcgcgcggcactatccgggggcgctgccgccggtggtctga

SEQ ID NO: 223606 - DNA, 627 bp, Klebsiella pneumoniae; identical to SEQ ID NO: 207927

SEQ ID NO: 223607 - DNA, 684 bp, Klebsiella pneumoniae
atggaatgcactggccagcgcatccgctgcgcaggcgccctgcgcgatggggttggcaaacaggatggcttccggattcaggatggtggtgaggctgctgtccacccaggtcgggtcaatctcggacagataggcaatatccatgtctccgccttccagacagcctgccgacgtgatgatgttcagccagtacgtcagcgggtacttgtaccagtgaacgtgatagaaggcgccgttcacctgcttatcgtcctttctcgcggttcccatgccggtcttgccgagattgatactgaagccccccagattgaccatgcaacctggcgaacggctgacgtccgtcatggccatcggctcccagtacccgatggccagaccggggcgaacaaaaagcggtggcggcgccggacacagctgcaggggattaccgggattgctggtatcaggcagatcgcctttaccaacctgcacgctgccgagcgacagagggaagatgcagcgccagcacacatcggtgatcgggttaacaaaccggccctcacaggaggggtcagcagccgcactgaggctgtacccccacaacatcagggcactcaggaaaagcgtcagggttttcacagaaacatccttattttacagggaaggtctcaatattcagccgttcaccggagggcgccggcgtga

SEQ ID NO: 223608 - DNA, 450 bp, Klebsiella pneumoniae
atggccagcgggaagaatgcccggcggccagggttaaagcgagcgctgcggcggctccgcccgggcgatgtgctggtggtctggaaacttgaccggctgggccgcagcgtgcgcgatctgattacgctcgtgtcggagctgcaggcgcgcggggtgaattttcgcagcctgaccgacagcattgataccagtaccccagcaggccgctttttcttccacgtcatgagcgccctggcggaaatggagcgcgagttaatagtggagcgtacccgagccggattagccgctgctagggagcaggggagagtcggcggccgccgccgggtaatgactgaagaagtggtggagcggtgccgccgaatgctggagaacggcgctacccggcagcaggtagccgatgtgataggtgtagacgtgaaaacaatctacaagtacctcccggcgacttga

SEQ ID NO: 223609 - DNA, 258 bp, Klebsiella pneumoniae
atgtcgcagattgaaaatgctggaacttcctcatcgaaaacgaaacgagtcaatcgaaaaaggcaacctttatcgggagcagagaaacagaaaatgtttgtttcccgtaaaaaagaaacgcataaagcaattaatgtctttatcgataaacaacttaaagatgatcttgtccagctgtgtgaaaccacaggattgactcagactcagatgattgaacgctggattcagagtgaaaaagcccgtattttcaacccataa

SEQ ID NO: 223610 - DNA, 558 bp, Klebsiella pneumoniae
gtgaaagtaaatcgtactctcctcagatggtgtctgcccggactggtcagcctgagcctgtgcgcacccgtaccggccgtttatgccgcgaacatcgagaccggattttccccggaaggaaccgccctgcagctggttctgaaaaccattacgaccgcacaacaggaaatccggctgatgggctattcgttcacgtctccggaggtggtcagggcgcttgtcggagcaaaacgccggggcgtggatgtgaaagtcgttctggaccacaaagccaataccggcgagcgtaacaaggccagccgtgcagccatgaatctgctgatcagcgcgggtataccggtccggacggtggatacctacaagatcctgcacgacaaagtgattatcgctgacgggcgtaatacggaggtcggttcgttcaactttagtcgcgcggccgatcgcgccaattcagagaacgtgctcgtcgtgtgggatgaccctgttgttgctcaacgctatctgcagcactggtcgtcacgctggtcgaagggaacggactggaaacagacgtactga

SEQ ID NO: 223611 - DNA, 267 bp, Klebsiella pneumoniae; identical to SEQ ID NO: 214999

SEQ ID NO: 223612 - DNA, 267 bp, Klebsiella pneumoniae; identical to SEQ ID NO: 215002

SEQ ID NO: 223613 - DNA, 879 bp, Klebsiella pneumoniae; identical to SEQ ID NO: 52347

SEQ ID NO: 223614 - DNA, 318 bp, Klebsiella pneumoniae; identical to SEQ ID NO: 52346

SEQ ID NO: 223615 - DNA, 741 bp, Klebsiella pneumoniae
atgcacatgtcactgcatcctttctacgtccaggaacggcagcgcgcggggcgcagatatgctttccgcccggaaaaacaacgtcttctcgatgcgctctggccggtactggtcagcttctgcgatgccggtaaacacacggtaggaatgagtgtgtccagactggccagagaactcagcccgaaagatgcccggggggaagtgatttccggtacggaagtcacggtacgccggatttcggcattaattgccgagcaggtccgctttggtgtacttggcgtatcagaagaaactctgtgggacagggaatcacggaagcgactgcctaaatacgtctggatcacgcccgttggctggaaaatgctgggtgttgatttgatgaagctgcaggagcagcagctgaaaaaactacgtgaatgcgaggaacgtcaggcgctcattaaagaggggctgttaggcgagcatgaggagatttctgttctgagggcgcgtaaacgctggtatgagcagcgcagtcgtgaagccctgcagtatcgccgtgcaaaaggggccgcacgtaagcgtgcaaaccgtctggccagaatgccccgcgaccgtcaggtctacgaaatgacctgctggctgaagaaaacgctgccggcagatgagctctatggttattctaaagataaacttgagcagctggctgtccggcatctgtaccagctggagttgtcactgaacccttctccgcctcattag

SEQ ID NO: 223616 - DNA, 624 bp, Klebsiella pneumoniae
atgaatatagggcatctcaattttttcaaggttaataagtgcggtttatacaaagtaaatgataacaatacctatggtttagaacttagcgaaacctttgacctcatacaggattgggtaggaacgaagtcacttgcacttacgataccatgggacccaaaagaaaagccaaacagatcaaagtgttactgcaaagatatctataaagatgaaaatactggtgatttcttaatcatgctttggaaatctgatactgatagtaccggttctttattaggtgcgagtgaagatggtgagattggaagctcatctgtagttaaatatacaaatagctacagagggaaaaaagttatctggggtcgaccatgcttttattgggttatccctgagcttgaaactatagtgtcgattaaatttgatcattcaatttgtgattctgaactatttcaagactatgtacattcatctattacaaatagagttaaacatagcaaaagagttaagaacaaaaccgagaaaggttatataagattatctaatactgatgacgatgatttatataaatatatgtacagatttgatatgaagctccgaagcttagggaaggtgcgaacaagttcctga

SEQ ID NO: 223617 - DNA, 516 bp, Klebsiella pneumoniae
atggggaaattgaaaacaaaaaatcttaaggaaagtgagtttataagatatatagaaactcatccagttttttcagagtctttatgtaagaagcatggggtttctgttgtatcactaggttattccctttatgtccatagtaatcatttttttctggagaatggttatgtgtcagatgatattcattatgacatggttaaaaataacttaatcatcatgaaaccaactcttaaacgattttataaaagaacaaggcaggtagattataatgattatactttcatatcggggattaaagagcatcaagactattgtatgttattaacgctttgttgctatcattggattgccgatgtgttcactgtctataatcataataaagggagtgatatagtcgttgacgttgccaatgagcttttacaaagaagcattgactacttttcaattgaacatcaaaacgtagttgaatgttttaatgagttaaaacataagttcccacattatagaaagcgataa

SEQ ID NO: 223618 - DNA, 321 bp, Klebsiella pneumoniae
atgaaaacgcctctgccgcccgtattgcgtgccgccttgtatcgccgtgccgtggcctgtgcctggctgaccctgtgcgaacgccagcaccgctatcctcacctcaccctcgacgcgctggaaagcgccatcgccgccgagctggagggcttctacctgcgccagcacggcgaggaaaaaggtcgtttgattgcctgtgcgctgctggaagatttgatgcaggccgggccgctgaaagccgccccgtcgctgtccttcctcgggctcgccgtgatggatgagctctgtgcccgccatatcacatcgcctgtactgcactga

SEQ ID NO: 223619 - DNA, 336 bp, Klebsiella pneumoniae; identical to SEQ ID NO: 139380

SEQ ID NO: 223620 - DNA, 684 bp, Klebsiella pneumoniae; identical to SEQ ID NO: 216766

SEQ ID NO: 223621 - DNA, 210 bp, Klebsiella pneumoniae; identical to SEQ ID NO: 214998

SEQ ID NO: 223622 - DNA, 231 bp, Klebsiella pneumoniae; identical to SEQ ID NO: 203619

SEQ ID NO: 223623 - DNA, 576 bp, Klebsiella pneumoniae; identical to SEQ ID NO: 180749

SEQ ID NO: 223624 - DNA, 516 bp, Klebsiella pneumoniae
atggccttaccacgcaaactaaaacacctgaacatcttcaacgccggtaacagctggatgggcattgctgaatccgtcaccctgccgaaattttcccgcaagcttgagaactatcgcgggggcggcatgcccggttcagtcggtatcgatctggggctggatgatggcgcactggacacggaaatgaccatcggcggcactgaggcactgctgtttaaacagatgggcaaggccacggtggacggggtgcagatgcgcttcaccggctctatccagcgcgatgacaccggcgaggtgcaggccgttgagctggttgtacgcggacgccacaaagaggtggattccggcgagtggaaaaccggcgagagcaataccaccaaagtcagcagcgttaacagctatgcgaagctgaccattaacggcgaggtgctgtacgaggtcgatgtgatcaacatgattgaaattgttgatggcgttgacctgatggaagagcaccgcaacgccatcggcctttaa

SEQ ID NO: 223625 - DNA, 285 bp, Klebsiella pneumoniae
atgaacgcataccgcgcatatgacgctatcgaagaacggaaatgggctgaacagtcgctcaccgaagagaagcaaaagtggattgacgatcgggcgcaggaaattatcgactcgctgccgaaagagccgtcagggctgttccgcttctctgtgccgatggacaaaagcccatatgaaggcctccgcagcgatgcagctggcgaggcatataacgatctcatctcggcagtagcttacgcccaggcggaatacgactgggatcaccgcaccggctgcccgttttaa

SEQ ID NO: 223626 - DNA, 195 bp, Klebsiella pneumoniae
atggctaactcaattcctaacaacggacgcgccgtgatgatgcgcaatcgccgcaccggagccgcctggctggtcagcttcgactatcgcgacggcagctactggcatgagccgcagggcaatctgcgccacatccgccggccatacgcatcacgcaatatcgagccgaacctggttccagccgggacgcattaa

SEQ ID NO: 223627 - DNA, 249 bp, Klebsiella pneumoniae
atggtagctcgtcacccgggttacgcactctttcccgtcacgccccaggcggccaattttcagatgaccggcggtgacctgcatatcaaagctgtcatcgacacactgatagttcagatcctgataggggtccagcttatacggtacgcggtacatctcgtgcgggtccgggtttataagctcgcgcatcagttcgaccagcccggcagcatcaaggatacgcgtcggaatataggcaccgcccagtga

SEQ ID NO: 223628 - DNA, 147 bp, Klebsiella pneumoniae
atgaatttcgacccgcaaatcgtcgcacaggcgaacgcgtttgtaaatgccctgcgcagtggtaaacgcgcccgagttccggccctgaagctggagtactggcagcagtttatgactgtggtttacgctggcctcggcctcgcgtga

SEQ ID NO: 223629 - DNA, 525 bp, Klebsiella pneumoniae
atgaagatgtcctacttccttacgctccttgccgaagtgtgcaccggcgtggcgccggaagttaacgccaaggcgctggcctgggggaaacagtatgaggccgacgctcgcactctttttgagttcaccaccgacgtgaaggtaacagagtcgccgatccttttccgtgacgaaggcatgcgcaccgcctgctcacctgatggcctgtgcagtgatggtcgcggccttgagctgaagtgccctttcacctctcgcgacttcatgaaattccggcttggcggcttcgaggctatcaaatccgcctacatggcccaggtgcaattcagcatgtgggtaaccggtaaggatgcatggtatttcgcgaattatgaccctcgcatgaagcgagaaggcattcatcacgtggttgttgagcgcgacgacaaatacatgtccgacttcaacgaaatggtgccggagttcatcagcaagatggacgaatcgctggcggagatcggctttaccttcggggagcagtggaaatga

SEQ ID NO: 223630 - DNA, 237 bp, Klebsiella pneumoniae
gtggtgcttgcgcgcatcgagaaagaggcggggcgctgctgcgggctgcattacgagctgtatcaggcgcgcgtgctgggcgatgcgctggattatctggatgcgctgccgctgaaagaccgcccgacgttcatgggcgcggcggcaaaacgcgggtatctgcttacgctggcggaagaagagcacgcggaggaagcccgtgatgtgctgctgagtgaactggcggcaaacgagtag

SEQ ID NO: 223631 - DNA, 228 bp, Klebsiella pneumoniae
atgcagacacaggcgatgcgtgtttatcagatcacatttaccggacgcgacgcaaaaggcgttattccgatgtttacccgcgtgaaagccatgaccggaaagggcgcgattaaggcgtttattgagcgttacaaacctgttcagggctggtttctgggcgatcccgaagacattaccgacaacgtgcaaaaggaggcagaagaagcagagagcaaaacgcagagatga

SEQ ID NO: 223632 - DNA, 231 bp, Klebsiella pneumoniae; identical to SEQ ID NO: 121864

SEQ ID NO: 223633 - DNA, 426 bp, Klebsiella pneumoniae
atgagtattcaacatttccaaacaaagttaggcatcacaaagtacagcatcgtgaccaacagcaacgattccgtcacactgcgcctcatgactgagcatgaccttgcgatgctctatgagtggctaaatcgatctcatatcgtcgagtggtggggcggagaagaagcacgcccgacacttgctgacgtacaggaacagtacttgccaagcgttttagcgcaagagtccgtcactccatacattgcaatgctgaatggagagccgattgggtatgcccagtcgtacgttgctcttggaagcggggacggatggtgggaagaagaaaccgatccaggagtacgcggaatagaccagtcactggcgaatgcatcacaactgggcaaaggcttgggaacgaaccacggcagcctggcggctgcaaattga

SEQ ID NO: 223634 - DNA, 225 bp, Klebsiella pneumoniae
atggagagtatcgggaaggacaaggcagtctgttacgaatatccctccccgatcatcccgaaagagcgctggcgctatcagatggtgaacatgtatccggacagtggtcagtgccatccgcttggacgcagcgtgatgcgctgggaggccggcaaaaatccacccaactcccgcaagaactatggctatctgatgtggcgtaaacgcaattgtgtctttctctga

SEQ ID NO: 223635 - DNA, 204 bp, Klebsiella pneumoniae; identical to SEQ ID NO: 92423

SEQ ID NO: 223636 - DNA, 327 bp, Klebsiella pneumoniae
atgctgcacgaaacccggcagtatggcattccggcgacactgcgcgggctcgtcaataacgacatgaggaccaccaccgacgcggtgctgcagctggtgaaagacggcgtcaccgacggggtgcagatcgacccgacactatatacgcagtacggcatccggagtgtgccgtctctggtggtacggtgtcaggccggatatgacgtggtacgcggtaacattcacgtcaaacaggcgctggagaaagtggcacaaaccggtgactgcgcacaggtggcccggcagatgcttgatgcgccctcaaatgccgccgggagccagccatga

SEQ ID NO: 223637 - DNA, 402 bp, Klebsiella pneumoniae
atgaaggtggaggaaggtgatgtcattctggttaagaagctcgaccgtcttggccgcgacactgccgatatgatccaactgataaaggaatttgacgctcagggcgtggcagtccggttcattgatgacgggatcagtaccgacggtgatatggggcaaatggtggtcaccatcctgtcggctgtggcacaggctgaacgccggaggatcctagaacgcacgaatgagggccgacaggaagcaaagctgaaaggaatcaaatttggccgcaggcgtaccgtggacaggaacgtcgtgctgacgcttcatcagaagggcactggtgcaacggaaattgctcatcagctcagtattgcccgctccacggtttataaaattcttgaagacgaaagggcctcgtga

SEQ ID NO: 223638 - DNA, 228 bp, Klebsiella pneumoniae
atgcagacacaggcgatgcgtgtttatcagatcacatttaccggacgcgatgcaaaaggcgttattccgatgtttacccgcgtgaaagccatgaccggaaagggcgcaattaaggcgtttattgagcgttacaaacctgttcagggctggtttctgggcgatcccgaagacattaccgacaacgtgcaaaaggaggcagaagaagcagagagcaaaacgcagagatga

SEQ ID NO: 223639 - DNA, 231 bp, Klebsiella pneumoniae; identical to SEQ ID NO: 213969

SEQ ID NO: 223640 - DNA, 231 bp, Klebsiella pneumoniae; identical to SEQ ID NO: 112534

SEQ ID NO: 223641 - DNA, 324 bp, Klebsiella pneumoniae
atgaggtggcgttactccctgcgctggaaattaccatcaccgtgtcccggtccgcatgaactggcatccgaagtggtggaggccggacagcctgcgcccgaatccattatgtcgctctgggtggcgggcgccgggtatgcggtgtgcgtggattttcccgatgagcggcagattaagcgctggagcgatgagcgcaaagccgctgcgcgtcgaaggaatcttgagcggcgggtcaacaaaacagcgcctctgtttgctgatgagctgatagatcgggagcttgagaggcgaccagactatttccggggaaaatctcagacctga

SEQ ID NO: 223642 - DNA, 195 bp, Klebsiella pneumoniae; identical to SEQ ID NO: 210511

SEQ ID NO: 223643 - DNA, 285 bp, Klebsiella pneumoniae; identical to SEQ ID NO: 210510

SEQ ID NO: 223644 - DNA, 228 bp, Klebsiella pneumoniae; identical to SEQ ID NO: 215004

SEQ ID NO: 223645 - DNA, 228 bp, Klebsiella pneumoniae; identical to SEQ ID NO: 215001

SEQ ID NO: 223646 - DNA, 198 bp, Klebsiella pneumoniae
atgaaaaacaacaccgaacaaccggtcagtacgacctctcatacctttcgccggatacctgtcatcgtcgctctcgtgcttttcgccctggcaaccagcgcgtttctctcgcgcatggttctggagtactccacgccgcgggtggtgggaagaaaacgctcgacagttttatggacagtgtcagccagaagcagctga

SEQ ID NO: 223647 - DNA, 1383 bp, Klebsiella pneumoniae
atgcctgtgtcgttccgtttgttgccaacgttgacctttctcctgctgttgccgggcgttcccgtctgggcgctgaccgccagcgacaccacccgccctgcgcaagcgcaagatccgctgcccgatatggggattgctccccaggttgatgacgacgcccggcactttgccgaagtggcgaagaagtttggcgaggccagcatgagcgacaatggtctgacggcgggtgaacaggcgcagctgtttgccatcagtaaaatcggcaatgaagtgagtcatcagctggagagttggctctcgccgtggggcaacgccaatgtcgacctgctggtcgataaagaggggaaattcaccggcagtaaagggagctggttcgtgccgttgcaggataacgaccgttatctgacgtggaaccagtactcggtgacccggcgcgagcacgatctggtgggcaacatcgggcttggccagcgttggcgggtcggcggttggctgctgggctataactcgttttacgataaagtgctgagcgaaagcctggcgcgcggcagcgttggcgccgaagcgtggggagaatatctccgcctgtcggcaaactattaccatccgcttggcgactggcagctacgcgataatcagactcaggagcagcggatggccgcagggtatgacgtcaccgcccaggcgcggctgccgttctaccagcacatcaacaccagcgtcagcgtcgaacagtatttcggcgatagcgtcgatctgtttcactccggcaccggctaccataatccggtggccgtctccgttgggctcaattacaccccggtcccgctggtcacggtgaccgctaagcataagcagggggaaaatggcgtcagccagaacaatgtgggcctgaagctaaactaccgctttggcgtaccccttaagcagcagcttgcggcagacgaggtggcgatcagcaactcgctgcgcgggagccgcttcgatagtccggagcgggataatctgccggtggtggagtatcgtcagcgcaaaaatctgacggtctatctggccacgccgccctgggatctgcagtccggggagacggtgcagttgaagctgcagatccatagtctgcatggcatcaaggcgctgcactggcagggagacacccaggccctcagcctgacgccgccggtagatgccagcagccccgatggctggagcatcattatgccggtgtggaacagtgaaccgggcgccgcgaaccgctggcgcctgtcggtggtggtggaggataaacaggggcagcgcgtctcctccaatgagatcgccctggcgttgaccgagccgctcgtcaagtttaccacgccaggcgtctcctggacggactcgccttag

SEQ ID NO: 223648 - DNA, 1779 bp, Klebsiella pneumoniae
atgttaaaacgtctttttaccccgctgacgctggtcaatcaactggcgttaatcgtgctgctcgccacgattattggcgtcgccggcatggcgatctccgcgcgcctggtgaacggcgtgcagggcagcgcgcacgccattaacaaggccggttcattgcgtatgcaaagctaccggctgctggcggcgatcccgctgaatgaaaacgatcaaaaactggtggcggacatgaccgccaccgtcttcagcccggagctgcaaaattccgcccgccgcgacggccaggaaatccagcttaaagccctgcagcagtactggcagctggcgctggcccccgggatgcagcgcgcagtcaatcaggcggaagtggcccaggatgtcgccgactttgtcgatcgtatcgaccagttggtcaccgcattcgaccacaccaccgagcagcgtatcgaacgggtggtctggatccatcgcatcctcgccattggtatggcgctgctgctgatcttcactatcatctggttacgcgcccgcctgctgcggccgtggaaacagctgctgagcatggcgcgcgcggtgagccagcgtgatttcacccagcgggcgcacatcagcggacgcaatgaaatggcgaccctgggcatggcgctgaataacatgtcggaagagctggcggaaagctacgccgtgctcgagcggcgggtgcaggagaagactgccggactggagcagaagaacgagatcctcgctttcttatggcaggccaaccgccggctgcactccagcgccccgctctgcgaacgtatttcgccggtactgaatggcctgcagggtctgacgctgctgcgcgatatcgaggtaagggtttacgacctggaagacgaagataatcaccaggagtttacctgccactcggatgatgactgtgatgataaaggctgctacctctgtccacgcaatctgccgccgctgccggatggcggaacaacgctgaagtggcggctgtcagatgcgcatagtcagtacggcatcctgctggcgacgctgccggttggccgccatctcagccacgatcagcagcagctggtggataccctggtggaacagctgaccagcaccctggcgctggaccgccatcaggagaagcagcagcagctgatcgtcatggaagaacgggccactatcgcccgcgagctgcacgactccatcgcccagtcgctatcctgtatgaagatgcaggttagctgtctgcagatgcaaggcgacgccttgccgacggagagccgccagctgctggggcagatccgtaacgaactgaatacctcgtgggcccagctgcgggagctgttaaccaccttccgcctgcagttgaccgagccggggctgcgcccggcgctggagtccagctgtcaggagtacagcgcccacttcggctttacggtgcagcttgattaccagctcccgccgcgctttgtgccctcgcatcaggcgatccacctgctgcagatcgctcgcgaagcgttgagcaacgctctgaagcatgccagcgcgaccgaagtgaccgtgacggtgtcacaacgcgataatcaggttcgtctggtggtagcggataacggccgcggcgtaccggaccacgccgaacggagtaaccattacggtttaattattatgcgggatcgcgcccagagcttgcgcggtgactgtcaggtacgacgccgggaaaccggtggaaccgaagtgatcgtcacgtttatcccggaaaaaacgttttccatccaataa

SEQ ID NO: 223649 - DNA, 300 bp, Klebsiella pneumoniae
atgaagatctatttaactataaatgaatcgtttaaaaagtatcttaaacctggaaatgacagggcattctttctcaagatacctgatgccatcccctctctatttgaaggattagaatgcgacttagtcatagtgggtgggagtgattatatatgcattgatgatttctcacgcattataattgataaaaatagtaacttctataatgatattagtgaacaattatccaaaagtggaacgatagagatctctaaattattaactgctaaaaataacaaaagtttctttagccagatgtaa

SEQ ID NO: 223650 - DNA, 858 bp, Klebsiella pneumoniae; identical to SEQ ID NO: 102269

SEQ ID NO: 223651 - DNA, 1272 bp, Klebsiella pneumoniae
atgttcgccctggctgacgtcaactccttctacgccagttgcgagaaggttttcaggccggatttgcgcggcaaacctgtcgtcgttctcagtaacaacgatggctgcgttattgcccggagtgctgaagccaaactgctgggtataaagatgggaaccccctggttccagctcaaagaggcgcagtttcctgaaaaattgtacgttttttccagcaactacgagctctacgcgagcctgagtaaccgtgtggtcgccctgctggaagagctgtcgccccgcgtcgaacaatactcaattgacgaatgtttcctggatgcccggggaattggccactgtatggatctggaggattttggcaggcagctgcgtgggcatgttctcagtggaaccggactgacgatcggtgtcggcttcggcgccacaaaaacactggccaaatcggcgcagtgggcgtcaaaggaatggccacaattcaggggggtactggcgctgtcgcccgaaaatccacgcagaacggcaaaattactcagcctgcagccggtggaagaaatctggggcgtggggaaccggatagcgaaaaagctgcacgttatggggatcaccaccgccctgcagctgtcgctgacgaaccccacatttatccggaaaaacttcaacgtagtgctggagcgcacggtacgtgagctgaacggcgagagttgcatttcactggaggaagcgccgccgccgaaacagcagattgtctgcagtcgtagcttcgggcagcggatcaccacctacgaagaaatgcgccaggccgtctgccagtatgccgagcgcgcggcggaaaagttgcgcggtgagcgacagtactgccggcatatcagcaccttcatcaagacatccccttttgcggttaatgagccgtattacggtaacgtggccacggaaaaactgaacacccctacccgtgacacccgggacattatcgcggcagcggtcaggtctctggacaggatctggctcgatggccaccgctacgcaaaagcggggataatgctcaatgatttcagtccgaacggcgtcgcgcagctgaatctgttcgatgacgtgcagccacggccgcacagcgatgcgctgatgaaggtactcgacggcattaatcattccggactcgggaaagtctggtttgccggacggggtattgcgccggactggcagatgaaacgggagatgctgtcaccggcatataccacccgctggaaggagctgccggttgcccgtttctga

SEQ ID NO: 223652 - DNA, 552 bp, Klebsiella pneumoniae; identical to SEQ ID NO: 95276

SEQ ID NO: 223653 - DNA, 1014 bp, Klebsiella pneumoniae; identical to SEQ ID NO: 223237

SEQ ID NO: 223654 - DNA, 837 bp, Klebsiella pneumoniae; identical to SEQ ID NO: 137381

SEQ ID NO: 223655 - DNA, 294 bp, Klebsiella pneumoniae; identical to SEQ ID NO: 102300

SEQ ID NO: 223656 - DNA, 579 bp, Klebsiella pneumoniae
atgattaacccgtccgaggttggaaaagctggtgaaatggtcaggctgaaaacgctggaggccatctggattcaagggaagctgcgcatgtggggccgctggtcctacatcagcggcggtagtggcggcaatatgtttaaccagttactggcttccgggaaagtcactaaaacagccatcaacgaagcattacgcaggatgaagaagtctggcatctcgaagccagagcttgaggcgttttttcgtgaaatactcgcggggaaaaacaaaagcggcctggccttctgtacagacgatgaaggactgctgattgataaggtactgggggcagtccttattacgggtggttacaaagagctgtattacctgctggtggagcattaccggttacggaagagcaaacgccgcatagcggaagagctttatgaaaagcatccagactggtgctttatgacctgcaggcgaagagttgatgcatggataagtttggcagaatcgatgctatacgcaccaatgtgtgacgcattcggcacaaatggcgacagattttacttgcaaagtgagccagaaactgcttga

SEQ ID NO: 223657 - DNA, 351 bp, Klebsiella pneumoniae
atgaaaaaagagatctcccgcaacccctctttcacgccttcgcctaagctgcgagcacatctgaactcccacagggaaggggtgactgaaaggctgaataatatctttgatcgctatgcgcatctggttcgcgcctgtgcccttactctcgatgacgacgaaacacaggttctgcttaatgtgctgaatggctccgttgtggaacctgcctttattgaatatctggctcaggaaattcgggactcggatgattatctggaagggatacccgcagctaaatcactgtacgaaaagtgtcagtcagcgacctatccgcaattgctggccaccgtcgaacgcctggaacgataa

SEQ ID NO: 223658 - DNA, 486 bp, Klebsiella pneumoniae
atggctcaggaatcccagattgaacagtctcgcgcttacttttaccgcaactttaagtacacaatcgaacatctgacccgggattatcaggctgaactgcagcgttattctgatgattcgtgggaactgcctcagcgagccgcacgcctcagcgcagcagttaagcgctataaaacgtaccggatgctgagttttatttttgagatagctgacagcatcgatctggacttaaccccgcttattgtaaagcgcctttgtatgcgccttttcggccgctcgggtagccaggacataattgttgccacttttgggcagaagggtcgccagcaccgcagccgcgataatacacctgccatcctggatgaaatagcttcccgctaccgtcttgccgcatactcctgtcaggcctccaccctgagtgatattgcaagtgtgaaaaagcactatcagacaggcatccgtgcagcacggaacagggaaaaataa

SEQ ID NO: 223659 - DNA, 267 bp, Klebsiella pneumoniae; identical to SEQ ID NO: 207480

SEQ ID NO: 223660 - DNA, 492 bp, Klebsiella pneumoniae; identical to SEQ ID NO: 207479

SEQ ID NO: 223661 - DNA, 252 bp, Klebsiella pneumoniae; identical to SEQ ID NO: 207497

SEQ ID NO: 223662 - DNA, 171 bp, Klebsiella pneumoniae
atgagtcaggactatcccgcccgtatcgctgcgctggaagacgcgcttcgccagaaagacagtcagctcagtctcattgcagagactgagtcgttcctgcgttcggcgctgtcccgcgctgaagagaaaatagagaacgaagagcgcgaaatagagcatctgcgggcatag

SEQ ID NO: 223663 - DNA, 756 bp, Klebsiella pneumoniae
atggttattcatgaacgccgggagaggatactggccaggctgacctctgagggttacctcaacgccagccagctatcagaggaatttaatgtagacagctctacgatccgccgtgaccttatttatcttgaaaaacacgggcacatcattagaactcatggcggtgtgttaccagtgctgtcgactgaagggcaggatacgccttacagcattcgtaagagtcgccatcattttgaaaaggtcgcgatagcagaatatgcggcctcccttgtgcaggacggtgattcagtaattctggataacggttccaccgtctatgaactcgctgcacttctggccctgaaaaagcatctgacggtgatcactaacgatttgaatatcgccatactgctcagccagtatccggcaattaatctgaacgtgacaggcggcgcggtagccggaaattcttacacgctggtcggtcccgacgccacgcgtaaatttggtgaagtttatgcagactgggcttttatgggtgcagaaggtgtgcacccggagtccggcataaccaacgtcaacgcggtagaaatccctaccaaacttgccattctgaatgccgctaaaacgcgggttatcctggctgactcctccaaaataggctacagagcagtctcgcacgtctgcccgctgagtagcatcgacatgattattaccgatcgaaaaaaatcggagaaagtaattgcagggtttggcgataaactcaggttcgcctga

SEQ ID NO: 223664 - DNA, 1014 bp, Klebsiella pneumoniae
atgtctactccctatgaacttgatattgccatgcaacctgaagcagttctggcacaaataaacaaccctctgcccgaagcactgcgccaactgaaactgtccgactatgaccggattgtactgactggaatggggtcctctgattacgcgcttattcccgttgagagagcgcttattgctgcaggcctgccggtgtggcgggtcgatgccggtcgcttgctggatatgccagagctggtcaccgacaacacgctgctgtgggcaacatctcagtcgggtatgagtggtgaaatcgttgcgctcctgaagcagggcaagcgcccaaaaaccctcattggtcttaccaacgatgaaaacagcgagcttggtcagcaggcggacattcttattacgctgaagagcggtgatgaagctacagtcagctccaaaagctatctgaacacgctgattgcctgctacaggacgctcgcactgatgctggggcagagtgaaaaagccgtatgtgattcggttaccagtggacttgataccatcagagatctgataaatcagcgacaagcagtacaaccgttttctgacgcgctcttcagtgcaccccatcagcgcgttgcctatattgcgaccggtgcatatgcttccagcgcactcactggtgctcttattaccaaggaagcttcaaaggtcagtgctgaaggctttatcggcggcgaattccgccatggccctctggaaacctcgggcaacggcatgctggccgtgttaatgggtaagcctggtgacgagacgctggagcagttcgctgcagaaatgcaggctaatggcacaatcgtggtcacaattggcgaagccgcatatgccggatcggcactgcttcctgttcctgaaggcagcgaactgctccagctcatctgcgggtttatttatatcgagcacttcaccgtcgaactggcaagccacaacggctttgttgccggtcagttcctttacggacagaagatcacggtggccgtatga

SEQ ID NO: 223665 - DNA, 912 bp, Klebsiella pneumoniae
atgacaggtaacatcaaggcaggcatagacattggcggaacgggaacccgaattatcctgcgggatgacaagggaactctggatacgcgcacaattgcgacggcagagtttgccgcaatcgacatacacgatcgtgcgggcgcgttagcgtcccacgtattatctctggttcccgcgggccggaaactggaaagtctggggatcggtgcaagcggtccggtagataccacgctgggcatcatcaataaccgggacacgctggaatgcttttcctttttccctctggtcgatgagctgaaggcgcgattgggggtcagggtaggcatcgacaatgatgccgtcgcggctgttctcggcgaatactactttggagcaggaaaaggcagtaagcgactgctgatggtcactctcgggaccggcatcggtgtagcgcttctggaaaacggtcaacccttccggaccgttgatggccagcatcctgaagccggtcacattcctgtatcaggcaatccggcgacctgttactgcgggctgcggggatgttgggaaacgctggcatccagaacgtggctgcagcagaaccttgagtcgcttctgcctgacatcgcttttgagaaacatgacgttaatttctacaaaacggtggcgctccagagagaggacgtagccagtgttttccaccggtacggaaattatctgggaagaggactggcaacgctgctgacgctttacggaccggaccttaccattctgagtgggagcgcggcacattattacccgctgttcaggcctggactggaggaagctctttgccgtgcagacgcctacgccactaacaactggatcgttccttcagagttaggggatgtggccggagctctcggcgcgacaatgattccagaattaacttag

SEQ ID NO: 223666 - DNA, 1389 bp, Klebsiella pneumoniae
atggtcaattccgaaataaataatggactaaaacattcagggaagattactaagttcagctttttcattatcatgtccataattatatcgtctattggcggaattatttttggctatgacaccggtattattggcggcgcgattgtctttatcggtaaagaatttcagataaatgattatatgcagggcgttattgtgagcatgtccttgctgggtgcaatgattggcgcactggcagcagggccgctggccgataaatacggaagaagagttaatctttttatttcgggggtctgttttgccgcaggcgcggtgatttctggtgtgagcgagagtattgaattactcacggcagcccgtattcttcagggcattggcgtgggcgcatcttcagtgctggttcccgtctatgttgctgaacttgctccggcaaaaatacgcgggcttctggtgacctcctttcagctcatgattacggtcggtattgtaatagcctatggcgttaataccgcagcggaaagtcagggtgaatggcgctttccggtcggaattgcctgtgtatttggcatcgctctcgcagctggcgtactgtttgttcgtgagtcaccgcgctggctgattgctgtcaaccgttatgctgatgcgcgttccacgctggtgaagctgcgcggcactgatgatgtggatgaagaaatccgggaaactgagcgtttaaacgccctggaagaagataatattaaatggcgcgatctgctcagtggccatgtacgcccgatgattatgattggtgtgctggttgctttcttctcgaacgcctgcggtattaacctggtgatttattttgctccgcagatcctgcagaccagtggattcagttcttctgcctcctggataggtacggttggtcttggcgtcacaaacgtaatattcacgatagtgggaatgctgattgttgaccgcgttggccgccggcctctgcttattatcggcgctatcggcctgaccatcacgctggttattctggcagtgcttttctctgtaccagcctttgaaggaagtggatggattgccctgggggcgctgctggtttatatcgtcctttatgctgttagtcctggcatgctggggttcctgatgatctcagaaatctcgccactgagagcacgggcgaaggtcaccagcctgtccatcttcgtcattttcgcgactaatctggtcatcgcgctattgtccctgcccatgcttaacgggctgggtgcttcgaccacgttctggctgttttcagccatatgcgtagcgttcagcatcttcagtttctatgttcctgaaacgaagggaaaaagccttgaagacgttgaaatgtatttcaaggaaagaacaaaaaaataa

SEQ ID NO: 223667 - DNA, 207 bp, Klebsiella pneumoniae; identical to SEQ ID NO: 191350

SEQ ID NO: 223668 - DNA, 1164 bp, Klebsiella pneumoniae; identical to SEQ ID NO: 191349

SEQ ID NO: 223669 - DNA, 1251 bp, Klebsiella pneumoniae
atgtcagtcgaaaagattaatactgtgattgtcggcgcgggtcaggccggtattgctatgagtgaacatctggcgcagatgggcgtgcctcacgtcgtcctggaacgcagccgcatcgctgagcgctggcgctccgagcgctgggattcgcttgtggcgaacgggccagcctggcatgatcgcttcccgtcgctaaaattcgataatatctctcaggaagccttcccgccgaaagagcgcatggcacagtattttgaagactatgcgaagatgcttgatgcgccagtgcgcaccggggtcgaagtgcatcaagttgtgcggttgctcggacgtagcggattcaaagtagtgacctcagccggcgaatttgaggccgacaatgtagtggccgctaccggcccgttccagaagccctcctttccgcaaatcgtgccggaaaccacaggattgcagcaaattcactcctcagcctataaaaatccgcagcagctgcctgcgggcggcgtattggtggtaggagcaggagcttcaggcacgcaaattgcggaagagctacgtaagtcgggccgtgaggtttatctgtcggtcggcgaacattaccgtccgccacgcgcttaccgcaacagagattattgctggtggctcggcgcgcttggtctgtgggatgaagtcaaaatcaagccgaagaaagagcatgtggcatttgcggtaagcggctatgaaggtggcaaaaccgtggatttccggcgtctggcgcatatgggcattacgctggtgggcattacgaaaagctgggataacggcgtgctgagttttgccgaggggctcgcggagaatatcgctgaaggcgataaagcctactttgacgtgctgcgcgacgccgatgcttacattgaacgcaacgggctggatctgccaccggagccgcaggcgtgggagctactgccggatccggaatgtctgctccatccgctgacgcaattagatattgccgaagcgggcattacctcgattatttgggcgacgggctttaaatttgatttcagttggttacaggttgatgcattcgatgaaaaaggcctgccgtttcataaacgcggtatttctgctgaacgcggcatttatttcctcggcctgccgaatctggtaaaccgtgcgtcatcatttatatatggcgtatggcatgacgctaaatatattgccgaccacatcgcattgcagaacgtttataccaactacgttaaatcgtaa

SEQ ID NO: 223670 - DNA, 819 bp, Klebsiella pneumoniae; identical to SEQ ID NO: 191347

SEQ ID NO: 223671 - DNA, 855 bp, Klebsiella pneumoniae
atgacgagaaaaccgacatttttaccctggtttattattcccgccacgctgaccgcgttcggactggttgtcgccatgtgcgcggtaatgcagttcagcgtacgcgcctatattcccggttcgctcgacgtgggcggattcaccctggcgaacttcaacggcctgtttaaatccatctatgccgatgcctttatcaacaccgtctggctgagcgccaaaactgctgtctttggcctgctgatgagttatccgctggcttatgcgctggtgcgaacccgcaccgtgtggatcaaatccgcgattctgataatcgcgattacgccgctgtttctcggcgaagtagtgcgtacctactcatggattatcgtactgggcaacagtggctttctgaacagcctgctgctggcgctgggagtcatatcaaaacccattcagtttatgtttacgcaaactggcgtggttgtggcactggtgcacgtcactatgccgatcatggttctgatgctggcgaccgcgctgtcacatatcagtcctgattatgaaaaagctgccaccagccttggcgcaggcccgatccgcgccctgctgacagtgacaataccactctccatccccggtatcgtctccagtctgaccaccgcgttcgcctggaccttcagcgccttcgccacgccgcaactgattggcggtggacgcgtgagcaccgtggcgacaatggtctatcagcttggtttttcgtcgatgaacttcccgtttgccgctgcgctgagtattgccggtttgatcctgaccattctgttgttgatggcgctgaaacgcatgacccgattcctgcacgcgatgggagggcattaa

SEQ ID NO: 223672 - DNA, 1032 bp, Klebsiella pneumoniae
atgttgcgtaagatttgtgccttaacgttgttgaccacgagcgtgctgtgcgcaggtaatgcaatggccgctgacaagctgattgtcagcacctggggcggcagcttcagggatttgattgacgaaactatcgccaaagagttcaccaaagaaaccggcgtggaagtgcagtttgttacgggcggtaccatcgaccgtctgaacaaagccaaactggcgggcggctcgccggagacggacgtgacctttaccacggcgcatgtgggctatctgtatgccaatagcggcctgtttgaaaaactcgatatgagcaaaatcccgaacgcgacgaatctggtgcagcaggcgaaagtcagcccttttcacctcggcgtgtggggctatgtttacaccatcggctaccgtcctgacatggtgccgaagggcgaaacgtttgagagctggaatgatctgtggaaaccagagctaaaaggcacgctggcgctgccagactgggatccgagccatattatcgcagtttccgccaagctctccggcaccgatgcggcgcactgggagcagggtcaggcgaagctgaaagcgcttatccccaacatcaaatctttctataccgatgacgctaacagccagcagctgatctccactggcgaaacgcccgtgcaggtcatgctgtcgatgaacgcctataacatgatttccgaaggggtgaacatcaaactggcgatgccgaaagagggcgcgattttgggcgtcgatacaatcggcatcaacaaaggcaccaaacatagcgagctcgcttacaagtttatgaatattgccctgaaacctgaaattcaggagcaggtggcgaagatctatcgaggcagcccgactgtgaccaacgcgcatatcgatccagaactggcgaaactgccgggtatgctgactacgcctgagcagtggaacgccaccatcaatactgatccgaaactacgtgccgagaaaaccgccgagtggcgtcagtggttctctgaaaacatcatgtctcattga

SEQ ID NO: 223673 - DNA, 963 bp, Klebsiella pneumoniae; identical to SEQ ID NO: 191344

SEQ ID NO: 223674 - DNA, 930 bp, Klebsiella pneumoniae; identical to SEQ ID NO: 191343

SEQ ID NO: 223675 - DNA, 450 bp, Klebsiella pneumoniae; identical to SEQ ID NO: 191342

SEQ ID NO: 223676 - DNA, 615 bp, Klebsiella pneumoniae
atgatgcaactttattttgccgccacctctgcctacgtacgaaaagtgatggtatgcgcgacggtgcttggccttgctgatgagattgaaccgctggattccgccgcgcatccgatcgagcgcgacgaacgcatcgccacgtttaacccgctggccaaagtcccggcactgcgcaccgaaagcgggctatgcctttacgacagtcgggtcatttgcgaatacctcaacgcgcgtgcccgcggcgggctcttcccggaaggcggcgacgtgcgctggggcagcctggcaagacaggcgctgggcgatgggataatcgatgcggcattgctggcgcgctacgaattcagcacgcgtccgccggagaaacagtggcaaaactgggcggacgcgcagctgaaaaaggttgccgccgcgctgctggagattgagcgtcaggtcagtgattttagcgaccgccccaatgatattgggcttatcgccatcggatgcgcgctcggttatctcgacttccgctttgcggaactcaactggcgcgccagccatccgctgaccgccgtatggttcgccgcttttgatgcgcacccggccatggtcgccacgcgtccgcacgtttaa

SEQ ID NO: 223677 - DNA, 996 bp, Klebsiella pneumoniae
atgatacctgagatgatgaatgcggtcattgcgcgccagccgggcggccctgaggtgttagaacaagtacagcgcgcggtgccgcagccttcggcgggcgaagtgctgattcgcgtcgccaacgcgggggtgaatcgtcccgatatcatgcaacgcaacggcatgccgctgccgccaggcatcaccgatgtgctggggctggaggtctccggcaccgttgtggcgcagggtgcgggcgttgaatctcccgctatcggcgcgccggtgatggcgctgctcaacggcggcggttacgccgactattgcgtggcgcgcgccgagctctgtttatccgtgccgaaaaacctgccgctcgcgcaggcggcgggcgtgccggaagcggcgtttaccgtgtggcataacctgttcgagctggggcgtatgcaaccgggtgaaagcgtgctgattcacggcgcggccagtggtgtgggtacgttcgccattcagtgcgcgcaggcatgcggggcgcgagtgatagccacggcgggcggcacagataagatcagggcgctgcgacagcttggcgtagggcgcgccattgatcgtcacagcgaagatttcgtcgcggttatccttgaagaaacccagggacgcggcgtggatatagtactggataatgtcggcggcgattatgtagcgagcaacctgagcatactggcgcctggtggacgtcatgtcagcctgtcatttatgcagggcgcaaaaattgaactcgatttgcagctggtgatgcgcaaagggctgagcctgacctcttcaacgctgcggccaaagagccccgtcgagaaaatgcgactggcgcagcgcatcagccgccatctgctgccgctgatcgccgcgggtaaaatcacgccgatccttcatcaaaccttaccgttagcacaagctgcggacgcgcatcgcattcttgaagccaataccaacatcggcaaagtgctgctgcaggtggcgccatga

SEQ ID NO: 223678 - DNA, 1149 bp, Klebsiella pneumoniae; identical to SEQ ID NO: 191339

SEQ ID NO: 223679 - DNA, 1158 bp, Klebsiella pneumoniae
atgattaccagtcgcacactgcttgagcgcctagtggcgtttgacaccaccagtcgcgaatccaacctggcgctgatcgattttgtctggcactacctgaccgacctgggtgtcaactgcgagctgatccacaacgccgggcgcagcaaagccaatctttatgcgcggcttggcccggccggaagcggcggcatactgctctcaggccacagcgatgtggtgccggtggatgggcagaactggagcgtaccgtcttttgccttgtcagagcgagacggcaagctgtacggccgcggcacagcggacatgaaaggctttatcgcctgcatgctggcggcagtgccgcattttcttgcgcagccgctcgcacagccgctgcatctggcgatttcttatgacgaagaggtaggctgtcttggcgtgcgtactttgctggatgtgctggccagtcgcccggaaaagcccgatctctgcctgataggcgagcctaccgaactgcagccggtgctcggtcacaaaggcaagcttgccgtgcgctgcgaagtgcagggcgcggcctgccattccgcctacgcgccgcaaggcgttaacgccatccaatatgccgcgaagctgatccaccgcctgacggctatcggcgaggtgttcgccgcgccggaacgccaggatacgcgttttgatccgccgttcaccacagtgcaaaccggcctgattcagggcgggcgggcgctgaatattgtgcctgccgaatgcacatttgactttgaagttcgcacgctgccgcaggatgacgcgcagcaggtggcggaggagctggaacgctacgcgcagcgcgaactcctgccgcaaatgcgcgccgtgaacagcgacaccgagatccgcttttatcccctcagcagctatcccggtttgtacaccgccgcgcaaagcgccgccgcgcagctgctcgcccatctcaccggctctgaggcgttcagcaccgtggccttcggcaccgaaggcggcttgtttcatcaggccggcatccccagcgtgatatgcgggccgggcagtatggcgcagggccacaaaccggatgagttcatcacaatcgaacaactggatgcatgcgacgccatgctgcgccgccttgccggatggatgagtctgaaggcgtaa

SEQ ID NO: 223680 - DNA, 675 bp, Klebsiella pneumoniae
atgacgttatccattattggacgttgctcgaaaaccggccagatgggcatcgccatcagttcctccagcatcgctgtgggcgcgcgctgcccctggctgcgcagcaaagtcggggcggtatcgacccaaaacatcaccttaccggcgctggggccgcgcattcttgacaggctgcagcagggcgctaccgccgaaacctcgcttaaagccgggctggacaccgatgattatgccgcctggcgccaggttaccgtgatgacaacggatggacaaagcgcgttctatagcggcgagaagacgctgggcgtcaacaacgcgctgagcggagagaactgcgtggccgcgggcaatctgctggcgaatcccgatgtgattgccgcgatggtgcaggccttcgaacaacggtcgggacaccttgccgacaggctcattgccgcgatgcaggcaggcatgagcgcagggggagaagcgggcccggtgcattcggcggcgctgtcgattgtggattctcccgtctggccgattgttgatttacgcgtcgactggaccgacgccgaccccatcgatgaactcaaccaactctggcaagcctatcagccgcagatgcaggactatatcacgcgcgcgctcgaccccactcaggcgccgagctacggcgtgccgggcgacgagtaa

SEQ ID NO: 223681 - DNA, 435 bp, Klebsiella pneumoniae; identical to SEQ ID NO: 191336

SEQ ID NO: 223682 - DNA, 231 bp, Klebsiella pneumoniae; identical to SEQ ID NO: 191335

SEQ ID NO: 223683 - DNA, 417 bp, Klebsiella pneumoniae
atgaccaaaacctacatgctggatactaatatctgctcttatatcatgcgcgaacaaccggaagcggtgctgaaacgcctagagcaagcggtgttgcgccgtcaccggatagtggtgtcagccatcacctatgccgaaatgcgttttggtgccatcggtaaaagggcttcgccccgtcatgtgcagctggtggacgcattctgtgcgcgccttgatgccatactggcttgggatcgggccgcagttgacgctacaacagaggttaaggccacgctagcagctgccggcacgccaatcggcccaaacgacacagccattgctggacatgccattgccgctggcgccatcctggtgacgaataatacgcgtgaatttgagcgagtcgctggtctgacgtttgaagactgggtgcaataa

SEQ ID NO: 223684 - DNA, 1041 bp, Klebsiella pneumoniae; identical to SEQ ID NO: 221949

SEQ ID NO: 223685 - DNA, 780 bp, Klebsiella pneumoniae; identical to SEQ ID NO: 221946

SEQ ID NO: 223686 - DNA, 246 bp, Klebsiella pneumoniae
ttgctgctgaaaacgtggtctgtaaagctgggagctatcggcgcgctggttggtgtatgggcgcagtcgttcccggatgctgcgctgcacgcctgggcggtgctgccgccggatatcaaaaacatcctgccgccaaatatcgttgcgttgattagccctgcgctggtggtgctggccgtactatcgcaatacgtacgccagccagcattgaaagaaaaggccgacgaactgaaggagcagcaatga

SEQ ID NO: 223687 - DNA, 2028 bp, Klebsiella pneumoniae
atggaacagtatacagttcagaagggtgacagcctgtggaaaatcagtcgtaaattcggaattgatgttaatgaactggccaatattaacggtcttctcactaaagcagagcagcatattatccagcccggtcaggtattgagtttaccatcaaaagacaaagtttatgatactcaattgactttgaggatttgcgatctcgtctggcgcccgcttggcaatgcaaaactcagactcacttttgatggtaagacgtatgattacgtaacagacagcactggtgttgtcgctggtctgcttattgaagacagcaccaaaggtataaaggttgaactgcaacatttaaataaaaaagaatacattctgattgcagaccataaaaaattgccgctgggaacgttaagtttgcggatatcatccagggaaatgataataaaagggagtaccagagttaaacaaggtacccaacaatcgagcaaacaacaggaaaaagtaaaggcgaaacagataaatgactcatctgcttccggcccatcagaaagtagaacagcggaaagcccgacaccttctgtaaatcaaaccacgagaaccgaaggtggtgctcccaccagtgtgagtaatattggtaatgtcagtgaagggttacgccttcctccagaggcagaacaatatcgagattatatcattgaaacagctaaaaaatatggattccagccagagggactttctgcattaatttatgcagagtcaagatggaaagcaaatgcgaccaatcctactggttctggagcggtagggttaggacagtttaaacctgatacatggctatccctatgtgcagaatcggagtctaaaatatatcagcttataacaggaaaatattcctaccagaaactggtctataaaaatagaaaactttttggtgaattggtcgatggaactataacggaaatcgataaagatactgttttatctttgcgggttaatgcagaatacagtattgatatgattggtttgtatgatcgaaaagggattgactcacttagtttaaagttatcagcagttagtgctcttgaatcagatgaattagttaaaatagcttaccttgttcatatgaatggggcatttggcgcatatgacattattatgaatgggaaagaaactcctggaaaaggcgaaaaaatcccgactaatattgctttctataaccgactaattggtaatttaaaagataatgagatgataattaggtattattctattgatagtacatggaggaccgcttttgttgcatggatggtcaattatttcgattcaattatcgtacctgatcattaccgaattgaaccgaagatgaaaaattactccaccaaagatattattcagaaacttaattctacgtacattctaaatacggatttacctccagtaactattatgaattcgcagccaagaaataccccatctccttctgtaaacgttgaggggaatacatggagtaatccactttctgtttgccggattcgtactcatgctcttcctcgagtccgtagtgctacttttaagggatggagaactcgctctaatggacgtcgttatcaacaccagggcttggatatagaagctgcgccaaatacaccaatattttcagtagcagatggtcgcatcgcttttataattgatcctcctcgtagtgattatggcagacagttatgtattattgttcaggttgacgatcttccactagagaaggcgttgctttgtagatgtaatgatagtgaaattagtgaggtttattttttctacgcccatctgtctgcaattcattctggtttagagaggggagaccatgtacgttgtggtgaattattgggagaaactggttgcacaggtaatgccaatggaatgaccagtatagctttaggtgctcatctccattttgaagttagagtaaaagagagacctggtcctggtatagcaaacaggcttgatcctgctcctttcatcgatgggtttaattatccttaa

SEQ ID NO: 223688 - DNA, 321 bp, Klebsiella pneumoniae
atgaaaaagaataaatatatattatcggtatgcagtaaagaaagaatggttaaagaatcaattttaaaagaaggattgcctgatattaatagtttatttagctttggtctttcaactacaactatgtctattgatttagaagattcatgctggttaaccacttacgatgacagtgaagaaagaaaatttcttttgaatgaatttggtttcaaaggtaagttgaatcttttatcggttgaaaaacagaataaacttcttcttaaaatcatatccaatgatagaacaaattcattaccaacaataaataaaaaaagactttaa

SEQ ID NO: 223689 - DNA, 915 bp, Klebsiella pneumoniae
atgataataacagatttagaaggtagaagtttatacagaaacagaaacgatttcgaaccagacagaatcattgatgtcatagtaaaagcaggtggcatagaaaatattgacctgacttttcatgccagtgatttctatgatgacgaagctattaaagcaataaggtttttgaaaaatatcaactacgacattaacaagcttccgatagaccaatacgaagaagttgtagctattgaacttatcaagcaaggctatgatatgtacaaaacaggtaggcataatatcccggtcattacagaatgtggttatggggttttaaaagagtgtattaaacaaggtttagatctgaataaattcaatgttgacaatcattttagatctgaaattgactatgatgaaagaggtaatagtagaaaggttcattattctgatatatctaattttataagatataaagagagcatagactacgacaaatttagcttgcttgctgacaatggattgttaaacgaaaaaacattaaaagacttagagggagactttggaccgctttattataaatatcaatcagccatgaataaagaaacctttaaaaaagttcttaatgcttacgataaaatagagttaaatcttgataagattcaagaaattcatgacatggatctgtgttattttaatggttctggtaattttaaaattcaattaattgataggtttttagaaacgagtgcaaacaaagattctgctattaatgaaatatatcagtcattggagaaaagaggtgaaaatataaacagtaaggataacttaccatttataaacatgattaaaaaacacactaaacaagaacagaacgagatccaggctgctttcacacaaaccgcaccaaaacccagcaccagaagaagaatgtag

SEQ ID NO: 223690 - DNA, 786 bp, Klebsiella pneumoniae; identical to SEQ ID NO: 223343

SEQ ID NO: 223691 - DNA, 789 bp, Klebsiella pneumoniae; identical to SEQ ID NO: 223344

SEQ ID NO: 223692 - DNA, 786 bp, Klebsiella pneumoniae; identical to SEQ ID NO: 223343

SEQ ID NO: 223693 - DNA, 765 bp, Klebsiella pneumoniae
atgaaaaaagaaatagtaaatattttaaatgaagtagtagctaagtcaaaatttgcaaacacggaaaaacacttcttcaattgtgtatctcatgcaatgattatgaatgcctttattcagtttgaagaaagaaagaaattctacctccaggacgactatgcttttaatcattttatgagcgaagaaacaataacaatttttaatggctatgagttcaaaaagaataataaatttttcaaacaatttaaaagcgaaattgttaaatccgcaatgattttatctaactgtatagaaaatgagcctttaacagatatttttaaagaattgtttgaagtttactatgcacaaaacgatcagacaaaatttgcaaaatacactgatagtaaattaacaaaagaccagaaagttgaatatgtaagctttaactatgataaaaatgatttttgtaatgttgaaccaactggtggcactggttttctcttatattccttgttagataaaataagcagaaaagcaggactggaagaaattcaaaagctaaatatcacttatttagaaagcgatcctttttttgctcaaatttttatcgcacaaacactaactaacatgttcaatcataatcttgactttaaagtattagatatctatatagcaagtaaagcacggtattacgactgtggaggatataaagaagcaggacatgtaatgatagtcaaccaaaatgagtttgtagcaaaacgagttttagaaatccaaaacaattaa

SEQ ID NO: 223694 - DNA, 213 bp, Klebsiella pneumoniae; identical to SEQ ID NO: 223309

SEQ ID NO: 223695 - DNA, 459 bp, Klebsiella pneumoniae; identical to SEQ ID NO: 223308

SEQ ID NO: 223696 - DNA, 1164 bp, Klebsiella pneumoniae
atgtctgaattatctgtactggaaaaagctatcgaaaactcccaaaaagaagtaaaggagcttatcgaagaacagcgtaaatccatcaaccagaccggtgaaatcaacaagcagctgcagatcgatctgacgaaagcacaggaagaactgaaagccaccggcacccgcctgttcgatcttgagcagaaactggccggaaactctcctgatcagactgcgcagaagtcatttgctcagcgcgtatctgaagacctgatgaagggctgggacggctcgcgtaccaaagcgaaagtcaccagttttgataaagcgattggttccggcgcagcgtcggcaggcgccctggtccagccgcagcagctgccgggtattcttatgccgggtcttcgccgtctgaccgtgcgtgacttgctggcacaggggcgtatcaccagtaacgcgctggaatacgtgcgcgaaaacgtgtttaccaacgctgcagcaccagtggcagaaggtaccctcaagccggaaagtaatattaccttcaccaaagaaacggcgaacgtgaaaactatcgcccactggatccaggcatcgcgccagatcatggatgatgccccggcgctcgagtcttacctcaattcccgcatgatgtacggactggcactggtggaagagaaccagatgctgaacggggacggtaccggcgataacctgcaggggctcaacgtagtagcgaatgactacgaaaccacactcaacgcaaccggagatactggcgctgatgttctggcacacgccatctatcaggtatcgctgagtgagttcgaagcagacggcatcattctgaacccggcggactggcaccgtattgccctgctgaaggacgctaacggcaattacattctcggtggcccgcaggcgtttgcctcgaaagtgctttgggggcttccggtggtgtcgaccacatcgcagaaggcaggcaaattcaccgttggcgcgtttggcctggcgtcgcaggtttgggatcgcatggatgccaccatcgagatcagcaaccaggaccgcgataacttcgttaaaaacatgctgaccatcctttgcgaagagcgcctggcgctggcccactatcgcccggcagcgattgtgacgggtgatattgctgtcagcactggtgcataa

SEQ ID NO: 223697 - DNA, 264 bp, Klebsiella pneumoniae; identical to SEQ ID NO: 223352

SEQ ID NO: 223698 - DNA, 195 bp, Klebsiella pneumoniae
atgtgggcgcagtcgttcccggatgctgcgctgcacgcctgggcgatgctgccgccggatatcaaaaacattctgcctccaaacattgttgcgttgattagccctgcgctggtggtgctggcggtgctttcgcaatacgtacgccagccagcattgaaagctaaggccgaagaactgaaggagccgcagcaatga

SEQ ID NO: 223699 - DNA, 846 bp, Klebsiella pneumoniae
atgaacacctatgcgaatatacttgggcttattgtgggtttaagtgttcggtatataatcgcttattttaaaatgccaattttctatcttgctataccgattgttcttacaacgtttataccatttacaatacggcttttatgcgccccgaaagcaaaaaaaatctgttggaaagacaaaattaaatataataaatatatattgcaaactggaatttctttggtcatatctactgtgtcgatgaccatatattcaaggataaatcagttttctgtttcatttatcgaaggtagctatgatcttggtgtttattctgtagctttaacattgggcacagcatggggttttgtaggtaatgctgtggcaatttcttttctatctaaaatttatgcggaaactgatgatcataaagcaatggaaattactgcgggtctatctttggggataatatttttactcataatgttcccatgtgtattcatttttattggaccatgggttatacaaattctttatggaaatgattatagtgcggcctatcccgtagctgtaatcttgtgtttctcaacaattatatccacattaggttttgtctctaatcgctttatcgtaagattttccggatataattacctgtcaaaaaagacaatggtgattttatttatcagcatacctttatcttctctatttacatattgctggggaattgttggttctgcatacagtgtaatcacaatagaactaatgtcattaactgtttttaattatttttataataaaagagtggtcttaaagatgcataaaaaaatgttaaacattaaaaacctgaaatatatattaagatga

SEQ ID NO: 223700 - DNA, 327 bp, Klebsiella pneumoniae
atgagtacacgaaacatcaacctcaaaactgccgctcaggaatcttccagaaaattggggggaaaccctgcgccatacacgatcctcattgccgagagggaaaaaaattcagaggaagagtgggatgtcctggaattcagcagcctgacggagctgaaaaaatatcgtaaaaactccccggaaaagatgcgctttaactattcctacgcgctctgccagggcatgaataagcagttccgatatatcaacgtggctgaagccgaccacttcaaacagtttttgcgtcagatagcgtgctcaggcgtcgatatccgggacatctactga

SEQ ID NO: 223701 - DNA, 1143 bp, Klebsiella pneumoniae
atgtactggcaggcactgcgcgggcgactgctgacgcgcccttcatcctatcccggcgtgtcgctgatggcggtgaccgttgagacgggcgggaagctggcggcgcagtcagaccgtcgcgtaaacgttgtggccacgcgggcctatgactcaggaacggccagaaccatttcgggggcgctgctgcatgtcgggaactcgctggggctggagatggatgtcgacaccatcaacgcgctggagtccgcgtactggacgccacggggcgaaaatttcgattttgctaccggagacagtatctcagcactggaaatgctgcagaagatagccaatgccggcaagtcacgttttctgctgagtgatggcctggcgacggtcaaccgtgaggggattaagccctggactggcgtgatcactccgcatgagatggtggaggagctgcagagcggatttaccgtaccgtccgacgatgattttgatggtgtcgacgtgacatacatcaacgggactacctgggcagaggagaccgttaaatgccggacgccagacaatcctacgccggtgaaaatcgaggcctacaaactcgatggggtactgaatgaggatcacgcctaccagatcggtatgcgtcgcctgatgaaatacctgcagcagcgggtgacgttccagaccactaccgagctggacgcgctgtgctacaacctgggcgatcgcatcgtgctcacagatgatattccgggtaacaacacgatttcctgtctggtggaggcgatgacaacggcggggggcgtgacaacgttcaccgtcacggagccgctggactggtcgtttgaaaacccccgcgcgctgatccgctatcaggatggctctgcatccgggctgatggtggcgagcagggtgggcgattttcagctgtcagtcccgcacctgagcgagtttgatgacccgatgaaggttgacctgtcgtcggcaaccatcgagccgatccgcctggtgttctgcggctcaacgcgccacgtctacgacgccattgtagaggatatcgcgccgcagtctgacggaacctgccaggtcaccgcaaaagaatacctcgaatcgttctatgcctacgacgacgccacataccccggcgacgtcgcgtaa

SEQ ID NO: 223702 - DNA, 1086 bp, Klebsiella pneumoniae
gtgcagcgcgataccgttggcgatagcggtcataccgaactcgcgcacgccgtagtggatgtagttcccggcagcgtcttcgttgatcggcttagagccagaccacagggtcaggttggacggcgcgagatctgcggagccgccgaggaattccggcagcagcgggccgaaggcttcgatggcgttctgcgaggctttacggctggcgattttcgccgggttggcctgcagcttcgcgatgaactcgttagctttcgcgtcgaagtcagacggcatctcgcctttcatacggcgggtgaattcggctgcttcctgcgggaaggctttggcgtaagccgcaaacttctcgttccatgcggcttctttcgcctggccggcttctttggcatcccactgggcatagatgtcagacgggatgtcaaacggcgcgtgtttccagcccagcgcttcgcgggtcagggcgatttcggcgtcgcccagcggcgcgccgtgggagtcgtgggtaccggctttgttcggcgaaccgaaaccgatgatggttttgcacatcagcagggacggtttgtcggtgaccgcccgtgcttcttctaccgcgcgtttgatggcgtcagcgtcgtgaccgtccacgccgcgcaccacgtgccagccgtaggcttcaaagcgtttggcggtatcgtcggtgaaccagccttcaacgtggccgtcgatggagatgccgttgtcatcatagaacgccaccagtttacccagtttcagggtaccggccagggagcacacttcgtgagaaatgccttccatcatgcagccgtcgcccatgaaggcgtaggtgtagtggtcgacgatatcgtgtcccggacggttgaactgcgccgccagggttttctcggcgatagccatcccgaccgcgttagcgataccctggcccagcggaccggtggtggtttccacgcctgcggtgtagccgacttccgggtgacccggagttttggagtgcagctggcggaagtttttcagctcttcaatcggcagatcgtagccagtgaggtgcagcaggctgtaaatcagcatcgaaccatggccatttga

SEQ ID NO: 223703 - DNA, 606 bp, Klebsiella pneumoniae
atgtctctccattctgccctgtctgaggagatcattacttttgaacaggcgcgtgatattgcgatccgctgtcatgagcgcacgattaaccaccaacagcgctgggttaatcattaccagaaccgcctggcctacgaacgcgcgatgctcaatgaaaacggtggcgttgtcacccgaacacaggaatttgaaccaggcgggcaggtactgagccggggagaatggttaaccattctccgggttaaccggagtaagggggaggtgagttcagtcgaaacgcccggttatcgctttctgggctacagcggcacgatgaaactcacgcccgaccgtatcacggactacaaagccccgacagcggaggaagccagcgacgcgaagaaagcggcgaagcgcccaccgatcgtcaattatccgggggaagggttccgggaaatgacaaaagctgagtgggcgaaattacccgctgattataaaggcgtgcggggtgctgcagaaaccgaaacacacggcgcctaccgcttccgccggtgcatgacgcacggttgtacgcttgtgaatgtgtatatcacagacatgaaaaccgttgaaattccgaaaaaataa

SEQ ID NO: 223704 - DNA, 564 bp, Klebsiella pneumoniae
atgcatcatgaccttaaacaccgtattcaggcgatgcgggacaaactggaagggcgcgcacctgtcgctgaaattcagggtagctcgcaactttttgtcaccccctccccggaatgtcgccggttggttgagctggctgatgtccgggaaaccgatcgcatactggaacccagtgccggaacgggcgccatactgcaggcgatcagggatgcagtcccccgggcgaagtgtgacgccgtggagctgcacgccgggttagcccgtcacctgcaggcgcatttcccggaggtccggatctggtgcggagattttctcgaatatcatccggagcgccggtatacccgaattatcatgaatccgccgtttaatcgcggtgatgatatccggcatatccggcgggcattaactctgcttgagcctggcgggattctgacgggcatatgtctggacgggccgcgtcagcaaaaggcgctggagtccctggcggacgtctgggagccgttgccacggggaacattcacgtatacccaggtagcgaccgccattctcagaataaccgtctga

SEQ ID NO: 223705 - DNA, 231 bp, Klebsiella pneumoniae; identical to SEQ ID NO: 98230

SEQ ID NO: 223706 - DNA, 711 bp, Klebsiella pneumoniae
atgacaccgactaccgcacagatcatgacggaaaataccgtcagccagacttaccgggcaacttattcacccgatgataataaattgcgactttacgcatcattacggctcgatgaagaaacgtattccctgatcaacaaagcaggctttcgctgggcgcccaaacaggaactctttgtggcgccagcctggacgccggggcgggaggatgtcctgctttccctcgccggtgatatcgaggacgaggacagcaccctgtttgatcgccaggagcagcgcgccgggcggttcagtgactacagtgaccggcgggcggttgaatcggagcaggcgcttgcgcatgttgattcgctggcatcggctgtcccgctgggacagccgatcctggtaggccaccacagcgagcgccgcgcgcgccggcatgcgcagaaaattgagaacggcatgaaacgtgcggtgatgctgttcgagcgcgccgaatactgggaacagcgcgcgcaggcctctctgcggcacgcgaaatacaaggagcgtccggatgtgcgttaccgccgtatcaaaaaaatcgaggcggaattacgcaagtcccaaaagcacatcgcccggtctgaaaagtatatgacgatgtggcgtgcgcagacgctcgatctgaaaatggcgttactggtcagtaattatgatcacctaaattccacgtgtgttttttattag

SEQ ID NO: 223707 - DNA, 219 bp, Klebsiella pneumoniae
atgaagtccatactcagggagctggttggcatcatcgtcgccacctcccccactctcctggttaaccagaaccaggccgctatcggaatagatccagtgatgtccgccaaccgtgtaagcctcaacgatttggttggtagcggcgtcaacgatcatacgccataccttttcaccgccgataaactgcgtcacctttccctcgcttcccagtgcgtataa

SEQ ID NO: 223708 - DNA, 291 bp, Klebsiella pneumoniae
atggcgtcaagttcaccctggcatcatctctataacactaaacggtggtaccggctgcgttatcaccagcttcagaagcaaccactctgcgagtttcacctcaggcgaaatcaggtgatatccgcaaccgttgttgatcacatcaaacctcacaagggcgatgaaaccctcttccacgacccgaacaatcttcagtcgctatgcaagcgctgccacgactcggttaaacaacgcatggagaagggcggaacggttaccgagttcgacaatgaaggcagggttatctggtag

SEQ ID NO: 223709 - DNA, 291 bp, Klebsiella pneumoniae
atggcgtcaagttcaccctggcatcatctctataacactaaacggtggtaccggctgcgttatcaccagcttcagaagcagccactttgcgagtttcacctcaggcgaaatcaggtgatatccgcaaccgttgttgatcacatcaaacctcacaagggcgatgaaaccctcttccacgacccggacaatcttcagtcgctatgcaagcgctgccacgactcggttaagcaacgcatggagaagggtggaacggttactgagttcgacaatgatggccgcgttatctggtaa

SEQ ID NO: 223710 - DNA, 558 bp, Klebsiella pneumoniae
gtggaaaaaatcaaatcaaaaataataccgcttttttatattgatcatgctattactttcttagaaaaaacgttttccccggaattaaaaataatatcagttggtagattgactaagcaaaaaaactatgcatatacactatcagtattaaaaaaattagttgataaaggggttaatgcatcactcgatatatatggggttggagagttaaaggaggaattaataattctttcaaatgaattgatgattgcgaatagagtaaactttaagggatttgttagcgattggaaagaagatgcaaagaacgctgacatttatatgctgtcaagtgattttgaagggctaagtattgctactttagaggctatgtctattggaatgctatgcgtagttaggcctacaggtgaagtaaaaaattatttaacaaacaatagcacaggtatcattgcttctaatgaagatgaagcctgtgacaaaataatgaccatactgaatgataatagcttatataactctattagatgcaatgcatataatctgtctcttatacacatctga

SEQ ID NO: 223711 - DNA, 1797 bp, Klebsiella pneumoniae
atgatgttcaaatttaatttaacttatgtcgcactcgcggcagcccttagctcatcgtttgtctatgccgacccaaacacatggacgcactcatcaggcacaaccgttgttgatattgaaaaacctaacgcggctggcgtatctcacaatatgtaccgtgattttaacgtcggcagcaacgggatgattttgaacaacagcggcgacgatcttacccatgacaaatttggcaatattgccaggaataataatttaaccaacggcagcgcatccgttattctcaatgaagtgacctcaaataagtccagttccctcaacggatttatagaagtcgcgggtcaaaaagccgatgttattatcgctaacccgaacggtatctcctgctcaggctgcagcttcattaataccaattcagcagtattaacgaccgggcaggtgaaacttaacgataacggagggatcgggtcctataccgtcagtaaaggcaagattactatcggcaagaacggtatggatgccacgaacaactatgccctgctgctggcggaaactattgctatcaatggtacgctcagcgctgccaacgctacattaggcgcaggaagttttacctttgataacacaacacaaaagatgacttccgcaggtaaaaccccaagcgttatgcagatgctatttcctgaatacagtatcgacattagtaatcttggcggaattaaagctaatagcatcagtatgatgggtaacgattatggtttgggcgtgcgcaataaaggcagtattgtttctaacagcatgttgtcgatggtcagcagcggagaattggtcaacgaaggttcgatcaccggcaatggtatgctcacgcagatcgtttcggcggggaactttaataactcgggtagcatatcaacaaccagtgcgactgcaattaatagcttacaggccctgactaacaacgggactatcacaggcaccaggcagctggtggttaacgcctcgggaaatctggaaaataacggcaccatctcaagcaaaacggcgttaagcgtaaccactaacggcaatttgaaaacttcctacggttccaatctgctttcagacaaccaattagtggtaggcgccctcgggaatatcgataacggcggttctactcgtgcaaaaaacactactgtctcttttagcggcagctcgctcaatgtgacgggaaacatccacggaaccgaaaccctcaccattcaatcgattaaagacaaagagatttcgtctggcgcgatcggcagctcagggaccatcaaaggaggtaatatcgccatcaagacaaaggggaatgtcatattaaataaaggtagccaacttcttgtcacagataacctaacggcagagagtaagagttttaataataaaggcggtaccattcgtggcgataatgcagtcatgaactttacccacagtggcatacaaaatagcggagaaattattggcgggactatcaacatcagcactaaatcagattttcttaatgaatggctgattcaatcttttggcgatatgaccattgacaccaacaataatggcaatattatcaatcgtggtcttatccacgctgacggaaccatgacgttaaatgccaaaaagattgttaatggcggttataaatgcggatttctgggtctgatgacctgtgaaaaaggaacgctcagcggcaataaattggtcgtgaacgcttatcataactacgcgagcgaaatcggtggaagtcagtactttaaatcgacagaaattaacacgctcaagtaa

SEQ ID NO: 223712 - DNA, 483 bp, Klebsiella pneumoniae
atgaacaaggttgctcagttctaccgagagctggtgtcgacgctcagcgagcggttacgcaatggagaacgtgatattgatgcgctggtggagcaggccagggtcaagattagccagtccggcgagttaacgcagagcgaaatcaacaatgtgatccgcgctgttcgacgcgatctggaagagttcgccctcagttatgaagagagtcaggatgagctgactgatagcgtctttatgcgggtgatcaaagagagtctctggcaggaactggcggatattaccgataaaacccagcttgagtggcgcgaggtgtttcaggatctcaaccatcacggtgtctatcacagcggcgaagtggtggggttgggtaacctggtgtgtgaaaaatgtcattatcaccttccggtgtatacgcctgacgtactgccgcgttgcccaaaatgcggtcacgaccagttccagaggcggccctttgagccataa

SEQ ID NO: 223713 - DNA, 1065 bp, Klebsiella pneumoniae
atgaaaaagatcgcactctctctcattacgctgggtctgctgcagtcgacggcggcgctggccaccgccccgacgccggtgccggcggccattgccgaacacaacggcccgatccgcattgccgtgatccgcaacctggggtctgacgataacaccacccagtttgtcgccggggcgctgcaggaaggcaaaaagctcggtttcaaaatcagcaccttcctgagcaacggcgatgacgccaagttccaggacttcgtcaaccaggcgatcagccagaaatatgacggcattattctctcccaggggcgtgacccctattcgacggccctggtgaagaaggcggtggacgccgggatcaaagtggcggtgttcgataccgcggtgagcggtgagatcccgggagtgacggtcagccagcaggatgacgcctcactgaccgagctctcctttggccaactggtgaaagacttcaacggcaaagccaacatcgtcaagctgtgggtggcgggcttcccaccgatggagcgccgtcaggcggcttaccagacgctgctgaagcaaaacccgggaatcaaagagctggagtcgatcggcgccgtttcgtccgatgtgcagggcgacaccgccaacaaggtgggggcgatcctcgccaagtatccgaaagggaaaatcgacgctatctggggcacctgggatgccttcagccagggagcctataaggcgctgaaagagaacggccgcaccgagatcaaactctacagcattgatatttccaaccaggatctgcaactgatgcgcgaagccggcagcccgtggaaggtgagcgtggcggtggatccgaagcttatcggcgcgaccaacgtgcggctgatcgccaataagatcgccggcgagccgacgccagccacctacgacttcaaggcggcggcgatcccgcaggcgctactggcggcccagccgggggcggtgaacgtggcctcgctggggaaaatcattccgggctggggccagacggaagactttatcgccccgtggttcgcgacgctggaagcgaaaaacaaataa

SEQ ID NO: 223714 - DNA, 1734 bp, Klebsiella pneumoniae
gtgaataaaacagccatggccgtggcggtcagtgtgatcctcgccggtggcgcgcacgccgcccagcaagagcgtccgaacgtcatcgtgattatcgccgatgatatgggctactctgacatcagccccttcggcggcgaaatccccacccccaacctgcaggcgatggccgagcaggggatgcgcatgagccagtattacacctcgccgatgtcggccccggcgcgttcgatgctgctcaccggtaacagcaaccagcaggccgggatgggcggtatgtggtggtacgacagcaccattggcaaggagggctacgagctgcggctgaccgaccgcgtcaccaccatggccgagcgctttaaagacgcggggtataacaccctgatggccggcaagtggcacctcggttttgttcccggcgccacgccgaaagatcgcggctttaatcacgccttcgcctttatgggcggcggcaccagccactttaacgacgcgatacccctggggaccgttgaagccttccacacctactacacccgcgacggcgagcgcgtctccctaccggatgatttttactccagcgaagcctacgcccggcagatgaacagctggattaaagatacgccgccggaacaaccggtcttcgcctggctggccttcaccgccccgcacgacccgctgcaggcccccgacgagtggattaagcgcttcaaaggccagtatgagcagggttacgccgaggtctatcgccagcgcatcgcccgcctgaaagcgctgggaattatccatgacgataccccgctgccgcatctggagctggataaagagtgggaggcgctaacgccagagcagcagaaatatacggcgaaagtgatgcaggtgtatgcggcgatgatcgccaatatggacgcgcaaatcggcaccctgatggagacgctgaaacaaaccgggcgcgataaaaataccctgctggtctttttaaccgataacggcgccaacccggcgcagggtttttattacgaatctaccccggaattctggaagcagttcgataaccgctatgacaacatcggccgcaaaggctcgtttgtctcctacggcccgcactgggccaacgtcagcaacgctccctacgccaactaccataagaccaccagcgcccagggcgggattaacaccgactttatgatcgccggtcccgggatcacgcgccacggtcacatcgacgcctcgacgatggcggtgtacgacgtagcgccgaccctgtatgaattcgccggtatcgatccgaacaaatcgctggcgaagaagccggtgttgccgatgatcggcgtcagctttaagcgctatctcaccggcgaagtacaggcgccgccgcgcgggaaatacggcgttgagctgcaccatcaggcggcgtgggtcgatggtgaatggaagctgcggcggctggtgccgcggggcctcaccgccggtgacgcgccgtggcagctgtttaatctgcacgacgacccgctggagacccatgacgtcgcggcccaacatcccgatcgggtcaaagcgatgagcgaggcctacgaggcgttcgccagacgcaccatggtcaccagggcgcagggcaagatgatcgattacgtcggtattgacagcaaaactggacgctatctggcggtcgatcccgccaccatgaagccggttccggcgccgcaggcgatcccggtgagcgagatccattaa

SEQ ID NO: 223715 - DNA, 1305 bp, Klebsiella pneumoniae
atgagcaccacaccgttaacgctttctattgccgggcaaccgacgcccatcaccctgccgcaggtgccgggaacccggggccatgtgggagtcgacatacgcgagctgaatcactccggattctgcagctacgaccctggctttgccaacaccgccggatgccagtcggcgatctcgtggatcgatacggaaaacagcgtgctgctgcaccgcggctatccggtggatcagctggctcgccagtgtgattttctcgaggtggcgtacatcatgctgcggggcgacgcgccggatgaggccagctatcaaacgtttcgcgagaccatcacccgccataccctggtgcacgagcagatagcccgcatgtgcagcggctttcgccgcgattcgcacccgatggcgctgatgtgtgctctggtgggggcgctggcggcgttctatcatgatgttctggacgtggaaaatccgcagcatcgggcgctggccgccacgcggctgctgtcgaaaatgcccactatcgccgccatgagctacaagtacaccattgaacaacccgccgcctatccgcgcaacgatctctcctatgccggaaatttcctgcagatgctgtttgctatcccggccgagaagtacgtcctcaatccggttatcgagcaggcgatgaaccagatcctggtcctgcatgccgatcatgggcagtgcgcctccaccaccacggtgcgcgcggcgggctcctccggggcgaacttattcgcctgcgtcgccgccgggctggcatcattatggggaccgatgcacggcggcgccaatgagtcgagcatgcggatgctggaggaaattgaaagcgtcgatcaggttccggcgtttctgcgtcatgcaaaacgcgacccgcaggcatttcgccgcctcggttttggcaactcacgctaccgtcaccgtgacccgcgcgccgatatcctgcgtgaaaccagccatcgggtcctggcggaggtaggcatgtctgaccgcctgctgcaggtagcgatggcccttgaggacgtggcgctgaccgatccctactttgtggaaaatggcctgtcgccgagcgtggatttttataccgcggtgatcctcaaggcgatgaatctgccttcgtcgatgtttgcggtggtcaccgcggtcggccggacggtcggctgggtggcgcactggaacgagatgcaccaggcaccgctgaccatctaccggccacggcagatttacgttggcgaggagtatcgggattacgtctcccgacgcggcgagcggtcaacgggcccgcagtga

SEQ ID NO: 223716 - DNA, 894 bp, Klebsiella pneumoniae
atgaaaacgctggttgttgccctcgggggtaacgctttattacagcgcggagaagcgctgacggtagaaaatcaatatcgcaatattcacagtgccgttcccgcgctggcgcgtctggcgcagcattaccgtttggccattgtgcacggcaacgggccgcaggtaggcctgctggcgctgcaaaatctggcctatagcgacgtcgaaccttacccgctggacgtgctggtggcggagagccagggcatgattggctatatgctggcccaatgcctggcgcaggaatcgtcggtaccgccggtatcgacagtgatgacgcgtattactgtggcatcgaacgatccggccttttcggcgccggagaaatttatcggtccggtctatgaccctgagttgcagcagcagctggaagaggagtacggctggacgatgaagcgcgacggcaaatacttgcgtcgggttgtcgcctcgccaaggccggtgagaattgaggagagcgactcgattgagcgtctgctgaatgagggacatgtcgtgatctgctgtggcggcggaggcattccggtgctcgagagcgggcagggcgcagaggcggttatcgataaagatttggccgcagcgctactggcggaacagattgatgccgatggtctggtgatcctcaccgatgcggatgcggtatatgaacactggggcaccccaatgcagcgaccgatccgtgaagcgaccccggaggcgctggcgccttttgctcgcgacgatggcgcgatggggccgaaaatttcggcagtcagcagctatgttcgccgcaggggcaagcgggcgtggattggcgcgttatcacgcattgaggagactctcgccggtcgggcgggaacctgtatcaagccctga

SEQ ID NO: 223717 - DNA, 804 bp, Klebsiella pneumoniae
atggataagatccgtccgctaacaggcagcattgacgcgccggaccatcgccagccatggcgaaccggcggcctctggcagcgcaccatcaatctctatgttgcagacggcgcgctgctgacgctgcatcatcggggacaaggcgtgagccccggcggatgggtattacgtcaccatgattttacccgtttacacgcggcgctgaaggcgggggggctgccgatagcacgggatgacggcattcaggtcgataacctgttgctgttaccaccgcgaaggcgctgctccctgcggcctcgatatcagcctggtggcccttatctaccgacagcgctcatgaagcgcccggaagagacgggcctgttcgggccgctgtcacaggctatccatctgccgcatcatcctgagttgcggcaattacgccactgttttgcttctgcgttggccgggagcgccgttgactggcggctgtggctggggaaggggccaggcctgacgccgagcatggacgatatgctgatcggcatgatgctgtccgcgtggtgttctggactgatgtcgcgcaacagcggacaccatttctttcgtgcctccggcgatctgcatgccgccacaacgcaggtcagcgtcaactatttacgctacgccagtaagggatgcttcgcttcaccgctactgcatgttgttaacgcgcttcagtgcggacgacgaattgaacctgccgtcgaagccctgctggcgatggggcacacctctggtgccgacacgcttctggggttctggctggcgcaacaaataatgtaa

SEQ ID NO: 223718 - DNA, 1260 bp, Klebsiella pneumoniae
atgtttacatcagtggcgcaggccaatgaggcagtaattgaacgaattcggaatgcacgtccgcactggctggatgtgaagccggcaggtgcgctaatcggggcgctgaatcagaacaaaacgttgctccacgccgggccgccgatgcgctggcaggcgatgaccggcccaatgaaaggggcctgcattggcgcatgcctgttcgaaggctgggcgcaggatgaaaaaaccgcccatgcgatgctggaaagcggcgaaattacctttatcccatgccatcacgttaacgccgtggggccaatgggcggcattacttcgccgaacatgccgatgctggtggtggaaaacatcgctgaaggcaaccgcgcctattgcaacctgaacgaaggaattggcaaggtgatgcgtttcggcgcttacggtgaagatgtgcagcagcgcctgcgctggatgcgcgatgtgctgatgccggtgcttagcgcagcgctgaaacagatggagcgcggtatcgatttgacggcgatgatggcgcagggcatcaccatgggggatgagtttcaccagcgtaatatcgccacctccgcgctgctaatgcgcacgctggcaccgcatctggcgcgcctaaatcacgacaaacagcagatagctgaagtgatggatttcctcgccattaccgaccagttcttcctcaacctggcgatggcctactgtaaatcggcgatggatgccggggcgcagatccgcgcgggcagtatcgtcaccgcgatgacccgcaacggcgatatgttcggtattcgcgtcagcgggctgggcgaccgttggtttaccgcgccggtcaatacgccgcaggggctgtttttcactggcttctcgcaggagcaggccaacccggatatgggcgatagcgccattactgaaactttcggcatcggcggggcggcgatgatcgcggccccgggcgtgactcgctttgtcggcgcgggtgggatggaggcggcgaaatcggtctccgaggagatggcggaaatcttccttgaacgcaatatgcaactgcaaattccgggctgggatttccagggcgcctgtctggggttggatattcgccgggtggttgaaactggcattacaccgcttatcaacactggtatcgcgcataaagaggcggggatcggccagattggcgccggaaccgtcagagccccactggcctgctttgaactggcgctggaagcgctggcggacgagctgggcgtgagctga

SEQ ID NO: 223719 - DNA, 1668 bp, Klebsiella pneumoniae
atgatccatgcctttattaaaaagggctgttttcaggattcagtcagtttaatgattatttcacgcaagctgagtgagtcagaaaatgtcgacgatgtttcggtcatgatgggcacgccggcaaataaagcgctgctggaaactaccggtttttggcatgacgattttgccacggcgacgccgaatgatatttgcgtggcgatccgtaccgattgcgcagatgcgtcggtgacggaaatgattatcgcccttctggatgaagccttatccgccctggcgcagggaagcggacaaagtcagagtctgaacgtggttcgccgctggcaaagtgcgatgcaaaaactgccgcaggccaatatgaccttaatttccgttgccggagaatatgccgcggagctggcccatcaggcgctcagtagcgagaaaaacgtgatgatcttctccgacaacgtcaccctggaagatgaaattgccctcaaaacccgcgcccgtgacaaaggattgttggtgatggggccggactgcggcaccgccatgatcgccggcaccccgctggccttcgccaacgtcacaccggagggcaacatcggcgtgattggcgcttccggtaccggtatccaggaactggtctcgcaaattgccctcggcggcgaagggatcagccatgcgattggtctcggcggccgtgacctgagcgcggaagtgggggggcttagtgcgcaaacggcgctggaaatgctaacccaggatgcacagagccaggtactggcctttgtttccaagccacctgctgaggcggtgcgcctgaagataattaacgcaatgaaacgcagtgctaaaccggtggtggcgctatttcttggctatgtctcgccagtcaaccgtgatgaaaacgtctggtttgcccgcacgctggacgaggccggtcggctggcgtgtctgttagcgcgagtggtacgccatcaggaaaatctgaccgcagtcgcgggtaagcatattcgcggtttatacaccggcggcacgctggcggcggaatccgccgggctgctggctgagcgcctgaacatcactcccgatgagcatcacccgcagggcatgatgctcaacgccctaggccaccaggtcgtcgacctcggcgatgatttctacaccgtcggtcgtccacacccgatgattgatccctccctgcgtaaccaactgattgctgaactcggcgagcaaacgcaggtgggtgtattgctgctggatgtggtgattggctatggcgccaccgccgacccggcgggatcgctggtggaagcatgccggcgggcctgggcattgaggagtgaaagccatccgctgcacgttatcgcgaccgtgaccggtaccgaaaatgacccgcagtgtcgttcccgtcagattgccgagctggaagatgccggcgtggtggtggtcgatagcctcccggaagccgcgctgcttgctgttgcgctgattagccctcagcggatggcggagcccgcaccgcgttccagtctgctggacggggtggcggtaattaatgccggtctgcgcagttttgcgatcgatttacagtccgccggaacgccggttgttcactatcagtgggcgccgattgccggaggaaataaaaaactggctcgtttattagagcgtttgcaataa

SEQ ID NO: 223720 - DNA, 1050 bp, Klebsiella pneumoniae
atgaaagtcagtcgggaaacacttcatcagcttattgctaataagctgaacgcagcaggacttactcataatcacgcggatattattgccgatgtgttggtttatgctgatgccagaagcattcattcgcacggcgcggttcgtgttgaatattatgctgaacgaatttcaaaaggcggcaccaatcgtcatcccacctttagctttgaaaaaaccggcccctgcagcggcattttgcatgccgataacgccgccggccaggtcgccgccaaaatgggcatggaacatgccattgagatcgcccggcaaaatggcgtagccgtagtgggtatccgccgcatgggacacagcggggccatctcgtacttcacacagcaggcggctcgcgccgggctgattggcctctcgctatgtcagtcagacccgatggtcgtcccttttggcggggcggagatctactacggcacaaacccgctggccttcgccgcccccggcgagggcgacgatatcatcaccttcgatatggccaccaccgtccaggcgtggggaaagatccttgatgctcgttctcgccatgaaagcattcccgatagttgggcggtggacaaaaacggcgccccaaccacggatccctttgccgtccatgctctgcttcctgccgccggcccgaaaggttacgggctgatgatgatgattgacgtcctatccggcattttgctcaaccttccttttggtcgccaggtcagctcgatgtacgacaacctgagccaggggcgtgagttaggacaattgcatattgtgattaatcctgactttttctcctccagcgccttatttcgccagcacattagcgacaccatgcgcgaattaagcgccattacgccagcgcctggatttagtcaggtttattacccggggcagaatctggatatcaatgagaaaaacagcgcggtcaacgggatcgaaatcgttgatgagatttatgactatctggtttcagacgctttatataaccgctcttatgaaaccaattccccttttgctcaataa

SEQ ID NO: 223721 - DNA, 1236 bp, Klebsiella pneumoniae
atgactcattcttttcgacaggcaattgaagaaacattgccctggctttcatccttcggcgccgatcctaccggcggactcacccgcttgctttattcgccggagtggctgcaggcgcagcaggcgtttaaacaaaagatgagcgacagcgggctggaaacacgcttcgatgaagtgggtaacctttatggccgcctgcccggtagccgttttcccgacgacgttatcctcagcggctcgcatattgatagcgtcgtcaacggcggtaatcttgacggtcagtttggcgcgctggcggcctggctggcggtccgctggctaaaagagacctacggggcgccgctgcgtaccgtggaggtgctggcgttagcggaagaagaaggcagccgcttcccttacgtcttctggggcagcaaaaatatcgtcggcatcgctaacccggcggacgtgcgtgagattaaagacgccaaaggcgtggcgtttgtcgatgcgatgaagcagtgcggtttcagcctgcccgccgccccgctggcgccgcgccgggatattaaagccttcgttgaactgcatatcgaacagggccgcgtgctggaaaccaacaagcagtccatcggtgtggtcaacgccatcgtcggtcagcgccgctacaccattaccctcaacggcgagtctaaccatgccggcaccaccccaatgggctaccgccgcgacaccgtccatgctttcagccgcatctgctgcgaatctatcgccaaagcgaaagcccacggcgacccgctggtgctcactttcggtaaagtcgacccgcagccgaatacggtcaacgtggtgccgggtaaaacggtctttaccatggattgccgccacaccgatgcccttgcattaacggcatttactgaagtgatcgaaggcgatatgcggcggatctgcaaggaaatggatattggcattgaaatcgacctgtggatggatgaagctccggttcccatggacaagaggctggtcgcccagctcactgccctgtgcgaaaaggagaaggtgaatttccgcgtgatgcacagcggcgcggggcacgacgcgcaaattttcgccccctgcttcccgacctgcatgatctttatgccgagcattaaaggtattagccataacccggcggagagtacgcatatcgacgatttggcggaaggcgtaaaaacgctcgccttaatgctgcaccaactggcctggactgaataa

SEQ ID NO: 223722 - DNA, 783 bp, Klebsiella pneumoniae
atgggatatttaaataatgtcgtgggttatcgcgatgatttactggccagccgttccatcgtgcgccacggtaattatgccctgctgacgccggacggtctggtcaaaaatattattccgggttttgctaactgtgatgtgactattctgtcgacgccgaaattaggcgcatccttcgttgattatctggtgacgctgcatgaaaacggcggcaatcaaagcgggtttggcggcgaaggcattgaaaccttcctgtatgtcataaagggggaaatcaccgccggggcgcagggtaaaacctttgcgctgaccgaaggcggctatctttactgcccaccgggtgaacggatgacgttcagtaatagccattcagccgacagtcagctatttctctataagcgccgctatattccgacagagggccatgcgccttatctggtcaccggcaacgtcagccagctggagcgtattcattatgaaggaatggaagacgttattctgatcgacttcctgccaaaagagctgggcttcgatatgaatatgcatatcctctctttcgagccgggcgccagccacggctatatcgaaactcatgtgcaggagcacggcgcctatattctttccggccagggcgtgtataacctcgataacaactgggttccggtgaagaaaggcgactatatctttatgggcgcttattccctacaggcgggatacggcgttgggcgcgaggcgttcagctatatctactcgaaagattgcaaccgtgacgttgagatctga

SEQ ID NO: 223723 - DNA, 1146 bp, Klebsiella pneumoniae
atgaaaattattattgcaccagactcgttcaaagaaagcgtcagcgccagtcgctgcgctcaggcgattaaggcgggcttcgtctccattttccctcaggcggagtgcatctgcctgccgatcgccgacggcggcgaggggacggttgaggcaatggttgaggcgaccgacggcaaaatggtgatgctgccggcgatggggccgctgggggaggtggtaggcgccttctatggcctgagcggcgacgggcaaaccgcgtttattgaaatggcggcagccagcgggctgatgctggttcccgccgggagacgcgatcccttgcgggccaccagcttcgggaccggggagttgattcgccacgcgctggacgccggcgttcgccatattatcctcggtataggcggcagcgccacggtagatggtggaatgggcatggcgcaggccctgggggcacgttttcttgacgagcgcggcgagagcgtaggattcggtggcggcgcgctggctcggttggcgagcattgacttacgcgacctcgatccgcgcctgcgcaaatgccggattgatgtggcctgcgatgtggataatccactgctcggcgaacgcggcgcggcggcggtctttggcccgcaaaaaggagccagcgcagagatggtcgctgccctcgagcgcggtttgcaaaattacgcgcaggtgctgctcatggcaacgggtgcggaggtgacgaagattgtcggcggcggcgcggcgggcggaatgggcgtggcggcctgcgtattccttaacgcggcgctgaagccgggcatcgatatcgtgattgaggcgatgcaactggaggaggcgctgcgcgacgcggatctggtgattaccggtgaagggcgaatggattcgcaaaccgtcggcggcaaagcgccgattggcgtggcgcggcttgcgaaaaagcatggcatcccggtgatcggtatcgctggcgttctgggggacggcgtggaagcggtgcatcagcatggcattgatgcggtattcagcattctgcccgcgctggcgccgcttgccgaagtgctggatcgcggtgagcaaaatctgtatgcctgcgcgcgcaatattgcctgtgctatcaagctcggccagaacattcccgcctga

SEQ ID NO: 223724 - DNA, 1311 bp, Klebsiella pneumoniae
atggtggtattgccgctaaataaacgtaacaccctggcggggtttcaatggttcttctttattttctgcaacaccgttgtggtaccgccaacattacagtctgcttttcagctccctgccagcgcgttaattacgcttacccagtacgggtttatcaccaccgggttggcctgtctggcacaggcgttactgggacatcgtcgggcgattatggaaggaccgacgggcctgtggtggagcaccattctgacggtcaccgtgggcgaagccgcacgggggacgccgttcgacagcatcgcctccagcctggctgtcggcatatttttctcggcggtgctcaccatcatcattggcgtaagcggcattggccatcgcctggcgaagctcttcagcccaacggtaatggtctttttcatgctgctgctgggcgcgcagctgactaccatcttttttaaaggcatgcttgggctgccctttagttcgacgcaggttaatccgggtattcagctggcgccattttgcctggcgctgtcggtgatgattctggtgctgggaatgatcatttttctcccggatggtatcgctcgctacgccctgctgatcggcactctggcgggctgggcaggctggtatctgctgtttcgcatacctcccgctacggtagcctcaggccccattcactggcagtggttcccgctgggttatggcggccagctacgacccggcatcattttaaccgccctgctggcgggactggttaatattaccaatacctatggcgccattcgcagcaccgatgttttttacccccaacagggggccagtaatacccgctatcgacgcagctttatgatctccggtttgataacattaataacggttccgctcaacgtggtgccattttccccgtttgtttcgtcgacagctttattaactcaaacgggcgacacctcgcgccggccatttattatcggctgcttgtgctgtctgctggttggattatttacgccgctgacccacttttttaccaccctgcctttaccgatcagcagtgcggttatgctggtctcttatctgccgttgttatattccagtttatctttcagtaagcaaattacctttaccgcgcgaaatatctatcggctggctctaccgttatttgtcggcatttttttgatgggactaccgccggtttatctccagacgttgcctctgacaatcagacccctcgtaggtaacggcttactaatcggggtgctgctggcggtagccatggagaatctcattccctgggatcgtattaagtcatga

SEQ ID NO: 223725 - DNA, 1362 bp, Klebsiella pneumoniae
atgtcttttgatttaatcattaaaaacggcactgttattctggaaaacgaatcccgggtagtcgatatcgcggtgaacgacggcaaaatcgccgctatcggtgaacacctgggcgaggcgaagcaggtcatggatgccacgggcctgatcgtttcgccgggcatggtcgatgcgcatacgcatatctctgaacctggccgtacccactgggaaggttacgaaaccgggacccgcgctgcggcaaaaggcggcatcaccacgatgatcgaaatgccgctgaatcagctaccggccaccgtcgaccggcagaccattgagctgaaattcgacgcggcgaaaggcaaattgaccatcgatgctgcgcagcttggcggcctggtctcttataacctcgaccgactgcatgagctggatgaagtgggggtagtgggattcaaatgcttcgtcgccacctgcggagaccgcgggatcgataacgacttccgcgacgtcaacgactggcagttcttcaaaggcatacaaaagctggccgaaatgaagcagaccgtgctggtgcactgcgaaaacgcgctgatctgcgacgagttgggcgaagaggcgaaaagggaaggccgcgtgacggcgcatgattacgtagcctctcgtccggtcttcaccgaagtggaagccattcgccgcgttctgtatctggcgaaagtcgctggttgccgcttgcacgtgtgtcatgtcagcagcccggaaggggtcgccgaagtgacccgcgcccgtcaggaagggcaggacgtcacctgtgaatcctgcccgcactactttgtgctcgataccgatcagttcgaagagattggtaccctggcgaagtgctctccgccgatccgcgatgcggaaaaccagaaaggcatgtgggaaaagctgttcaacggagaaatcgactgcctggtctccgaccattcgccgtgcccaccggagatgaaggctggcaatatcatgcaggcctggggcgggattgccggtctgcaaaactgcatggacgtgatgtttgatgaagcggtgcagaaacgcggtatgtctctgccgcagtttgcccgtctgatggcgaccaacgccgccgatattttcggcctgaagcataagggccgcattgccccgggtaaagatgccgacctggtgtttattcagccgaacagcagctacgtcttacgagcagaagacctcgaatatcgccataaagtcagcccttacgttggtcgcaagattggcgctcggattgctaaaaccatcctgcgcggcgaggtgatctatgacatcgaacagggcttcccgcgcgcaccgaaggggaaatttatccttaagcatcagcagtaa

SEQ ID NO: 223726 - DNA, 1455 bp, Klebsiella pneumoniae
atggaacaaactcaagacctatacaaaaccaggggctatagtgatgatctattgccgaaatcagacactcagcgtaactggaaaacattcaattatttcacgttgtggatgggttctgtacacaacgtaccaaattatgtgatggtgggtggtttttttatccttggactttccacttttagcatcatgatggcgataatattaagtgcctttattattgccctggtcatggtgtttaatggtgctgccggaagtaaatatggcgtacccttcgcgatgatattaagagcctcatatggagtacgcggtgcattattgcccggactgctcagaggcggtatcgcggcgattatgtggtttggcttgcaatgctacgccggatcgctggcatttctgatcttattaggcaaattatggcctgcgtttctgacgcttggcggtgattttaagctgctggggctgtcgttgccggggttgatcgcctttctggtgttctggttgattaacgtcgggattggctttggtggcggaaaagtgctgaataaatttaccgcaatcctcaacccctgcatctatattgtcttcggcggcatggctatctgggccatttcgctggtaggattcggcccgatcctcgactacctgcctaccggggtggcaaaagcggaacataccggtttcttgttcctggtggtgatcaacgcggtggtggccgtctgggccgctccggctgtcagtgcctcggatttcacccagaacgcgcgctcatttcgcgagcaggctattggtcagacgcttggactcgtggtggcctatattctgtttgcggtcgccggcgtctgtattatcgccggggcaagtatccactatggtatggatacctggaacgtgctggatattgtgcagaaatgggacagcctgtttgcctcgttctttgcggtgttggtgatattgatgaccacgatctccaccaatgctaccggtaatattataccggcaggttatcagatcgcggcgatcgccccagccaaactgacctataaaaatggcgtgcttatcgccagtattattagcttgctgatttgtccatggaaattaatggagaatcaagacagtatttatctcttcctcgatattattggcgggatgttagggccggttattggtgtaatgatggcgcactatttcatcgttatgcgtgggcaaataaatcttgatgaactttataccgcgccaggagattataaatattttgataatggttttaatgttaccgcattcctggtaaccattgtggcggtcattttatcgctcggtggaaagtttattcctttgctggaacccttctcccgtgtgtcatggtttgtcggtgttattgtcgcttttgttgcgtacgcgttgctgaagaaacgggcgcaacccaataatctgacacggccaaatacggttagttaa

SEQ ID NO: 223727 - DNA, 1257 bp, Klebsiella pneumoniae
atggatacgatcaataaaaaaggtgtcgactattggaaacaaatagtcgtggtaatgagtctgggctgggtggcaatttggatctatcgtaccgtgttaacgccgatttatccggagattcaggcgtcattgggtaacgtcagtaatgctgaaattggcgcgattgccagcttctattttctggcctactgcggcatgcagatcccctgcggcattctggtggataaactgggccagaaaattatgctgatgtgcggtttttcgctatttattatcggtaccctgagtatcgctaatgccggaaatctgacgctgatttatatcggctcgctactggccggcgccggttgtgcctccttctttagttccgcctattcgctctcctcggccaacgtgccgcaggaacgccgggcgctggcgaatgccatcatcaacagcggctctgccattggcatggggattggcctgattggctcaagtattctggtcaagagcatgcacatggtctggcaaaatgtgttgtttatcgtcgctgcgattttactggtgatgctctgcgtgtttaccctggtcattcgccgcaaactgaaagaacccgccacggcggaaaataaaacgagcgcagcggcgtcagcgccggttgcggaagagaaatcggcgccgctgttctcgccattactgtgcagcgtgtactttctctatttctgtacctgctacggctactatctgattgtaacctggctgccctcttatcttcagaccgaacgcgggtttgacggtggggcgattggttttgcttccgcgctggtggcggtggtcggggtaccgggcgcgctgttctttagccatctctcggataaattccgtgacagtaaagtcaaagttattctcgggctggagatagtcgcagcggccatgttgatgtttaccgttctgtcgccgaataccaccatgctgatgattagcctggtactgtacgggctgctgggcaaaatggccgttgatccgattcttatctcgttcgtctccgagcaggcgtcagcgaaaacgttaggccgcgccttcagcttatttaatttctttggtatgagttctgcggtagttgcaccgacgctcaccggctttatttccgacctgaccggatcgaaagaaattagttttgtgatgtctgccggattggttgttaccgggacgatactttttgctctgatcaccttgcgcaagaataaaataccgtcaaagaccatcaccgtataa

SEQ ID NO: 223728 - DNA, 879 bp, Klebsiella pneumoniae
atgaagctgggatttattggtttggggattatgggcaccccaatggcgctccgtcttgctaaagcagggcacgcactgcacgttaccaccattgggcctgttgctgatgaattactcaagcacggggcacaacatctggcctgcgcggaacaggtggcggagcagtcagacattatttttattatggtacccgataccccgcaggttgccgaggtgctgtttggcgaacatggttgtgctaaagcggcgctgaagggcaaaattatcgtggatatgagctctatctcaccgatagaaaccaaacgttttgcgcagcaggtgcgggatctgggcgccgattaccttgatgccccggtctccggcggcgaaattggcgcacgtgaaggcaccctctccattatggttggcggcgatgaaaacatctttgcccgcgtaaaaccgctgtttgagattttgggtaaaaatatcaccctcgtcggaggaaacggcgacggtcagacctgtaaagtcgccaatcagattatcgtcgcgctgaatattgaagcggtgtccgaagcgctggtttttgcctctaaagccggggcggaccccgctcgcgttcgtcaggcgttgatgggcggtttcgcttcctcacgtattctggaagtgcatggtgaaagaatgcttaaccgcacctttaatccaggctttaaaatttctctgcaccagaaggatctcaatctggctctgcagagcgctaaagccctggcgcttaatctgccgaatacagctacctgtcaggagctatttaatacctgtgccgcgaatggcggcagcgaattagatcactcgtctctgattcaggctctggaattaatggcaaatcatcaaatagcataa

SEQ ID NO: 223729 - DNA, 777 bp, Klebsiella pneumoniae
atgttgcgcttttctgccaacctttccatgttatttcaggaatatgattttctggatcgttttgagaaagcggcggcctgtggttttcgcgctgttgaatttatgtttccctacgactatgcgcctgagctattaaagcaaaagctgagcgacaaccagctggagcatactttacacaatttacccgctggcgactgggcggcaggggaacgcggcatcgcctgtattccaggccgggaagcggagtttcgcgaaggtgtcgacgccgcaatccgctacgccaaagcgctgggcaatcgtaaaattaactgtctggtcggcaaaactccggtgggctatcgcgaagaacatattcgctcaacgctggtggcgaatttacgttttgctgccgccgcgctggcccaggaaggtattctactgctaattgagccaatcaattacttcgacatgccgggcttttatctgaataccacgcatcaggcgttggcgctgattgatgaagtgggtaatgataatctgaaaattcagtacgatatttaccatatgcaacgtatggagggggaattaacccatacgatgcaaacatatgctaatcgtattggtcacttacagatcgccgataatccgaatcgcggcgaacccgggaccggtgaaattaattatgagtatctttttaatttcatcgataaatcaaactatgacggttgggtaggttgtgaatataaaccattgaccaccaccgaagcgggactgacttggtttaatcgctaccgctaa

SEQ ID NO: 223730 - DNA, 1782 bp, Klebsiella pneumoniae
atggcaaaaatgagagccgttgacgcggcaatgtatgttctggaaaaagaaggggttaacacagcatttggcgtgcctggcgcggctattaatccgttctattctgcgatgcgtaagcacggcgggatccgccatattcttgcccgccatgttgaaggcgcgtctcatatggctgaaggctatacccgcgcgactgccggtaatatcggtgtctgtctggggacctccggcccggccggtacggatatgatcaccgctctgtattctgcctccgcggactcgattcccattctgtgcatcaccggccaggcgccgcgcgcgcgtctgcacaaagaggactttcaggcggtggatattgaatccattgctaaaccggtcaccaagatggcggtgacggtgcgtgaggcggcgctggttccgggcgtgctgcagcaggctttccatctgatgcgctccggcagaccgggaccggtgctcatcgatctgccttatgatgtccaggtggcagaaatcgaattcgaccctgagctttactcgccgctgccggcttataaaccggtcgccacgcgtccgcaaattgaaaaggcactggcgctgttagtccaggcggaacgcccggtgattgttgccggtggcggggtgattaacgccgatgccgccgcgctgctgcaacaatttgcggaaatcacccatgtcccggtgatcccgaccctgatgggctggggctgtataccggacgaccatgaactgatggccggaatggtcggcttacaaaccgcgcatcgctacggcaacgccacgctgttggcctcagatctggtgttcgggattggcaaccgctttgctaatcgtcataccggctcggtcgagaagtacaccgcaggccgcaaaattattcatatcgacattgaaccgacgcagattggccgtgtactgtgcccggacttaggcattgtctccgatgccaaagcggcgttaattcagctggtagacattgcgcagcagatgcaaaaagagggtcgcctgccacgtcgcgagagctgggttagcgagtgccaggcacgcaagcgtacgctgctgcgtaaaacccacttcgataacgtgccggttaaaccgcagcgcgtctatgaagagatgaacaaagcgtttggccgggacgtatgctatgtcaccaccattggcctgtcgcaaatcgccgccgcgcagatgctgcatgtgttcaaagaccgccactggatcaactgcggtcaggcggggccgctgggctggacgcttcccgccgcgctgggcgtttgcgctgccgatcctgagcgcaacgtggtcgcgatttccggcgacttcgacttccagtttctgattgaagagctggcggtaggcgcccagttcaatattccctatatccatgtcctggtgaacaacgcctatctcggcttgatccgccagtcgcaacgtgcctttgacatggactactgcgttcagctggcgtttgaaaatattaactccagcgaagtaaacggctacggcgtcgatcatgtgaaggtcgcggagggactcggttgtaaagcaattcgcgtcttcaagcctgaggatattgccccagcgtttgagcaggccaaagcctggatgaaagcctatcgcgtgccggtcgttgtggaagtgattctcgagcgcgtaaccaatatctccatgggcagcgaactggataacgttatggagttcgaagacgttgccgatagcgccattgacgcaccaaccgaaacttgtttcatgaaatatgaataa

SEQ ID NO: 223731 - DNA, 819 bp, Klebsiella pneumoniae
atgacagaagtgagaaggcgtggaaggcctggccagcaggagccttccgcgcaaaaaggcgcacaggcgctggagagagggatcgcgatattgcaatacctggaaaagagcggcggcagctcgtcggttagcgatatttccctgaatctggacttaccgttatcgaccacctttcgcctgctaaaagtgctggaaggcgcggattttgtctatcaggacagccagttaggttggtggcatatcggtcttggcgcgttcaatatcggctcggcctacatccataaccgggacgttttatccgtcggcgggccctttatgcggcggctgatgctgatgtcgggggagacagtcaacgtggcgattcgcaacggcaacgaagcggtgctgattggtcagcaggagtgtaagtcgatggtgcgaatgtgcgcgccgctcggcagtcgactcccgctccatgcttcaggcgccgggaaagcgctgttgtatccgctccctgcggaagagctggtggatgtgattgtgaagaccggcctgcagcggtttacgccgacgacgattgtggatttgccggtcctgcagcgaaatctggatgaggcgcgagcctgcggctacagcattgaccaggaggagcatgtgacaggattaaactgtattgcttcagcggtttacgatgatgtgggctctgtggtagcggccatttcgatttccggacctgcgtccaggctaaccccggaccgttttgtcagccagggtgagctggtaagggagacggcaaggaatatcagtaccgcgctgggccttaaaccccaggccgactga

SEQ ID NO: 223732 - DNA, 483 bp, Klebsiella pneumoniae
atgaagcttgaagtattgcccctgacgcgagatgcattccgcccgtatggggatgttatcgaaacggaaggacaggatttttttcacatcaatgatggaaaagtacagcgttttcacgatctggcgatgatggagacgttacagcaggatcgtacgctcatcagcattaatcgtgcgcaacccgccgcgctgccgattattgtcaccgaactggagcgccatccgctgggtacccaggcgtttgtgccgatgcggggggaggcctttgtcgtggtggttgcggcaggcggcgatgagccggacatgaacacgctgcgtgcgtttatctcaaatggccgtcagggggtgaattaccaccgtaatgtctggcaccatccgctgtttgcctggcagacggaaaccgattttttaaccgtcgatcgcggcggaaaagacaactgtgatgtcgtaaagatcccgaccgtggagctgagctttgcgtga

SEQ ID NO: 223733 - DNA, 924 bp, Klebsiella pneumoniae
atgctcgatcccgaaacattacgcacctttgtcagcgtcgctgagaccggcagcttctcaagagcagcggaaaaactttataaaacaaccgccaccatcagctatcgcatcaaattactggaggacaacaccggtgtcgcactcttttcccgcacaacgcgcagcgtactgttgacgccggccgggatgcacctgctggcgcaagccagagagtggctgggctggattgatagtatgcccggtgagcttcagcagataaacgacggggtagagcgccaggtcaatattgtggtgaataacctaatgtacgacccgcaggccattgcccggctgctggcctggctcacccagcgctacccttttacgcaatttcatttttcacgacaaatctatatgggcgtctgggatacgctgctgcatgacgacttctccctggcgattggcgtgaccggcaccgaaccgttagcggaaaacatggccgtctacccactgggtgaggtgacctggctcttcgtgatgtcgccgcatcacccgctaagccagcaacccgacccgctatcagaggcgcaattgcggcgctatccggcggtgaatattgaggacagcgcccgacggctgacgaagcgcgtcgcctggcgtctgcccgggcaaaaagagatagtggttcccgatatcgaaaccaaagttgccgcccatctcgccggcgtcggcatcggctttttaccggaaccgctctgcctgccgcttatcgctcagggcaagctgatcgcccgacacattccgaccatgcgtcccccttcgccattgagtctcgcctggcgcaaagatcatcatggtaaagcggtgcaggatatcgcctcgctgttcagccattctgcgccggaaataacggggttcctgacgctattcagcaatacaccgtga

SEQ ID NO: 223734 - DNA, 1146 bp, Klebsiella pneumoniae
atggcacataaaataaaagcgctggcgatctcgatcggcgcaacactggtgttcgcttcatttgcttctcacgcggagatcacgctgctgaaacaagatccgcaggcgggcgatccgttaagccggcttaactttaccgtcggcgggagtattcgtccgcaattcaacatgatgaccggcgatggcgataaaggctcctataagcgtaacggtttcgacggcggcacccgtttccgcttcgcggcggattactacctgttcgatgatattagctggatcagctactacgaactgggggtgaacattccggcgctgttcgactgggataaccactacgcggaaggggcgaacaatactacccgccgcatgctgtataccggcctgaaaagcgataccagggggacgttaacctacggtcagcagaacagtatttactatgatgtggtgggggtgaaaaccgatatctgggactacgacatgatcggccaggcgccgggcaacggcattaacggcgattacgatggttcttatcgttcacgtaatatgctgaaatataagaaaaccgttggcgatgtcgatctttacggctcttatctgttcgaagacagcgaatacctgccgggtaacggtctgcgctataaacgtaaaggcggcggttctgttggcgcggactaccacatcatgaaggatctgacctgggggaccgcatggaactacacccgcgccgaaatgcgcgacccgtcaacttccgacagcaaaacctatgaccagaacatcgtcggtaccgcgctgagctggaccccggataactggaccttctccttcggcggcggctggtatcagaacttcctcaccaccaaaaaaaccgatgtgcataattacttcgccggcgacgcctgggggattgaatattttgcgggctataaattcccgatcaatcagtatgccgttaaatctattcagccgtactttatgggcgaccgcctgcagtacgtgaatggccgcaactaccagcgtatcgataacggtctggggattagcttccagctggattatggtttccgcgttgactacgagcacgtgtttacctccagcaccgacaatctgggggatatgaacctggtgcgtctgcgctacgacttctaa

SEQ ID NO: 223735 - DNA, 366 bp, Klebsiella pneumoniae
atgattacgaatgatgaatatgaaaaaaggaaggaagcccttgaaggggcatcaatggttacgatttgggaaaacattcacccagctagcctatcaggtaagctaacgctgtcatttgatgaagagaaagagttatttttctggtttatcgagcgtttgatgtatgaggggaaagtaaagtttggaaacggtggcgagttctggactggtacaatagaagaacagatctcaaaatttagagaaagtttcccaaattctcctgaagagatggagtgtggcgcttttaatgggtattggtttttatctgatgcttgtcctgcagggcttgtctggattaacgaaaacggttaccaggattggacttag

SEQ ID NO: 223736 - DNA, 795 bp, Klebsiella pneumoniae
atgccatcaccctttgccaatacgctgtacgatccggacgcatcttcctgcccggccgtcgcgcgtcatcttgattttgtcgagtatgaagccgaagtgccggtgcatagccatcgtaaaggacaactgattatcgtgctgtatggcgcggtgcgttgtcgggcggaaaataacctgtggatcgtgccgcctcgctgcgcggtatggatcccgggcggtattgcccacagtgtgaccgccacctggaacgcgcgcctcaactacctgtttattgaacccggggcggcggcgctgcccgacagctgctgcgcgctggcgctctctcccctgatccatgagctggtggggcggcttactcgcgaaagggcggactacgcggcggatagccatgccgggagactgacccgggtgaccctcgacgagctggcgaccatgccggcgcagcgcctgaatctgcccgtctcaacgcaccccaaaatacgcgccatggccgacaggctggtgagtcatcctgacgatcgcagtaccctgccggtgtgggcgaaacgtctggcgctgagtgaacgctccctggcgcgcctgatgcagcgggagaccggcctcaccttcggacgctggcgccagcagctgcatctgattattgccctgcaggagctggccagcggcgtttcggtacaaaacgtggcggctaagctggggtatgagtcggtgaatgctttcattaccctgtttaaaaaaacgatggggacgacgccggcgcactattttgccgaacggcagaccggcactcgttaa

SEQ ID NO: 223737 - DNA, 2058 bp, Klebsiella pneumoniae
atgaacatcatcctctttcgtcaggcccgctggctgcgggccgcaggcgccgtcgcgcgccgtttcatgccgcaaacaccctcagctgcgctgcgcagcgatggccaggcggtgatctatgccgcgaagagtttcgccgcggcgatgctggcttactatctcgcgctctccatcggtctgcagcggccttcctgggccatcatcaccgtctatatcatctcgcagacctcggcgggcgcctcgttgagccgtagcgtctatcggctggtcgggaccgtcgtcggcgcggcggccaccgtaatcatcgtacccacgttcgttaaccagccgatcctgtgcagcgtcatgctggccctgtggatcgcgggtagcctctgcctgtccctgcttgaacgcacgccgcgcgggtacgccttcctgctggcgggctacaccgcgagcctgattggctttcccgccgtctccgcgcccgggacgatctttgatctcgccgtcacccgggtggaagagatcgccatcggtatcttatgcgccggcctgatccatcgcttcgtgctgccggtgcgcatcgccgggcggtttaacagcacgctggcacagacgctggcaaccgcccgccagcggatcgccgatacgctggcaggcaagccggtggcggcggaaacgctgcggctggcgctgagcctgcagtttctccagggcatcaaccaccacctgccctgggatgacggcctgtctgtccctcaccgccaggcgagaaaagcgatccacgaccggctggcgcgactgttgatcgtcaatggcgaattatatgaccgtttacagcggagcgggccgccacctgacgacctgcaggcgctgctggcggaggcagaggcctggctgacaggcccgcaagccgccaggtcggcgccctcggcagacggacttctctcccgctgcgagcggctcatcgtccggtacgctgctgacgcgcagaccatggacgaggcgctgcggctcagcctggcgcgccatctggcggaagccatccgcctcctgcaggagagcgagcggctggcgaaggcggtttatcgtcggcggtcgcctgccctgccccccgacgccggtgcggcgaagggttatgttttccatcgcgatccgctcagcgccctgcggacttccttcggcgccttcgtcatcatccttagcggctgcctgatctggataggatccgcctggcccgatggcggcaccgcggtctcgatcctcggggtctgctgtagcctgttcgccagcttcgacgcgccggcggcgcatctggtgaaatacctgatcggctgcgtgtggggcgtgctgttcagcctgctctacagcttcgtcctgctgccgcaggtgaatgaatttgcgctgctggcggcggtgcttgccccggtctatctgctggccggctcactgcaggcgcgaccagccaccacctttatggcgatgggcatcaccctgacgctgccgatattgtgcgagctgggggccagctaccgtggcgacttcgcgacggcgatcaataccgcgctcgcgctgtttatcgccgtcggttatgcggcgtttggtatgcgcctgctgcaaaccgtgcaggcggaaaccgctatccgtcgtctgctgacgctgtgccagcgcgatatccgccgcgccgctcgcggccggctggcgcacaatgcccaccgctggaccaacctgatgatcgaccgaaccgcattactgctgccccgcctgccgcagagcggaccggcagccggtcagttgcttgacaagatgctgcgcgatattcgtaccggtctcgccgtgatccatctgcgccgtcgctatcagcaggcggacagtgcgtcggcggacgcagtgcaagcgctcctggacgcgctgaacccgcagccggacatgacggccctggagcaaccggtcaatgcactgctggcccaggctttaccggcgaccgatgccgcctcgcgcgaacgcgcggaagcgctcatcgcgctgtattgcgccttacacctgcctgaggagagccagaaccatgcgtga

SEQ ID NO: 223738 - DNA, 213 bp, Klebsiella pneumoniae
atgcgtgacctcgcgctgggcggggtatttttccccggcctgctgattgtcggccttatcgccctgctcgctacactgttgctgcaaccgcttatcttctccgcccgcggcccgggtcgcctgccgtgccggcagctgtgggggctgtccctttttatcgcgcttttcttcctgctcctgcagggcgttcactcgctggggttatccgtatga

SEQ ID NO: 223739 - DNA, 921 bp, Klebsiella pneumoniae
atgacactgtatctgacacttctgggccgctatgccctgaccttaggcgccgtcgccgccgccgcgctactggctttcattttctggaaacaggaggcgcagacgccctggacccgcgatggccggatgcgggccgacgtggtgcagatcgcccccaatgtctcggggccggtggccagcgtggcggtgaaagacaaccagtgggtcaatcggggagaggtactctataccatcgatccgcgctggctgaagctggcggtcagcagcgctcaggcggaggtggaagcccgacgccaggagatggcgatgcgccaggatgccgccagacgtcgggcgcagatccagggcgtcatctccagcgaagatctgaaacagaccaacagcgcggccagcgtcgcggctgctaactaccagggcgcgctggcggcactggcgctggcgcagctgaatgtagcgcatgccaccgtgcgggcgccggtatccggctacgtgacccatctccggctgcgccccggcgactatgccaccgccggggtgacgacagtcgccattatcgatggtcagagcttctgggtggtggggtattttgaagagacccgtctgcgccacatccacattggcgataccgcgcacatcatgctgatgggctatgacccggttattaccggccatgtggagagcatcgggcacgggatcggcgataccaatgatgaaaccggcgccctgggcctgccgcaggtcgagccaacgttcagctgggtgcggctggcgcagcgtgtgccggtgcgtatccatatcgataccctgcccgcgggggtggaacgggtcgccggtctgtccgcgaccatttcggtcatccctgaccggacggcgcggcgcgccggtcaatcatcagtagccgacttgctgtcctctcagtga

SEQ ID NO: 223740 - DNA, 642 bp, Klebsiella pneumoniae
atgaacgctgctacccgttcgaccgccgatatccttgccagtgagttaaaaatcttaatcaacaagggggcattgcgagatggcgaccggcttgtggagcgcgacctggcctgccagttttctgtcagccgtatcccaatgagagaagcgatacagcagcttgagcgcgaaggtctggttgagattttcagaaatcgtggcgcggtggtgaaaacgctgacggccgcagatgtcgatgaaatttatcagctgcgggcactcctggaaggtgaagccatttttcatagcctggagaatatggacccggaaacgcttgcccgggcagagctggtgcatcagctgctgagtagcgcttctgaacccgagctgcaggggaggtataaccgcgagtttcatgaactgctgtatcggaagtgtaacaatcagcgcctgttgaagatgatcggtgaaatgcgcgagcagattgaaagatatgagctttttcagaacagactgctgtcggatacgctgaaattccaggatgagcatcagcagatcctgatggcctgccagcaaaataatccacaggaggctcgggcatatactgtgaaacatattctttcagcaggtgaaatccttcgcgcctatattgtaagccgttaa

SEQ ID NO: 223741 - DNA, 672 bp, Klebsiella pneumoniae
atgtgcggacgatttgcccaatcacagacacgcgaagaatacctagcttatcttgccaaagaagctgagcgtaacatcgcctatgatccagaaccaatcggccggtacaacgttgcgccagggactcaagttttgatcctgatcgaacgcaacgagcagctgcatctagacccggttcactggggttacgcgccaaactggtggtgtaagccagcgcttattaacgctcgcgtagaaaccgcggcgacaagcagaatgttcaagcctctttggcaacatgggagacgaatttgttttgcagacggctggtttgaatggaaaaaggaaggcgacaagaaacagccttacttcatccacagaaaagacggcaagcctatttttatggcggcgatcggcagcgtaccttttgaacgcggggatgaagcggagggatttttgatagtgactgcagctgccgaccaaggtctggtcgatattcatgaccgccggccgttagtgttagtgccggaagcagcgcgcgaatggatgcggcaaaatgtaggggggaaagaggcggaggaaataattgctgatggtgctgcgtcagcggaccatttcacctggcaccccgtgtcccgcgcggtgggtaacgttaagaatcaggggccagaactgatagaaatggtcaagtaa

SEQ ID NO: 223742 - DNA, 1716 bp, Klebsiella pneumoniae
atgtttcaaatatcagcaggtggtttttttgactctcataaaattgaaaagcatgaaggaacttttgttttctactctaatgttgatgtgttttttcctgtgcaaaatgagttgccattttttaaagtaaaacaagttagtcatgatggggttaattgttatgtggttaattacattcttttgactgaaaagccagataaaattgaggctggagtggtaatcagagccggggatcaagattatatacaacagttcatattgatttgggagttttactttgattgtgtggctaggctggaaaaagaatctgtaaaaaaaatttgcgctcaatcaaatttcaataaaactcattctaaaattgttcttgagatcgcgccgcatttagttgagattaatagagctatttcatctgaggacgttaatggctttttgggttttgtacaggatgttgttagtattaagcgctcagcatttaaatcggtaatggctgctctaaaaataataagtgactcgaaggagtcgttatcaacaaattttgatttaacttattccatgctggtttatgctttagagtcgctatctcagagaaatgataactatcaatcacattgggatgattatgatcaaaaaatgaaggcggaattagaacttgtatttgaaaaccttccttatgaacactcggtgaaaataaagaatattcttattggaggcaagcaatttaaactacaaaaaagatttaaggattttattactagtaatataggagatgagtatttttatgaaacaggtaagcgcccaattcgtagtagttttcttaatagagctttagataatttatataaaatacgctcatcatttgttcatgaactaaagcctctggataaaatgatgtctaatgctagcaaatcaactggagattgtcttgttctttttggtgaaccgtattttagctactcagggttgcttagacttctagggtatgtgatcaagtctttttgcaaaaataatcacagtaatgaaaatgaatctgttaattgggtaatggaaacctctggcatgatggttgcagaaatatctgcaatgcattggttgtggaatcctgaagcatttacctctaagagtattgcaagatggtttagtgaataccttaatatgttaaattcaaatagtgtgactgatttgcaggctataatgtgtaaaattgaagaaatttacgatcaatctaaaagagagcacaaaagtgggcttcttagtttttattttttgtataattatgttcataataaggacaggcgtgagtggctttattttgcagaaaaaagatattcttttttagagcgtgatatgtattggtatgtgtgttgtgcatatatgtattcttcattaacaagtattgccaatgcagttgtagacgcaagtgcacttaaagagtttaatctctgttttaatgagtatgaaaggagtaaatttaagcccagacgtttaaatcttccagcaatgactgaggcagcagtcttaatttgtgcggctaattcatattttagaattgggatgtatcaagattatgtaattatggttaagaggagccttagggaaatttcgacagtgcaagaggtgtttaactatatccgcgattgtttaattaattcacaatctattgatttgctaagatgttttgacttatataggggggggagtaggttgacacaaatataa

SEQ ID NO: 223743 - DNA, 612 bp, Klebsiella pneumoniae; identical to SEQ ID NO: 85683

SEQ ID NO: 223744 - DNA, 951 bp, Klebsiella pneumoniae
atgaacttagtggatttaagaagtgaagtcatcaatataatttcgaacataactggttcgcgtttgatttttttattagatgacgggactaactacatacccaaaatttccaaagtagatcctacatcactaaaaagcattactactggtttcgtagaaagattaaagagtgaagtcattgacaatacggatttaacattaccattgctttcaaatattgatgagcgtaaaaacgctttatatcaatttgattaccaaaaacagccacaagagtttgcagcattggattcagcagcaaaactaccgccaaactcacaagaatattacattcccactccctcttttgaagatgttaaagcaattgccttcattatctatggcaatggtaaaacaatatcgctttacaagaacaaaacacctctgactgtattgaaaaatacatctaacctcgtaaattttgtaatgaataaacaaggaatccttgaagaactgacagaaaatgtgtttaagttagattttaattttgaccttttcctattagatggtcaatattatgtcaagaatcatagaacattagaaatagcaatgaaattccatgaaataatatcagaacaagcaacccttgcaatttcctcactggcaggctcaggaatgattgatgatattagccatttgcaaaaaagttcttctgaattatcttctgcaagaaaattggcaaaaattgcaaaacattcacctgttttagggaaaattgattgcccttctgtaattagcttcgtttctaaacataaagtactttcaggtgttttaaaattaaatgagagtggcgataaatttatcgtaaaaacgaaggaagctcaaaagcattttattaaactaatgagtgatgattatctggagtctgaactgacaaaaatcctatatgatagtttagcaaaagatgctttatga

SEQ ID NO: 223745 - DNA, 531 bp, Klebsiella pneumoniae
atgttagatgtacttatgcgacatgcggttcaaacttttttccagaaagagcgggctaatattctcaatggagtagccgaaagaaatttgtgtgctcgtttagctctttatatcgaattggaaatggagcaagttggcttacagggatattatgctgatgttgaatacaataggaaacaaaatggagctgtaaaaacgataatggatgatgagtaccaaataattagaataaattgtgacctcatccttcacagtcgtggtgaaattatacagagagataatctgattgcagtcgaaatgaagaaaattgaaaggccgcaatatgaaaaagatagtgacatcaatagactccgggcaatgacgaaaaaaagttatgatgatatatggtcatttgatggagaaacgcacccagagcatgtatgtggttacgaatacggatatttccttgaaattgataacgttaataggagttataatgttatcactgttgttgaaggtgaagtaattaatcaatctaatttcttattttga

SEQ ID NO: 223746 - DNA, 573 bp, Klebsiella pneumoniae
atggacttccttgagaatgcagaactaccaaaggaacttggctatcagttagacccgaagaactatgaaattcttgattctgatgaagggttgagtggctacaaaggtcacaacttcacaaaagggtcactcggaaaattcaaaagtcgagtagccaacggggagataacatcagggtgtttgttaatagagtccgctgataggttttccaggagacaaggatatgatgcaattgatgaatttacattcttactcaagcgtaatatcgatattattgaagtcgaaacggagcaaattttcagctacagacttgatcacaagctgacgcagttatctacaagcattgaaagggcatatcaagaaagcaaacgcaaatcgagattgatcaccaaaagctgggcaaacctaaaacgcaaagccgttgatgagggcatagcactaaagcgtaatgtaccttactggctggctcttgatggagatcattatcgactaaacacatcagaagccgaacgcatcaggactatatttaatgattatgtaaatagacccgttttagttccatgcattttttga

SEQ ID NO: 223747 - DNA, 555 bp, Klebsiella pneumoniae
atgaaaacaggaatgcggatgaccgtggcgatggtcgcggcagtgagcagtggcgcgatggccgcgccgtttagcgtaagcagcaatgatatgcgtgacgggcagccgctggcccagcagcactggtttgccggtttcggctgtaccggaggcaatgtctctccgcagctggcatggaaaaacgccccggcgggtacgcgcagcttcgcggtcaccgtccgggatcccgatgcgcctaccggcagcggctggtggcactggacggtggtcaatatcgccagcagcgtcttttcgctgcccgctggcgcgggagataaaaacagcgctacactgccgggcggagcggtccagggccgcaacgattttggctatgccggcttcggcggcgcctgcccgccggcgggagataaaccgcaccgctaccgttttacggtgtgggcgctggatgtccccacgctgccggtgaatgccgaggccagcggggcgctggtcgggtatctgttacacagccatgctctcgccagcgcgcaattgacggcgacggccgggcgctaa

SEQ ID NO: 223748 - DNA, 888 bp, Klebsiella pneumoniae
atgtcatcatcccgtccggtattccgctcgcgctggctgccctacgtgctggtcgcgccgcagctgattatcacgctgattttctttatctggcccgcgggcgaagcgctgtggtattcgctacagagcgtcgatccctttggcctttccagccagttcgtcggcctggataacttcgttgcgctgttccacgatccgtactacctggactcgttctggacgactataaaattcagcaccctggtgaccgtcagcggcctgctcatttcgctgttttttgccgcgctggtcgactatgtggtgcgcggcagccgcttttatcaaacgctgatgctgctgccgtacgccgtggcccccgccgtcgcggcggtgctgtggatcttcctctttaaccccgggcgcgggctgatcactcacttccttggcgagctgggctacgactggaaccacgcgcagaacagcggccaggcgatgttcctggtggtctttgcctcggtatggaagcagataagttacaacttcctgtttttcttcgccgcgctgcagtcgatcccgcgttcgctggttgaggccgccgccatcgacggcgccggaccaatccgccgcttcttcaagctggcgctgccgctgattgcgccggtaagtttcttcctgctggtggtcaacctggtttacgccttcttcgacaccttcccggtgatcgatgctgccaccgccggcggcccggtgcaggcgaccaccaccctgatttacaaaatctatcgcgaaggtttcgccgggctcgatctttccgcttccgccgcgcagtcggtggtgctgatgttcctcgtcattatcctgacggtggtgcaattccgttacgttgaaagtaaggtgcgttaccaatga

SEQ ID NO: 223749 - DNA, 2211 bp, Klebsiella pneumoniae
atgtcgactccagacgcgcaggataaaaaagtcccacaattctcgtcattcaccatgcggccagcgcccgccccggcggagagctgctgcacagaccacgcctgcgccgcagagaccgcaccagccgccgaagcgcttagcgacgcccgctacagctggcaggttgccggcatggactgcgccgcctgcgcccgcaaggtggaaacggcggttcgtcaggtgcccggcgtcagtcaggttcaggtgctgttcgccacggaaaaattattggttaacgccgaaggtgacgttcgcgctcaggttgagcaggcggtacgtcaggcaggttatacgctgcgcgatgccgatgcccccgcgtcagagaaaacgcagggctcgcggctgcgcgacaatttaccgttgctgacgctggtcattatgatggccctgagctgggggctggagcaggccaaccaccctgccggtcagttagcctttgttgccaccaccctggtcggcctgtggccgattgcccgccaggcgctgcgcctgattaaaagcgggagctggttcgccattgaaacgctgatgagcgtcgccgccatcggagcgctgtttatcggcgccaccgcagaggcggcgatggtcctgctactgttcctgatcggcgagcgtctcgaaggctgggccgccagccgcgcgcggcagggcgtgagcgcgctgatggcgctgaagcccgacaccgccatccgtctgcgcaacggcgtgcgggaaaccgtcgcccagcgtgacctgcgtcccggagatgtgattgaagtggctgccggcgggcgtctgccggcggatggacaactgctgtcgccgtttgccagctttgatgaaagcgccctgaccggcgagtcggtgccggtggagcgccaggccggagaacgggtagcggcgggcgccaccagcgtcgaccgcctggtgcagctgaccgtgatctccgaaccgggcgacagcgccatcgaccgcatcctgaagctgattgaagaggcggaggaacgtcgggcgccgatcgagcgttttatcgaccgcttcagccggatctacactccggccattatggtggtggccctgttggtggccattgtcccgccgctgttcttcgccagcgcctggctgccatggatctataaaggcttaacgctgctgttgatcggctgcccgtgcgcgctggtcatctccaccccggcggccatcacctccggcctggcggtcgccgcccgacgcggggcgctgatcaaaggcggcgcggcgctggaacagctgggccaggtgcgccaggtggcgttcgataaaaccggcaccctgaccgtcgggcagccgcaggtgacctcggtcatcgccactgctgagaatgacgacaacgcgctgctggcgctggcggcggcggtggagcaaggctccagccatccgttggcgcaggccatcgtccgcgaagcgcagcggcgccagctgagcattccgctggccagcggccagcgggcgttggcaggttccggtatcgaagccgaggtcaacggcagccggattttaatctgcgcggccagcaaagccgccccggcagagtatgaggcgcagatccagcagctggagagcgccgggcaaacggtggtgctggtcatgcgcggcgagacgcttctcggcatcctggcgctgcgcgacaccctgcgcgacgacgcgcgtcaggcagtggatgccttacaccagctgggggtgcagggggtgatcctcaccggggataacccgcgcgccgcggcggccattgccagcgaactggggctggaattccgcgccggcctgctgccggcggacaaagtcgaagcggtgatggcgctgaatgccgatgcgccgctggcgatggtcggcgacggcatcaacgacgccccggcgatgaaagcggcgaccatcggcatcgccatgggcagcggtaccgacgtggcgctggagactgccgacgccgcgctgacccacaaccgtctgaccggcctggcgcagatgatttccctggcgcgggcgactcacgccaatatccgccagaacatcgcgattgccttagggctgaaggggattttccttgtcaccaccctgctcggcctgaccggtctgtggctggcggtgctggcggataccggcgccaccgtgctggtaacggctaacgcgctgcggttattgcgtaagaagttgtag

SEQ ID NO: 223750 - DNA, 1221 bp, Klebsiella pneumoniae
atgcccgaatccgtcgccgaaccggcgctcaatggactgcgcctcaatctgcggattgtctccgtcgtcatttttaactttgccagctatctcaccatcggcttgccgctggcggtacttcctggctatgtgcatgatgtaatgggctttagcgctttctgggctggcctggtgattagtctgcaatatttcgccacgctgctcagccgcccgcacgccgggcgctacgctgacctgctggggcccaaaaagattgtcgtcttcggcctctgcggctgctttttaagcgggctgagctatctgctggccgcctggagcagcggctggccgctggttagcctgctgctgctatgcctcggacgagtcattctcggcatcggccagagctttgccggcaccggctcgacgctgtggggcgtcggcgttgttgggtcgctgcatatcgggcgggtgatctcatggaacggcattgtgacctacggggcgatggcgatgggcgccccgctcggcgtgctgtgctattcgcaaattggcctcagcggcctggccggggtcattatggcggttgcgctggtggctatcctctgcgcgctgccccgcgcagcggtgaaggcggcgaaaggcaaagcgatgtcgtttcgcgcggtgttcgggcgggtgtggccctacggcatggcgctggccctggcctccgccggtttcggggtgatcgccacctttatcacgctgttttatgaggccaaaggctgggacggggcggccttcgccctgacgctgttcagctgcgcgttcgttggcgcgcggctgctgtttcctaacgccattaaccgcctcggcgggctgaacgtggcgatgctctgctttagcgtggagatcatcggcctgctgctggtcggctttgccgatacgccgctgctggcgaaaatcggcacctttcttaccggggccgggttctcactggtctttccggcgctgggcgtggtggcggtgaaagcggtgccgcagcataaccaggggtcggcgctggccacctataccgtgtttatggatttgtcgttaggcgtcaccgggccgctggccggcttgctgatggcgtggaccgggatcccggtgatatatctggcggcggcaggtctggtgatggcggcgctgctgctgggctggcggttaaaaaaacggcccccggtcagcgaaccggaggccgtcgcaccaggccagtaa

SEQ ID NO: 223751 - DNA, 396 bp, Klebsiella pneumoniae
atgaaaaaaattattcattggatgattgccgcaacggttgtcggcgcgcttgccggttgcgcgcgtaccgcccctattgatcaagtcaatacgactgtgagtgccggtcatactgcggcgcaggtgaaggatgcgattatcaaagcgggtgcgcagcgcgaatggattatgtctgatgcgggccctggcgttattaaaggtcacttacaaaatcgcgaccatgttgctgacattaaaattaactactccgcaacaagttattctattgtttatgtcagtagtctgaatctaatggccgccaacggaaaaattcatagaaactataaccgttgggtacacaacctcgataaagatatccaggttaccctggcggcaaacaccgctatgcaacaataa

SEQ ID NO: 223752 - DNA, 1062 bp, Klebsiella pneumoniae
gtgtaccaacaggattctctcagcgcgcttgatgccattactgaagcgcagcgtattgcttttgcccccatgctctttcaaaccgcattatgtctacgcaactcaggtattctgggttatctggaccagcaaggtaaactcggcgcgacgcttgaagccatcagcgaaattttcgagggaaaagaatatgccgttagcgttttactggatatggggttaagcggtcgtatccttacctggaaagaagggcgctaccacctctctaaaataggacatttcttacttcatgatccgatgacgcgagtaaatatggattttactcaagacgtttgttatcaaggattattctttctggaaaatgcgctccaggagggaaagccttcaggattaaaagtttttggtgagtggccaacgatttaccctgccttgtcacagctaccacccgcggcgcgcaaaagctggtttgccttcgaccattactattccgatggcgccttcactgcagcgctgccctatgtattcgccagccaacccgcaaggctgtacgatgtaggcggtaataccgggaaatgggcgctacgctgttgccagtacgatgaaaatatcgcggtcacgttattagatttaccgcaacaaattgcactggcacgggaaaatatagaaaatgctggccttgcccatcgcatcgattttcatgctgtggatatgctgagtgacgcccccctacccggagaagcggatatctggtggatgagtcagttcctggactgtttctcgccagaacaaatcatcaccatactcagtaacgtggcacaggtcatgaaacctggcgcccgcctgtacattctggaattgttctgggatgcgcagaaatttgaagcagcatcatttagtctgaatgcgtcttcactctattttacctgtatggccaacggcaacagccgtttctacagcgtagagaagttttaccgctatcttgaaatggcggggttcgaagtagaacagcgtcacgataatttaggcgttgggcataccttgttgatatgccacaagaataattga

SEQ ID NO: 223753 - DNA, 723 bp, Klebsiella pneumoniae
atgacattttcatttaacattgttgattggcaggccttcgcgcctggcgtcagtggccccgagcaatggcaacggtggtcacagcatttgcacgccatcgatcccgccgcggcgccacccaaactcagcgaattgccgatgatgaccgcacgccgactcagctcgggaagtaagctggctgtggaatgcggtctggctatgctccgtcgccatgaaatcgatgccgttctttataccagccgtcacggcgaactggagcgcaactatcggatcctccatgcgctggctatggcgcaagcgatctcgccgaccgatttcgccttatcggtacataattccgccgtgggtaatcttacgattgctgcaaaaaaagcgattatgtcgtcatccctttctgccggacgcgatacgtttcagcagggattatacgaagtgatgggcctgctacaggcgggttatcagcgcgtgttgatggttgatttcgacggttttctccctgagttttaccacgctcagttgccgccaggtatcaccacctggccctatgcggcagcctgggtgattgagcccggtcgccagtggcaatgccacgcccagcctcatgcagccgttgctgaaagtccattaccgcaaagtttactgttcttgcagtactatttgcagaatgcccgcacgttcacgcttcccggcgatcgcgtgcaatggcaatggagccgcgcatga

SEQ ID NO: 223754 - DNA, 816 bp, Klebsiella pneumoniae
atgaagccgtttttccaccggcttaatcggctctggcgcgcagcgatgaccggtttctgcttcgcactgtttggcattggcggcctgctgctctcgctaatctggtttaatctgctgctggttttggtacgtaataaaacccgccgacgccgtatcgcgcggcgcagcatttccgttagctttcgcgtattcctcagcgtggtgaaaagcgtcggggttctcgattaccgtatcgatggccgcgatattttacgcgcggagcgcggttgcctggtggtcgccaatcaccccagccttattgactacgtaatgctggcctcggtgatgccggagaccgactgcatggtaaaaagcgcgctgctgaaaaatccattcgtcagcggcgtgatccgcgccgccgattatctgattaacgatcaggccgatgccctgctgccggcaagccggcagcgtttacagcaaggcgatacgattttgattttccctgaaggcacgcgcaccgtgccggggaaaaaaatgcagctacagcggggggcggctaatatcgcggtacgctgtggcagcgatttacgcattgtcgtcatccgctgtaccgagcatatgctgggtaaacaaagcaaatggtacgacgcgccgccaactaagccgcggtttaccgtcgaggttggagaacggctgccaatacatcagttttatgatgccaataaacaagaaccggcgctggccgcaagacagttgaaccgtcatattttgcttaaattagaaacaggcactctccctgaaacaggaatgaatgatgcaagcgctctatcttga

SEQ ID NO: 223755 - DNA, 258 bp, Klebsiella pneumoniae
atgcaagcgctctatcttgaaattaaaaatctgatcatcagtaccttgaacctggacgagctgtccgctgatgatatcgacaccgatgccgcgctttttggcgatggtctgggcctggactcaattgatgcgctggagctgggtctggcggtaaaaaatcagtacggcgtggtgctgtcggctgaaagtgaagagatgcgtcagcatttctactctgtcgccacgctggcggcatttattcaagcacagcgcgcctga

SEQ ID NO: 223756 - DNA, 252 bp, Klebsiella pneumoniae
atgaatgaacaacaagccatttacgaagaaatctccgcgctgctggtgaacgtgtttgaaatcgatccgcaggatattacgcctgaggcccgcctgtacgaagatcttgaactggacagtatcgacgccatcgacatgatcgtccatctgcaaaagaaaattggtaagaaaatcaagccagaagagttcaaaactgtccgcaccgtgcaggatgtggtcgatgcggtagaacgcctgttcaaagaagaataa

SEQ ID NO: 223757 - DNA, 582 bp, Klebsiella pneumoniae
gtgtcgggcattcgctcactgccagttgtgccattgctgacgggcatattgctgctggcctggccgtttataatctggttcggcctcgcgcataacagcctgcaagggttgttaccgctcatggcgctgatgttgtttttacgctttcgtcagacccggcgacgggcgggagcgctgagcgtggtcactcagattgtggcggtggccggcatgacgctgtgtattgccagctacctgctgaaaacccatcagttactgctattttacccggtggtggtgaacagcgtgatgctggcggtgtttggcggttcgctatggtccacgatgccgataatcgagcgtctggcgcgactgcgtgaaccggatcttccggagcgggctgtacgctatacccggcgcgtcacccaaatctggtgcgcctttttcatcattaacggtggcattgcgctttttaccgcgctgtatggcgatctgtccctgtggacggcgtggaacggcatgatttcctatctgctgatgggcacgctcatggccggcgagtggctggtgcgccagcgggtgataaaacgagataaaccatga

SEQ ID NO: 223758 - DNA, 1350 bp, Klebsiella pneumoniae
atgaagcagcctctcccgttggaccagtggctcagcgccgcgcgttcgccggaaacgccgatcgcctggcaggacacgcacctctggacgcttgcacatctgcgccatgatgtcgcccacctgctcacgcacttgcgtcagcagccagccatgcgctgggcgttgtgcattgaaaatagctacttgtttatcgtcgctctgctggcaaccctgcatgccggcaaaacgccggtccttcccggccacggccgtatttcgctgttaaatgagcagaaggcgctgtttgacggcattctcagcgataaagcgctggcatgggatggcgcgctggtgattgtcgagtccacgatggcggtaacgagcggccagatgcattttcccgcgccaggcaaagaggcttgcattgaattattcacctccggttccaccggtcaaccgaagcgaatttgcaaaccgatcggatcgctcgaccgcgaggcggcgctgttatccgcctgctatgccgggcgtctggcaggctgtcgggtggtggcatccgtagcgccgcagcatctgtatggcctgacgtttcgactgttcttgccaatggcgttgggtttaccgcttcacgcggacatgctggagtacaccgagcagttaacggcgttaagccggaagcatcgctatctgtttattagtagtccggccttcctcaaacgtctcgaccaccggcttacccctccgccgatcgaaatgatcgtgtccgcaggcggcaagctgctttggcaggatgccgtgcaaaccgcccgctggtgcaatacctggccggatgaaatatacggcagtacggaaagcggcgtcatcgcctgccgccagcgcgtgcaggatgaggcgccatggcaaccgtttcccggcatccgctttcagccagaaggcgatgcgttccgcctcttttctccgcttattaccgataaccgcggccagctgctcgaggatattttgcattttcgcgagagtggccacttccatttggcaggccgtcgggatcgcgtggtcaaaattgaagagaagcgcatatcgctgagcgaagtggagcagcgcctgctggaacttgaaggcatcattgatgccgccgtgttacccatcacccgcggcagccgtcagagtattggcgtattgctggtgctggataaccatgcccgccagcgctggggaaaaagccaggagactcgttggcgaaaagcactgcgctctctgctggaaccggtcgccattccccgctactggcgggttatcgacgagatccccgtcaatagtatgaacaagcgtgtctacgcgcagttacaggagttatttcatgcagccccatga

SEQ ID NO: 223759 - DNA, 354 bp, Klebsiella pneumoniae
atgcagccccatgaaattgagcgccgtcagccacaagccgatcgggttgaaatcattttatcggtggatccggcgttattctggtttcgcggccactttgccgttcagcccttgttgccaggcgtcgcgcagattgactgggcgatgcattacgccaccaccttgctggcgcccggctggcgctttcacgatattcacaatgtgaaattccagtcgccgctcctgccgggggcgatcgtgacgctcactctcagctggcaggaagcacgtcagctcatcaccttcagctatcagcgccacgatggcgaaacacgacataccgccagcagcgggaagattcgcttatgtcgctaa

SEQ ID NO: 223760 - DNA, 1692 bp, Klebsiella pneumoniae
atgtcgctaaccttttccccctgcgtggtgatcccgtgctataaccacggcgcgatgatgtcgcgggtgctggcgcgcctgcagccgtttgatcttccctgtatcgtggtggacgacggcagcgacagtcgcacacagctggagctggagcgactggcgctggaaaccccggatctgacgttgatccgcttagcgcagaacgccggaaaaggcgccgcggtcatctgcggattacaggccgcagcgcaagccgggttcagccacgcggtgcaggtcgatgccgatgggcagcacgccatcgaagatattccgcagctgctggcgctggcgcagaagcatcccgaggcgctgatctccggccagccggtttacgacgactcaatcccgcgctcgcgcctgtacggacgctggatcacccacgtctgggtatggattgaaacgctatcgctgcagctaaaagacagcatgtgcggctttcgcgtctatccgctggcgccgacgctgcagctggctaagcgcgtgcccctcggcaagcggatggattttgataccgaagtgatggtgcgcctctactggcaggggaacaccagctactttgtcccgacccgcgtgacctatccgccggacggtttgtcgcatttcgatgccctcagagataactgccgcatctcgctgatgcatacccgactgttcctcggcatgttgccgcggatcccctcgctgctgtttcgccgcgcttcgccgcactgggcgcgtcagaaggaggtcaaaggcttatggggcatgcgcctgatgctgttggtgtggcggctgttgggacgacacgcgttttcgctgctgctctacccggtggtcggcgtctactggctaacggccagcaccgcgcgccgcgcttcacaaaactggcttacccgcgtgcgcgaccagttagccgctcgtcagctgccggagccgggcgaactcagtagctatcgtcacttcctgcgctttggcaacgcgatgctggataagatcgccagctggcgcggcgaactgcagtttggtcgcgatgtggtgtttgccgcaggtgccgaagagacgctcaatatcgacgatccgcgcggcaaactactgctggcctcacatctcggcgatgttgaagcctgccgtgcgctggcgcagctgcagggcagcaagaccatcaacgcgctggtgttcagcgacaatgcccaacgctttaagcagattatggcggagatggccccgcaggccggactcaacctgctgccggtcaccgatatcggcccggagaccgccatgctgctgcaggaaaaactggatcgcggagaatggatcgccattgtcggcgatcgtattgcggtcaatccgcagcgcggcggcgagtggcgcgtctgctggagccgttttatggggcaaccggcccccttcccgcaggggccctttatcctcgcggctattttgcgctgcccggtcaatttgatgttcgctctgcgtcagcagggcaagctgcgcatttactgtgagccgttcgctgacccgctgccgctgccgcgcgccaatcgccagcaggcactgcaacatatcatcgatcgctacgccgaacggctggaatattacgcgctgcagtcgccgctcgactggtttaactttttcgatttctggcgtttgccggagcccaaagataaggagtaa

SEQ ID NO: 223761 - DNA, 423 bp, Klebsiella pneumoniae
gtgcttaacgatccccgttttactgctgaagtagagctaaccattccctttcacgacgtcgatatgatgggcgtcgtctggcatggcaactatttccgctacttcgaaattgcccgcgaggcgctgcttaaccagttcaactacggctaccggcagatgaaagcctccggctatctgtggccggtggtggatacccgcgtgaagtaccgggacgttatcaccttcgagcagcgtattcgcgtccgcgcgcgtctggaagagttcgaaaaccgcctgcgcattggctatgaaatttttgccgccgagagcggcaaacgcaccaccaccggctacaccatccaggtcgcggtggacgaaaaaagcggcgagatgtgttttgtcagcccgcaagttctgtttgaacgcatgggggtcacgccatga

SEQ ID NO: 223762 - DNA, 606 bp, Klebsiella pneumoniae
atgagattgctgctgttggtgggactgttcatcagtccgttggtcagcgcgctgacgctcgatgacctgcaaaaacaatttagcgaacagccggtggtgcgcgcccacttcgatcaaacccgcaccataaaggatcttccgcagccgctgcgatcccaggggcggatgttgatcgcccgcgaccagggcttgctgtgggatcaaacctcaccgttcccgatgcaactgctgctggatgacaaacggatggtgcaggcgattaacggccagccgccgcagaccgtcaccgccgaaaacaacccgcagatgttccagttcaaccatctgctgcgcgcgctgttccaggccgatcgtaacgtgctggaggagaacttccgcgtggaattcgccgataaaggcgacgggcgatggacgctgcgcctgacgcctgtcaccacgccgctggataagattttcgccagcatcgatctcgccggaaaaacctacctggagcatattcaactcaacgataaacaaggcgatcgcaccgatatcgccctttcccaacatcaactgacgccagcgcaactgaccgatgacgaacgccaacgctttgccgcccagtaa

SEQ ID NO: 223763 - DNA, 2319 bp, Klebsiella pneumoniae
atgacgaacgccaacgctttgccgcccagtaaacgtcctgcgctgatctggggcgtcgtctgcctgatactggcgggcgcgctgctggcgctgttgccgcaggcccggctcaacagcagcgtgctggcgatgctgcccaaacagacgctcggcgcgatccccccggcgctgaacgacggctttatgcagcgtctggatcgccagctggtctggctggtcagccccggtaaacaggccgacccgcaggtggctcgcgactggctgcggttgctgcaaacctcagacgcgctggccgaggtcaaaggcccaatggatgccgccagtcagcaggcctggggaacgtttttctggcagcatcgcaatgcgttaatcgaccccgccacccgcgcgcgtctgcaggagggcggcgaagcgcaggcccagtggatcctttcgcagctctattcggcgttttccggggtcagcggtaaagagttacaaaacgacccgctgatgctgatgcgcggctcacagctggcgatggcgaatagcggccagcggatgcagctgcaggacgggtggctgaccagcaaagacgcgcaaggtaacgtctggtatctgctgcacggcgagctggcgggttcgtcgttcgatatgcgacagacgcaccgcctggtgaccaccctcgcgcagcttgaaaaggaattaaaagcgcgccacccgcaggcgcagctgctgtcgcgcggcaccgtattttacagtgattacgccagccagcaggcgaagcgcgatatctccactctcggcgcggcgaccatgttcggcgtcatcctgttgatcgtggccgtgttccgctcgctgcgtccgctgctgttatgcgcgatctctatcgctatcggcgcactggccggcaccgttgccacgctgctgctgtttggcgagctgcatctgatgaccctggtgatgagcatgagcattattggcatttccgcagattacacgctctattacctgaccgaacggatggtccatggcgcagcggcttcaccgtggcaaagccttgttaaagttcggaaagcgctgctgctggcgctgcttaccaccgtggcggcttatttaatcatgatgctggcccccttcccggccattcgccagatggcgctatttgcggccgtggggctaagcgcctcatgcctgacggtgattttctggcagccatggctgtgccatgggctcccggtgcgtcccgttccagcgatggtgctgatgtcgcgctggctcgcggcatggcggcgtaacaaaaaactcgccatcggtctgccggtggttctggccattttctccctgacggggctcgctctcctgcggatggatgacgatatctcacagctgcaggcgctaccgcagaatatcctctcccaggagcatgccatcaccgcgctcactggccaaagcgtcgatcaaaagtggttcgtggtttacggcgacacggcgcaacaaacgctgcagcggcttgaagcctttatgcccgcactggctaaagcgcaaaccgacggtatgcttggcgggtatcgcgccattccgctcaattcactggcccgccagcagcaggatctggccctgctgaagcaggcggcgccggccatcggccaggcgctgaataacgccggactcaccgctgttcaccccgacctgcggccgatgccggtgacagtcggcgactggcttgccagtccggccagcgaaggctggcggctgctatggctgacgctgccggatggcgaaagcggcgtactggtgccagtgagcggggtgaaagatagcgcggcgctgaaggcgctcagcacaacccagactggcgtggcgtgggtcgatcgtaaaagcgatttcgaccagcttttcgcgctctaccgtcatattttaaccgggctgctcggcgttgcgctggcggtgattgcctgcggcgccgctatccgccttggctggcgcaagggcttaataagcctggtgccgtcggtattgtcgctgggatgcggcctgggggcgttggcgctcaccggccacgccgttaacctgttctccttactggcgctggtgctggtacttgggattggcatcaactacaccctgtttttcagcaacccgcgcggcacgccgctgacatcgctgctggcggttaccctggcgatgatgaccaccttattaacgcttggcatgctggtgtttagcgccacccaggccatcagcagctttggcactgtcctggtcagcggtattttcaccgctttcctgctgtcgccactggcgatgccgagcaaaaaagagaaaaaaagacgatga

SEQ ID NO: 223764 - DNA, 585 bp, Klebsiella pneumoniae
atgagaagaccatcattctggcgcgccttcgcgctcttcgccgccttattgctggccggctgcagtcattcgccgccggagccgcaaggccgtccgcaggcgtggctggagccgggtacgcgcgtcacgctgccgccgccgggcatctcgccggccatcagttcccagcagttattgaccggccgcttcaacggccaaacccagtcgctgctggtgctgctcaatgccgatgataaaaagctcacgctggcgggcctgtcgtccgtcggtatccgcctgttcctggtgacctatgatcaacaagggctgcgcgcggaacagtcgatggtgatcccgcaactgccgcccgccagccaggtgctggccgatgtgatgctcagccactggccgcttagcgcatggctgccgcagctgccgaaaggctggacgctaaccgaccgcggcgacaaacgcgaactgcgtaacgcgcgcggaaaactggtcaccgacatcacctatatcaaccgcaaaggcaagcgcgtgccgattagcatcgagcagcacgtctttaaataccacatcaccattcaatacctgggtgactga

SEQ ID NO: 223765 - DNA, 1170 bp, Klebsiella pneumoniae
atgatcttcatttctgctgtcggcatgattaacgccctgggacgcgataatgatgaaatcgccgccaatctggcccgcggcattgcgcccggcatgcgcccgcgtgaagggtggttacaggggcatccgcaggcgattttcgcgggggtggacggcgaactacccgccattcccgatacctttcgcgaccatcgttcgcgcaataatcagctgctgctggcggcgctggcgcagatccagccgcaggtggatcgcgccatcgcccgctatggccgggctcgggtcgccgtggtgttgggcaccagtacgtcagggctggatgaaggcgacgtacacgttaatttgacgcttaacggcaaggcgagcgaggcctggcgctatccacagcaggagctgggcgacccgtcgcgttttctcagccgctggctggcgctggatggtccgacatataccctgtcaaccgcctgctcctccagcgcgcgggcgataatcagcggacggcggctcattgaggcgggactggcggatgtggcgatcgtcggcggcgcggatacccttagccggatgcccatcaacggctttcacagcctggagtcgctctccacgacgcagtgccagccgtttagccgcgaccgctgcgggatcaccatcggcgaaggggcggcgctgatgctgctgacccgcgagccgcagcccatcgcgctgctgggtatcggcgaatccagcgacgcctggcatatttccgccccgcatccccaaggagaaggggcgatgcgcgccattcagcaggcgctggacgacgcgggcatcatgccggagcaggtgggttacattaacctgcacggcaccgctacgcggcttaacgaccagatagaagcccgggtgatcaacgcgctgtttggcgaaagggtgccctgtagttccaccaaacatctgaccggacatacgctgggtgcggcggggatcaccgaggccgccatcggcatgctgatcctgcagcgcaatctgttgttaccggcacaggatttcagtcagtctccgcaggatgacacgctaccgccgtgcgggctcattgaacatccgcagccgctgtcgcggccagttatcctgtcgaactcttttgcctttggcggcaataacaccagcatcctgctcgggagaatgtcatga

SEQ ID NO: 223766 - DNA, 477 bp, Klebsiella pneumoniae
atgagccactttttatcacccggcagttacctgccgcacgacgcgccgatgctgctgctggaagaggtcgaggcggtgactgccgacaccgccacctgccgcgtcgcggtctcacccggcagcgttctggcgccatttctcgataccaacggcgatcttcccggctggttcgcccttgaattaatggcgcagaccgtcggcgtctggtccggctggcaccgccagcagcaaggacaaacatcgctcgctttaggcatggtgctgggcgcgcgcgaactggtttgcgcggccgggagcctgccgggcggaaagacgctgtccatcagcgtgaagctcttgattcaggatgaacgtttcggcagcttcgaaggcaccattatggtggacgatgacgtcctggccagcgggcgggtcaacaccttccagcccacaacagaagaacttagcactttatttcaacaaggagcgtcagaatga

SEQ ID NO: 223767 - DNA, 732 bp, Klebsiella pneumoniae
atgagtcgttcagttttggttaccggcgccagcaaaggcatcggtcgcgctatcgcctgccagctggcagcggacggttttgtggtgggcgtccactatcatcgcgaccgcgcgggggcgcaacagacgctggaggcgataaccgccgccggcggcgacggccggctgctgagttttgacgtcgccgatcgtcagcaatgccgcgaggtactggagcaggatatggccgaccatggcgcatggtatggcattgtcagcaacgccggcatcgcccgcgacggcgccttcccggcgcttggcgatgacgactgggacgccgtgatccacaccaacctcgacagtttttataacgtcattcatccctgcatcatgccgatgattagcgcgcgccagggcggacgtatcatcaccctctcctcggtttccggcgtcatgggcaaccgcggccaggtcaactacagcgccgccaaggcgggcattatcggcgccaccaaagcgctggcgatagaactggcaaaacgcaaaatcaccgttaactgtattgcgccgggtcttatcgacaccgggatgattgacatggaagagcacgcgctgaaagaggcgatgaccatgatcccgatgaaacgcatgggtcaggccgacgaggtggccgggcttgccagctatttaatgtcggatatcgcgggctacgtcacccgccaggtcatttccatcaacggggggatgctatga

SEQ ID NO: 223768 - DNA, 1230 bp, Klebsiella pneumoniae
atgatacgccgggtggtcattacagggatgggcggggtgaccgcgtttggcgaaaactggcaggatgtcgccaccaggctgcgggaatataaaaatgcggtgcgtaagatgcctgaatggctggcgtatgacggactgcatacgctgctgggggcgccaatcgacgatttcaccctgccggagcattatacccgcaagcgtatccgcgcgatggggcgggtatcgcggctctccacccgcgccactgagctcgcgctggagcaggccgggcttatcggcgacaccgtgctgaccaacggccaaaccggcatcgcttacggctcgtcaaccggtagtaccggtccggtgagcgagttcgccaccatgttgacggagaaacataccaacaatatcaccggcactacctatgtgcagatgatgccgcataccaccgcggtgaataccggattattcttcggtctgcgggggcgcgtgatccccacctccagcgcctgcacctccggcagccaggcgattggctacgcctgggaagccattcgccatggttaccaaacggtgatggtggccggcggggccgaggagctctgcccttcggaagccgcggtattcgataccctcttcgccaccagccaacgcaatgacgaaccggccctcaccccctctccgttcgatgaacagcgagatggtctggtgattggcgaaggcgccggcacgctgatccttgaagatctcgagcatgccaaagcgcgcggcgcaaccatctacggtgaaatcgtcgggttcgccactaactgcgatgcggcccatattacccagccgcagcgcgaaaccatgcagatctgcatggaacaatcgctaaacatggcgggcttaagcccccgggatatcggctatatttcggcccacggcaccgccaccgatcgcggcgatatcgcggaaagccaggcaacggcggccgtttacggcgacagcgtgccgatctcttcgctgaaaagctatttcggccatacgcttggcgcttgcggggcgttagaagcgtggatgagcctgcagatgatgcgcgaaggctggtttgcgccaacgctgaatctccataaaccggacgccaactgtggcgaactggattacatcatgggggaaaagcgcaaactggagtgtgaattcctgcagagcaacaacttcgccttcggcggcattaacacctcaatcattattcgacgctggtcttga

SEQ ID NO: 223769 - DNA, 588 bp, Klebsiella pneumoniae
atgtatcagctttttctgggtaagatctccgcccttagcgccctgccgttaccgcctgcgttgatggcacaggcgccggacggaccgcgacgagccagctggcttgccggccgcgcgctgctggcgcaggcggctgccccgctgacggatattcagcttggcgaacagggcaagcctgccttccccgtcgcgcgcgggctgtggtttaaccttagccacagcggcgacgatattgccctgctgctcagcgataaaggcgaggtgggttgcgacatcgaagtgattcgcccgcgcgaaggctggcgccgcctggctaacgccctgttcagcgaaagcgagcaccaggaactggcgcaggcttcgccagcgcagcagctcacggtcttctggcgtatctggacgcgcaaagaggcgctggtgaaacagcgcggcggcagcgcctggcagatggcctccgttgacagcgcctgtcacggcccgctgtcgctcagccagattctgcacgatgggttaagtattgcggtctgtacgccgacgccgttcacgctgacggacgcgcgcattcaacatttcagcggcgcggtttaa

SEQ ID NO: 223770 - DNA, 1050 bp, Klebsiella pneumoniae
atgtcccctccgcaggctgataaagccgggctccatattttacttaagctggcggcgctggtgattatcctcgccgggatccacgccgccgccgatattctggtgcagctcctgctggcgctgtttttcgctatcgtcctcaacccgctggtcacctggttcattcgccgcggggtgcggcgcccgttcgccattaccctggtggtgacggcaatgctggtgatgctcaccgcgctgcttggcgtgctggcggcgtcgctcaatgactttgtcgccatgctgcccgatttcaaccgcgccctgacgcgtaagatcgtccagctccaggagtatctcccctttctcaacctgcatatcaatccggagcgcatgctgcggcgtatggattcagaacggctgatgacctgggccacgacgctgatgacccagctttccggggcgatggccagcattgtgctgctggtgatgacggtgatctttatgctttttgaggttcgccacctgccctacaaactgcgttttgccctcaataaccctcgtctgcatatcgccgggctgcaccgggcgctgaaaggcgttacccactatctggcgctgaaaacgctaatcagcctgtggaccgggctgattgtctggctggggctgctggcgatgggggtacagttcgcgctgatgtggggggtgctggcgttcctgctgaactatgtgccgaatatcggctccgccatctccgctatcccacccatgctgcaggcgctgctgttcagcggcatctacgagtgcctgctggtcggggcgctgtttctggtggtgcatatggtgctgggcaacatggtggagccgcgcatgatgggccaccggctggggatgtcgaccctggtggtgttcctgtcgctgctggtctggggctggctgctggggccggtgggaatgctgctctcggtgccgttaaccagcgtctgtaaaatctggatggagaccaccgtcgggggcagcaagctggcgatcctgctcggcccggggcgtcccaaaagccggctccccggctag

SEQ ID NO: 223771 - DNA, 1986 bp, Klebsiella pneumoniae
atgaaagccgtagtcttcgcttatcacgatatgggctgcaccggtatccaggctctgctggacgccgggtatgatatcgctgctattttcacccacccggataaccctggcgaaaaccatttctttggctccgtggcgcgccttgctgccgagcagggcattccggtgtgggcgccggaagacgtgaaccatccgctgtggattgagcgtatccgcgagatgaagccggacgtgctgttctccttctactaccgcaatctgctgggcgatgagatcctccgtctcgcgccgaaaggggcgtttaacctgcacggttcgctgctgccgaaatatcgcggccgcgcgccgctgaactgggtgctggtcaatggcgaaagcgaaaccggcgtcaccctgcaccggatggtgaaccgcgccgacgcgggggatatcgtcgcccagcaggccgtggcgattggcccggatgacgccgccctgacgctgcaccgcaagctgtgcgccgccgccaccgggctgctgggccaggcgctgccggcgatcctcgccggaaccaccgatgaacgtccgcaggatcacagccaggcgacctatgtggggcgtcgtaccccggaagatggccgcctcgactgggagcagccggcgcagaccctgcacaatctggtgcgcgccgtctccgaaccgtggccgggcgccttcggctacgccggcgcgaacaagtttatcgtctggaaatcccgcgtccgtcatgatctgccggcagctaagccgggtaccgttatctccgttgcgccgctgatcgtggcgtgccaggagggggcgctggagattgtcaccggtcagaccgaacgcggggtgtacatgcagggcgcccagctggcgcaggggctgggcctggtgtccggggcggtgatcagcagcaaaccggtggtggcggttaagcgtcgcacccgggtgctgatcctcggcgtcaatggctttatcggtaaccatctgaccgaacgcctgctgcaggacgacaactatgagatttacggcctggatatcggctccgacgccatcagccgtttcctcgactgcccgcgtttccactttgtggaaggcgatatcagcattcactccgagtggatcgaatatcacattaagaaatgcgacgtggtgctgccgctggtggccatcgccacccctatcgagtacacccgcaacccgctgcgcgtcttcgagctggatttcgaagagaacctgaagatcatccgcgactgcgtgaaatacaataagcgcatcatcttcccgtcgacctcggaagtgtacggcatgtgcaccgacaaaaacttcgacgaagacacttccaatctggtggtcgggccgatcaacaaacagcgctggatctactcggtctccaagcagctgctggaccgcgtgatctgggcctacggcgataagaatggcctgaagttcactctgttccgtccgttcaactggatggggccgcgtctggataacctcaacgccgcgcgtatcggcagctcccgcgccatcacccagttgatcctcaacctggtggaaggctcgccgatcaagctcatcgaaggcggtaagcagaagcgctgcttcaccgacatcagcgacggtatcgaagcgctgttccgcatcattgagaacaaagacggccgctgcgacgggcagatcatcaacatcggcaatccggataacgaagcgagcatcaaagagctggcggagatgctgctggcctgcttcgaacgccatccgctgcgcgatcgcttcccgccgtttgccggcttccgcgaagtggaaagcagcgactactacggcaagggctatcaggacgttgagcatcgcaaaccgagcatccgcaacgccaaacgctgcctgaactgggagccgaaggtggagatggaagagaccgttgagcatacgctggacttcttcctgcgcacggtagaactggtggacgctaaacatccatga

SEQ ID NO: 223772 - DNA, 864 bp, Klebsiella pneumoniae
atgatccgcagtatgaccgcctatgcccgccgtgaaatcaagggtgactggggtagcgccgcatgggagctgcgctcggtaaaccagcgctatctggaaacgtacttccgcctgccggagcagttccgtagcctggagcccgtggtacgcgaacgcattcgcgcccgcctgactcgcggtaaagtcgaatgcaccctgcgttttgaacaagaccccagcgctcagggcgaactcattctcaacgaaaaactggctaaacagctggttaacgctgccaactgggtgaaaatgcagagcgatgaaggggaaatcaatccggttgatatcctgcgctggccgggcgtgatggccgccaaagagcaggatcttgacgccatcgccgccgacattctggcagcccttgacggcgcgctggatgacttcatcgtcgctcgcgaaacggaaggccaggcgctgaaagcgcttatcgagcagcgtcttgaaggcgtgagcggcgaagtggcgaaagttcgcgctcatatgccggaaattctccagtggcagcgcgagcgtctggtcgccaagctggaggatgcggaagtgcagctggagaataaccgtctcgagcaagagctggtgctgatggcgcagcgtatcgacgttgccgaagagctggaccgcctcgaagcccacgtgaaagagacctacaacattctgaaaaagaaagaggccgtgggtcgccgtctcgactttatgatgcaggagttcaaccgtgagtcgaacaccctggcgtcaaaatcgatcaatgccgaggtcaccaactccgcgattgagctgaaagtgctgatcgagcaaatgcgcgagcagatccagaatatcgagtaa

SEQ ID NO: 223773 - DNA, 618 bp, Klebsiella pneumoniae
atgctgcttcatgttctgtatttaatcggtatcaccgcggaagccatgaccggagcgctggctgccgggcgtcggcggatggatacgttcggcgtcattattatcgccaccgcgaccgcgctgggcgggggttccgttcgcgatatcctgctgggacactatcctctcggctgggtgaagcatccggaatacgtcattattgtcgccgtcgccgccgtccttaccacaattgccgccccggtaatgccgcacctgcgccggcttttcctggtgctggatgcgctggggctgatcgtattttccgtcatcggtgcgcaaatcgccctggatatgggagaagggccggttatcgcctctattgctgcggtcatcaccggcgtttttggcggtgtactgcgcgatatgttctgcaaacgcattccgctggtcttccagaaagagctgtacgccgggatctcgtttgccgcagcggtactttatatagcgctgcaacattacgtcagcagccacgatgtggtggtcctggccacgctgctgttcggctttaccgcccgcatgctggcgctgcgctggaagctcgggctaccggtcttccactacacccacgacgcccactaa

SEQ ID NO: 223774 - DNA, 1008 bp, Klebsiella pneumoniae
atgaagccaatttttagccgtggcccctcgctacagattcgccttattctggcggtgctggtggcgcttggcgtgattatcgccgacagccgcctgggtacgttcagtcaaatcagaacgtacatggatacagccgtcagccctttctactttgtctctaatggtccccgggaactgctcgacagcgtatcgcagacgctggctacccgtgaccagctcgaactggaaaaccgcgcgctgcgtcaggagctgttgttgaaaaacagcgatctgctgatgctgggccagtacaagcaggagaacgcgcgcctgcgtgaactgcttggctcgccgctgcgccaggacgagcaaaaaatggtgacccaggtcatctcaacggtcaacgacccctatagcgatcaggtggttatcgataagggcagcgtcaacggcgtctacgaaggccagccggttatcagcgataaaggcgtggtggggcaggtcgtggcggtagcgaaaatgaccagccgggtactgctgatctgtgatgccacccatgcgttgccgatccaggtcctgcgtaacgacattcgcgtcattgccgccggtaacggctgcaccgacgacctccagcttgagcatctgccggccaataccgatattcgcgtcggcgatgtgctggtgacctccggtcttggcggccgtttcccggaagggtacccggttggggttgtatcttcagtgaaactggacacccagcgcgcctacacggtgatccaggcgcgtccgacggccggtctgcagcgtttgcgctatctgctgctgctgtggggcgccgatcgcaatggcgctaacccgatgactccggaagaggttcatcgcgtggctaacgaacgcctgatgcagatgatgccgcaggtgttgcctgcgccggatgcgatggggccgcagatgccggcgcccgccaccgggctgacgccgtctcagccgtcgcagcctgaagggggcaatagtggcaagttaccgtag

SEQ ID NO: 223775 - DNA, 3798 bp, Klebsiella pneumoniae
gtgaggcgactgcccgggattttattgctcaccgtggcaacattgattgttatcgtcgcgctgctggtgagtggcttgcgtctcgtgttgccgcagctcgacgcctggcgtccgcagctgctggagaaaatctccgccctcaccggcacgccggtggatgcctcgaagatcgccgccagctggcaaacttttggcccaacattagatgtccgcgatattcatgttgggctgaaggatggcgggacaatggcggtcaagcgcgtgaccctggcgctggacgtctggcaaagtctgctgcatatgcgctggcagtttcgcgatctcaccttctggcagctgcaggtccataccaataccccgattcagaccaatgacggcggcgaaagtctgaaaaccgaccgcatcagcgatctctttttacgtcagttcgaccactttactctgcgcgacagccatctgagcttcctgaccatttctggtcagcgggcggagctggcggtcccgcagctgacctggcttaacggcaggaaccgtcaccgcgccgaggggcagctcagcctttccagtctcaccggccagcatggcgtcatgcaggtgcggatggatctccgcgatgaggatggcctgctgaataaaggccgggtctggctgcaggctgacgatattgacgtcaaaccctggctaggccgctggatgcaggacaatatcgcgctgaaaagcgcccgcttcagcctcgaaggctggatgactattgaaaaaggcgatgtagccagcggcgacgtatggctgaaaaaagggggcgccagctggcaaggggatagcgaggttcatcatctgtcagtggataacctgacggcgcatctctctcacgacaagcagagctggggcttctatattcccgatacgcggatcgcgatcgacgataaaccgtggccaagcggcgcgctggcgatggcgtggatcccggggcaggatgtaggtggcgacggtcatcagcgtagcgatgaattacgtattcgcgccagcaatttagcgctcagtggcctgagcggattgcagccgtttgccgataagctggcgccttctttgggcgaactctggcgcaccacgcagcccagcggcaaaatcaatctgctggctctagatattcccctgcaggcgacggagaaaacgcgctttcaggcgcagtggagcgatctggcgtggaagcagtggaaactcctgccgggagcggaacacttttccggcagcctgaatggcagcgtggagcacggggaactgcgcgcccgcatgacgaaggcgcagatgccgtatgccggagttttccgggccccgctggagatcgccgctggcgaagccaccctcagctgggtgaaaaatgacaaaggctttatgcttgatggccgcgatattgacgtgcaggcgacgggggtacgcgctcgcggcggcttccgctatctgcaaccgcagggggacgatccgtggctgggcattctggcggggatcagcaccaacgatggcggccaggcgtggcgttacttcccggaaaacctgatgggcaaagcgctggtggactatctcagcggcgcgattaaagccgggcaggcccgcgatgcgacgctggtgtatggcggtaacccacatctgttcccgtatccgcacaatgaaggccagttccaggtttacgtcccgctgaagaatgccactttcgcttttcaaccggactggccggcgctgaccgggctgaatatcgacctcaattttatcaacagcggcctgtggatgcgggcggataaagcgatgctcggcaatgtgaccgccagcaatctcgatgccgtgatcccggattatgcgcaggaaaaactgctgattgatgctgacatcaaaggcccgggcaaagaggtgggcccttatttcaacaccacgccattgaaagcgtcgctcggggcagcgctggattccctgcagctggatggggatgtgagcgctcgcttacatctgaatatccccctcgatggcgagatgaccaccgcgaaaggcgatgtacggctgcagaataataccttgtttatcaaaacattagatactacgttgcagaacctaagcggtaatttcagctttgtgaatggcgatctcaatagtcaaacgttgagcgcgacctggtttaatcagccgctgaacctcaatttttccacccgcgaaggcgaaaaagcgtttctggtggatgtcgggatgaacgccagctggcagccgtcgcgcaccggactgctgccgaaagcggttaatgagacgctgagcggtagcgttccgtgggatggcaaggtcgctatcgaactgccgtaccatggcaatgccagctataaggttgatatcaatggcgatctgaagaatgtgagcagtcacttaccttcaccggtcaacaagtccgctggcgaacccctgccggtcaaaattaacgtcgccggcggtctgagcagcttcgacctgaccggatccgttggcgcgaagaatcatatcaacagccgctggttgctgaaccgtaagctgacgctggacagagcgatcctcacgacggatagcaaaggcctctctccgctgcccgaccagcccggcgttgaactcaatctgccgccgatggatggcgcgcaatggctggcgctgttccagaagggcgcggcgaatgaagtcagcagcagtgtcctctttccaccgcgcattgtgctgcgtacgccgtcgctggcgctggccggccagcaatggaacaacgtcagtctgatgtcgcagccggtcgccggcggctcgcaggttgaggcgcaggggcgtgagatcaacgccaccctgacgatgcgcgacaatgccccgtggctggcaaatgtgcgttatctctatttcaacccggccagcgccagcggcaagggcggaacggagaacgtgacttctcaggcggagacgcggctggatttccacggctggcccgatctgcaactgcgctgcgcggaatgctggctgtgggggcaaaaatatggccgcatcgacggcgatgtgacgatcaagggcgataccttaacgctctccaacggcctggtggataccgggtttggccggctgacgaccgacggcgtgtgggttaacgccccttccggggtgcgcacctcgctgaaaggcagactgcatggcaataaaacggatgaatttgcggatttctttggcgtttccacaccggtgaaggattcgccgtttgatatcgactacgatctccactggcgcgcgccgccctggtcacccgatgtcgcctcgctcaatgggatcattaaaagccacctcggcaaggggcagtttaccgacctgagtaccggacatgcaggccagctgctgcgtttgctgagcgtcgatgccctactgcgcaaactgcgcttcgacttcagcgataccttcagcgaaggtttttactttgactcgattaacagtacggcatggattaaggatggcgtactgcataccgatgatacgctggtggatggtctggaggcggacattgccatgaaagggtcggtcgatctggtgcgtcgccagctggatctgcaggcggtggtcgcgccggagatctccgcgaccgtcggcgtggcggcggcttttgctgtcaacccgattgtcggcgcggcggtgtttgccgccagcaaggtgctggggccgctgtggaacaaagtctcgatactgcgctatcgcatcaccggcccgattgaccagccgcagatcaatgaagtgctgcgccaggcgcgcagcaacaaaaagcaatga

SEQ ID NO: 223776 - DNA, 615 bp, Klebsiella pneumoniae
atgaatgcgataatcattgacgatcatccattggcacgtatcgccattcgcaaccttctcgacagcaacggcattaccgtcgcagcggaactcgacagcggcgcccatgcggtacagaccgccgaaaccatgcagcctgacctgctgatcgtcgacgttgatattccggaactcagcggcatagacgttctggagcagctgcgaaaacgccgctaccggggaaaaatcatcgtcatttccgccaagaatgaactgttttacggcaaacgtagcgccgactgcggggccaatggttttgtgagtaaaaaagagggaatgaataatatcctcgccgcgatcgacgcggccaataatggctacagctatttccctttttcactggagcgcttctgcacccacggcatcaccgatcaggaccgactggatacgctgtcaacgcaggagatgaaggtcttccgctatattctcagcggcatcgactacaccaccatcggcagcaaaatgaatatcagcaataagacggtaagcacctataaggtccgtctgatggataaattaggctgcagctccctgcttgagctttatgactttgcacaacgcaataaaatagggtga

SEQ ID NO: 223777 - DNA, 534 bp, Klebsiella pneumoniae
atgaaaactaacactataactgccggcgccggattacgcctgaccgaggagagtgatatcgcccttctgccggccattgaacgttccgccgctcaggcttttcgtcagatccccgctctcgcctggctggcggacagcgaggtgattagcgttgcgcgccatcatgattatctggaaacggaacatagtctgctggcggtggccgccgggcaaccggtgggttttattctgaccgaaccgctcgacgatgccttatttatcgtcgaaatcgccgtccaccaggcctggcagcatcagggcatcgggcggatgctgctggagcaggttatcgacggcgcccggcaaatggcttacccggcggtgaccctcaccaccttccgcgacgtgccgtggaatgcgccgttttatacccgtctgggattcgccatgctcgatgaactgaccctgcccgccgggctggcggcgaaaagagaacaggagacccggcacggcctgccgccggagacgcgctgcgccatgcgcctggcgctctga

SEQ ID NO: 223778 - DNA, 1644 bp, Klebsiella pneumoniae
atgtctattggcgctatgtatacccgaaaaatcacccactggtttgccaggcgatcgtttcagaatcgcatcttcctgctgatcttattcacctcgacgatcgttatgctggcgatgtcatggtatctgaccgacattaccgaagagcgtctgcattaccaggtcgggcagcgggcgctgattcaggcaatgcagatttcggcgatgccggagctggtcgaagcggttcagaaacgcgatctcgccagaatcaaagcgcttatcgaccccatgcgttcgttctccgacgccacctatatcaccgtcggtgatgccaacggccagcgcctctatcatgttaatcctgatgaaatcggcaaatcgatggagggcggcgatagcgatgaagcattgttaaacgcgaaaagctacgtgtcagtgcgcaaaggctcgctgggctcctcgctgcgcggtaaatcaccgattcaggacgagaccggcaaggtgattggcattgtgtcggtaggctataccattgaacagttagagaactggctcagcctgcagataagctcgctgctgatcccgatggcgatcatgttactgcttctgctctactgcgcccgccgcttctcgttgcatatcaaaaagcagatgctgaatatggaacctcaacagctgtcgcagctgttgatccagcaaagcgtgttgtttgaatccgtgttcgaagggctcatcgccatcgactcccgttacaagatcaccgcgattaatcagactgcccgccggctgctcaacctgagccaaccggaaccaacgcttatcggtaaagggattagcagcgttatttctcaggaggctttcttctacgatgcgccgcagaccaataaaaaagacgagatcgtcaccttcaatcatatcaaagtgatcgccagccggatggcggtgatcttaaataatgagccacagggctgggtgatcagctttcgtagtaaagacgatatcaacaccctcagcctacagctcagtcaggtgcaacagtatgccgataacctgcgcgccgtgcagcatgagcatcgcaatctgatctccaccatcgccggcctgctgtttcttaaacgctacgatcatgcgctggatctgatccaacagcagtcggaaagccaccagaaagtgatcgattttatcgcgcggaatttccaggataaccatctggccgggctgttgatcggcaagtattaccgcgccaaagagctcggtctggaactggttttcgatccggcctgcttcgtcgacagattacccaccgccctttctcacaacgaatggatctcgatcgtggggaatctgcttgataacgcctacaatgccagcctgcaacagccgcagggctcaaagcagatagagtgcctgatcaacagcgacggccacgaggtgattatcgaggtcgccgatcagggatgcggcattgacgagacgctgcgcgatcggatcttcgagcgcggcgtcaccagcagcgtcagcaaagatcatggcatcggactctggctggttcgcagctacgtggaacaggcaggcggtagcatcgtcgtcgaaaataaccttccctttggcaccatctttactctttatattcccctgacccgagatgaacatcatggatag

SEQ ID NO: 223779 - DNA, 747 bp, Klebsiella pneumoniae
atgaaaaagcgtgttcttgccctttgcctggccagtttcttctccgttaacgccttcgcactggttccccccggtaacgatgtcaccaccaagcccgatctctactatctgaccaatgcccaggccatcgacagcctggcgctgttgccgccgccgccggcggtgggcagtatcgcgttcttaaacgatcaggcgatgtatgagcaggggcgcctgctgcgcaacaccgagcgcgggaagctggcggcagaggatgccaacctcagcgcgggcggcgtggctaacgccttctccagcgcctttggttcgccgatcaccgaaaaagacgcgccgcagctccataagctgctgaccaatatgattgaagacgccggcgatctggcgacccgcggcgcgaaagagaagtatatgcgcattcgcccgtttgccttctacggcgtctccacctgcaacaccaccgagcaggacaagctggcgaaaaacggctcttacccgtccgggcatacctccatcggctgggccaccgccctggtgctggcggagatcaacccgcagcggcagaacgaaattttgaagcgcggctatgagcttggcgagagccgggtgatctgcggctatcactggcagagcgatgtcgatgcggcgcgcatcgtcggctccgcggtggtcgccacgctgcacaccaacccggccttccagcagcagttgcagaaagccaaagacgaattcgccaaaacgcagaagtaa

SEQ ID NO: 223780 - DNA, 1260 bp, Klebsiella pneumoniae
atgataaatgaacagcctgcagagatcctgcaggatatttttcagcatactgtcgacagcgcccgagccgggcctgcgatcctgtctaacctgccggaaaaaccgcgtggccgctgcgtggtaatcggtgccggtaaagcctcggcggcaatggcagcggctgtggatgcagcctggccggatgtggatgtgtctggcgtggtggtgacgcgttacggttacgcggtgcctgctggtcgcatccggattatcgaggctgctcatccggtatcggattcgatgagcgaagttgccgccatgctgattgtggaagcgctgcgcggattgacctctgatgacctggtgctggcgctcatttccggtggcgggtcggcgttgatggcgctgcccgcaccaggattaacattgaaagataagcaggccattacgcgcgcgctactgcacagcggtgccaatatcaaagagatgaatctggtacgtcgtcatctctccgcggtgaaaggcggcaagctggcaagaatggcgcaaccggcccgtattgtgtcactgattatcagcgatgtgccgggggataacccggcagatgtggcatcaggtcctactgtcgccgatgacagtacgccgcttgatgcgcttcgggtgcttcagcgctacggtattcagaccccggaacctgttcataaactgctaagccagccggcaggcccggttgaaagcacagcgaacagcgaagtaaaactcattgccacgccgcagcgggctttgcaggctgccgcgctggttgcgtgcagacacggactgacgccgcttattctcggcgatgcgttagaaggcgaaagtcgtgaagtggccattgttatggccgggattgctaaatccgtgaagcaatatggtcatccggtttccggtccggcagtgctgttgtcgggtggcgaaaccaccgtgacggtaagtcagggtcagcacgggaagggtggtcgtaatactgaatttgcgctcagtctggcctgtgcgttgcagggagaaagcggtatatgggcaatcgccggcgacagtgatggtatcgacggaacggaagatgcagcaggtgcgctggtattcccggacacgctaacacgcggcaaaatgggtggtctaaatgcggctagttatcttgatgcacacgatagctatagctattttcatgcgctcgatgacctggtaatgaccggcccaacgttaaccaacgtcaatgatattcgggcaatattgattgcctga

SEQ ID NO: 223781 - DNA, 846 bp, Klebsiella pneumoniae
atgcaacagcgtattactttccgccaggcctgcctggtcaccctgttttcggggctactgctgtctggtggctcaacatacgctaaagagtggaaatcgatcaccatcgctacggaaggcggctatgagccctggaatctgacgcttcccggagggaaactcagcggcttcgagcccgagctaatggcgaatttatgccagcgaatgcagatcgaatgcaaactggtggtgcagaactgggatggcatgattgccggacttaacgccggaaaatatgacgtgatcatggatgctatcgtcgtcaccccagagcgttcgaaagtagtggcgtttacccaggcatacgctgccacgccggcctctttcattgcggtaaaagggtcgctgctaccgccgtccccggcggtcaaacttcatgatgatgagaaagagattcaggcggcgattgcgcctctgcgcgcggcgttgaatgggaaaaccatcggcatcgcttccggtaccgtctacaccccgtttattgataagtatttcaaggatatcgctgacgtccgggaatataacaactcagcggatgcgatcctcgacctgcaggctgagcgcatcgatgcggtgtttgatgatattacctttgccaacaccaccctgtcgcgtccggagaatagcaatctggcattgagcggtccgctgatgagcggcccaatctggggaggcggtgaggcgatgggggtgcgccttaccgataccgatctcaaagcgaaactggatagcgccattcaggcggcgctggccgatgggacggtaaaaaaactgagtgagaaatggtttaaaagcgacgtgactccctga

SEQ ID NO: 223782 - DNA, 732 bp, Klebsiella pneumoniae
atgattatcgattttgccttcctcggtgagacgttgttgaagctcggcgcggcgctgccggtgacgctggggctctttatctgctcttttatgcttggcggcgtgctggcccttggcgttctggcgctgcgaatgagccgctggccgctggcaagcggcttcgccaaaggctatatcctgatctttcgcggctcgccattgctgatccagttgtttctcatttattacgggctgggtcagtttggggtgatccgccacagtttcctgtggccgctgctgcgcgaacccttcatctgcgccgttctggcgctggcgctctgtacggcggcctataccgcggaaattctgcgcggcgggttgctggcgataccgccgggtcagattgaagccggccaggcttgcggtatgtcgcgctggctgctgctgcggcggatcattgccccggtgatgctgcgctatgcgctaccagcctactccacggaggccattttgttggtcaagtcgacggcgctggcaagcctggtgaccgtctgggacgtcacgggggtggcccaacagattattcagcgtacctaccggacgatggaggtatttctctgcgcggcggccatctacctgctgctcaatttcatcattgtgcaattatacgccctgcttgaacggcgtttaaccccgcataccaggccaaatccggcgaccgtgtcgctcaagccgataactaaaggagagtaa

SEQ ID NO: 223783 - DNA, 795 bp, Klebsiella pneumoniae
atgctcgattcacgtccggtgaccttatcggtcagcgatattcataagtcctttggctccctggatgtcctgaaggggatcaccatccaggcgcagcagggcgatgttatttcgatccttggcgccagcggctccggtaaaagtacgctgctgcgctgcattaacctgctggaaacgcccgatgccggagtggtcagcgtcggcggggagacgattgaaatgaaacaccacgctcgcgggcatcggctggcggcgaatccccggcagatagagcgcctgcgctcgcggctggggatggtcttccaaagttttaacctgtggtcgcatatgacggtcctgcagaatgtcattgaggggccgcattatgtgctcaaacgcgataaacggacctgcattgaacaggccgagcagctgctggagcgggtggggatgttgaaccgaaaggatttttatccggcgcagctctccggcggccagcagcagcgcgtggcgatagcccgcgcgctggcgatggagccggacgtcatgctctttgatgaacccacctcagcgctggatcctgaactggtcggcgaggtgctaaaggtgatgcgcagcctggcggaggagggacggacgatgctggtggtcacccacgagctgggattcgcccgccatgtctccaaccgggtggtctttatgcaccaggggacgattgactgcgacggcgcgcctgaggcgctgtttggcagccagggatccgcgcgctttaagcaatttatctccagccatcaacagccaggacaggtcgtatga

SEQ ID NO: 223784 - DNA, 1500 bp, Klebsiella pneumoniae
atgaaaatgatccagtggggcgatgcgccgatacgctggcaggaggtggcttgcgtcgcccggggcgaggcgaccttgagcctcagcgacagcgcctgggcgcgtatcgcgcaaggacgggcgatcgtccagaatatcgttaaagccggccaggtagcctatgggatcaataccgggctgggggcgctgtgcaatattacgctgccggaagcacagctgcaccagctgtcgcgcaatacgttgctcagccatgcctgcggggtgggaccgttgctggcggtcgccccaacccgggcaattatgtgcgccgcggtggccaatttcagccacggtaaatccgggatctccgccgggatagtgcagcagctgttggcgtttttgcagcatggcgtcacccctcaggtgccctcccaggggtcagttggctatttaacgcatatggcgcatattggcctggccctgatgggggttggcgatgtgctgtggcaggggcgaacgtggcctgcggcagaggtcctgtcgcagctgaatctgcagcccatcgcgccgggagcgaaagaggggctgagtctggtcaacggtacgccgtgcatgaccggtctggcctgtctggcgttagacgacgccgagcgcttaatggactgggccgatgtaaccggcgcgatgagctttgaagcgctgcgcggccagcttgtggcattcgatgccgagatcctggcgctgaaagccagccccggtatccagaccagcggccagcggctgcgtgagctgctggcggacagccctctgctggccgaaagtcaaggacttcgcacccaggatgcgctaagccttcgctcgatgcctcaggtgcatggcgcttgccgcgatcagtttagccacgcgcagacgcagataaatatcgaactcaacgcctgtaccgataatccgctgatcctggggaccgttgagcagtggcgggtggtctcccaggcgcatccgcatggcgaatcagtggcaatggcctgcgatttgctggccattgccatggcagagctgggcgctatcgctgaacgacgccttgaccggctggtgaatcctctggtgagcgggctgccggcgttcctggtcgcccgaccgggcgtaaattcagggatgatgattgcccagtacgtcgctgcgtcgttatgcgcggaaaacaagcagctggcgcagccggcggtgctggacaattttgttacctcggcgttgcaggaggatcatttaagcctgggcaccagcgctgcgctgaaactgcagcgcctgctgggcaacctctatcagatcctcggcatcgaatatttactcgctgcccaggggctcgattttcacgagccgcagaagctggccgcgggcacgcgccgggcgcgagacctgctgcgcgaaagcgtgcctggctgggaggacgatcgttggctggcgccggacattgccagcgcggtggccatccttaagcgaaccgctggccacgcgccggcgtga

SEQ ID NO: 223785 - DNA, 306 bp, Klebsiella pneumoniae
atgatggcaaatatacttcgctcaatacctatgctattagtgattggttttaatctattgctggccatcctgtttagtttgatctatgccaggaagcatccggaaactgatctattcatcatcataacatttactggtatgttattaatttctacatatattataaatttctactctgttccgacctttgcaactagtgagaaaaagaaaataaaaggtgtctttcccggacgaagaggtaagctaaaaagaattattacagactcgatggtactaatcctggtttttttgtatcaggctcaatag

SEQ ID NO: 223786 - DNA, 906 bp, Klebsiella pneumoniae
atggacagactggatgccatgcagttgtatgttgcggttgtggatgcgcacagcttcgcccgggcggcggaggtgctggggcagccgcgctcaacggtgtcgcgggtagtgaaggagctggaagcctggctgggggcgcagcttcttcagcgcaccacccgcaagctcagcgtgacggccgagggacgccggtattacgcggagtgtaaacggctgctggccgagatggcggcgatggaagcctcctttcccggccgctcggcccagcccgccgggcggttcaaggtggggatgccgcaatctcttgcccggcactgcgtattgccaaggatcggcgagtttctgcagcagtatcctgacctggagttgatcctctgctcaagcgacaacgtggaagatattatccaggagggattcgactgcgtgatccgtagcggacaaatcgaagattccaccaccctggtggcgcgtcctctggcccgctaccgctggatggtcctcgcctcgccggcctggctcgcggcccacggccggccgcagagcatcgacgaactgcaccagcaccgggcggtgggctacctgaaccaccgtaccgggcggaccatcgactggcttttctccctcgatgacggcgattgcgcgatccgcatgcaggagacgctggtggtcgacgataccgatgcctatatccaggccggcgttcaggggctgggcctgatccgcatcgccagctatctggcgcaaccttatctgcagagcggcgcgctggtcgcctgtctggagcaggccgcttctgatcttcccctgtcgctggtctatccgcaaaaccgctatctgccgccggcggtacgcgcgttttatgactggggcagacgcgttctgcaacccccgctcagcgaggcctga

SEQ ID NO: 223787 - DNA, 924 bp, Klebsiella pneumoniae
atgaagaaaatcattgaaaatgattttagtcgtatcgatctgaatctgttgacggtcttgatggtgctgtaccgcgaagccagcgtcacccgcaccgcagaggccctgcatcttggccagccggccatcagcggggcgctgaaacggctgcgcgagatgtttgacgatccactgttcgtgcgcagcgccagaggcatgctgccgacgccgcgggcgcaagcgctgatgaccgagctgcagccgctgatggaacacctgcattcggcaatgtttggcgccggggagttttcccccgccagcgcccagcagcttttccgcgtcggcctcagcgactggagcgaacactggctgatgccccagctgttacccggactgatgcaggaggcgcccggagtgtcgctccagacactagccgccgaccccttccaggtacgccagctgttggaggaggatcgcattgatgtcgcggtatccctcaacaaacagagccgcggggagatcgtcagtgaaccggtgatgaccatgggggtgaccactctctggtcgccgcagcagatcccctgccgcgggccgttgtcggtgggcgatttcgtcgcctgggaacatgtgatggtggcctatcgcgaaaccggccacggggaaatagaccgccagctcgccagtcagggactcgcgcggcgcgtgcgctttgccacgcagaatttctccacctttcccctgctgctgaccaccctgccgctcttcgccaccgtcccccagggactggcgcagcgctggcaggagcagtatgccctgcgcggggacgccccgccggtggcctacccggaatttaccctgtgtatactgcgtcacaaacgccgggcgcaggatccggcgctgaactggctgatagcgaggataaaacaggccatgcgcggaccatag

SEQ ID NO: 223788 - DNA, 1188 bp, Klebsiella pneumoniae
atgactattgctgtttcccgtccggcgggattgcctgcggcggtgtatgcgctttccgtgggttcatttggtattggcaccaccgaatttgtgattatgggtttattactcgatgtggcccatgattttcatatatccattactcttgccgcctggtctattaccgcttatgcctgtggggtggtgattggcgcgccgctgcttacgccgctattaagccgttatcgcaaaaaaccggcgctgttatttttgatgatcttattttccattggaaatttaggctgcgcgatcgccggtaatatgaccatgctaattattgccagggtaataaccgctttcgctcacgcttcgtttttcggaataagctcagtctatgccgcggagctggcgccggtagataaacgagcttcggcggtctccgccgtgtttctcggcgccaccctggccaatattctgggcgtgccgctcggcgcctgggtggggcagtaccttggctggcgctataccttctatatggtcacgctgatcggcgttctctccgccctggcagtcattgccctggtgcctggccgtcaggcgcaaccgtcggcccagagccggatccgtgatgagctaaaggtgctccgccatcccgcggtgctgcgcagcctgctgatcactgccctcgggttctccggcgtcttcgccgccttcacctacatcgcgccgatgctgaaaaccgtcaccgggatgagcgaacaccttattccgccggtgctgatgctgttcggcgttgggatggtcgccgggaatcatcttggcggccgactgaccgacggcggcgtccgccgggcgctgctgctgactctcgctttgctgagcgtcgtcctgtgccttttcccgttggctattcagacgctgcctggtgcctgcgcggcggtgtttttgctgggggcggcgatgttctccaccattccgccgctgcagatgcaggcgctggacagcagtgagagcggtaaaagcatggtctcctcgtgcaatatcgccgcctttaacctcggcaatgccggcggcgcctggtttggcgggctgctgctcgcctccggcgtctctctatctcacattcctctggccggtgcttgcctgaccgccagcggattggttatcgctagtgtgacgttgtcacctttaaaaggaagtcaagcatga

SEQ ID NO: 223789 - DNA, 1065 bp, Klebsiella pneumoniae
atgaagtatcggtatttaggttccaccgggctgtcggtttcggagctctgtttcggcgccatgacgtttggtgagaaaggggcctttctcggcgcgccggggcgcaactggtcggaattcggcgtggtgcctgagcagacggcctacgatctggtgtacaaagcgctggacgccgggattaacttttttgataccgcggactgttataagaacggccagggcgaagagctgctcggcaacgcgctgaagggaaaacgccagcaagtgattatcggcacgaaagggcgctggcaaaccgaccccaacccgaatgcgctgggggcgtcgcgctaccatatcatcaatgccgtcgaggccagcctgcagcggctgaagaccgattatatcgatatctatcaccttcacgggttcgatccgcgcaccgcactggaggataccctgcggacgctggataccctgatccgcgccgggaaaattcgctatatcggggtctccaactacgcggcctggcagctggcgaaggcgctggggatctcggagcgccttgggctggagaaattctgcgtctatcagggctattacaatatcgccgcgcgtgaactggagcatgagattatcccgctcagcgtcgatcagaacgtcggcatcaccgtctggagcccgctggccgggggctttctcaccggcaaatacccgcgcaatcaggcgtttcccgaaggtagtcgcctggcgaacgccacgccgttcgaatccgcgccgatcgccaaccgcgagcaggcctggcagaccctggaggtgatgcaggagattgcccgccagcgcaacgccagcgtcgcgcaggtggcgctcaactggctgcgtacccgtccggggatcgcttcgctggtgatcggcgcgaccaaactggcccaactggaagataacctggcggcgctgaactggacgctgagcgacgaggagacggcgatcctcaacagcgtgagcgagaaagagaaaccatacccctactggcatatctgcaatgtcgccggcgatcgtcgtctggccgatgatatctatccctaa

SEQ ID NO: 223790 - DNA, 894 bp, Klebsiella pneumoniae
atgatcattgaaaatatatatgctattatagtaacatacaatcctgagttagataatattgagaagttagtcatttcattaaaagagcagaacgttatacctttaatagttgataacggtactttaaaagaaaaagatcttttttttcttagaaccatagcaaatgttatcagcttggaagaaaatgaaggtattgcaaaggctcaaaatattggaatagtgtatgcaaaagagaataaagccgatgctgtgattttttttgatcaagatagtcaaattagcaataacttcgttgaatatttggtaactgattatctttcagttaaatcgtatgatgaaaaaattggtataatcggcccaacatttattgactcaaggtataaattctactataagcagattgttcttagtcgaatcggtttcagaaggaaaataagccctgaaaagtttaaagaaccttttaaggcaactttaataatatcgtctggttcatttgtaccaatgacgatattggattcagtaggatatatggatgagaattttttcattgactatgtagatactgaatggtgccttagggctattgctaggggtttttccgtttatgtatctacttcagctactatggaacatgctataggtgataaaatgatcaatttcctggggctacatatacctgtacactcatcagttagacgctattacagaattcgcaatgcaatacttttttctagatatccacatgttcctttgatattaaagattagagataattttatgaatcttattcatcaggctattataaccatcagtcaaaaagataagcttaataattacagaactacaataaaagcgataaaagatggtttaagcggaaagtctggtaaacagtga

SEQ ID NO: 223791 - DNA, 1269 bp, Klebsiella pneumoniae
atgaaattattgcttgttggcaaccatacatgtggaaaccgtggagacggtgctattttacgaggcttacttgatagttttcggaaaatagaaccaagtgtcgaactggatatcataagtagatatgcaattagttcttctttgttattagatgaaaagatttcaattgataaattacatcttgctaaaagcaaacagaaaaatactaatttatatggtaagataaaaaataaaatcaatgcttttttactgccaagaattctcttagcacatgcacagaaaaagggactgtttttccgattctcattaccttcatatattcttgattttatttcggatttgaaacaatatgatgcggtaattcaagttggaggatctttttttgtcgatttatatggttcagctcaattcgaacatgttttgtgttcattaatcgcaaaaaaaaatatatatttagttggacatagtgtaggaccttttgaaaatgacttttttaaagatgtagctacttactctttttcaaatgtaaataaattaattttacgcgaagatgttagtcttgagctaatgagatcggcgggaatacctactgataaggttataatgggtgttgataccgcgtttttagttgatgataataagcctcaggctaaaaattatgttttagaacactggctggatattataagtcgtaaaccaactatagcaattactgttagacgtttagcaccatttgataaacgtcttggagtttctcaggaatcatatgaaagcgcaattgcttctgtagttgatcattatatcaatgaaggctttcaggttgtagctttttcaacatgtactggtattgaaagttataataatgatgatcgcatgatcgcttattcagtaagtagaagattgaaagcttccgcttctgattttcacattgtaatggatgaaattaatgaccttcagctaggttatttattaaaggaatgtatgttaacaataggaactagattacattccgcaattatatctattaattttggaactcccgccgttgctattaactatgaacataaatctttaggagttatgagggggctaggaatgaatcaattatcagctgatttacaagaattgctgaatggtaagattattgataaaattaattatattcttgaaaattatacagaattgaataataatcttaaagttaaggttggcacaactcgaaatatcggcttggatatttctaaaaatattttagacgaaataggttga

SEQ ID NO: 223792 - DNA, 1224 bp, Klebsiella pneumoniae
atgaagatctcttttttttgcattaaattccctatagcgtcagaaacttttgttctaaatcaagttatttcttttatgaagatggggtatgatgttaatattatttccatttttccaggtgatatggacaaaatccatgaagattttgaaacatataaagtagcaagtaaaaccacctatatctttaaaacagataacagggataaaaaagtttttactttatttcaaaggttttttttggcattaaaatgcctggcgaagggtaatattgatgcttttaatataaaaaaatttaatttgttcagtaaaaacctactattaccttcgttagctggaataatcaaaaaaaaatttgaggctgatttttttatagcgcattttgggcctagtggtgttttagcaaattcgttaagaaatattggctgcttagacggtaaacttattacagtttttcatggcaatgatctttctgccaaagaacttttatttaaatatcaggaagcataccaaactttatttttagaaggggactattttttacccataagcaaattgtggaaaaacaaactaattgaactaggctgctcatcagataaaatttcggtaattcgcatgggtattaaagtagacgagtttccttttgaaaggaggagttttgataacgccaaactaaaaatagtctcagtctgcaggctaactgaaaaaaaaggaatacagtattcaatacttgcatgtaaaattcttagagaccaaggttttagctttgcctataagattgttggatatggtgagttaactaagcctctacaaaggcttatcgaaaacaatggactcgaaaatcatgtcagtatagttggatttcagcctcagattgaagtgaaaaaaatattaaaagaaagcaatgtatttctattaccttctgttactgctgaggatggagatatggaggggatccctgtagcattaatggaagcaatggcatcaggattacctgttgtatctacttatcatagtggtattccagaattaatctcagatggtaaaactggatggttgtgtcctgaaaaagatgctgaatgtattgcatctgctcttagcaaaataattagtagtggttataatgtttacaatattgttaatgcggctcgtatacaaattgaagacaattttaaccaaaataatgaatatacaaaaatggcctccttattggagagtttaagatga

SEQ ID NO: 223793 - DNA, 1326 bp, Klebsiella pneumoniae
atgagtggaattaaggggcaagctagttggctactattttcgaatggtttttctgcaatattacaaattatacaggtaagtattctcgctcacaaacttgcacttggcgaattgggtttattagcaattgtaaatacagtgttaatgatagccatgattcttcaagatatgggtatgagtagttatatcgtccataagcagagtctttcgagaaggcagcaaagtactattttttggataaatctttcgcttagtctaatagcaggattaatcgtttttgctttttcttggccattagccattttctatcagatgagccagttagaacctttgattatgctggcaagcatcaattttctatttttgggggctttatctcagtaccaagctcattatataaaagcaaaacgaatgatcttgctttccaagattgaaatgactgccaagcttatttcttttgcgtgcgttgtaggcatgctttacctgagtaatttaagaacttccgcagttattattggcttgattataaatgctcttatacggttgctattaatgtctactttaggtgagcgttcatggaccccttcacttgctttcgagttaagtatttttagagatgtgtttaaatatggtatttatcaactcgggtctcaaatcataaatcaacttcgtactcagttagatattattattataggcaaggttcttggaggagattcattaggtttatattctcttgcaaaagatttaattatgcaacctttaaagttggttagtccagttattaatcgccttgctttgccaagattcgctgaggtgcaaaatgatagcgctaatttaggcaatgcttttttaaagggaacatgtgtaattgcttcatttagtgccgttatgtttgtttgtatttatattttttcacctgcaataattacaatgctctatggttctaatcgtttatccattgtggaaatattaccattcatgattctttttggaatgttaaggccaatggggggattaactggagctattgcacaagcaaatggtaaaacccatgttgagttttattggaatattgtcgctggtattactgttctttgcatttcttttactatttttttaaactcgacactttggtatgtatctttggtgctatcactgtctcaagcactgatcacaattcttgtttttccttttttcattaaaccgataattaatattgattttatttcctacgctaaacaatggttgccagtgacaatcgcgtttatatcttctatattcttaatacataaatttagtttcttcataatgccgttttggtaa

SEQ ID NO: 223794 - DNA, 558 bp, Klebsiella pneumoniae
atgttaaaaaacagtatattgaaggattactggcgtatgtacggagggtggcgagccctctgtaaaagctgctatttccgaatgtctgttgttatgactatcattctttatcctacatggtcacatgtagggtggtggaatgatattttatccctaatgccaaaccttttaggattttctctaggtgggtttgcaatgtggattgcaataggtgatgataattttagagaattaatttctggttctgaagagaataaaacatcgccttatatggaagtcaatgcagcatttgtacacttcattttccttcaaatattatctatattaattggcttaatagctaaatcttattgtgttgttttacttgggaagttctttttccttaaacaatatgaattaatctatatcatttgtcttaaagtggtcagtgggcttgggtattttatctttgtatatgctattttttctgctttagctgcggtatttgcaatatttagggtgtcaaagtggtatgatcaatactctggacatataagaaaaagtaaaaagagaaactaa

SEQ ID NO: 223795 - DNA, 894 bp, Klebsiella pneumoniae
atggctagagcaaaaaaactttcatatggcgctattaatatcacaatccatccccatagccctcaaaaatatgttgaattgtttagagacgcaagaaggcttttcttaaacgtgaacgtccacggcgatcagtttgcggtattgcagcatttcaacccaatacatagagaacaacttataacggagccttatgaaggagaggttgtaaagtatacggatatcaataagaacggtgaatggtatagtattagtcgaaaagagttggctacagatgaagaaaaagagcaaattgtcattcctgatgatatgaagcctaatgtttctcgtttttcatttatatttttacccaatgttcacttgatggtttacgaaaatcagcatgagcaaaagagtattacccctcggcaaatggagaagtttttaaaaactcttttttctaatgaaaagattaaagaaaaatatggagttgtaaatgttacgagtttaacagagcctgatgctgtagagcgaatgttatcgcttaaaggtattacactgttatctatggtaactcgcaggcctaatccagatgatttggttagtgctgaacatgaagttcaagagcgatttaaagctatcggtgttatcgaagaagataaaacatataaagctgaaagaggtgagcaaattaaacctgataaaaaactaaagcgtgatgctctgattgcagcacgaaatggtcaggttgaaattaaacgaaaaaatgagagcggccacgtagaaagattgtctactactgataaaccgttacaacgtagtgcgagttatgatccagttgtaacactacctattgcactcttgctacaggaagcttacgctcttacaaaagagtttataaataaattgagggaataa

SEQ ID NO: 223796 - DNA, 753 bp, Klebsiella pneumoniae
atgaaggcgctggcaaagcagtgtggtggtagtcataaaacggtgaacgatcgtatccatattgtgcaacgttttgatcataacttacgggcgctgaacgtccagatccagaggatggcgcagattaaggttcgccacgttgaaagctacattcatgaaagactggcgctggggatcggtaaacgcacgctgcaaaatgaaatggcctcgttacgtgctgttctgcaacaagccgggcgtaagcaggtggcagagcatgagcggctgactaataaatcgttggggttgtctggtgcatcgcgcaacggtacgcgacaggctattacgccggatcattaccgccatgtactggaaacggcccgtacaaaaaatccaggtctggcagcagcgctggagctggcacggctgatggggctgcgttcgcaggaggcggtgcagagtgtacagtcgctgaaaacgtggaaacgggcggttgagcgtggcgatacgcgcttaaccgtggttttcggcaccaaaggcgggcggcctcgtgaaacggtgattctggatactggcgcagtcaaaaaagcgctggataacgcgttagctattgcagaaagccgtaatgatcggttgatcgacaagccggatctgaaaagcgcgatggactactggcacaaccaggcggcgcgtattggtctggctggcatatattctccgcattcactgcgctatgcgtgggcgcaggatgccattcgtcactatctgatgtag

SEQ ID NO: 223797 - DNA, 228 bp, Klebsiella pneumoniae
atgaataaagatgactggcacccggcagacatcatcgccgggttacggaagaaaggaacgtctctggcagcggtatcgcgtagggccggactggcctcttccacgctgaccaatgcccttaaccgccactggcctaaaggtgaaaggctgatcgccgaagcgttaggcgttgcgcccgaacagatctggccgtcccgttaccgtaagccggaatatcgccagagctaa

SEQ ID NO: 223798 - DNA, 261 bp, Klebsiella pneumoniae
atgatccccaaacgcttaaaagaagcccggctgcgggcaaaactcacacaggaaaagctgggggtactggccggaatagaagaggcaacggcttactcccgcctctcacactatgagaacggcactcataagcctacttttgatcttgtttgcgaatttgccagagtgctcaacgtaccggagtgctatttctatacggtcgatgatgattttgccgaagcggtgctggatctttatgttcggtgggaaagtaaatcctga

SEQ ID NO: 223799 - DNA, 1263 bp, Klebsiella pneumoniae
atggcattaaccgataccgctatccgcaagatcaaacccaccgataaatccttcaagattaccgacagttcaggactctacctgctgatcaaacccaacggctcaaagctctggtatatgaagtaccgcatcgatggcaaagagaaaaagctagcctttggcccctacccggatgtttccctgttcaaagcgcgtcagctacgcgatgccgcacgcgccagagtgcgtgaaggggcagatcctgccgctgataagaagctcgcgcagcagaagaagaaaaacggtcataccttccgccagatcgccatgaactggcacgccgatcaccggcgctggtctgcgcattatgccgcgactatccagcgcaggctggaaatgtatgttttcccggatatcggggacagatacatcgatcagatcgtcacggaagatctgctgtttactctgcgtaaggtggagaacaaaggctttctggagatcaccgcgcggctgaaaaactacgtcacagaaatcatgcgctatgcggtaaaaaagcagctaatcaaatcaaacccggcgctggatctggacggtgagtttacgccgccggaaacacagcattacccggccctgctccttgagaaactgccagaactgttatcccggacagacagctaccccggcaggctgctgacaaggtacgcactcaaactgtcgctgctgttttttgtgcgctccagtgaactgcgctttgcccgctggagtgaaatcgactggcagcagaagctatggataatcccggaagaacgggagcagatcgaaaacgtgcgcttctctcatcgcggcacgaaaatgaaaactcagcacatcgttccgctgtccgatcaggctattgctgtcttaaagcaaattgaggcgctctccggtcatctggcgtttattttccccggcgaatacgatcaggacaaatgcatgagcgacaatacgattaataaagcattgcgcatgatgggctacgacaccagaaaagaaatctgcggccacggcttccgggcgatggcatgtagtgcgctgagtgagtcgggattgtggagcaaagacgccattgaaaaacaaatgagccatcaggaaagaaacagcgttcgtgcggcctatatccataaggctgaatatctggaggagcggatcgcgatgatgcagtggtgggcggattatcttgatgcgaatatcgacaggtatatttccccttaccagtacgccgcgcctctgaaaaacgtatcgtaa

SEQ ID NO: 223800 - DNA, 789 bp, Klebsiella pneumoniae
gtggataaccagatatctgtaccgcctgcgctaaccggaaaccacgcttttttctttgacctcgacggtactcttgccgatatccagccgcaccccgatcaggtggtgatacccgacatcacgctgcaggcgctcaacgcgctggcccggcagcagggcggggcggtggcattgatttcagggcgctcaatggctgaacttgacgcgctgacccatccatggcggctaccgctggccggcgttcacggggccgagcgccgtgatatcaatggcaaaacctatattgtctctctgccgtcggccctgcgcgatgaaatcgcggctgagctgagctcggcgctgcaggcgctccccgggtgtgagctggagagtaaagagatggccttcgcgctgcactaccgtcaggccccgcagcagcagagcgcggtgctggagctggcgcagcgcatagttcagcgctacccgctgctggcgctgcagcttggcaaatgcgtggtggagattaaaccccgcggtgtcaacaaaggggaggcgatcactgccttcatgcaggaagcgccgtttgccggtcgcgaaccggtttttgtcggcgatgatttgaccgacgaggcgggattcagcgtggtgaatcaactgcagggaatgtcgataaaagttggcgctggggaaactcaggcgcactggcggttggcggatgccgccgccgtaaggacgtggttgcaacatctggcgtatgacgcgcaaaccgaaaggagggatgaccatgagtcgtttagtcgtagtctctaa

SEQ ID NO: 223801 - DNA, 1734 bp, Klebsiella pneumoniae
gtgaatattcaggctcttctctcagaaaaagtcagccaggccctgatcgcggcaggcgcgcctgccgattgcgaacctcaggtccgccagtcagcaaaagttcagttcggtgactatcaggccaacggcgtgatggctgtcgccaaaaaactgggcatggcgccgcgacaacttgcagagcaggtactgtctcatcttgacctcaacggcattgccagcaaggttgaaatcgccgggccgggctttatcaatattttccttgaccccgcgttcctggcggacaacgtcaaccgcgcgctgcagtccgaacgcctgggcgtcgccacgccgcaggtacagaccatcgtcgtcgactactcggcgccgaacgtggcgaaagagatgcacgtcggccatctgcgttcgaccatcattggcgatgcctcggtccgtaccctggagtttcttggccataaggtgatccgcgccaaccacgtcggcgactggggcacccagttcggcatgctgatcgcgtatctggaaaaacagcagcaggaaaacgccggtgagatggccctggccgacctcgaaggtttctatcgcgaagcgaaaaaacactacgacgaagacgaagccttcgccgagcgtgcgcgcagctacgtggttaagctgcagggcggcgatgagtacttcctgcagatgtggcgtaagctggtcgacatcaccatgtcgcagaaccagatcacctacgatcgcctgaatgtgacgctgacccgcgatgacgtgatgggcgaaagcctgtacaacccgatgctgccgggaatcgtcgccgatctgaaagccaaaggtctggccgttgagagcgaaggcgccaccgtggtgttccttgatgagtataaaaacaaggaaggcgaaccgatgggcgtcatcatccagaaaaaggatggcggctacctttacaccactaccgatatcgcctgcgcaaaataccgctacgagaatctgcatgcggatcgcgtgctttactacatcgactctcgccagcaccagcacctgatgcaggcgtggactatcgtacgtaaagccggctacgtgccggagtccgtaccgctggagcaccacatgttcggcatgatgctcggcaaggacggcaaaccgttcaaaacccgcgccggcggtaccgtgaagctcgccgacctgctggacgaagcgctggaacgcgcccgccgtctggtggcggagaaaaacccggatatgcccgccgatgagctggaaaaactggcgaatgcggtcggaattggcgcggtgaaatacgccgacctgtctaaaaaccgcaccaccgactatatctttgactgggacaacatgctggcctttgagggcaataccgcgccttatatgcagtatgcctatacccgcgtgctctccgtgttccgcaaagcggatattgatgaaagcgcgctagtggcggcgccggtggtcatcaccgaagaccgcgaagcccagttggccgcgcgcctgctgcagtttgaagagaccctctccgtggtcgctcgcgaagggacgccgcacgtgatgtgcgcctacctctacgatctggcgggcctgttctccggtttctacgagcactgcccgatcctcagcgcggagagcgaagcgacccgcaacagccgcctgaagctggcgctgctgacggcgaaaaccctcaagctgggtcttgataccctcggtatcgaaaccgtcgagcgtatgtaa

SEQ ID NO: 223802 - DNA, 138 bp, Klebsiella pneumoniae
atgcttacggcaaagcacaaaggcggaaatgccaacctcggcctcgccaagcatacagatgatctgttcgtcgaaaaaactccatggcgatatcctaacgttgctaatgaaaacattactaacatcatggtgtgttaa

SEQ ID NO: 223803 - DNA, 1530 bp, Klebsiella pneumoniae
atggaacgcagagagttcgcaaagcgtctagctataatggtcggtgttggagcggcaggtgctgtttcagctagagagactacggcagaaaaaagaagccaagttcagcaactttattcagcgcaacaactacatgatactgtcaatgttcttaggtttggtacacaagaaaaggccagcgatgcattttataatgccttcatatatttgaataaacgtggaggaggaaacctgctagttccaaatgggaactatgtcttcgacaagccggttaaaacgagaataggctgtaaaatttcaatatatacgtcttctaactcgataatgacaatgaaaactgacggagatatgttcgatatcaccgggtcagaaaatgcggctatccgcttttttggtaatggtgaatttatctatgatggaccggcaaccaaggatgctgcatgcataagatttgtatcgctgacaaatggaaaaaaatatgcgacaagttcgtttgaatgcaatggacgcattaggattagaaagggagacaatgagtgggcctgtggcattcatcttactgatgttcgtgatgctgtgttggttaacattcagttcgacggtctaaaccttaaggggaagccaagctcgcaaatcggtgtctttgctcgagcaaaaagtgctgcatcagtctcatgggttatcagcgatctgcagtttaacgatttgaagaccggttttcatatcgaatcggattccgtccctggaattgaagggctgaaattctttaactgtgatatggccggcgtggaaaacggaattgttttcaacaataactcagattatcacccaccccagattgaacttattggttgtcatattaatggtcacaatacgctaatatcgattaagaaggctatcagtattcatattgttgggggattgtactatcgtaacggcatgggcggggctttctttgaattcgatggcgttcaggatgtatccattgttggacctagcttctctgtaactggaaagaaaactgatatccctgggattgtaatagatggtaacaacgaagaatcaggtttgttcaggatttcagattgtcacttctggtcgcatggaagaaaaagccctttcattgagcttaacggtaatatctctggcgtaactctttctaattccaccaaggactcatctggaaaatggattgaaaccagcggaatgaaaagtcctaaatcactcgtcaacgtttgtagtgacacgataaagctttcccaagcagataagggtgacacttgggggattagtctaaaaaataataatggagttattgatctgtcatcagttcctcccggaattgtattcattgataacggtgaaataaagaaaataaatggcgggagaattggtagtgaatacacattggtaagcgaatctattataactctagtaaaaggtgttaatgtaaaaaatggctcggtaattcaacgccaagccaaagttgtttgcctcattagtatgggcggctattatatcgcaaaatga

SEQ ID NO: 223804 - DNA, 1227 bp, Klebsiella pneumoniae
atgaaaaagatatcaattgatagtatccatgatgtggttcttaaaacatttatatctatctgtgttgtattacctacaggtagtgtttttgatataaatataaagtttattttcctctttcttgtcctgggcttggctgtatttgccagaaaagggaaagggattgtaaaactaatgattggaatgatgcctgctgtttttatcgtcttagtatttttaattgtaacgatgctcaatgtcagatatataccagagactatcgctcagtcaaaggatattttggttttttttcttatggcttcaatatcatattcattggtagataaagagcggcgttatgaggtgataaccaaaacaatcattaactgcctagttgttatcgggattataaagtttcttatttttgcatttgcagctttaacaggtggtagcgttgccggcgttgtatctatgatttccaaaatattcaacacatcattgatgacgatggagtctgatgatgtgtcaatcagccgaataaattttatgtccgactacatactgccaatggctatctttattaaaaccaagcagtatttaagaaagggagcccctcgatttagttcaattgttattataatccttatgtactccattattattagtttgtcacgcttcttatgggcagctggcttgcttggcttggcaatgggcatcgcatcagacattaacaaaaagaaaagccttctcataattttgttcgcagtaataatgatcgccatcatgctatcacttccttcagttcaggaagttattgaattcagaatggcatctaaaggtgttgagcgctctgatgatttgcgaactcttcagtcaaatgctatttaccgagagtttgagaaagcacctttattaggtaatgggattggttattatgtaccatctttattacgaagcacactgtcaaggtactcatatgaacttcagatacaggcgttgtatatgcaaatgggtattattggtgcatcgacattattgttgctaattatagggactttactaactcaaattcgcggatttggaatcaagaatacgttattctactgtgtacttatatgtctgtggatggccggtgggttctttaacccggtaatattatcatcaacaggcggcgtcgcatttatgttactattttgcattcccgatgcaattaacaggatgaacaataaggggggaacactcccttaa

SEQ ID NO: 223805 - DNA, 1911 bp, Klebsiella pneumoniae
gtgatcgacgattttgcagcagacggccagctagccaaagccataccgggatttaaaccgcgcgagccgcagcgccagatggcggtggcggtcagcgaagcgattgaggcctcccggccgctggtggtggaagcggggaccggaaccggtaaaacctacgcttacctggcgccagcgctgcgggcgaaaaaaaaggtgattatctccacagggtcgaaagcgctgcaggatcagctctacagccgcgatctgcccaccgtcgccaaagcgctcaaattcaccggcaaactggcgctgctcaaagggcgctccaactacctgtgcctcgaacgcctggaacagcaggcgctggcgggcggcgatctgccggtgcaaaccctcagcgacgtgatcctcctgcgctcctggtcgaaccaaactcaggatggcgatatcagcacctgcgccagcgtggcggaagattcccaggcctggccgctggtcaccagtaccaacgataactgcctcggcagcgactgcccgctgtataaagattgcttcgtggtgaaggcgcgtaaaaaagcgatggacgccgacgtagtggtcgtcaaccatcacctgttccttgccgatatggtggtcaaagagagcggctttgccgaactgatccccgaggcggaggtgatgatcttcgacgaagcccatcagctgccggatatcgccagccagtactttggccagtcgctctccagccgccagctgctggatctggcgaaagacatcaccattgcctatcgcaccgaactgaaagacactcaacagctgcaaaaatgcgccgaccgcctggcgcaaagcgcccaggatttccgcctgcagctgggggaccctggctaccgtggcaacctgcgcgaactgctggcggacagccacattcagcgggcgctgctgctgctcgatgatgcgcttgaactgtgttacgacgtcgccaaactctcgctggggcgctcggcgctgctcgatgccgcctttgagcgcgccaccctttatcgcgggcgcctgaagcggctgaaagagatcaatcagccgggctacagttactggtatgagtgcacctcgcgccactttacccttgcgctgacgccgttgaccgtggccgagaagtttaaagaggtgatggcgcagaagtcggggagctggatctttacctcggcgacactgtcggtaaacgacgatctgcaccatttcaccgcccggctggggatcgacgaggcgcagacactgctgttgccgagcccctttgactatcagcatcaggcgttgctctgcgtgccgcgtaacctaccgctgccgaaccagcccggcgcggcgcgccatctggcggcgatgctcaagccgctgatcgaggctaacgacggtcgctgctttatgctgtgcacttcgcacgctatgatgcgcgatctggcggagcagttccgcgccaccatgactttgccggtgctgctgcagggcgagaccagtaaaggccagcttctgcagcagttcgtcagcgccggcaatgccctgctggtggccaccagcagcttctgggaaggggtcgacgtgcgcggcgacgcgctgtcgctggtgatcattgataagctgccgtttacctcgccggacgatccgttgctgaaagcgcggatggaagattgccggctgcgcggcggcgatccgttcgatgaagtgcagctcccggacgcggtgatcacccttaagcagggggtgggccgcctgatccgcgatatcgacgatcgcggggtgctggtgatctgcgacaaccggctggtgatgcgcccctacggcgcggtctttctggccagtctgccgccggcgccgcgaacccgcgatatccgccgggcggtgcgctttctcgccgtgccgccggcaaggtaa

SEQ ID NO: 223806 - DNA, 270 bp, Klebsiella pneumoniae
atggctttactcgacttttttctctcgcgaaaaaagaacacggctaatattgcgaaagaacgcctgcaaatcatcgtcgccgagcgccgccgcggggacgcggagccgcattacctgccgcagttgcgcaaagatatcctggaagtgatctgtaaatacgtgcagatcgacccggagatggtcagcgtgcaactggagcagcgggacggtgatatttccattcttgagctgaacgtgaccctacccgaatcggaagagtcgaaaccctga

SEQ ID NO: 223807 - DNA, 330 bp, Klebsiella pneumoniae
atggaaaggaccacccattccccacatgacgccgtgtttaaacacctactgtcgcatcgggcgacggcgcgggattttctggacattcaccttcctgaacatttgcgagaattatgcaatctgcaaacgctgcagttggagtccggaagttttatcgatgaagacctgcgcgccagccattccgatattctttactcgctgcaaacccaggcgggggacggatatatctatctgcttatcgaacatcaaagctctgcggaccgtcatatggcatttcgcctgatgcgttatgcgttatgcgatagcagcgatgcagcgccatctggataa

SEQ ID NO: 223808 - DNA, 432 bp, Klebsiella pneumoniae
atgcagcaccgacgggtcgcgatgcttgagttgctgcaaaagcatatccggcagcgcgatatgatggaactgcaggagcaactagccagcctgttggcgctgggatacactagccgcagacagctcaggacgctgcttcactatttattgcaggcaggaaatgccgccgatccggtcgcctttttacgtaatcttgcgcaaaatatccccagacggctgcataaggagacgctaatgaacattgcccagtttctggaacaacgcggccatcagcagggccttgagcagggcctgcagcaaggtcttgaacagggagaacaattggctgcgcaacgtattgcccaggcgatgctggaaaacgggcttgatctggcgcaggtggcgaagctgacggggcttgcgccggagcgcctggccctgctcgcccattaa

SEQ ID NO: 223809 - DNA, 912 bp, Klebsiella pneumoniae
atgagatactatatagcaataccaacatataacggtggtgaaatttggaaggcagcagtggacaatataaaaaaatatgctcctgcagatttgtttgtgcatattattgactccacaagcaaagatgatactgttctcgttgcagaaagggctggtttcgatgtagttaccattgaaggaagtaatttcaatcacggaggtacgagaaataaagccgttgaagaatatattgatcgctacgatgtggttatttttttgactcaagatgctatcccacaaccaaatttcattgagaaaataatatcagtatttgctgaccataggattgcttgtgcctatggtcgacagttgccgcatacaaatgctaacccgctggcaagacatgccagaagttttagctatccagagaagggacatatttgcggcatagaaaacgtttcagaaatggggctgaaaactgtttttatgtcaaattctttttctgcatatcgtctatcaatatttaaagaactgggaggattcccttcgaatactattctgtgtgaagatatgtttttcacggctaaagccgtattagctggttataaggtagcgtatgttgctgaagctgcggtccagcattcacataattatactcctttagaagaattcaagcgctattttgatattggtgtatttcacaaagatgagccctggattcgtcaacatatgggaggtgcaggtggtgaaggaaaaaaattcataatttctgaaattatttttttgttaaaaaaagcacctctctggctacctgtcgcatgcgttaataattttatgaaaatagtagggtacaagctagggcaacaatatgaaaagataccaagaaaaatgattaaatcttttagtatgcataagcgttattgggatgtttaa

SEQ ID NO: 223810 - DNA, 393 bp, Klebsiella pneumoniae
atgttgaagaaattgtgtttattaacccttatctctgccttgggcgcgggctgcgcaccgttacagccctccggctgtcataaaacgaccgcgacgggaagctgtggctctggccgctgggacgatcgggatgagtggggcgcccaggcgcgggccatcagggccgcgatactagcccagatggatacccccgagcgctggcagggtaagaaatgcaggttgcatttagcctttgcgcaggatggcacggttttacatgtctcgaccagcaacggtaacaaagcctattgtgacgagttagccgctgctgccaggaaggccacgttcccgccttttaacaaccccgatgtcttccgggattttcagcagtccggctttgatatgcagggttaa

SEQ ID NO: 223811 - DNA, 1143 bp, Klebsiella pneumoniae
atgattactgttaagaaatgtgctttttgcgataagtctctctcaggaaaaaataggactaaagagcacgttattccgaatgcattaggtggcagaaagaaaacagtagagtttatctgtaacacctgtaataacaagctaggtgaaaaatgggatgcggaactggctagacaactaaattggttttcattggctgtgggtatcagtagagagagaggtaagcctcctaagcagatagtgcaaacagttaaaggtgagaaatattggcttctgaatgatggaactctcacgatagagaagtctgcgtatctcgaagaagtagaaggcgatgctgtaaaaattagcctaatagcaaaaaatattgatgaagctaaagaacggctcaagggcatctcacgaaaatatccgaaactggatgttgaaagagctttaaaagagcttgatgtaaccactgactatctagattcacctcttcatttcagtttgtcccttggcggccctgatgctggccgttctttggttaaaacagcatttgcatttgcgtcagtatgcggtgttgaaaacaatcattgcgataaagctctacaatacttgcttaatgaagatctcgaaactattccttttggtttcgcctatctatccgacttaatccagggacgacctgaggataaacttttccattgtgtatcgctacatggagatccaaaaaccaaattgctttggtcttacattgaatattttggtttctttcgagtagtggttttgttgagtgagtgctaccatgggggtattataaataaaatgtactcaattaaccccttagatggcacccaagttgatgtaaaagtaaattcagaagtcaatccgcaagagttttcattgattttggaggggggcggttttaatcataaagtttatgaggcagcaatacattatgcactaactatcatagtggaaagagatagaagtcgctctttggaaaaagcagttgaaacaggatttgaacatgcatccaaacaactcggaataaatgaaggcgagattataccaaaagaagttgcggctgaatttacagcattggtaatgcaaaaaattaatccatatattgaacacttggttagaggcggtagaagaaatcaatag

SEQ ID NO: 223812 - DNA, 621 bp, Klebsiella pneumoniae
atgcgcgattattcactacttattggaaacggcataaataatattacaaatggaaattcttggcttgatgttttaaataacctagggacaacatatgggataaaaattgacactcatgaaaaaccatttccactagcctatgaggagatttattttaatatttcaaataagcaaaaaaatggattttcagaaaataaaataaaagattccatcgcatcaaagataaatacaataaaaccaaatgaaatccatcaaagaataattgagttagaatgcaataatattttaacaacaaactatgatttagcttttgaatattgtttagatgatagcatcaagcctaatgatttaaaaaatgaaggtgtaataaaagaaagtaaatacaatattttcaggcattatcaggtgaaaaacaaaaacatatggcatatacatggagcagtgaataacccaaactcaataattcttggctatgaacattacagtggttatttgcaaagtatgcgggggtatacaactaccggaagtcagtattccaataaatcgttcaacgagccgcttacaaaacggttgcaagcaaataatattggtaatagctggatcgatgattttttttactaa

SEQ ID NO: 223813 - DNA, 1365 bp, Klebsiella pneumoniae
atgtcattatccgtgaataggtacctaaaagaagttgaagaaataaaaaataaagccaccgccctgtccaataaagaattcagtgacactattgatgaaaatggccatcaatacgttgatctggtaatggagggtggcggcgtcctcggattagcccttgtaggttacatatatattttagagcaagcagggataagattcattggtatcgcaggcacgtcagccggttcaattgccgccttgttattatctgccatagatgtacctgaaaaagaaaaaagcgaacgcctaatagatatgatcgccaatatgccaataaatacatttattgatgggaaaaaggacggagattatgacccaaagaaatttatggatactgccacaggcttaatgaactctaaaaacaagtcaggatttaaatattttagtgcatttttaaggtttcttacgacaacggacaacttaaaaataatgcaaggacttaatagaggcgatgaatttgagtcctggcttaaaaaacagctatcatcttttaatatttatacagtcaacgatcttagaaaaagaatggcgacgactccatacggatggaaacttagaagcaccagcattgataaaccatcccaacttgaaggtaaacaatcccttgatgaactggatgtaaatcatgactatttatgcctgataacagcagatttagccaccgaatataaagttgaacttcctgtcatggcagaactatactgggaaaaaacgaacgatgtaaatcccgcggtgttctgccgctgctctatgtctatcccttttgtttttcagccctacacggtaaaaatacctcatatggataataatctacaattgaaatggcaaaaatataccggcattagttttcaaagcagattagcgactcgatttccgccacctatcgcttgttttgttgatggcggcatcatgtcaaactttccgattgatgtttttcacaaccccacaaaaattccagcaagacccacatttggtgtcaaactgcaacttgacgatcacagtcatgaaattaatagcacccttgatatatttgctcaatcgttcaacaccgccagacatgccatgaattacgatttcattaaaaaaaaccctgattacaataagctagtatcattcatagacactggagacattggctggttagacttcagtatgtgcgatgccaacaaacttaaattgtttagacttggcgcagaaaccgcttatcaatttcttattaattttgattggcataattacaaaaaaatcaggcgagatattacttccgcttatcagacaagccttccccttacaaaattaaatagatacttcaagaacaaataa

SEQ ID NO: 223814 - DNA, 1503 bp, Klebsiella pneumoniae
atggcaatcaagaacagccttacaaaacttatatgtatttctgcacttctactagttaatgcttatgctatttctgcaccgactctttcgccggaggatattgatgcaattgttcggaagttaaaggaagagttatcgaacgacgataagttaaaattcaaagagaatgacaacaaaaaattaattgcgaataaaataacgacaggtgaaccattatccgcctcgacgaatgaggcaggtacatttaataatatgtcggatagtgaattccacgatcttgcgttaaagattaagaaggaaatagggtttaattattccggttattttcgtgcaggaatggcaacaacaaccaatggtggtccgaaagactatgccattggtagtcttggacgatatggtaatgaaaacacggggtggtttgatctcacctttacacagcgagtgtttaaagatcaaactagagaggctgaagcaatcgttactctggacggtaatgttagccagtcaaattccagtggatggttcgatacaccctctgagaagggcagttatctacaattttcagatatgtatctaaaaaccacgggttttataccaccaattcctgatgcaatattgtgggttggtaagcataaaattgctaaacgagaactccagatgcttgactggaaatatcataatgcagtaaccgcaggcggtgtaggcttagaaaatatcacattgcctgttggtagtttggatattgcattacaacgtcaggataaggatgctgctgatgaaacagtcaacacgaatttcattgattttcgttataataaaatacctgtatctcataataagacattggaaatagatggtaaatatcatatggcaaataaaacagatagccagaatgatatcgaatttaaagatgctgcaatgggaactatcactttaaccacacaacatgatgatggtggtttcaatgaatttgggtttcaacttggtaataattcgattgctagtagcatggctaaaataaatgactcagaaccgggctatttgtatataccaggcagtgccagtggctatacatggcgctttatcacacaaggggaaaattatttatcccccaatataataatggccagcacagtagttgctgggatggctaaaaatattcataccattgaagataaacatccacactctgactcggaatttttgcgtgcagtggttcggccagcctggatttgggatcagtataatcaaacaggaatagagttggcttattttaatcaaagaaatactaatatcgacggaactcttcgagaatcaggctataaagcaacagtttatcatgcacttaaagttgcaaatagcatgttaaaatcacgcccggaaattcgcttctataccacctatatggatgcaattcataacgaaattactaatttcagtttcaatgacgataaaagccgtcagttaagctttggcgttcaggcagaattgtggtggagatga

SEQ ID NO: 223815 - DNA, 1404 bp, Klebsiella pneumoniae
atgctatacaaaaatcttaaagtttttccggatgaatttttatggggagcatcgacttcagctttccaggttgaaggagggtggaattgcgatggcaaaggtccttcggtccaggatgcccttggtgcccggcatgctgacattaccgattttactgtagcgagcgatcattatcatcgctataaagaagacgttcgtttatttgctcaaatgggattaaaaagttatcgtttttcagtttcatggtcgagagtattgcctcaggggcaaggtgaaataaacgagaaaggggttgatttctataataatttaattgatgagctgttgcgttacaatatagagcctatattgactctgtatcactttgacttgccattgaaacttgaagagcaaggtggatggagttcaagaaaaaccattgatgcatttatagaatacgcgagattgatatttgatcgttttggtgaccgggtaaaatattttttaactataaacgaacaaaacgtaatgattttacacggtaatgccattggaaaaaaacataacagcaaaaaacacgcttaccaggaagcacaccatatgtttgtagcacaggcagtagtgatgaaactgtgccacgaacgtgtgcctgagggtaagattggaccggcaccaaatattatatcggtatacccagcgtcctgccatccagaggatattattgcagcagacaactggatggcaattcgttgttggctttatcttgatatggcagtttatggccaatataacagcctcgcctggtcatatttatgtgatcgaggttatcagcctgatgtcctggagggagatgatgaaatactgaagaatgctaaccctgatttcatttctattaattattatgccacaatgacggtcagtgcgagtcgtaatgatggtcatgatattaccttccgcgaaggtgatcagcagatcacctatggtgaggaaggtatttatcgggcagcagttaacccttatctcgagaaaacagattataactggctggtcgaccctataggttttcgcacgactttaagagccgtatgggataaatatcgattacccatcatgatctctgagaatgggttaggtcaacatgattgtcttgtaaatggtaaaattgatgatcaataccgcattgattatttacaaaagcatattgaacaaatgcagcttgcaataaccgatggtgtagaaattttcgcttattgtccctgggccgctatagacttaatcagcacccatcaaggctatggcaagcggtatggatttatatatgttgatcgtgatgaatttgatcttaaagagctcgccagaatcccgaaaaaaagcttctggtggtataaagatgtgattagcaagaatggcttgtccaggccctga

SEQ ID NO: 223816 - DNA, 1884 bp, Klebsiella pneumoniae
atgagcggtaaataccataatctgataacctctataatttctcatattggcgggattgggaatgtaaaagatttaacccattgccaaactcggttgagatttgttttggttgataataatattgacattgctaaattgaaatcccttgaaggggtaatcaatgtcattatgagtggaggtcagtgccaggtggttgtcggcactcatgttaaggatgtttttgatgcatttaatgacgcgtacccagcacgcagctccagcagttctaatatatccacatcgaagaatagaaaaataagtttaagttcagttatggactttatctctggaacattcaaccctctcatacccgctatttccggggcagggatggtaaaagcattgctggctttacttgtcgtgtttaaccttattggtaaggaagagaagacctatgtagttataaactttatgtctgacgctgttttttactttttgccaattttacttgcctataatgcggcatcaaaattaaagtgcaatccaatacttgccgcagtgcttggtggtattttacttcatcctcaatttgtccagttacgattgacaggcgatccaatagagatttttgggttgcctgttaggctcgtaaactatggttcctctgttgttccaattttactcattgtttggctacagtcatttgttgaacgttttttgaatacaatagtgcctaatgccatcaagattatctttgtccctatgttgactctgatgtttgtcggtattatagggttaacgctgcttggtccactgggagggtatattggagattatattgcattagcttttgtgggtttacaatctgtcggtagttggacagtggttttccttgtagcaacactttggccaatattagttatgtttggcattcattttagcattacgccactttctattgcacaacttacaacattaaaagtcgaaaatattattggtccaggtgcgatgatagctaatatcagtcaggccgtcgctgcgctggttgttggttttagaactcaggagaataccactcgtcaaatcgcacgttcttcaggaatcactgcactaatggggattacagagcctgcactctatggtgtaaatttaccaaaaaaatacccgttaatcgcttgtatgacaggagccgcttgcggtggtttatatgccgggattacagatgtgtatcgttatgccgtgggatcatcgggacttccagccctgcctttatatcttggcgagaacctgtggaacatctttaatattcttattgcattacttatttccgttatagtaacggctatccttacctatattcttagtctgaaatacgaaccggcttcagtgtgtaccggtaatgctgaagcacctgcagaatcgcacatttcagcagaaaaaaataatatagaagggataatgaatccaataaaagggaatgtaatcccattagaagaagtagaggatgaagttttctcttccggtgcccttggaaaaggattagccatcgttcctgttgaaggaaaggtattggcaccatttgacggtaccgttgtttcagttttcccgactttacatgctatctgtctggaatcaaataatggtgttgaattattgatccatgtaggtattgataccgtgtcattgaaaggggcgccctttaagtcttacattgaaaaaggacagaaggtgacttcaggacaactcatgattgaatttgatattggggcgattagcgcagccggtctttctctgcacacccctgttattattactaatcttgaagaaacttcagagcttgaatatacacaagaccaacacaaggtaattgacgccacgaaaaagataatgagcgtcaagttataa

SEQ ID NO: 223817 - DNA, 126 bp, Klebsiella pneumoniae
atgattatggacatactgaaatcgaccagtaacagtagtttatgtaaaagcgaaaaaaacaaacccgatgattatcaagaggttttgttgctgtgtcattacgattaccatgcctgtgaggcatag

SEQ ID NO: 223818 - DNA, 888 bp, Klebsiella pneumoniae
atggacctaaaaattctacgttacttcctgaccgtttcaaacactaacaatattaccaaggctgcggatttgctacacattacgcagccaacattaagtcgccagctaataatgcttgaacagagccttggtgtggagttgttcgaaaaaaatggcagggcaatgaccctcacaccagaaggtaaattattaaagagtcgcgccagagatattttggatcttgctgcactaacaataaaagaactaaccgaaaagaatgttttagtttctggtgaagttaccattggaatagtggagtcacagggtagcgaattacttttagacttaattaaacccttctctttatcttaccctaacgtcaggtttaacttctattctggcgtaacagaatatatcatcaaaaaaatggatgaaggagaggttgatatttgtgtgttattagacccggttgatacattaagttataacgtcataagattacccacatatgaagaatggggtgtgctgctacccgtcgacgatcctttagccaaaaaggaaaaagttgaaatgaaagatctgatccatcagccactgatgcttccagcgaggccttctgttattaatgaaatagaaaactggtttggccgctcgaaatatcatattaatatattaggaacctacaacagtcttgtcatacctattcaaagcgtcaggaaaggtatttgttacgtggtatgtattgatagcccacttgtacgtaatgtgaatggattaacttttcggcagtttaacccgataaggcgtacacaaagcctggttctatggaaaaaaggccgtatatttaataccgcaacagatttatttgttaaaacgatttcacgctatctgaaccaacctgaatactaa

SEQ ID NO: 223819 - DNA, 900 bp, Klebsiella pneumoniae
atgaataatgccctgtataaccagatacgcatctttcagagcattgcacgtgagggtaatatttcggcagccgcaagaaaactggaaattactcctccttccgtcagcaatgcgcttaagctgcttgaagagcatattggccatccgctttttgtgcgtacgacccgccgtattgatctgacggaaaccgggcagctgttgctggaacagaccgctgcggcggtggagtcgctggaaaattcgcttgaaagcattcgcgaccagaatcaggagccctctggtattgtgcgaatcacactctcgcgttttgcctatttgttaattcttaagcctgcaatggcgaaattctgtcagcaatatccgggcatacagctggaaatatcggtctatgacggtaccgtgaatatcatcgaagagcgttttgatctggggatccgttttggcgatattcttgaaggcggggtggtggcgcggccgttaatgaaaccctttcgtgaaggattatatgcatcctcagcttatatcagcgagcatggaatgcctgaggtgccggcagacctcagtcaacacaagctgattggctaccgttttatcactaacaaccgcatccttccgttgctcctgaacgaccacggagagcaactgacggttgagatgcccgggcagttaatcagtaacgatatcgacgttatggctgacgggatccgtaacgggctgggaattggacgcctgtttgaacccatctggcagttacagcccgacagggagcactttatccccgtgatggagtgctactggaaaacctacccgccagtttatctctattaccccaaaaacgcgggtaaaacgaaaagagtgaagaccctgattgattttctgctatccgctacgaggcgataa

SEQ ID NO: 223820 - DNA, 303 bp, Klebsiella pneumoniae
atgcgaattttatgtctggatatccccgcacctggagcatcgctggaaaaatatgctccacatcttaacgctgaagcgctgcacgcctgggggctgtataaatccggcttcatccgcgacatctacttccgtcaggacagacctggcgtcgctatttttcttgaatgtgactctgtcgatgaagcgatgaacgtcatggccgaattcccgctggcaaaagcaggcttattaagctttgagtgcattccgcttggctcctttattaactgggaaaatctttttgccgctgaattcaaaaagtaa

SEQ ID NO: 223821 - DNA, 690 bp, Klebsiella pneumoniae
atgaaacctgcagataaacccgtgctgtgtgtcgtctccagtcatccaattaaaggtgcatccggtgtaccgaccggttttttcctggctgagctgacgcatccgctgaaagtactggaagatgccggactaaaaacgatgatcgccagcattcgtgggggacagccgccggtggatggatttgacctaagtgaccctgtcaacgcctggtactggaacgaaaccgattttcagcagcgcctggccacaacgcctgcgttatccgagctgaacggtaccgattacagcgccgttttctttgcgggtggccatggaaccatgtgggatttccgtgatagccaagatgcccagcgtattatccgcgaagtgtatgaaaatgatgggattgtctcagccgtctgccacggacctgcggcactggttgacgcaaaactcagtagcggcgaatacctggtgaaaggcaaaaacgtggcggcctttaccaacaaggaagaggaagaagttcacaccacagatgtggttcccttcctgcttgagactgcactccgcgagcatggcgcgcttcatcatgaagctccgaactggtctgaaaacgtggttactgacggtcgccttatcacggggcagaatcccgcttcagcgcacggtgtcggtgtggcgctgttaaatgcgctccgccagacagcttaa

SEQ ID NO: 223822 - DNA, 948 bp, Klebsiella pneumoniae
atgaaaactcttcctcccgtcgcgctcggcacatggtcctggggcacaggctttgccggtggcgacaccgtcttcggcaatcatctttctgatactcagatggcagacgtgttcaccacggccatgagtaagggcctcaatctctgggataccgcagcagtatatggcatggggagttcagaggctgcgctgggaacgttagtccgtcaattcccccgcgaggatatgattttatccaccaaattcacgccgcagattgcggacgaacagtcagcgcagcctgtcagcaatatgcttgaggccagcctgggacgcctgggtgtggacgcgattgatttctactggatccataatcccctcgatgttgagaaatggacgccaggactgatcccacttttacaaagcggtaaggtaaaacgcgtaggtgtttccaaccacaatctggcacaaatcagacgcgccaacgaaatccttaacgcttccggttattccctcagtgcagtacagaatcactacagcctgctttatcgcgcctctgaagaggccgggatccttgattattgccgacaaaataacatcacgttctttgcttacatggtcctggagcaaggcgcgctcagtggtcgttatgattcaaatcatcccatgcctgccgggagtggccgggcagaaagttataacgcagtactgccgcagatagaaagattaaccgccgccatgaaaaaaatgggagctgaaaggaatgccagcgttgcacagatagccatcgcatgggctattgcgaaaggtacccttccactcatcggcgcgactaaagtccatcacgttctggacgccgccagtgcttcagatatccagttacgcgaggaggaaatcatcctgctggaacaactcgccacagagaccagagtggatacacgaggcgcctgggaaaaaccgatggtgtaa

SEQ ID NO: 223823 - DNA, 1035 bp, Klebsiella pneumoniae
atgaaaatcatttgcctcgaagaacattatctcgacagcgagttagggcgagcgtgtatgcctgttgcgcttgagcaggcgcctttccttggcgactgggggaaaaccgtcgctgatggtcataatcctgaccgaagccggccgcagatagaaaagaatgcgctgataaacgcgaaaggcgcagatttgggaagccgccgcctcagggatatggatgaggctggaattaccctgcagatcctttctgtgggcggattcccccagttggcacccaaggatgaagcggtaacattaaatacggcggcaaacgaccgccttgccggggcggtaagaaatcacccggatcgcttcgcggcatttgccacacttccctgggcacagccggaagaggctgaaaaagagcttgtccgcgcagttgaaaaactggggtttaaaggggcacttctcaatggccgaccctcttcatgctttctcgatcatcctgactatgactccctgctttcccgctttaataaactgaatgtgccactctaccttcatcccggattaccgtttaaaagcgtgcaacaggcctacttcacgggcttcagcgcagaggtcaacgccaggctctctatgtttggctggggctggcatcacgaagccgggatccatttgttacggctgatgttatcgggcgcatttgataaatatccccacctgcaggtaatcagtggccactggggggagatgctgcccttctggctgcagcgtcttgatgacagccttccgctggctgcaacgggtctgtcacgcacgctaacgagaaccttccaggaacacgtttatgttaccccgtcaggtatgctgacactgccgcacttccagtttatctacgagttaatgggggcagacaggatcctgttctccgtcgattatccctatcagaccctggacggtgtaaaaacatttatcgactgtctgccggtcaataaggctgaaaaagaggccatcgcgtttcgcaatgcagaacgtttactgggcatcacggcgtag

SEQ ID NO: 223824 - DNA, 573 bp, Klebsiella pneumoniae
atgaaaaatatccttgttgtttcaggtcatcctgagctgaaccattccgtcgccaatgccactatccttgatgaagtggctaccgcccttcccgatgctgaaattcgtcgtctggactggctctatccggacggcaaattcaatatcgctgcggagcaggaaagcctgctcagggccgatgtgattgtctggcagtttcctttttcctggtatgggctacccggggtaatgaaacaatggctggacgaggtctttgtccacggcttcgcgcatggctcaacggcgaaactgcgcggtaaaaagctgctcctctccttcactaccggggcgccacaggcgctctataccgctgacggtttctttggccatgccattgaagcgtatcttattccgttcgagaccacggcaaggctgtgcaatcttgagctgctggcgccggtttatacctgcggtatcagctatgccgaccgggatgccgacaaaatcgcgcagcaaaaaacgcttgcccgggaacacgcttcaaggcttgtcgatctgctcaattccgtcgtgaataatccaaagggagaataa

SEQ ID NO: 223825 - DNA, 1020 bp, Klebsiella pneumoniae
atgcagtatatccggcttggtaaaagtgacttactggtctcccgcatctgcatgggatgtatggggtttggcgacccgttaacgggccagcatcgctggacgctggacgaaacagcaagccgggacattatccgctacggtctcgaaaagggtatcaatttttacgataccgccatcgcctatcagaacggctccagcgagcgatacgttggccgggcgctgcgggagatggcaaaacgcgaggacgtggtgctggccaccaagtttctgccacgaaccgccgcgcaaattgccgcggggatcggcggaaaagaagccatagcccgatcgctcgaccagagcctgcagaatctggggatggactacatcgacctctacatctatcacatctgggattacaacacgccagttattgaggtgcttgaagcgctgcacgccgccgtgaccgccggcaaggtgcgcgcgattggtatttccaattgctatgcctggcagctggcgaaggcgaacgcccttgccgaacgcgaagggctgacgccctttgtttccgtgcagagccactacaacctgattatgcgtgaagatgaacgagagctcttcggtctgtgcgctgaagatgatatcgccatgaccccctatagcgcgctggccagcggtcgtctctcccggaaagaaggccacacgcgacgagccgcggaggatgattatgcgcgcgggaaatatgacagcacggctgaacaggatcggctcattattgagcgtgtagccgaacttgccgaacggcatcaggtgtccatgacggaaatatctctcgcctggctgctgacaaaagtcacgtcacctgttgtaggggccacaaaaaaagatcacgtcgatggcgcggtaaacgccgtcaatcttcaactgagccaggaggaaatccggtttctggaagaaacctaccagccgcatgttctgacggggatcatggcgcaaaacacgccgcaaacgaaagacgccaggcaggtctggacgcggtag

SEQ ID NO: 223826 - DNA, 600 bp, Klebsiella pneumoniae
atgatctggttactgcagcacagagcagcagcgttgtttttgtttgcagttatcttcctgatgcccgttagccatgcacatagtcgtgaaaagaccgacattaaaacgctcgttatcgtctcacacccttatccggaacgctcagttctgacaaaagagctgcaggcagccgctgagagtctggaaggcgtgacggttcgcaaccttgagacattgtatggttatgacacacgtcagattaatggcgacgcggagcgaaaaatgatgcgtgagcacagtcgtgtcgtttttatcttcccgacacactggttcaatattacgccgatgatgaaagcctggcttaatgaaacctgggggagtgtcggacccggtttgtggcagggaaaggagatgcttattgtcagtacggctgcggggggaagctcaacttacgggccagacggcaggatcggggtatcgctcgcggatgtgtttttaccaatgaaagccagcgccctgcacgcaggtatgacgtggcttcctcccctggtctttgagggcgcccgtagcgatcagctaccttcctaccagcaccagctgatcgaacgacttaaacagtaa

SEQ ID NO: 223827 - DNA, 726 bp, Klebsiella pneumoniae
gtgaaaaagagccttatgcttttaatttgcatactaataagcagtccggtttttgcaacaaaaccggatgtgctggataagtcagtgatgaatctcttcgagattggggtcaggcccgatcggggcaacgattttgcagacgtggccagacagacgatttctgcttcggttgttcatgaagaaggtacgctggcgatgtacgccctgcaacgcagcgaccatccaagtcatgcattcatggtggagctctatgaaaacgaaagcgcttaccacaaacatctgaatggcgacccgtacaaggcattcgctgcccgggcacctgacattatcgaacggaaaaataaaatcattctggagccccaatttctgggggacaaacacatcataccgaatgagcgaaccattaataatctggtgatcgtcgaggtaaagcctgaatttcagaccgaatttaaaaacatcgtcatgcctgaaatggctgagtcgctcaaagtagagaaaggcgtgttagctatgtatgccgctacagactcacagactccgaaccgctggtatttctatgagatttacgccagtgaggaagcgtatcaactgcaccgacaaacgccacactttcgggactatctcaggcaaacggcgcatatgagcgccagtaaggacgctatcccggtaaaaccggtatttcttcgtaacaaaggcggaatcaaacaggatccgcaccgttga

SEQ ID NO: 223828 - DNA, 804 bp, Klebsiella pneumoniae
atgaaaagcataattgcagcggcggccatgtcgcttgttatttctgattttgctattgctgaggaaacaagaggtaaagcgatgatgaaaattgaaccttcagcgatttcggaagctgatattcgtgctgtctctccggctctggcgcgcttcagccgtgaagccattactgaagatctgtggacacgcgattccctctcgcccagggaccgtagtatggtgaccattgccatgctgattgcccgcaaccagccaggcgagcttaagcactatattgaagtcgctctcgatagcggcgtgacaccagcggaactgtcagaaatcattacccatctggcgttctactcaggttggccaaatgcaatgtcagccatcagcgtgaccaaaacggtttttgaatctcgtggcgttacggcggatgcaattcctgacgcttctccggatctgctccccctcaatcaggaagcagaaaagcagcgttcagaaacagtggaaaaaaatgttggctcaatatctccaggcctggttaagttcactgctgaacccctgttcctggatctctggcaaagacccgcgctgaaaccccgcgacagaagcctggttacggtcagcgccttaatcgcatccggacaaagtgcacagattggctatcacctcaacagagcgatggataatggactatctgctgaggaggctggtgagatcgttacccaagccgcgttctatgccggctggccaaacgcgtttaccgctgctcctgttgtcggagaggtactacgcaatcggtcatcgagtaaaaagtaa

SEQ ID NO: 223829 - DNA, 618 bp, Klebsiella pneumoniae
atgagccgatacacagttgctggcagcgaaggccagtatgagaaaaattcaggtgaacgggttttggctaataaactcgggattgctgacgcaaatgagatggatagcgtagaactggtactgctggaacaactttatcgctcggtttttgaggaacactttccaaccggattgctcagcgtcaatatcctgaaaaagtggcattatcgctggttaggcaatatctatgcatgggcaggccaggaaagaacggtcaatatcagcaaaggcgattttatgttcgccccttcaacacagctggctaaactgctaaacgattttgataagaaataccttgctcattatacgccttgttcaggcatgagtgaattgcagctcacagaagctatcgcagtcacacatgttgaattgatcctcatccatccattcagagagggtaacgggcgtttatcacgattattagctgatgtgatggcggtgcaggctggctataaaccgctgaattatcaaagctgggaacaaaacaaaacccagtatatatcggctatccatgcaggtttgactctggactatcgaccgatgaaacactgggtcagcatggccttaagaagggattag

SEQ ID NO: 223830 - DNA, 582 bp, Klebsiella pneumoniae
atgaaaacgcaacttcgtattatggcaattctcatgggagcgctggtttctggcgctgcaatttctgttactacgccaaccattaacgttaaccctggctccaacgcgggtacccagggtaccggcggacaggttatcttcaatggatcaatcaccgacagctcctgcaatatcgacagcgcatccaccagccagacggtggatctgggcaaatgggccagcacctattttaccagcacaggttttgaaaccaccaaaacgcctttccatatcaaagtaaaagattgccctgccagcgtgacaaatgttgcggtgctgtttgacggcgcgcgcgatcagtctgataacacgctgttggcgaccaccggcggcgccgctggcgtggcgatcaagctgtatgaagatgacaagtctacggcggtcagcctcggcaaagtgtcgaaagccaaaaatgtcgttgcgggcgcgactgccggcaccggcactgccgacctcgagtttttcgccgactatatctccaccggtgcggtgacggctggcgatgccaacggtacggctaatttcaatatgatttataactaa

SEQ ID NO: 223831 - DNA, 690 bp, Klebsiella pneumoniae
atgaaaactcaggtggctgttttgctcagcgcattggcctttcaggcctgcgccgggataaccattaatgcctcacgggtgatctattcaggaaaagacaaagtcgccagcctgaatatcaataaccgcagcagcaccccctataaagtgcagatctggctggacgccgggctcaatgcctcgcgcgtcggcctgccgatggtggcgacgccgccgctggtctatttatcgccgcagcaatccgcccaactgcgctttatctatctcggcagcgggctgcccgacgatcgggaaagcctgttctgggtcaatatccaggagacgccgccgaccgccggcgacaatcatacgctgcaatttgtcgtccgcacccgtctgaagctgttttatcgtccacccgccatcgccaccaccctcgtcaaagaggtgcaaaagctgcagtggcagcagagcggcaataacctgcgcttgacgaactcaggccctctgcatatcaccctggtcaacggagcgctgatcgataataaaggccacctctcgccgatgagaaacgtgatgctccggccctacagcagccataccgtaatgaccaccgacagcgctcgcctgtaccagttgaactatatcgacgactacggcgcggtagtgccgatcccgctgcagggcagtctgcccccggggccaggctag

SEQ ID NO: 223832 - DNA, 789 bp, Klebsiella pneumoniae
atggaccttggcattacaggacgacaagcggtggtgtgtgccgccagcagcgggttaggctttgcctgtgccgctgcgttggtgtcagaaggcgtcaatgtaacgattaacgcaaggcaaagcgatagacttaatgaagccatacgcttgctgaggaccatcaactcagcagtacaaatacaaggcattgcaggcgatattacgtgtcccgaggtacaaaatgccgtactgacagcgacacccaccgtggatattttagtaaccaatgcggggggaccgccagtcggcggcagtcacgactggccccgtgaaatatggttgcaggcgattgaaacgaatatgctcacccccattgcattaattcaggctgtacttggcgaaatgagaaaccgtcgttttggacgtattgttaatattacgtccgggagtgttaaagcaccgcgggaaacattaagtttatcgaatgggtcacgtgggggtttaacgacttatattgctggtcttgccagaagtagtgagcttgccagtcaaaatgtgactatcaataatctcctccctggcgcattttccacaccgcgattaatgcaaaccctggcaactgatgcacaacgctggggaaaatcatcagagagtatggaaattgagcgcaaaaaactcattcctgccggacgctttggtataccagatgaatttggagcctgctgtgcttttctttgtagcatgaatgctggctatataaccgggcaaaatattttgattgatggtggggcgtatccaggggtgttttga

SEQ ID NO: 223833 - DNA, 864 bp, Klebsiella pneumoniae
atgataaatagtatccagaactttaaaattgcaaggcttacttggcgcacatttctgtcgctgggagggggagcgctcgtcagttcctgtatgcaacctgcacaaattatcaatcaggaatatcgcatactgacacctgattttcaggacacttttgatatcccgcctccccccgacagttcgaccgggagaaaaataaagctatggtcgactaacttttataccacgcaacccgtcgaggataaaaacggcgtcccattccgggataaagatggtatcccgatatcggataatgtcagtaagcgtagctggtgcctgggtgctcaggaaggttctgtcaaaacaacatttcatggggaggaaatcaggctcacgcatgcaggagtatttaagaaaaaacctccttattatatcgactgtgatgtggaatatgaaacccatactcatgatctgtctgcctatgggttaagttatcatgtaaaaaccaacgcaccgtttggcttaggaattaacaattactttttggttccgtaccggactatggctgtaaaggttaatgataattcaggtttaaaattaaaggcaggagacgtactttatattaatgatgtgactaacaacatgatcacagatccctacactggcaggaaattcaagcatgacggatatttctttgtcggagatgttggtggaaaagttaaagatatacatgctgacaccttttgtggtttccaaaaaaattgccttcctccgtttacaagcagtgatgacgatcatcattatatgtttacagccgtggttatcactgaccccgcaatcaaagaaaaactgctacgaatgcacttaaaatccagctacaggtag

SEQ ID NO: 223834 - DNA, 804 bp, Klebsiella pneumoniae; identical to SEQ ID NO: 100100

SEQ ID NO: 223835 - DNA, 792 bp, Klebsiella pneumoniae
atgaatttaattgataacgttaagaatgaagagctacagaatattcgttttgttttaactgatatggatgaaacgctgacttataagggcagactgcaggcccgaacctatcagagtctggaaatgctacaacatgcgggcatcaaggtgattccggtaacggcggcctctgccggctgggccgatcagatggcgagaatgtggccagttgatggggtcatcgctgaaaatggaggattatttcttaccagaaataacatcgaacatggtattaacaggtacttctggcatgaagacaaatatcttctcaatcgagaaaaaatcagccatattcttctcaagattcgccagaaatacccctgggttgaagtgtctgacgatcaggattttcgcctgacgagtatcgctttcaaacttcccaaaaatcatgagcagaccagacagctcattgacgaattagcggaaaataaatgcagctataccattaataatctatgggtactggggtggttaggggggtatgacaaactcgtcatgagcagaaaggtgttaaagcatttttacgcactggaagaatcagatgaacaggcatcggttttctacagtggtgattcgctcaatgatgcccccatgttcagctactacagcaaaacgttgggaatgaacacgatcaatgatatagcgcaagttataccatcattgccgtgctggataagtcaatttccaggtggtgaagggtttgttgatggcgctaacagaattttaaatgctaaaagggcaagtatccgttaa

SEQ ID NO: 223836 - DNA, 621 bp, Klebsiella pneumoniae
atgctcgtcactgattcacttcttgcttacaccctcgctgccacgctgcttaccctgacgccaggtcttgatactgctcttattctccgcacggcgactgctgaagggggacgcaaagccttgcatgccgcgttaggcatcgatctcgggtgctttatctggggcgcgctggtggcctttggtttaggtgcgctactggcggtttctgagttggcttataccttattgaaatggtgcggcgcgggctacctttgttggctgggcatccagctgctcctgcgcccacgccagcaatttaacacccacccgaccgaatccaattccacgagtaactggttcctgcgcgggatgttggggaatgtgcttaatcccaaaatgggcgtcttctacgtttcgtttttacctcagtttatccccgccgggcattcacccgtcagttggacctttctgctggtcactatccatgtattgattgggacgctgtggtcgttaacgctgattaccgccactcgctatgccgcgggcatcctgaaaaaaccggccgtggtgaaatggatggaccggatgaccggctgcctgtttctgatattcgccgcgaagctggcgatgagccggcggtaa

SEQ ID NO: 223837 - DNA, 627 bp, Klebsiella pneumoniae
atggttaatattgtaataaaagagtcggataccctcttccaatgtggcctgacctttttttttagtgatttcttttcccaacacaatactacagttgatttcaattttaactttacgtcagaaagcgttcagctagcagacgtcattgtgctggcattatgtccaggcgaatgttttatttgctgccctgaactacagaagcgaaaaaaaggcattgtgattggttttgttgatgatgatatgcgagcctctgcgctcccctcttgctttcaggatattatctttatctctcgccggcattccgtgagacagttacgtagagcagtacatacggcctggcaccggctgcagcagacaaattatcgacagtcacccgcgtcatgttttgactgtcagccgaccaaattgtcaccgcagcaaatccgcatcatgatctgtttatatgaggggatgtcggtaacgcaaattgccgatgagcttatgatcagtgagaaaacggtctatgcgcataaatatatggtcatgagtaaatttaacttacgcaacgattatgagctaatgcttctgctcaataaactgacaaaaaataacgactggccaaatggctttataaaagttagccagtga

SEQ ID NO: 223838 - DNA, 2535 bp, Klebsiella pneumoniae
atgatgatggcaatggattatataaaagcacggtctccacggttggcattattgataaccatcgcgctcttcggtaatacacaaaatagctatagtcgcgatttttttaacccagaactggttgaactggataatccagggacagaaaaagtcgatctttctggttttgaatctggcgcgcaagcccccgggaattatcatgtcgatgtcgtcctggacgatcggttagtcgatacccgcgatatcaggtttgtgttgctgaaagagcctggcggtgatgataaattagtcccctgtttatccattgagcaattagaaagctggggagtcaagacgggcctttttcccgcgttaaagggtgaaacatcctgtgcgaacctgtccgcgattcctcaggctagtacggatttccagtttgccatgcaacgtctggtattgagcattccgcaagcggcactttcagcgcaagcgcgcggatcggtgccaccggatcgctgggatcaaggcattaacgccgccctgctcaactacagtctgagtggggcgaataactgggccaaaaataacaacagcagcaccagcgataatcagtatgccaacctgcgtcctggtctgaacattggcccctggcggttaagaaactacaccacctggtcgcgagattcacagggtcatgatgcgtggaagacggtttatacctatgctcaacgtacgataatcccgttaaagtctcagctcacgctgggtgacagctctgccccggcagatgtgttcgacagtatgcctttccggggaggacaacttgcttccgatgatgacatgctgcccgactctctcaagggctatgccccagtggtgcgtgggatcgcccggactaatgcccaggtgataattcgccagaatggctatcagatataccagagctttgtggcaccgggcgcttttgaaatcacggacatgtatcctaccggaggcgccggcgatcttgatgtcactattaaagaggctgatggcagcgagcagcactttagcgtgccatttgcctcccttcccgtattacagcgtgaaggccgaataaaatatgcgttaacgggcggccaatatcgttcgtacaacggcagcgtggacaaaacgccctttgctcagatgagcgttattctcggcttgccctacggctttacgttttacggcggattgcaggagtcgagtaagtaccagtcgctcgccgcgggcgtcggtaaaaacatgggtgactttggcgctatctccagcgacatcacccagggctggtccacgccgcaaaatatgccgaaaaccagggggcaatcatggcgggctcgatacagtaaaaattttgccgcaacgggcaccaacttcgcgattgccggctaccgctattcgaccagcggctactatggcatgcaagaggtcctggattcttacggtgacagtcatgcgcttcaggaccgacgccgcaaccgtgctgagctgacgctgagccaggggctgggagaccgtctgggatcgttgatgctgaacgccgcacgtgaagattactggaactcaggtaaggcgatggaatcatggagcgttgggtataacaactactggcacagtattagttatggcctgacctggactctgagtaagaatgggggcgcgggaacgtacagcgcaccccagagcgacgataaaaaccagatgctggcgctgaatatcagtattccactggaaaaactgttgccgcagacatgggcaaactatggcatgaatgccagcaagaataacggtacgacacacagcgctgggttaaatggtgttgctctgccgaataatgcgctcaactggaatattcaacagggttacggcactcacgacgtggcctataccggcaacatgaatggtgattatcgcggcacctatggtgaaatcaccgccgggtacagctatgacaaaaataccgatcgtctgaactatgggattcagggaggcgtggttgcgcatgccaatggcgtgacgttctctcaaccattgggcgaaaccaacgtgctgattgccgcccccggggctgccggcgtaggcatccagaatatgactggagcgacaaccgattatcgcggatatacggttgcctctaacttaatgccttatcgcaaaaatgatgtgtcattaatcactgaaacattaccggctaacgttgagttagaacaaacggtcaaaaccgtggtccctacgcgtggcgcgattgtcagggcgaactatcgggcaagcgtcggtgttcgcatgttgatgaccttgacccagccaaacggccagttagtgccgtttggcgcaatggccagcattgaaggagcagaaccaagcagctttatcgttggtgatagcggacaggtgtatttgacggggctcgatccccaggtaaacctgatcgtgaaatggggaaatcaatccgcaaacacctgcagggtctattacgcgataaacatgacgaagcagaataacgatgtgattatcgataatgctgtttgccgttaa

SEQ ID NO: 223839 - DNA, 768 bp, Klebsiella pneumoniae
atgaaaataataactctttataaccataagggtggcgtctcaaaaacgacaacaacttttaatctttgcaattatatctcaggcactggtaagaaagttttaatggttgatgctgatccccagtgtaatttaactgagattgctatggcaacggtgattaagcaacttgatgagcaatcagagaaagagaacttaatcaaagatttaccaggaagtaacatccttgaagttcttaaccaaagaataaaaggggattctgcttttattgatttagagaaagttgaagtatgtcaggttgctgaacatcttgatttagattcatttgaggagtttgctaaggctgtctcattatatcaaattttgcttttgaaaaatggttttttgtgtcgtggaggtattgcattaaataaacattacagtaagtcaggctttatttttagccctgcgttaattgaagcctataaagttgaaagtgaaaaggctatttatccaaggattgtaatatccgaagacttaattgacttcctttatccttcaaaggtgatgcctaatattctttgcaaagaatatgatggattatactttataaattacattacaaatgaactagatgaagaaacacatcaggttttgttatcattaattgataattgcattactaataaaaacccttctatagcgcaaaaagggctttggttagctggttattcagatgtggtttaccagactcagtcatgcccttcccggtttactctctttaatgattga

SEQ ID NO: 223840 - DNA, 354 bp, Klebsiella pneumoniae
atgacggcatacggaacggaatttttctcaatgaacgatgttaaaagactcagaatcattcaggatattatcgaccggcgtctcactacgcgtctcgcggccagccgcctggagaaatctgacagacactaccaacggctactggagcgctaccatgaacagggccactttcacttgttaaccggcggcgtggccagcctggtttggccgtgccatgagcgaattgaacatcaccggtatctgtgccaataccagttcatccaagggccatggcttgcgaagccgccacgccatgatttcgacgttcatcgtccgctcgagagtgatgaaaatctggtagcaacattcacctaa

SEQ ID NO: 223841 - DNA, 165 bp, Klebsiella pneumoniae
atgagtggcgtgccgtcgtatcctcgtctcagggggctgccaggttattcgctgcaagtcaaagaacttgctcacctgctgctgcaacgcctgggtaacaggaaacctaataaaaagtcaatctccctgaccatgtttatttatactcagaaaacatgtcattaa

SEQ ID NO: 223842 - DNA, 1470 bp, Klebsiella pneumoniae
ttgaaatggctaacctggttaaaacgtatcgtgttgtccctgctgctgttgatcgttggcgctctgggactacgcctttatgacattcagcgcgggcccgatctgcagctctggcatacctgggttccgcatgagatggacgcggatgaaatcgacaatgctgactggaacgattacatcaaaaaagagaatgcgctcttcagtgaggtaaaacgccaggttaccgataagctggacgctgagcagcaaaccgaactgaatcgttactacagtcacagccctatctatccggactcgtttcccaccaactggaatcggtcatacatcatgatgccggatggtaaaccgcaaggtgccgtggtgttgctgcatggtctgacggatacgccctacagcctgcggcatatcgccgaaaattaccgccaacagggttatgtcgccatcggtatcagattaccgggccatgggacggttcccgccgggctgaccgacgtggactggcaggactggctggccgccacgcgcctggcggtgagagaagcgaaacgactgacgggtaaagatgcgcccctgcatatcgtcggattttccaacggcggcgcgctggcaatgaagtattcgctggacacgctggataatgccgaactggcaaaaccccagcgggtgatcctgatttctccgatgatcggtattactagcttcgcgcgtttttccggcctcgcgggctggcccgcgtttcttcccgccttctcgaaagccgcatggttaaacatcatgcccgaatttaatccgtttaaatataactccttcccgacgaacgccgcccggcagtccttcctgctgaccaaagcgctgcaaaagcagatagtggctgacgcgagaaatcagaaacttaacagcttaccgccggtattgacctttcagtccgtcatggattcaacggtcagtacgcgggcgatcgtgacggcgctgtataaccgcttgccggataatggcagtgaaattgtcctgttcgatttaaatcatgcggtcaggtttaattcattattacgccggacgtcttacaccgcgctggcgcggttgctgcccgcagcgccgcgagcttatcaaaccacgatcatcactaacgccaattccgccagtacagagatggagatccgaacaactcctgccgggaaaacagacactacggtggagaagctacagggactgcattatttaccggacgtgtattcgctttctcatgtcgcgcttcccttccccttgagcgattcgctgtacggacgctatccccatccgctgaatcaatacgggatcagcctcggcacgtttgcagctcgcggcgagcgttctgtgctggtagtgggcctggactcgctgatgcgccagtcttccaatccgttttttccctatatgatcaagcgcattgacgaagggatcgacactcgcccggctctctccgggaaataa

SEQ ID NO: 223843 - DNA, 366 bp, Klebsiella pneumoniae
atgttatatagcgatgatgaatataagatgtttgctgaggaactggaaggatcatccataggtaccgtatggtctgccatgagggcggataattttgggaaagatgagttatcatataaagaaaaatgtgactatttttttgaactgatggaacgccttcttttagaaggcaaaataaaattagcaagtcgaggaaaatatctggaaggaagcatcgacgagcaaatttctttgtatcgtgaaaactttcccctaaaccaggaggaaatggaagaggatgcttttgatggtttctggtttctgacggaaaaatgccctggcggcatagtctggatccatgacaatggctatgaagactggacctga

SEQ ID NO: 223844 - DNA, 366 bp, Klebsiella pneumoniae
atgaagcaattaaccgttttcgaaatggagacaatctctggtggctattcatgggatttttcctctatccaggccagtattaccagcctcgttagtaatggcgtggaagccgtagcttctgcagccaccatgggaaccttagccgcggtatttggcacctttatcggtggtacacaggctggggcaaatggcggcattctgggtattggtcttatcgggaacttcgtcggcttgatcgcaggctttgtcggaggcgcaatcatgggtgccggatgtggtctggcctggggatgggacggtacgatgaccgtcattgaacaaggtgctcagggtttagttgatggcacctttgttgtctggaaataa

SEQ ID NO: 223845 - DNA, 369 bp, Klebsiella pneumoniae
gtgaaagaattaactgtatttgaaatgaatgctatttccgggggttatagctgggatttttcgtctatccagtcagccattaccagtttggtaagcaatggtgttgaagcaacagcttctgctgccctgggagccgttacatggggtacctacggtctcctttggggcggcacccaatctggtgctaatggtggtattctgggcctgggtttaattggtaatgcggtaggggctgtctgggggactctcatgggggctcttggcggtgcagttggttacgccgcactgggctgggatgcctctgtaaacgagtctctgcagtccatgctggggattattgatggctcattcgtgccatggagccactaa

SEQ ID NO: 223846 - DNA, 1959 bp, Klebsiella pneumoniae
atgagccaaatacacaaacaccctattcccgctaacattgcggaacgttgcctgattaacccggatcagtacaaggcgcagtatcaacaatccataaccgaccctgatacattctggggcgagcaggggaaaatccttgactggatgcgcccctacacccgcgtgaagaatacctccttcgcgccaggtaacatttccatcaaatggtatgaagacggcaccctgaacctcgccgccaactgcctcgaccgccacctcgccgagcgcggcgatcaaaccgccatcatctgggaaggcgacgacgccagccacagcaagcacatcacctaccgtgaactgcatgcggacgtgtgccgcttcgccaatgtgctgctcggcctcgggattaaaaaaggcgacgtggtcgccatctatatgccgatggtgccggaagccgcggtggcgatgctggcctgcgcccgcatcggcgccatccactcggtgattttcggtggcttctcgccggaggcagtggccggacgcattatcgactccagctcgcgcctggtgatcaccgcggatgaagggctgcgcgccggtcgcgccatcccgctgaagaaaaacgtcgatgacgcgctgaaaaacccgaacgtaaacagcattgaacacgtcgtggtcctgaaacgtaccggcggtaaaatcgactggcaggaaggccgcgatctgtggtggagcgatctgatggcgaacgccagcgccgaacaccgccccgtcgagatgaacgccgaagatccgctgttcatcctctatacctctggctccaccggtaaaccgaaaggggtgttgcacaccaccggcggctatctggtctacgcggccaccacctttaaatacgttttcgattaccacccgggcgatatttactggtgcaccgccgatgtcggctgggtcaccggccacagctatctgctgtacggcccgctggcctgcggcgccaccactctgatgttcgaaggggtgccgaactggccaaccccggcgcgtatgtgccaggtcgtcgataagcataaggtcagcattctgtataccgctccgacggcgatccgtgccctgatggcggaaggcgacaaggctatcgaaggcacagaccgctcctcgctgcgcattctcggctcggtcggcgaacccattaacccggaagcctgggagtggtactggaagaagatcggtaacgagaagtgcccggtgatggacacctggtggcagaccgaaaccggcggctttatgatcaccccgctgccgggggcgattgagctgaaggctggctccgctacccgcccgttcttcggcgttcagccggtgctggtggataacgaagggctgccgctggatggcgccaccgagggcaatcttgccatcgccgactcctggcccggccaggcgcgtaccctgttcggggatcatgagcgctttgagcaaacctacttctccaccttcaaaaatatgtactttagcggcgacggcgcgcgccgagatgaagatggctattactggatcaccggccgcgtggatgacgtactgaacgtctccggccaccgtctgggtactgccgagatcgaatcggcgctggtgtcgcacccgaaaatcgccgaagcggcagtggtcggtattccgcacaacatcaagggccaggctatctacgcctacgtgacgctcaatcacggtgaagaaccgacgccggagctgtatgcggaagtacgtaactgggtgcgtaaagagattggcccgctggcgacgccggatgttctgcactggaccgattcgttgccaaaaacccgctcgggcaaaatcatgcgccgcattctgcgcaagatcgccgcgggcgacaccagcaacctcggcgatacctcgactctcgccgatcctggcgtagtggaaaaactgctcgaagagaagcaggccattaccatgccttcttaa

SEQ ID NO: 223847 - DNA, 312 bp, Klebsiella pneumoniae
atgaatgaacaactttgtcagcggatagaaaatagtgcgcatttcagggagctggtagcatcacggcaacggtttgccgccattctgtcagtgattatgttagtgatctatgtgggctttattctgcttatcgccttcgcgccaggctggctcggcacgccgctgcacgccgggaccagcgtcacccgcgggatcccgctgggcatcggggtgatcgtcatttcgtttgttctcaccggtatttatgtctggcgggccaacggtgaatttgaccgtttgaccaagagcgttctcaacgaggtaaaagcatga

SEQ ID NO: 223848 - DNA, 1656 bp, Klebsiella pneumoniae
atgatcaagagagtcctgacggcgctcgccgccacgctgctgcccctcggcgttcaggccgcagacgccattaccggcgcggtacagcgccagccgaccaactggcaagcgattgtcatgttcctgattttcgtcgccctgaccctgtacatcacttactgggcgtcaaaacgggtgcgttcgcgcagcgattactacaccgccggcggcaatatcaccggtttccagaacgggctggcgattgccggcgactttatgtcggcagcgtcgttccttggtatctccgcgctggtgtatacctccggttacgacggtctgatctactcgctgggcttccttgtcggctggccgattatcctgtttctgattgccgaacgtctgcgcaaccttggccgctacacctttgccgacgtggcgtcctatcgtctcaaacagggaccgatccgcaccctctccgcctgcggctcgctggtggtggtggccctctatctgatcgcccaaatggttggcgccggcaagctgatccagctgctgttcggccttaactatcacgttgcggtggtgctggtgggcgtcctgatggtgctctatgtcctgttcggcggcatgctggcgaccacctgggtgcagattatcaaagcggttctgctgctgttcggcgccagctttatggcctttatggtgatgaagcacgtcggcttcagcttcaataatctgtttaccgaagcgatggccgtccacccgaaaggcgcggcgattatgagcccaggcgggctggtgaaagatccgatatccgcgctctcccttggcctcggtctgatgtttggtaccgccggcctgccgcatatcctgatgcgtttctttaccgtgagcgacgccaaagaagcgcgtaaaagcgtgttctacgccaccggttttatgggctacttctatattctgacctttatcatcggcttcggcgccatcatgctggtcggcgcgaacccagtgttcaaagacgcggccgggcagcttatcggcggcaataatatggcggcggtgcatctggcggatgcggtgggcggcaacctgttcctcggctttatctccgcggtcgccttcgccactattctggcggtggtcgctggcttgacgctggcgggcgcctcggcggtgtcgcacgacctgtacgccaacgtcttccgtaaaggggcgaccgagcgtcaggagctgaaggtctccaaaattacggtgctgatcctcggcgtggtggccattctgctgggcatcctgttcgaaaatcagaatatcgctttcatggtcggcctggcgttctctattgccgccagctgtaacttcccgattatcctgctgtcgatgtactggtcgaagctgaccacccgcggggcgatgatcggcggctggctgggtctgctgacggcggtgattctgatgatcctcggcccgaccatttgggtgcagatcctcggtcatgagaaagcgctgttcccgtatgaatacccagcgctgttctccatcgcgatcgcctttatcggcatctggctcttctccgcgaccgataactcaccggaagggatgcgcgagcgcgagcagttccgcgcccagtttatccgttcgcagacagggattggcatcgagaaaggtcaggcgcattaa

SEQ ID NO: 223849 - DNA, 1092 bp, Klebsiella pneumoniae
atgaaacgtgtttttttactgctgctgtggctgtctccagtttgtggctgggcctgcagcaactatataaatggcggggatgtcaccattgccaacctgccgccaagaatattgctgagtgcgaataactatacggctgggaccattctctatgactccgggaaaatcaccgggccgcaaacttcgatgaataattgtaatggtggtatttacgcacagtttaaatgggcttcctcaatggtgggttctcacaccagcgatcatatctatacgacttcagtcccggggatcggtatcagaataaaagtgtggcttaatgtcacagggcaaatggagggttacaatacccaaatcaaacctgactatagcgaacattatataggagatgcgaattttctattggggcaggggaacttgttttatttttataaccactctcactacaaccctgtctatcaattgcaattgatagccactggcggccctatcgccagcggtagtgctctgaccttgggtaacccaacctcaacggtgtccatcaaagatggcgatggcacgatggcagcttccagtttgcgcgtcactggttccacgcaaatccagctggtgccgatggggtgcgatgttgacgtgacaagtctgctatttcagatgggcaacgtcagcgcctctgaatttaataaggcgacaaaagtcggttctgcacaacaaaatctgacgctgacttgcgaaccaggaacgaacgtcacactgaaggtctcggcctcttcagctcagggagataatccagacaatagcgtgatatccctgggatgggctcctgatgcggcaacaggtgtcggcgtgcaattgaatcttaatgggaaggcattacccttgaatacggatctcacattgttttcatccagcagaacgacagttttgaattcgggtgcagaggccagttaccgcgtattcagcaatccggacaacccgggaggggcttcaggtacagagagactttcctttacgactaactattataaaaccggttccgaggtgaaggctgggcaggcgaacgccaacggaaccctgaactttacctacaattaa

SEQ ID NO: 223850 - DNA, 564 bp, Klebsiella pneumoniae
atgaagagggggaatggccggctatccataaaaccatgcttattgcttattattagcattgggattttattcattttcgcaagacctgcctggccctttaacgccaatagtgtagttaattttaatgtcagcggtaagattgaagaacccgtatgtgaagtgtcggtaaagccctccagtactatcgatctgggaacggtttcccttcaacgtctgaccggtaaaccaggcgcgagtagtgatgccacggccgttgccattgcctttgagcattgctcaacggggatgacctcggtgacgataacatttaacggtaattcatatagtagtacctatcccagtatttatcaggatgagcttatttatggtgccaagaacgtagggttacagctgctaagtgcggtggatcagaaaagcctggggccaaatgatacttatacctatgccctccctgagggcgctgaacgcgtttttaatatgattgccagaatgtacacccctgacgggaaagtaacagcgggaaaggtggcttttaccgttactttcaacgtgacctacaaataa

SEQ ID NO: 223851 - DNA, 2592 bp, Klebsiella pneumoniae
atgattatggtatgtcgggaccaaaatataaggccatcattcaatagcgctggatggaatgatgcattctcattgaaaagtagctatatcgccatactttgcagtcttggcgctatccccttaacgtctttcgctggggagtattttaacccacatttacttgaaattaatgaaactagtgcgacaagcgtagatttatcttatatttctcgcgaagccgtacctcctggtcagtataatcttgatatttatattaacgacaagtttatcgcttctgacactatcgtctttaagccacaaaaggaaggtagtgattcgtctgctgagccgtgtattagcgttgcgcaactaaaagagtggtcaataaaaacgcaggattatcctgagctcacgatagagggctccgagtgtgcaaaactgcctgcaataccaggatgggaaacggcggttttactttcacagcagcgagtcgattttaccgtgccgcaggtcgcgatgctgcgtcaccctcagggctatgtccccgagaatcaatggcagcagggcattaccgccgggctgcttaactataatctttcggggcaaaaaaacgatccgcggcacggaggcgcatcgacatccagtcagtttcttagtctgcagcctgggttgaacgttgggccatggcgtttacgtaattacagcacctttaatcatgataatgatggcaaccagtgggactccgtctatagctatatttcgcgcgatatccatgctctgaaaggccagctgatactggggcagacttacacctatcctggcatctttgacagcttcagcttcaccggtgtgcagatgaatgcagacagggagatgctaccggacagcatgaatggctttgctccggtgatcaaaggcattgcccggacgactgcagacgtaacggtatatcagaatggatacagcatctataaaaccacggtctctcccggggcattcgaaataaatgatctttatccaacggggagtgcgggcgatctctatgttacggtgaaagagtctgatggcggcgagcagagcttcgtggtgccttttgcctcgctggcgattctccagcgggaagggcagatagactatgctttcagcagcggtaaaactcgctcggcgagctcaggcggaaaggaataccattttctgcaatccacccttgcctggggtgcattgagtaacgttacgctgtacggcggttttcagcaactggaagataaatatagcaatgcgctgttgggagctgggtttaatctgggatctgttggcgcactctcattggatgcttctcagtcctgggctgatataaaagaaaatccaaccgcggataataccactgccagcgaggggcagtcttatcgcgtgcgttttagtaaagattttccattaacgggtaccaacttctccgttgccggatatcggtattcaacccatggctattattctctgcagaatttcattgaccgggcaaatgctcatagcgggtgttgttcattaacggggcggactaaagatcgttttgacgcttcggcctcccagattttctccgggttcggttctctcgccctctcgctggtcagtgaatcttattgggataattcacgtatggagtcgctgggggtgagctatagcaataccctgggtcgcatttcttacttcattaactactcctacagccgaaatgtgcagagcacaggccagaacagcgatagctctccgaccagcgataatatgatatcgcttacgatgagcatgccttttggcgcggatatatcggctaactacaacctgaacagcagccggacgggcgacacgacccatagcctggggttgagcggttctgcgtttgcggaccgttctctgaactggaacgtgcaggaaggctacaacgccagcgataaaagtatctctggaaacgtcaatctgaactatcagggttcccggggcgaagtcgccgccggatacgggtatgacagctatagctcgcactacaattactcgcttcgcggcgggatggttgcccattctggcggggtaaccctttctcgctatctgggcgagagcgtggcgctggtcgaagcgccgggcgtcagcgatgtggcagttcgggggcagacgaatattacgaccgatgcttttggatacgccgttgtgccttttgtacgcccctaccatgaaaacaatctctctcttgatgagcagcaggtctctggtgcggaaattgataacattgtcagaaaggtagtcccgacgcgaaatgcgattgttaaagtcaaatatgatacctggatcggctataaggccatggtcaccatcaactacaaaaataaagcggtgccttttggcgccgtggtgacgcttgaggatgaaaatctgaatgataaagagcgtcgtagttcgattgtcggcgatgccgggcaagtctatattaccgggttacccaaaaaaggccggctatttgtgaagtggggtgatacgcaaaatagccagtgttatctcaattatgatttttcatctgatcagtcagtggatgatatcgttttttatgcagagaattgccgatga

SEQ ID NO: 223852 - DNA, 687 bp, Klebsiella pneumoniae
atgaacagattattatgtttagtgtgtttttttttctctatttcagtttcgcaggctagcgtagttgttggcggaacgcgcgttatctttgatggaacaaaaaagacaaccaccgtctctgttcagaataaagataatgttacaaatatcgtccagtcatggttagccatcgttgatgagacatcacccgcgaaagactcctttattaccaccccgcctctttttcgcttgaaggcaggagaaaaaggatttgtacgcattcttcgtacaggcaaaccgatgccggaagatcgagagtctatgttgtggctcaatattaaaggaattcctgcaacggatgacgtatcagataaaaatatagtgcaatttgcgattaactcaaggattaaactcatttatcggcctgcagctttaaaaaatgccattccggaagaatttgctcaaaaactgcaatggtcaaatgatggcagagccattaaggtaaaaaatgattctcctctctatatgaatttctctgagatttttattaatggtaaagcagtacccgaggcgtggtttgttgcaccctattcaacgataagaataccggtagctaatgcctctccagctgggaaaaaagaaatcacatggagtgtgatcaatgattatggtatgtcgggaccaaaatataaggccatcattcaatag

SEQ ID NO: 223853 - DNA, 537 bp, Klebsiella pneumoniae
atgaaagcaaatttcaaaacgttagctaagattttagctttatcttctggctgctctttggtggcaatgtctcatgcgaataatactatcgacttcacggggacggtggccgaaaccacatgttccgccagtattgataataatgcttcatctattgaaatggggactgtctcggtagcagatttaacagcgaacgtctatagcgccgcgaagaacttctctttcacactggccggttgccctacgggcgaaggtgctctgaccaaagcccgaattacctttggtggtgaagcagataaatttaatagtgattattttcgaaaccaggctacaggaacaccagcaaccaatgttgctgttgctatttttgatggcgctggcgtattgcaaaagaacaatactgaaggttctgatgtcgatatttcttctggggaagcgaccattccgtttatcgtaaaaatggctaagtcaggttcctctgctccaactaaaggcccagtgaagacgaccgtaacctataacgtaacctattattaa

SEQ ID NO: 223854 - DNA, 411 bp, Klebsiella pneumoniae
atggccttcgcgccagctcgcgtgacgcccatggtcatgcaacgtcttctggtacccgttcaggtacttatctatgccggactgttcgtctgcgctgaatatttggttagctggctacgcctgccgcttccggcgaatctggtcgggatgctgatcatgctggcgctgattgtctgccgggtgattcctttaaactgggtgcgggccggcgcccgctggctgctggcggaaatgctgctgtttttcgtgccggcagtggtggcggtcgttaactatgtgcagctgctgatggtcgacggctggcgtatttttctggtgattggtttaagtaccatgatggtgctgggcgcaaccgcctgggtggttgataaagtgtatcgctatgaagttagcaggatgaaacatgagtga

SEQ ID NO: 223855 - DNA, 240 bp, Klebsiella pneumoniae
atgggcttttatgttcagattcaaaaaaaatcctcccaaaatgggaagtctaagtatgttttttataatgaaaaaggtagcggcgagttcagcatcaatgaaagtgatgggaaaattgactactatcaaaaaatgcctaatgattctagcaacattgccttctcaagggccgcggtgaaagtgttaaaatattggaagacgaacggtaaacttccagaccgagaagtatgggcttcttag

SEQ ID NO: 223856 - DNA, 492 bp, Klebsiella pneumoniae
atggacaataaaattgagtctgcactgcagagtctatatgacattctgaatagcgaaaccatagaagcgagctccagcgctcaaaaaactattcaaaaaacaatctcaactagcgattacctcaaagcatatgacttggcagaaattgagtatgaaagaattagaaatgattactcagatattgaaaagatttctaataatttagataaagattctgacgttgttgaaagagttaaaaatcacatattcttcaatgagcatgagattcattaccaagatagcagtgttagatttggaaggttggatgccgacccagcaatagtaaacgcatgggataggatagtttgcgacaactgcattgatacagactatcatttctttgctcacgaggagtatgagtcccttatagcacaaaatgacggagtgacgtacaatgaagcacataatctaacgatagaagctggcttcatctgggatcctaaggaggaatga

SEQ ID NO: 223857 - DNA, 411 bp, Klebsiella pneumoniae
atggataacaagttacttgaaaacaaagatataaatttgaatagcttgaggaatgtttttgataacgctggatttaagactgaaatcatagatggcgagttggtaatacaaaaggaaagtatcaaatctattatttatataagatcagatttagttagtattgtttccaagtttaggttaaaacctgatttagataatgaaataattgaatctaaattggtccagttgaaccatgggacttatcccgcacgatactttaccaatgacgacaaaaaaacactcattatatcaataacttattttacaggcgttgggatctacataccccattttatacttactgccaacgcgtatttaggatttattcctcttgattttaagcgtgtagattgttctgatattttagtctaa

SEQ ID NO: 223858 - DNA, 201 bp, Klebsiella pneumoniae
atgatagccgggactactaactatgacgatgtggcagaagtccgctgcaatttgtgcggcggttattacaaagccgacgacccggaaagtcacgaatgcgatgaagaagcccatgacgaaattgagtgtgatatctgcggtttcaaaagtactgacccggacggcgctcactactgctgcgaggataactccgatgactga

SEQ ID NO: 223859 - DNA, 612 bp, Klebsiella pneumoniae
atgatcgatgcgggttttttgcgtgcaaaattaggcacaaaggataaaccaatcgatgcggaagtaatcaaagcatttgtagaaaaattaacaaaaagacctgagctggaaggtatgattttgcatcgtgtttattattacgatgcagaaccgcttaccggaatacagacgcatcccattagcggggagaaaattgacttctctgaaacagatgtttcaaaaagaaataaagttatgcttgatgagctgaaaagaacacctttttttgctgtaagacttggggagacaaactttcgaggttggaaagttgacccatgggctttaaagagcagtgactccaaaacatcatccattaatgcctacaatgttaagcctaatgttcagcagaaaggcgttgatatgcgcattgcattagatatgtcatcaatgtcattaaaaaaacaggccgatatatatgctttggtgactggtgattccgattttgtaccaattataaaatttgcaagaaaagaaggccgacagatctttttatacactctgggacatggtgtcaagcagacgatgtatgaacattccgatttgttagtgccaaattccatggataaattgtga

SEQ ID NO: 223860 - DNA, 258 bp, Klebsiella pneumoniae
atgagttttgatttcaaccttgcaccgataagcttaaaagcccgacaaggtaacatcgatctcgccgcttccggcgtcgcctacaaagaacgaatgaacatgcaggttgtcgccgaagtggtggcgcgggaacagccagaacatctgcgcgagtatttcatggaacgcgtccgctactaccgggagcagagcgcacaacttcctcgcgcttccgatccactttacacagaaatggcagacttaaatgcaagaaaataa

SEQ ID NO: 223861 - DNA, 600 bp, Klebsiella pneumoniae
atgcaagaaaataaaatacaagagcagcatgaaaaacaagaaacaaaatctcaggctatcgatttttcaacggaatttgatgctctgataaatgcaaaaggaaagattactaactccatgctaacggcggttaatcgatactttttgtacttttctttctttgagtctttgcttcttggatgctctggagggcaaaggaggagttctgcctatgcaaaggctctcaaagatagggggtattttgatgagaatgtaattaaatcaacattcaacgtgtttgcagatagatacgttaatgatcgacagaggtatgagagtctttgtggtgaagatgggcatacacgccctgaaactaaagaaaaatattatggtgtgatgtgtgcgaatgcagatgaccttgttgcaaagtttgaattatgtttatttgtctgcttcagactgaggaataatcttttccacgggccaaagtggagatatttccttgacgggcaagaaaaactactcttgactgccggaacttttatacattcgattcttgataaagtccccagaagtgaagaaggttgggagtttcaggatattttgtcgccaacagaatag

SEQ ID NO: 223862 - DNA, 324 bp, Klebsiella pneumoniae
atgcgaatgccctacaaacaagatttcatcgccgctctgctggcagctaaggagcagggtatcggcgcaatactggctttcatcatggcgtatttgcggggccgctataacggtggcgctatggcgaagacgctcatcgatgcggtcatgtgcgcgatgatcgcctggttcgtccgtgaccttctcgacttcattggcctgagcagcaatctcgcttacatcgccagtgtcttcattggctacatcggtactgactcgatcggcaacctgattaagaagttcgccgccagaaaagcaggggttgatgatgctggaactcaataa

SEQ ID NO: 223863 - DNA, 480 bp, Klebsiella pneumoniae
atgctggaactcaataagcagcgcagggcatttctggatatgctcgcctggtcagagggtactgacaagccagggcagaacaccaaaaacaggggttatgatgtcattgtcggcggatcgcttttctctgactacagcgaccatccacgaaaactgatcagcctccccaggctgggcatcaaatctaccgcggccgggcgttaccagctgctttcaaaatggtgggatgcgtaccggaaacagcttggactgaaagacttctccccggcctcacaggaccaggtggcactgcagcaaatcaaagaacgtggcgcgcttccgctcatcgataacgggcagattcggcaggctatcgatcgctgcagcaatatttgggcatcattacccggtgccggctatggccagtttgagcataaggccgataacctgatcgcaaaattcaaagctgctggcggcgttgtagccgaagtacaaccatga

SEQ ID NO: 223864 - DNA, 462 bp, Klebsiella pneumoniae
atgaaccggctaatcgcagttatcagcgccgtactgatgtgcctgatagtcagcctcggctggctggccagtcactaccacgacaacgcgaccgagttcaaaaggcagcgggacaaagcgactgaacaactcagcctggcgaaagacgccatcgctgatatgcaggtaaggcagcgcgacgtcgcagcgctcgatgccaaatacacgaaggaattagccgatgcgaaatctcagcttgatgatctgcagcgttgcgttagctctggcaagtgcgggttgcgcgtcaacgcagaatgtcccgcgaacggagcggccagcgccggcggcatgggcgatgcttccggcccccgacttactgactccgctgaacgggattatttcaccctcagagagcgaatcaccacaatcactggacaagtgagctacctgcaggaatacatccgcacgcagtgcatgagatga

SEQ ID NO: 223865 - DNA, 573 bp, Klebsiella pneumoniae
atgtgtgatgtagacgaatcgatggatgtcaacttttctcattttgagttttttacccttcatacagggcaggcagaaaaattcattgccgcctgcaccaccgaagatgatatcggggtggttttgagaatccacctcttgcttgagaaagatatcgaagtgtggtgtgcatgcgcatcgaataatggcaagttcttccaagggtttgatgaaaatttaaccttggaattctcttctaaggcacaactggcgctgaattttggattaagcgagtcgctatataaagcggtcaaacgcatcaacaaaattagaaatgttagggcgcatcaaatagataagtttgcgataactgactcagagattgattcactatcgagtttactccaagtaggctatccaccccatttattaccaatgaatgaatttaatgctcaaatagatggtggcaagatatttaccttcacgagcgacgaaacacccaatagactgaaatttataatgttatattcaatactaaaaatgcgcatgtgcgatgaagcattacaacagttgcacgccaaatccagacaatag

SEQ ID NO: 223866 - DNA, 915 bp, Klebsiella pneumoniae
atgtcgcgtaagtcagtcagtaagatggaacgcgacattgaggaccggtattacgagataaaggtggcgctaaaagctctgctcgaccagcgcctgaccgggcgagagcgcgagtcaaacagcaaaaattggcactttctgtgccacgttaacggcgccgagccaacgctctaccaggtcaacgctggcaagttcatctacgacatgtcagcgcaggagctggcggacctgctggaagcggtgcagtccattctcgacgattacctgctggaaggcggcgaacaaaatctctgggcgatggactacgtcgccgcagaggcgcagcgcggcacgctggaggcattcaacaacctgtcgcagcagtcgcaggtgtacgccagccagacgacgctacagcagcttttaaacagccccggttatctgaaccagatagcggcagccaggctgacaacgttcagtgactggaaggtcatcagcaatgccgtgcgcggcgacctgaccaacatcatcaccgatgcggtggcgcgcggagttaacccacgggaaacggctggcgtcatcagcaagcgcctcgatgtttcgatgtcgaaggccaagaccatagctcagactgaacaggtcggtgcgttgcgacaggcgcaatggaacgaaacagactgggcggcggatcggcttgggctgaatactggcttgctgtggctgtcggcgctcaaaccgacgactcgcagttggcacgccagccgccacggtaaggtttataccaccgagcaggtgcgagacttctacgccgagaacggcaaccggtacaactgctattgcagccagattccggtgctgcttaatgacgacggcagcatttttaacgaagggttagctgataagctggcgaaagaacgcaagcagtggcagtcttga

SEQ ID NO: 223867 - DNA, 366 bp, Klebsiella pneumoniae
atgtcgtctactgcttcatggtcatacaacaagccatgcaccatctggaaaaggattcgagatgctgatggtagtgatactgatgggggagggcagccgtatggtttccagccaccaataaacatcatgtgcgactacatcggcggcctttcgtcaaaactcagcgagttgggaaagggtattgtcgttaaaaataccttcttcactgcttacgctgatgccaaagagggcgattacatccttattggaaccagtacggatgccaatccatataacactaaggcagatgaaataatggcgttcacgcagtggaacgacacgctcgatggtgttgaagatgactgggccattatcactggagtttga

SEQ ID NO: 223868 - DNA, 1350 bp, Klebsiella pneumoniae
atggcagaagtaccgttaccaactcccacagataacgctgttccgagcacggatatccgggacgcagtttatgccggcgccatgctggataaggttgtcaccagtaccgacctgacatacaccgatcgcctcggcggtgagcattacaccgtagacggaattaaggcggaaggggataaggtcgttgaggaaacccggcagaacctgatccctctcagtcggcagtatatgaccctggcagcagcgcaggcggatatcgcgaatatcccggatggctctgcaacatatgttcgtagtccggatgataattctcttgcgtatgaatatgtaaataatggtggggtgttaacggccacaggcaggagaatgccttctcaggaatatattgattccctcattgagtcaataaactcctcagatgatgatgttccgtacttaacattggctggcaaaaatgggtttagctggtcattactgcgtaatagcgggctgtattggcgctctattgtattaaaccagcaggaattaaaaaacgaaataattaatataaaaaataatcagttgcgagccgggggcatagaaatgtcgcaattttctggggataagcttgttctggttggtaagcatggattttccaaagaggtcgctctttctggttttacacctactgaaaacgttgagtcagatgctcttgagcactggatttttggtgtaagcaatgattcattcgtcggcttaaatggaaggcataacttaattccacaaggtattaatcacgcattttcgaaaaattatgtcagtcttccggcctggagcggtgcactggtttcagatgtgcctgattctctggaatacacccgctgtgcagtcgtgcgctatgacggaattaagggagtttcactctttaataactctgactatgggctcagtatcggtggcgggcgcttcgtcattacaagcgaaacaaagaccggcgatgcgctgaaagttgtctgtgtggaaaaagggatggatacgcagggctggtatattccggcctctgttggcgactggatttttattgccctcacagaacggctttctgatactggtgccagctgctcacgcagcatattcattggtgggcagcctccgctggatatcagggagcctgataacaaaattcgcgacttagctacataccctcttgccattggcaatgcctggtcagataacgcgaactacaaaaccaatcccctggttatagccgaatccattatttacgacatcgcactgacctcctcagaggttcaggcgctctatgagcgcagaaagcaggcaatggctgcacgcggcataaaaatttactga

SEQ ID NO: 223869 - DNA, 762 bp, Klebsiella pneumoniae
atgagtattgtacttaaagatgaatcaatgattcttaatactgctgagacggttgataccgtggttgccccagtgatgccatatacctctcttataatgtccggtaatcaggatatggcgaccgcattccgccttcgccgatatggagacgttatctctcaggttgtgcttaacggcccatggacattcagccagccaggtttcaaagcagatggctcagccctcgcatattttgatgtcgacgtgacacaacaggttcctcgcacattgctggttaccggcctttttaataaaggcgcgcggattgccggtattgcctttggagatccgaacactttgaaatctttctacgttgagcgcggcagcggcgtttctgggtcgggtttcccgtcgaaaaacctcatccccgtctggtctggtgctgccatcggtaccgccgggaaacagcttgctctcgatactgaacctgacggcgctttaacgctgtttatcagcggagacgaaaccgggacgcgatggggcgtaatctataacggcattatgaaagcgctcgcgaaagactcgacctatgcactatccacggcaacaggccgtacacgcatcggcggctcctcagcacagccaacaggttccgccattgcggcgcacggaatttacacggctgcatcatactcgcgcctgctgagcgataccgaactgctgcagatggggaattttatgaacgcctatgcagaggatatgggagcgaccatgtatgaataa

SEQ ID NO: 223870 - DNA, 1356 bp, Klebsiella pneumoniae
atgaataatgtctctctcaccacattcccggacgagattgaaaccaccatgcaggcggcatggtggaaaccgctggcggtgaaattcgggcgcgaggtgttcgcgtatattgtgactgagacggcggcgaccggcagtgatgtcgggacgcacaaggttaaggttgcgctgcgcaatgccgatggctcattcagtctgggatattgcaagctttctggtggcactgatgctatctatcccaatgacctcggtcataatcagccatctgtggcagttgatggactgggtcatatttgggtattcacctcgatgcatatcgatctgtggcatgtatttcgctccctgaaaccattcgacgttagcactatggtgcagtttaacctgctgccggataccacctggggtaactcttacccggtgctggcgcaggataacaacggtgatgtttatgcgatggtacgcgacttccccatcaccaacgtcacacagtctggacagctgtataaattctcacttacagagcgtatgtggcgacgtgtggcacagctaggctatgagttccagcggaccttttaccctgacgacctgattgtgacccgcgattatgtgcatattttgtgggagtggggcccgctcggtgcaggaactctacggcatctgccatcatatgcccgttatgataaacagtcaggacaactgcacagtatcaccggcgaaacgctaccaatgccccaggacacaaccgccgcgtttaactttcacatcagggaactggagccgggagagttttttgtcgaaaacagcgataccgccaacatcaatatcactggcggcgtacaggccgccaagctctgcatgaacggggagaacttcatcggggcactgtaccgtcaccgggcacagggggtggatggcgggacgtttggcggatttaacgtcatattctctaccttcagtgatggccagtggcagcacgaaaccatcgtggatatacaacaattcagtgatattcagacaggtgcagcgctgtcagccacatacaccagaggtgagacgcgcctgtttttttctgttgagatcggcaacaatgctaccgatcccaatcagaacaaagcctggccggtgatggcgcggaaagtgaacggccagtggttgtactcaccgctaacctcaacttcgtaccgtcgcctgcttcgccttcgtaatgagaaaatcaacgggggagatctgttgataatgaccacaccctatacaacaccgcgcactatgtatcgcctggttgtccctgacagctacagcagtgatgaagagtttagctccttaacagacttaatctcatatctcaggttgcattaa

SEQ ID NO: 223871 - DNA, 1008 bp, Klebsiella pneumoniae
atgacttttgacgcaccaaggatattggagctgttaccttctatacatgcaactatcctgtccatttatggggctgcaatcccagcattttacttctacgcttacgaaaaggttaagaaagcaagagatgagcttactgaaattatatctgaagtgagaccttcttttagtggactgaaccctatcccagataatctaaatatttatacagagaaaggaaaatttgactggggtgaaaaagcagatatgtttttgatagagtcaatgagttttaaccacaacagatacattaacaatgaggaactttctaaaaaggtctccacctttttaaatttcctcggtggagtattaagccaccctccttgctttggtattaacttttgtcaaaaatacacatctccaaatgaaataaatatatcaagcaatgacatccaagaaatatatgaaacaataaggttgcttcatcatagagtattcgtttttaggcctagtttttatgaactctgtcgtcaggctgatgcatacatgaaagagaagacaaccaaggaaatcgctgatgctttaaaaaacagtacaaaacctcatgagtcattgatgtccagtccagaggtagcttcgttcgtgcaagaacgtgataaacagttttatgaatcatttatacataatgaaaattatgctaaaaatttggaaatcataaaacaaaaatatgagtttattttgaatacagccatacctatactgaaggagaaatgcgttgagtatgaacgatggagagatctgttttcgatcaagaaaagagtaaagcaatctcttaaatatctatctatcggaatgctttttggaattgttctgccgttagtgatgtcattaacattcaaaggacggactaacttcgattcaccagtcatgataagtttagaattcacattattaatagctccatttatattatattcaattattatatatgggtattataaggaaattaacaaatcaaacactttataa

SEQ ID NO: 223872 - DNA, 240 bp, Klebsiella pneumoniae
atgcttcgacagtcagacatcgccgcggctttccgcgagtccattttgcgcagttccaaggggttccagtacctgcacacccgcgacttcgttaccgcactgcgccggcgcggcatccacttatccgaggtggaggcgaactcttggatcgcacgcgagcagacgtatttcgtcgataagacgtctgaccatagcgaaaacaggctgtggatgatggctaacatggggagggtgctctga

SEQ ID NO: 223873 - DNA, 318 bp, Klebsiella pneumoniae
atgggctttccgtctccggcgtccgactacgtcgagcagcgtctgtctgttaactcgatctgcaatctagggcctaacactcgcgttttcgaaagggatggcggttatgtcgtcgtagatattgggcttaaacccaggcagggaagccaactcattattttatacgatggcaggtctgagcttgcaaagctgatggggcggtcgctgataaccgaagacggcgaagcgattgaaggcgaggctctggatgatgtcactgtcgcaggcgtcgtgacgcatatcatttgtgatgtgcgaagcgatggcttggcggtttaa

SEQ ID NO: 223874 - DNA, 1512 bp, Klebsiella pneumoniae
atgccgctgttctatcaaaaccccgtgattcatgccgattacgccgatcccgatgtcattcgcacaggcgatgatttctggatggtggcttccagtttccatcaactgcccggcttaccgcttcttcattctcgcgatctcatccactggcaaatcgttaaccatattattaaacgcctgccttcgcctgaatacgacagcgtgcagccgggaaaggggatttgggcgccttccattcgtttccatgggggtctgttctgggttttctacagtttgcccgacgagggtatttttgtttcccacgcccgggatccgttaggcgagtggagcgaaccctattgcctgaacgcttcccccggctggatagatccttgtccgttctgggacgatgacggacgagcctggctgattcacgcttttgcttttagccgcagcggggtgaaaaacaagctccagatttttgaaatggcggcggatgcatcccggctgttggataatggacggatcgttgttgacggaacgccctcccatcccactctggaaggcccaaaattatataagcgcaatggcgaatactggatattcgctccggccggaggcgtcaagcgaggctggcaaacggtcatgcgcgctccgacgctatctggtccatggcaaagtcgcgatgtcttgcatcagggagattcaccgataaatggccctcatcagggggcgtgggttgaactggagaacggtgaaaactggtttttccactttcaggataaaggcgtgtacggccgcatagtgcatctccagccgttgagctggcgggctgacggctggccgcaaattgggcaacggcttgacgatcacggtaaggggcagcccgtaagtctgcatcgcttacccgcgctgccccttgctccatgttgtttgcagaccagtgacgatttcccgagtggccagcccggccttcaatggcaatggcaggcaaacccccagcgccgctggctaatgccgcatgcgcaagggctacgcttgcgctgcgcgccgaccgcttccgatatcagcctgtatcatttacctcaattgctgctacaaaaatttcccgcggaacgttttcacgtgcagacagcggttcatccgatgttttctcaggatggcgatgaagcgggagtcgcgatttacggccaacgctttgccgcactgcgcgtaaggtactgcgcgccgactcttcagctatcgctgtgccacggatggatagacgattgcggtgaaacgcatcaagaatccatcgaacttgaggcgatcgccggttgcaacgagattgcgctggggttccaggtggactacgacgggatagtccgcttttgttatcggcttacgcagcgggaatggcagcaggtgacaccgtcgttttccgccggtgcgggaaaatggatcggcgcacgtatgggcatttacgcgcgtggcgcgcatgaaaacgccggcagcagcgccgttttctcaccgtttatcgtgcgtttgcagtaa

SEQ ID NO: 223875 - DNA, 699 bp, Klebsiella pneumoniae
atgaaaacattacgcacgctattgatcggcatcccgctgtcctgttttacgctaaatacgcttgctgcggcaacctgggttgataatcgctacgcgcatactacggcttctgagaaaaatcagtataaaataggcctgggtcatatatttgataatggcgccggtgttctggcctccgccatgtacgacctcggacaagattttaatcaaatgaaaagctcctttcaggagtttgaaggctggtatccgatcccgcttaatgataaatggacgctgacgccgggcggattaaccgatattgatagtaaaggaacgaagctggcgccttatatcagtctcgattataaaatcagtaaatctttaagtttaagcagccgctaccgctataaccatatgacccataaagatcgcgattacaacggctatatggattacaacgacagccatcagttcgacctgtaccttaattaccaggcgactgagaaactgtggcttcagttcaacccggaattcttcgtcaacacaaacgacttcaatgcctctaacgggcagaaaacccactgggagccaagcattgtggcgcgttaccgtgtcgataaacactggcttccctatgcggaagtggcctggctcgatcaggatcagaatcacgacgatcaggtgcgattccgcctcggcattcgctattacttcgattaa

SEQ ID NO: 223876 - DNA, 843 bp, Klebsiella pneumoniae
atgactgatatccagacacaaagcgttagcgcttacgccgatgataaaagcgagaaaaagctttttcgtcagctttttatccgccagtttccgctgctggggtcgatgaacttcacccgtatggagggattaagctacggctgggcgctggcgccaatgctgaagaaaatctacgccaacgacccgcaccgttatcttgagtcgcttaagcgaaacagccagttcttcaataccaaccagcatctggcgccctttattatgggcctgacgctgtcgatggaaaaagagaacgccgccaacccgaactttgatacctccagtattaacggcatcaaagtggccttaatggggccatttgccggggtcggtgactccttcttctacggcgtgttgcgtattatcgccaccgggattgccattggcctggcatcacaagggaatccgctgggaccgctgctgttcctgctgatttacaatattcccagctatctgctgcgctattacggcggcgtcatgggctaccgtttaggctcgaagtatatcgccgaagcgacgcagtccgggctgctgagctgtatcaccaaagcctcatcaattatgggtttaatgatggtgggggcaatgagcgccagtatggtgaaatttaccactacctttaaaaccaccatcgccgggcagccctttgtactgcaggagatcctcgacaaaatttgcgtcgggttaattcctctgcttttagttctgggctgcctgaagctgctcaataaaaaggtcagccccaataaggtgttaattatgctgattgtcttcggctttgccgctgcgggtattggcataatttaa

SEQ ID NO: 223877 - DNA, 804 bp, Klebsiella pneumoniae
atgttaacttccgcaattcttgttgctgtcattatgtttctggtgaaaaccgccgaccatacgctgggtcaaccgctgattgaacgtccgctcatctgcggcgcgctggtggggctggtgctgggagacctgcaacagggcattattatcggcgccacgctggagctgattttccttggcaccatcaccatcggcggctcggttcctgccgaccttgcggtggggtcagtactggcaaccgcttttacgattctgacccacgctgagccgccggtggccgttgcgctggcactgcctatcagcctgctggcggtctttgtttatcaggtgctaaagctggtctataccgccctggttgaaaaatacgatgcgctactggaacaggggcgtgaccgtgcggcgctgggtctgacgctcggtatgaccttcttttacggcgtccccttcgccctgatcgccttttttggcgtgctcttcggcaccgaggtcatccgcagcctggtcgagagcattccgggtacggtcatgcgcggcatgacggcggttggcggcatacttccggcgctcgggttcgccattctgctgaaggcgctgtggaaccgtaacatcgccgccttcttctttatcggtttcgcgatggcggcctatctgcaattgccgattatggggattgcgattattgcagcctcggtagcggtctatctgtgctttaacgaattcaatcagcttaaagcgaataaacaaacggcaacggcggccgcgtccgcctcagttgacgataaggatgggttcttcaatgactga

SEQ ID NO: 223878 - DNA, 498 bp, Klebsiella pneumoniae
atgatttctttagtacgtattgacgatcgtttaatccacggacaggttgccgtggtctggaccaagcatctgggcgtgaaccgcatcctggtcgccaatgaccagatcgtgaataacgaagtgcagaaaatgtcgctgcgcatggcggcacccgataccgcaaagtgcgccattatggcggtgaaggacgcgggcgatgtgcttaacgacccgcgttcggaagccatgaaaattatggtgatcgttaacaatgccgccgacgcccgtcggctcgtcgaacaggcgccggggataaaaacgctgaacgtcgctaacttcgggcgcatcaccgacaacctggcggcgaaaaagcgcattagcgataccgtctacgtgacgccggaagatgtggcggatttccacgctatcgccgaccgcggcgttgccgttgaatatcaggtcctgccatctcatccggtgaaaaacctgattgagatgctggataacgccgccagctaa

SEQ ID NO: 223879 - DNA, 1179 bp, Klebsiella pneumoniae
gtgactatcgcactcgaagcgcttgatgcgcgctatctctcgccgcagccgaggttaaatcatgcctggcttaacgcggcaatcggcgaagtgctgacgcagctcgacgccatgctgccgcgctttacggcaacctttcccgccgccagtgcgacacggggccgctatgaaagcgtggagaaagtcgactggaccgagggattctggaccggcatgctgtggctcgcctgggaggtcaccggcgatgataaatatcgggcggtggcggaaagcctgctcgatagctttgaagaacgtctcgataagcagattaaagtggatacccacgacctgggctttctctatctcctctcctgcgttaacgcctggaagctcaccggcaacctgcgcgcccgcgaactcgccctgcgcgcggccgagctgctctatcgccgctttaacgccacggcgggcgtcattcaggcctggggagatttaaacgacccggcgcgtcaggggcggatgatcattgactgcaatctcaatgttccgctgctattttgggccgccaacgaaaccggaaatcagcggtggcgcgaggccgccagccgtcatctggcgcaggcggcacgctatctggtgcgcgaagacgcctctactttccatacattttatatggatgttcatagcggccagccgctgcgcggcgatacgcaccagggattcagcgacagctcctgctgggcgcgcggccaggcgtggggaatttatggtttcgcgctgggatacgcccacaccggcgatgcctggcagcccgagctctcccgccgcctggcgcactattttcttaaccgcttaccagaagattttgtctgctactgggatctgatttttaccgccgaagataatcagtaccgggatacctctgcggcggcgatcgcggcctgcggtctggcggaactgctgaagctattaccgctcaccgacccgctgcgtccggcctacggcaacgctatcgaactgatgatgcgcaatttacgcgagcgctactttgcccacgcgcaggacggcctgctgcgcgaaggcgtttataactttggccgcaatatgggcattaacgaacctaacctctggggcgattacttctatttcgaagccctggttcgcctttcccgcgtctggacaccctacttttgctaa

SEQ ID NO: 223880 - DNA, 483 bp, Klebsiella pneumoniae
atgcgagagatgtacatcgcaacccatggccgctacgcagaagggatagtatcggcattaaatctgctgattggcgacgaccatggcgtcacgcccgtctgtgcctactgcggtgaaattgagtcaacagctgaactggccatccgctttgacgctatcgcccggcaggcggccggtcgcggcaatgagctggtgctgtttaccgatatgcccggcgggagcgtcaacaataccgccgtacagatgatggtcaaatatccccacgcgcacgtcatcagcggcgccagcctgattatgctgatggagttttgcatgtcggaacacgccgaaaccgcacagcggcttcaggatgccgtcgccgccgccagcggggcgatgcagtacatgaatcagctgccggaaatcatcgcggcgcgccaggctgcgcagcacaaaacgcaggacaatattgatgatttttttgccgaagagggaaacccgtga

SEQ ID NO: 223881 - DNA, 2604 bp, Klebsiella pneumoniae
atggcgctgtcggcaaaagaaaaattattccagaaaatagtcacccactacgcacggaaacccgcaggattcacggctcaggactgtgcggactttatgcaggttaaccgcagcgttatcagccattacctcaacaggctatgcgatgacggttatctgcgtaaagaaaacacccgtccggtgcgcttctatgtgcaacaaaacggcggggataagactcagccatctcgcgtagtgtcgaaaaagcacgacgccttccagccgctgattggcgcgcacgggagcctggccgacgccgtcgcgctgtgccgctcggcggtggactatcccgatgacggtttgcctgtcctgctctccggggagagcggcgtcggcaaaagccatctggcgacgctgatttatcagtacgccctcgagcgcggagttatcgcagcggacaaaccattcgttgagcttaactgcgccgattacgccaacaatccggagctgctttcggcaacccttttcggctatacccgcggcgctttcaccggcgctgaccgcgagaaacgcggcgcctttgatgatgccgatggcggatttctgtttctcgatgaagtgcatcgtctctcggcagagaaccaggaaaagctgtttctgtttatggataaagggtatttctaccgtcttggcgataaccgtacgcgccatccggcgtcgctgcgctttatcttcgccaccacggaaaatatcgataccgtcctgcttaacaccttccgccgccgcatcccggtgcgcgtcacgctgcccaactatatttcgcgcccgctgaccgagcgcgtcgctcaggtcagccactttttgcagcaggaagcgcgcagcctgcgtcgggatatccatcttgataatcagctgatgcatcagctggtcacctccccggtgcgcggcaatattggcgagttaaaaaatcagatcaaagtgatgtgcgccagcgcctggagcgagaatcgtgaggctgacgtcatcacgctacgcggcccggcgtccggcggcgaaataatccgtattgccgccagcgcgcatgaagatgcgctgaatgtcagccatctgctgcccaaagcgatgcgcgatgaggtgatttttcgcgacttttgccacagcggtaacgtgctgttgctgaatcgcaaagttgaacagctgctgactaccgtcagcggcgcggtcgccgccgagtcgctctacagcggctatatctggcagaacaccgttcacgcgctggaggagctggagagcctgaccggcgtctcctgtcacccggaaatccgcaaggcggtctggctctgcctgagctatgcgctgcatgctccggaggaggcgctcgacccagacgaactgcaaaccatttccgattatgtttccgctaaggcacggctgctggccgaagagtgcctcgctttgctgagcaaacatgtcacccagcagccgctccccctgcttcagccgctgttaagctgcgtttttcacaccctcgccggtgaagacgatccgattcagggcattatcgtgtcccacggtcgcgccacggcgtcgagcatcgccgggatcgccaaccagttgaccggcggctactattttaaagccttcgacatggcgaacgcgacgtccaccagagagatcatcgacctgctgattgcccacgtttcccgccttaaacaaggcgcggggctgattattctggtggatatggggtcgctaaaagagatctacgaagagattaagctccacctgcacggcgaactgttggttatcaacaacgtcagtacggccatggcgctcgatattgcggccaaaattcaggataaactgtcgatggaggcgattattgagagcgccaaaggggcgtacgaggtggaaacgcgctactacgcgggcgtgttaccgggcaataaaattattatctcctgtatctccggcgaagggatctcccgcaagctaaaagatattgtccagcgcttcctggcccaggatgagatcgacattattacgatggagtatgacgatctgaaatggaaaatcgcccacgccgacccggcgctaaacggtacgcggctaatcatcaccacgaccgatctggaagccggctatattcctctgcttagcgtggaacagttgattaaagaaaagacgctggtgttaaaacgcgactacttcaacgggctgctgatggaaggcggcctggagcccatgattgatgaagtggtcaagctgtttaccgtcgaaggcgtcgccagccgcctcaacttcctcaatccggtggtgattattgatgaagtcgaagcggtcattaaacagtatgaagccttctacaaaatccattttgaaagctatctgcgcatcaatctgtttatgcatatcgccctgatgatcgagcgggtaatggttaacaacggcgtacgccaccgcgaagaggcggagctgacgctggcgcagcaggcgtttgtcgccgtccacgacacctttttccaggccctgaaccgtaaatacaatatcatcctgccgcttaccgaagtgctgatgatttatgaaatcatggagccgtggatcgcctttgaccccgaccattaa

SEQ ID NO: 223882 - DNA, 1368 bp, Klebsiella pneumoniae
atgaatagcttcgtggcgtttatcgttaaggatttacttggtcaggcatccattcttattgcttttattgccatgcttggcctgatcctgcaaaagaaatcgccgggcaaaaccgcggaagggacgtttaaaacgctgcttggcttcttaattatgatggcggggatcaacatcattgtcgccacgctaacctttctgaacgatatcttcacccagggatttggcatgaaaggctatattaccgatgtggccgccatcgccgggttagcgaatcgggaattaggttcggaagtggcgctgacgctgctggtgatctttgccgtcaatattattatcgcccgtctgacgccgcttaaatatattttcctgaccggccaggcgctgctgtggatggcgacgatcggcgccgtgattggctataagtccgggctcaccggcgtaccgctgattttaaccgggggcatcttcggcggcgtgatggcggtgttaatgccggccctggcgcagccggtggtcaggcgcattaccggatctgacgacgtggccctggggcacttctgtaccatcggttatctggtgcaggccgccgtcgcaaaggtcgtcggcaaaggctcccgctccacggaagatctcgagctgcctgataactttaagtttctgcaggatacctatctggccatggcggtggtgatggtgccgatgtatctcatcccggctatcgcggcgggcccccagtacatcgcgcagttctccggcgggattaactacctgatgtatgcctttatgcagtccattcagtttgtcgccggggtctttgtcctctatagcggcgtgcgtttattgctcaatgagctggtgccggcctttcgcggtatcgcgatgcgtattgtcccggatgcgaagccggctcttgattgcccggtactgtttccttatgcgccgaatgcggtgattgtcggatttctggcgacgaccgtcggctcgattatcggcatgctggttttcccgatgttcggtctggcgatgatcctccccgggctgttaaccaactttttcgccggcggcacggcaggggtttttggcaacgcgctgggcggacgccgcggggcgatgatcggcggggttattcacggcctgtttatcacgtttctgccggccattctggtgcccatgctggagagctatggctttacgggcgtcaccttcagcgactctgacgtcatcagctcgggtctggtattaggccacgccttccagaataactggctctttgtcgccttatttattgtgtttgtcgccgcactggcatggtttgtcaacgggaaatccgctaagccgaaaggggaaaatgttcatgagtctgtataa

SEQ ID NO: 223883 - DNA, 192 bp, Klebsiella pneumoniae
atgatgggcgctggcgataaatgtaaatttatctggctggaaaataagcaaaaatgcctggcgttcgccaccggcgccaggcatgaccttctcatctcgggaggggaggggataccttacgcctgcagccaccataccgcttcgaacggccgcagcgtcagcccggtcgggcggggcgtggtctcggcatag

SEQ ID NO: 223884 - DNA, 594 bp, Klebsiella pneumoniae
atgaccaccatcgcccttattgacgatcatttgattgtccgctccggctttgctcagctgctggggctggaaactgattttcaggttgtcgccgaattcggcagcggccgcgaggcgctggcggggttgccggggcgcggcgttcaggtctgtatctgcgatatctcaatgccggatatttccgggctggcgctgctcagccagctgccgaaggggatggcgaccatcatgctgtcggtgcacgacagcccggcgctggtcgagcaggcgcttaacgccggcgcgcggggctttctgtcgaaacgctgcagcccggacgaacttatcgccgcggtgcgcacggtggcggcgggcggctgctatctcacaccggatatcgccatgaagctggccgccgggcgccaggatccgctcaccaaacgcgaacgtcaggtggcggaaaagctggcggagggcatggcggtgaaagagatcgccgctgagctcggactgtcgccgaaaaccgtccacgttcaccgcgctaacctgctggaaaagctgggcgtcaacaatgacgtcgagctggcgcgccgtatgtttgacagctggcaatga

SEQ ID NO: 223885 - DNA, 2631 bp, Klebsiella pneumoniae
atggtgacggtttttgttgaaatactgaaatcctccgtactattgtacctcgggtttttgaacatcaggcgatatgtcttgtacctctatattgagacactgaaacagagactggatgccatcaaccaattgcgcgtggatcgcgcgcttgctgccatgggacccgctttccagcaggtttacagtctactgccaacgttattacattatcatcacccgctgatgccgggttaccttgacggtaacgttccccgtggcatttgcctctacacgcctgatgaaacccaacgccactatcttgaagaactggaactgcatcgcggcatgcagacccaggagccgccaaaaggcgagctgccgatcaccggcgtctactcgatgggtagtacctcctccgtcggccagagctgttcttccgatcttgatatctgggtatgtcaccaggcctggctggatagcgaagagcgccagctgctgcagcgaaaatgcagcctgcttgagagctgggcggcctcgctcggcgtggaagtcagcttcttcctgatcgacgaaaaccgcttccgccataacgaaagcggcagcctcggcggcgaagactgtggttcgacccagcatattttactgctcgatgagttctaccgcaccgcggtgcgtctcgccggcaagcgtattctgtggaatatggtgccgtgcgatgaagaagagcattacgacgattacgtcatggggctgtatgcccagggcgtgctgacgccaaacgagtggctcgatctcggcggccttagttcactgtcggcggaagagtacttcggcgccagcctgtggcagctgtataagagtatcgactcgccctataaagcggtgctgaaaacgctgctgctggaagcctactcctgggaataccccaacaaccgcctgctggcgaaagatatcaaacagcgcctgcacgacggcgagatcgtctccttcggactcgacccctactgcatgatgctggagcgcgtgaccacctacctccaggccattgacgatgaaactcgtctcgacctggtgcgccgctgcttctacctgaaagtgtgcgaaaaactcagccgcgagcgcgcctgcgtcggctggcgtcgcgaagtcgtcagccagctggtcaacgcgtggggctgggatgaaaagcgtctgatgatgctcgacaaccgggcgaactggaaaattgatgaagtgcgcaaggcgcacaacgaactgctcgatgcgatgatgcagagctatcgtaatctgatccgtttcgcacggcgcaataacctcagcgtctccgccagtccgcaggatatcggcgtgctgacgcgtaagctgtatgcggcctttgaagcgctgccgggcaaagtgacgctggtgaacccgcaaatttcgccggatctgtcggaaccgaatctgacctttattcacgtgccgccgggtcgcgccaaccgtaccggttggtatctgtataaccgcgcgccggatatggaatcgatcatcagccatcagccgctggaatataaccgctatctcaataagctggtggcctgggcctggtttaacggcctgctgacctcacgcacccgcctgtttattaagggcaacggcatcgtcgatctggcgaagctgcaggagatggtggccgatgtgtcgcaccacttcccgctgcgcctgccggcgcccacgccaaaagcgctatacagcccgtgcgaaattcgccacctggcgattatcgttaacctcgaatatgacccgacggcggccttccgcaatcaggtggtgcacttcgatttccgtaagctcgatgttttcagcttcggcgaagagcaaaaatgcctgatcggcagcgtcgacctgctgtatcgcaactcgtggaatgaagtgcgtacgctgcatttcaacggcgagcaggcgatgattgaagcgctgaaaacgatccttggtaaaatgcatcaggatgccgcgccgccggacagcgtggaggtcttctgctatagccagcatctgcgcggcctgatccgcacccgcgtacagcagatgatctccgagtgcatcgaactgcgtctctccagtacccgtcaggataccgggcgctttaaagcgctgcgcgtctccggccagacctggggactgttcttcgagcgtcttaacgtttcggtgcagaagctggaaaacgccattgagttctacggcgctatctcgcacaacaagctccatggcctgtcggtgcaggttgaaaccaatcacgttaagctgccggcggtagtggacggattcgccagcgaagggattatccagttcttctttgaagacgcggataacaacgacagcggctttaacatctatattctcgatgagagcaaccgcgctgaggtctatcaccactgcgagggcagcaaagaggagctggtgcgcgatgtcagccgcttctattcgtcatcgcacgatcgttttacctacggctccagttttatcaacttcaacctgccgcagttctatcagattgtcgaggtggacgggcgcacccaggtgatccctttccgtacccaggcgattgccgccgcgatccccaccagccaggacgttaccgcctcgccggtgctgcagcagcgctactcgtag

SEQ ID NO: 223886 - DNA, 717 bp, Klebsiella pneumoniae
atgcgtttttaccgacctctgggccagatttccgcgctgacgtttgacctggacgataccctttatgataaccgcccggtcattgaccggacgatgcacgagtcgctggtctttgtacgcagctaccatccgtcgctcagccagttcgacgcccatgagcttaatcagctgcgccagacgctgttggcatccgagcctgagatctatcacgacgtgaccgtctggcgccaccgtgcgctggagttaggcatgcgtaacgccggactctccgccgacgcggcgaaagcgggggccgatgcggcgatggaacacttcgcccagtggcgcagccgcgtcgatgtcccgcaggagacccacgatacgctggcgaagctggcggagaagtggccgctggtggcgattaccaacggcaacgcccgaccagagttgttcggcctgagcgactatttccgctttgtgctgcgcgccgggccggatggccgctccaagccgtttgccgacatgtaccatctggcggcggagcgcctgaacttaccgcgcgggcatattctgcacgtcggcgatgacctgaccactgacgtcgccggatcgctgcgctgtggcatgcaggcctgctggatcaaaccgcaaggcgcggacctgatgcacaccgcggacagccgcctgctgccgcatattgaaatttcacagttggcatctctgacctcgctgatataa

SEQ ID NO: 223887 - DNA, 894 bp, Klebsiella pneumoniae
atggaagcgaaacagacgcggttggggattattctggccctcgccgcctactttatctggggtatcgcgccggcgtacttcaaacttatctactatgttcccgccgatgaaattctgacccatcgcgtgatctggtctttcttcttcatggtggcgctcatcagcgttagccgtcagtggccgcaggtgaaaaagctgctgaagacgccgcgcaagatcttcctgctggcgctctctgcggtgctggtcggcggtaactggctgctgttcatctgggcggtgaataaccaccatatgctggaagccagcctcggctactttatcaacccgctggtgaatattctgttagggatgattttccttggcgaacgtttccgtcgcctgcagtggctggcgatgatcctcgccttttgcggcgtgctggtgcagctctggacctttggttcgctaccgataatcggccttggtttggccttcagctttgccttttatggtctggtgcggaagaaaatcgctgtcgatgcgcagaccggcatgctggtggaaacgctgtggctgttgccggtggcggcgatttggctgttcggcatcaccgacagccccaccagccatatggggcagaacccctggtcgctcaatctgctgctgatggcggcgggcgtggtgaccaccatccctctgctgtgcttcaccggggcggcaacgcgtctgcggctctccacgctgggctttttccagtacatcggcccgacgctgatgttcctgctggcggtgacgttctacggcgaagtgccgggcaaggataaaatggtcacctttggctttatctgggtggcgctggcgatattcgtgatggatgcggtgtatacgcaaaggcgggggcgtcggagctag

SEQ ID NO: 223888 - DNA, 267 bp, Klebsiella pneumoniae; identical to SEQ ID NO: 125559

SEQ ID NO: 223889 - DNA, 201 bp, Klebsiella pneumoniae
atgaaaaaatcgcgtttcactgacagccagatcatgaccatccttaaacaagccgaggccggaactccggtggctgaactgtgccgtgaacatggtatgagcagtgccagtttctataagtggcgctcacgctttggcggaatggatgccatcgatgatggcccgtctgaaagagttgggggacgaaaaccgccgtattaa

SEQ ID NO: 223890 - DNA, 639 bp, Klebsiella pneumoniae
atgaacctatttatatataacaagaacattgcggcgatctttcttggagtggttcttttatcaattcttataacgttatcaccagctatcacgctacattatgtagacattgatatagtatttttcagtattctaatgtcacattttataatggtaaccttattgtattttttatgcttaagaaaaataacgggatgtataatccgagtcaaatccgatagcgcaacggtcaagttaacctctttattattcttggtgatcgtttttattcagttagcggtttattgctatagagattctttttttcattatgagacatctcatataaactggatggtagttatagttttgacattagtcgtaccctactacgaagagattgtttacagagtttgcgctttcggttttctaagtacgatttataaaaaaaatttaataatcccatgtgtacttacatctctgttcttttgcttaatgcattttcagtattataacattcttgatcagatagttctttttgttgtgtcttttttactattaatggtaaggattaaaagccaaagccctttatacccaatgctaatgcattcagggatgaatgcctttatcattctgttaaatattaaaataaccttataa

SEQ ID NO: 223891 - DNA, 207 bp, Klebsiella pneumoniae; identical to SEQ ID NO: 101465

SEQ ID NO: 223892 - DNA, 2244 bp, Klebsiella pneumoniae
atggaaccaatcaaatggacaggaagaaaacgcctccccgtcatccgtcagacagagtccgctgaatgcggactggcgtgtctggccatgatcgcttgctggcatggactgctgacggacgtacccgcgctccgtgaacgattcagtatcagtacacagggaatgaccttgcagcggctgatggagtgcgcgtcaggtatccggctggcctcacgtgcagtacggttagagccggaagacctgaaatcgctttctctcccgtgcattctgcactggaacataaatcatttcgttgttctccataaggtacaagggagcaaactggtcatccatgatccggataaaggaaaggtaactctctctctacaggatgccggaaaacacttcaccggcgttgcgctggagctgacaccagccggcgatttcacggtcagagatgaaagaaagaaaattcgactacgccagttgacaggtaagacacccggccttcaggcagctatgttgcgcattgtcattttcgccctggctctggaggttctgacgctggggagccctcttatcaatcagatggtgatcgatgaggttctggtcgcggcagaccggagtctgttgaccgtcattatcattgcactgctgctgctgtcactgacccagatgctgctgtctctggcccgccagtgggccagtattaccttgtccgtcaattttaatatgcagtggacggcccgggtgttccatcatcttgtacgtctccctctggcctggtttgacgcacgaagtaaagggagtatcaatgcccgctttgaggcagttgataccatccagcatgcgctgaccgcacagatactggaaggtattctggatgtgctgcttgtggtgaccacactatgcatgatgctgttgtacagtcctgaaatgacgctgatagccttgctggcagctattatctacggggtgctgagagcactgtggtatccctccctgcggcagtcagcagaagatgcctgggatgccggggccagggagtcagggtattttcttgaaaccctcaacgggatcctgagtctgagaataaacggggttactccataccgtgaggctgcctggctgaatctcaatgtcacccgaagaaatacgcagttgcgccagagccgtctgctgatgtgctatgacattgcccacactctgaccggcagcgtggtatcggcaatcattttgtggaaaggcgccggtgaagtgctgaacggcacctttaccgtcggcatgctggttgcctatttgtcttatcaaatgcgtttttcatccagtatcagcagtctgaccgataaatttttttcctggcgcatgctagatatctataacgaacgtctggctgacattgtgctgaccccgacagagggtcatcagcaacaacccgttcaggaagacaacagcgcgtcagttaccccaccaatatctcgtgggaccgtagccggagatgaccatccccctttatccctagagcacgttaccttcagccataagggcggtaacaaaccgatacttcgcggagtatcgctgacgctgcatcctggtgaagtggttgccattaccggcaaatccgggtgcggtaagtcaacgctggtgaaacttatccttggggtccatattcctgacgaagggacaatcagaaccttttgcatactgcaaacccacccggattattttcaggtacgccggcggatcggtacagtgcttcaggatgatcagcttttcagcggctccattgcagataacatcatttttttcagcgaggatcgcaatcatgaacgaatggcccggtgtgctcagctggcgcttatcgacagcgatatcatggcaatgccgatgggatatcagacattaatcggtgaaaccggtggtgggctttccggagggcaaaagcaacgtgtacttctggcaagagcgttgtacaaaatgccggggtttttgttactggatgaagcaaccagtcaccttgatgttgagagtgagatccagataagccagacgcttcgccaactggggcttcctgtgctgctgattgcccatcgaccggaaacgatagcatctgctgaccgtgttctgtatctggctgatggtaaccttacggagctgaagcacccgttcactgtcgacgatggtgacgtaacgtgtgctcctgctgatgacagagtgggggatgttcgacaaaacgtcctcacacgttgtaatgccagtcagtga

SEQ ID NO: 223893 - DNA, 180 bp, Klebsiella pneumoniae
atgctcctgacctgccagttcaatcagctgctgctggagtccctgcagttgccgatccagttcagtttgcctgctctttccctgggcaataagatgaatcagatcatcctgagctgcgtcctgtgcggagcgcagttgcaaaagcgcctgacgctggttttcaacattttcctgcgctga

SEQ ID NO: 223894 - DNA, 948 bp, Klebsiella pneumoniae
gtgctggcggagaaacagcagcaaaccggcgtgaaactgctgtggggcaccgccaactgctttacccacccgcgctacggcgccggggcggcgaccaaccccgatccggaggtgtttgcctgggcggccacgcaagtggtgaccgccatgaacgccacccaccagctcggcggcgaaaactatgtgctgtggggcggccgcgaaggttacgagtcgctgttgaataccgatctgcgccaggagcgcgagcagattggccgcttcctgcagatggtggtggagcacaagcataagattggctttggcggcacgctgcttatcgagccgaaaccgcaggagcccaccaagcatcaatacgattacgatgtcgcgacggtgtatggcttcctgaagcagtttggtctggaaaatgagatcaaggtgaacattgaagccaaccacgccaccctggcggggcactctttccatcatgaaatcgccagcgccatcgcgctgggcattttcggctccgttgacgccaaccgcggcgatgcgcagctcggctgggataccgatcagttcccgaacagcgtggaagaaaatactctggtgatgtacgagatcctcaaagccgggggattcaccaccggcggcctgaactttgacgccaaagttcgccggcaaagcaccgacaaatacgacatgttctatggccatattggcgccatggacgtgatggcgctgtccctcaagctggccgcgcgcatgattgaggatggcaagctcgatcgggctctggcaaaacgctatgccggctggcagggcgagctggggcaacaaattatggccggccgcatgtcgctggataatattgcccggtacgctgagcagcataatctgaatccgcagcatcacagcgggcgtcaggaattactcgaaaatctcgtcaatacctatatctttggttaa

SEQ ID NO: 223895 - DNA, 372 bp, Klebsiella pneumoniae
atgcaaacttattttgaccagctcgaacgcgttctttttgccggacctaaaaccgataatccgctggcgtttcgccactataatccggatgaaatcgtgctgggaaaacgcatggcagatcatctgcgttttgccgcctgttattggcataacttctgctggaatggcgcggatatgtttggcgccggctcgtttgagcgtccctggcaggccgcgggcgatgcgctggaaatggccaaacgcaaagcggacgtggcgtttgaatttttctataagctcaacgtgccgtattactgcttccacgatgtcgacgtctcgccagaaggcgcgtcgctgaaagagtatttgcataatttcgccgtgatgacctaa

SEQ ID NO: 223896 - DNA, 483 bp, Klebsiella pneumoniae
atggtccagtgggcgaggaaaaagcttgttgattacaagtacctccacaatgcaaaagagtcaggccttggtatctggaagctcacaccagatggcatcaaaaaagcggaatcactttccacccgattgaatatcgattatccagatgatgttccggaaaccttttacgaaggtgccgtaaagcaaatcaaagttaacaaatacgaacgtagtaaaacggcaagagacaaatgcatagatcattacggctgtcagtgcagcgtgtgcaatatggattttgaggaaacgtatggtgaaaccggaaaggactacattcacgtccatcatattacaccgctgtctgatattggagagcgctacaaactggatcccgtaaaagaccttcgtcctgtctgccccaattgccatgccatgatccacagacaaaaaccttcactcagtattgaggcattgaaagtcttaatgaagaaggcacaaaaatag

SEQ ID NO: 223897 - DNA, 3414 bp, Klebsiella pneumoniae
atggagcagtctctcaattttgaaatgttgcgtagccagtggccggaactggcggaactcgcgtgtatggcggaacgctatgttcactccgatccggaaagctgtctggtcaagctgcgcaactacaccgaattgatggtacgttggttataccgtcaggaacgactgcccgaaggcatcaaagcaaatctgtatgatttaatgaacgcagatgtgtttaccagcatgatgccggaagccattatcatgaaaatggatgcgctacgtatccacggcaaccgtgccgcgcacggtggtcgtatcaaagctaaagatacctactggctgctcaaagaagcgtatttgttgggaatttggctatatgtccgctacgcccacggtaatgttgataactgccccaaatttactcttcctccattaacgcaatcttcaggtcgtgcagatgataaacgtctggaagatgcaatcagggctcaagatgaaagccgtgagcgagaactggcgttacaacgcgcactacagcaagagcaggaaaaggccgaacacctcacccagcgcctgaatgaagccagagctcgcaaccagcatgttgccgacatcctctctattgatgaaacggaaacccgccgccgcctgattgactcccgcctgcttgctgctgactggaatgtaggggaagagcttaacaatactgatcaggttacgcaggaacaccctgttaaagaacagcctaccgcgaccggcgacggttatgcggattatgtcttgtgggatgaagcgcataaaccgctggcggtggtggaagcaaaaaaaaccagcgtcaatgccgagcaaggacgaattcaggctcggctatatgcagactggctggaaaaagaatacggtcagcgtccggttattttctataccaatggctacgacatctggctgtgggacgatcataaaactcatggatatcctccgcgccgggtatttggcttctacagcaaggaaagcctgcaatatcttattcagcagcgtgaaacccgtctgccgctgaatagtgtcccgcatgttaaagataacgaaggtaaagccgttgccggacgtttgtatcagcttgaaaccattgcccgcgtcagcgaacggtttaccaataaatatcgtcagtcattaatcgttcaggccactggcactggtaaaacccgtgtagcgattgcactgagcaaactgatgattgatgcccgttgggtaaaacgcgttctgttcctttgcgaccgtaaagagctgcgcaaacaggcggcgaatgctttcaatcaattcaccaatgagccgctgtatgtggtcgggaaatcgaaaaaagcagataggcagaacgctaggatctacattgccacttatcccggcatgatgaaaatcatggaccattttgatgtcggttatttcgatctgatcatcgccgatgaatcccaccgctctatctacaacgtctacggcgatttatttaagtattttgatgcccttcagattggccttacagccacgccgatcgacatggtgagcaaaaccactttcggcctgtttggttgtgaaggacgtatccctaccgctaactacagtctggaagatgccatcgccgataacaatctggttccctatgaggttgtcacgcacaccacggaattcctgcgcgaaggcatcaaacgggagaaattgagcgacacacaaatccgcgaactggaagaacagggtatcgatcccaatacgctggaatttgatggcaaggcgctggatgaggcgatctacaacaaagacaccaaccgctatatcctgcgtaacctgatggaaaatggcctcaaagatcgggacggccagctgccaggtaaaaccatcattttcgcccggaaccacaaacacgcgctgttgttaaatgaattgttcgacgacatgtacccgcagtttgccggacgcttctgtcaggtcatcgacaactacgatccccgcgccgagcaattgattgacgattttaaagggctggatgaaagtactaacaaagagctaaccatcgctatctccgttgacatgctcgataccggtatcgatgtcccggaaattgtgaatctggtctttgccaaaccggtcaaatcgaaagtgaagttctggcagatgattggccgtggtacacgcctctgttcggggctatacggcactgatgaaaacggcaaaccgctggataaacagaaattccgcatcttcgatcactggggcaactttgagtatcacgagttgcatatcgaagaggccgaagtcacagcgacaaaatcgctggcgcaaaaacgcttcgaagcgtgggttatgctgggggctgctgcacagcgtaagttcgacaaacaggcggtggatttagtcgctcaccagctccgcgagcagatcaacgcgctggatgaaaagtcgattgccgtacaggaaaagtggcagcaaaaagcgcagtacagcgatgaaaaagtgttgcgccagctttccccaaaaacacagcaggatctgctatcaatcctggccccgctgatgcagtggctggacgttcgcgggcaaagcgatgccatgcgctttgatatggatattctggcggcgcaaactgcccgttataccaacccggaagagctggatgtgctctggccggtcatcgtcgagaaagtggaacgtctgccgccgcatctggcgcaggtgcaacaacagggacagcggattaatcagcttcgtgatttgggctggtggaagcaagccagtctggaagagctggaagatatccgcattcatctgcgcggcatcatacacctgatggaaaaagatgcgacgccgaaatttggttcgctacaggtggatatttccgaagacgcgaacctgattcagacggaaacccgcaaaaccaacatccgctcgattgacttcaaactctatcgccagcaggtgcagggagcgctggagcctctgttccagcaaaatccggtgctgaagaaaatccgcaacggcgagccggtgacgcaaagcgagctggatgaactggctaagctggtgctgatccagaaccctaacgttgatatccgggcgctgaaagagttctacccgcaggcgaccgccagcttggataaacttttgcgtaccattatcgggatggacagcgatgcggttgaagtgcgctttgcccagttcgccgctgacaataacctgaccagccatcaactgcgcttcctgtcattgctgaaaaaccacatccgcgattacggcaccattgaaatgcggcagctctttgaacagccgtttacgcatatccacaacgaaggcgttactggcgtattcccggatatagagcagattgcccggctgcaaaagatagtcgaagagttaggtgttgtgaccgacgcgacgacggtataa

SEQ ID NO: 223898 - DNA, 1170 bp, Klebsiella pneumoniae
gtgagtaaatatcaattagtcactcttggcaaacatatagatatattgtctggatttgcatttccttcaagtgggttcaatcagaaaaatggtgttccactaatccgtattagagatattctttctggaagaaccgagacctattatgaaggtagttatgacttaaaataccttattaaaaaaggcgatttacttgttgggatggatggagatttcaatcgtgagtattggaaaggtactgatgcgttgttgaaccaacgggtatgtaaaattacgccaaatcctgaaacacttgataaaaattttctatatcatttcttgcaaaaggaattggataaaattcatgccacaacagatgttgtgactgtaaaacatttgtcagtaaaaaagatacaagatattaaaattaggcttccctcgttaaaagaacaaaaacgcattgctgctatccttgataaagccgatggtatacgccaaaaacgcgagcaagccatcaaactggctgatgattttttgcgcgctacgtttttggagatgtttggcgatccggtaatgaatcctaagggttttgatattaaggtattaagtgatttttttattgatgaaaaaaatggtactaaatgcggcccttttggcagtgctttgaaaaaagatgagtacacaagagaaggagttcctgtatggaacatggataatattaccttaaaaggaggctttattgacttaccttctctttgggtaagtgaatataaatatcaagagcttgaatcctactctgtattagatggcgatgtaattatttccagagctggtactgttggtaaaatgggtgttgtaagatcgagtacggaaaaatctattattagtacaaatcttattcgggttcgtttcggcgaaaaattgtatccagaatatttcgtatctcttatgacgtactgcaaaggtagagtcggtaacctcaaaactgggccggatggtacatttacccatatgaacaccggagttttgagcaatttagagtttccttatccaccactagagctacagaagaaatatattaaaattcgtcagtctgttatgcttctcattgataaatatcatcattttggatttggaatcgatgagacattttgtgctataaaccaaaaagctttcctctgtcaaccatag

SEQ ID NO: 223899 - DNA, 1182 bp, Klebsiella pneumoniae
atgatcgacctaaaaactataaaaaaaagaattgagcatgctataaaaccgatggaaaaagcaggagtagatgaatacttctggggcatccgctcggaggcaggagactttctacctccttattacctagtatattttcttttggttgacttgcttgactttaattttaatggcccagaggaaaaggtggccttttcaatacctgtaaaaatagaaaacactactcttattgtagaatatagaaaaatggggttaggcatttttataaaaaataaaaacgatgaggataaagcaaaagctattttgaaatgtatacaatctggagttaaagcaggcacggaatattttaattatattgccgatgaagcagccaaaacttctaacttgaatgttaataataatagcaatgagctttatgatcgcttctgccatttttttaattgttacgataacattaacaaacaaattataggaatagaagccaaaccagaggtacatgtacaaaacacccctaccttaactcttgataataaaaatttattttccattcggactagtgatatttttgaaaattataataaaatagctcatcttcgtaaagaggctatttggtatgcaatatctgctatagaatcttttttcaattggacggaacatgttttcattttgatagcaattttaaatggaaaaataaaaacaggtgttgatgtttatgataaaattggagaagagtggaaaacaaagtttagactagctatcgatattaacactcccgaaatgaaagttttttatgatcgtttgatcatacttagacagaaaataagaaattttgtttctcatggctcatttggaaaagatggacaaacattggaatttcattcttcggttggtgctgtaccacttttgatgccacatcgtcaaaacaaagaacattttaaatttggaaacggtattgattttgttgcacctgaagctatggagctattacagaaatttgtaaaaaatatgtggagtggcaatttattacccgctaaaatttatattgagtcaggaaatccattaattctttcttatgcgattaacggtaagtatgctaatgcgatgtcatccgaggatgacatgaacaattttgtcgaatatttgacacgtatatttgatgatgcttctaatatggattggtga

SEQ ID NO: 223900 - DNA, 150 bp, Klebsiella pneumoniae
atgatacatctgaaagtcctgaaggcgtttaagccacaaattttctttgacgatcaggatgtgcatttgatcgcggctgcaaaggttgtaccttctggaaaagtcccttatgccagtaactccgaacttgcagaacgtgaagcatcgtga

SEQ ID NO: 223901 - DNA, 687 bp, Klebsiella pneumoniae
atggcttctcgattaattataaccaactcctgtattatacttattctgggtttattctctattgacctgtataacccagcattgcctacgattaaggtggccctcaatataagtaacgcacaggcccagagtctggtcgtctggtatctgggcggttttgcagtatcacaactggtttatggtcctctttccgataaatacggccgggtcccggtaatattattatcactgctcttttctgccgtaggtaactatttgacctcaacggctgatagctaccagatgttatctctcttccggttatttaccgggattggtgccggaggctgcccggtaatcagtcgggccattctcagtgatacatttcgggataaatcagagctgtcaaaatccctggctgttttctctatggcctcacaagtctctcccgcttttgctccagtgattggcggatacattacggaatattttccatggaaatataacttcattgccttagcgttgatgatgcttgccgggtttatattcgtcaaaatgacactgcctgagacctcacccagaaaagcattacctggcgggcgtattgctggatttaggatcttattcagtgatttaaacttcatgatatatagcgtggtttcagccgtattatttgccattacgattgggtattttactgctaaatag

SEQ ID NO: 223902 - DNA, 1527 bp, Klebsiella pneumoniae
atggctgaaggctatgctcgcgtctccagtgcttttggtgtttgtctggtcatcggtggtcccggggtcacgaataccctcaccggtatcgcttcagcttatacggataattttccagttttactgctagccgggcaaattgcgtccgggatggaaatgcgtaacgttcttcaggacagtacacaatccggtattaatcaacgtgatatttttgcgccagtcacccgggctgcttacgaagttaaagaagggcaaccgctgagtctctttcttcgggagtcgttacgggcgttgaaaggtgcggaacgtggccctgtctatcttggagtgagtaaagaagtcctcaccagcgttgacgcctgccgcggcgagattaccgatagcgtcagtgatagctggcaaagaaagccagtggatctgattaaaatgcgcagttcggcatttgaaacttttctcgccaataatcaacgctgcatcattctcgcgggcctgagaggcaagacacctgaaaccagcagagcgctgattgattttgccgaagcttacggttttcccgtcgcgactacgcttagcgcaaaagggctttttcctgaagatcatccgcttgcactgggggtatatggttattcgggtcatcctcgcgccattgaagccttaaaagatggtgaactcgatggcgttattttactcggtatggatatgacacagtggagcacgatgatctggtcacccgacctccaccctccagggggagtgattcaagttgatatcaacgcagactatcttggcaaattcatggatgtgacttgcggcgttgtcgctgagagtagcgcatttcttgatgtgctgagcgaatattaccatcctattttgacagagggtcgcaacgtccgcgaaccttgggtgcaacggcttatgacggcctcacgctgcatgccgatcggtgacgaaagccgccacccagcttcttatgttggccttctgcagactcattttccagacaatggcatcgtcagcgttgactctggcgcacatcgttctttttttgggcattactgggtttctcgtactcctgatgcttacctttccgccacaacgctgggaccaatgggatggagtattccagcaggcatcggggccagttttgccgctcccgaccgaaaatgcatggttattaccggggacgggtgtatgttaatgcaaggaatggagatagcgactgccgcgaagtatcagcgaaatgtactttttgtcgtcttcaataacgcctcctatgccgccagttattttaataataaagaaaaccaggcggatcttaccgacattcctgattacgattggtgtctgttagccaaaagttttggtatcgaggcaatttctgtgcaatctccacaagagttggaaggaatgattgcggacattatgcgcaagcagacccctttcttgattgaagtaaaatgcgataattatcatgtgacccctaatactgaatataaccgtcgtgttaaaacgcatccacttatttag

SEQ ID NO: 223903 - DNA, 780 bp, Klebsiella pneumoniae
atgaatatgattgagcaaatgcatcagcacggctatgttgtcattccgcaggtaattggaagcgatgaaatccaaacaattcgtgactgttataaacatctctccgaaagctcagggttatcgacgttgttgcctacggacattttaaatcaacctgctattttcaatgtgttattgaaagaaaacataacttcagcaattcgcgaactctttgggcgtaacttctcgcttttccctaattttactattcgcgagagcgtgtatattccctggcataatgacgcctactttcttcctcaggaagtgattaacgcagaatctcccttacaattcatgcaatgtgccatttacttacaagataatgatcctgaattgggaggtggcataacgttaataccatccagccatcgacttgataaaaatgtcattgaaaatatgctgagagcttcgcaggaatacgaaaaaattgttatgagcaaagccggagacttagtgctttgggataatcgtattacccatagaagcacctatccggataaggcaccggacagcactaaactcgctttacaatggactgtcagcgcttctcaagatcataacggcccttatcttgactaccttcgagcgcgtgcagaacgaagtatgcatgtttccgattaccttcccaaaagccctaaaccctattttgcggatatgcccaacgtggtattccctacctcatttcatcaggattctctgtctcgcatgacgcggcaaaacattcactttataggtttataa

SEQ ID NO: 223904 - DNA, 1350 bp, Klebsiella pneumoniae
atgtcgtcagttaactatctggtggtggaaccgacaaaccatattctgcattcagcctggataccatcgtcaaaacctgagactcagagagcaatacttgctgcaacattggctaatggtaagtctgtaatctacaacgatcttcgttgtctggagaccagtaccatgaaagatgcatgccgaagtatcggtgcaaaaattatcgaagagcctggtcgtcttattatttatggaaccggtggtaaaatatctccggaagaaaaagtcattgatgcactgggctcaggtttggtattccgcgtgttgactgctctgacatgctttagcaataaaccggctgttattacgggtgacaccattcttagaacgcgtgtgatggaaccattgctggatgccattaacatactgggaggaaatgtttccagtatcaatatgaatggtaaagccccctttgttaattggggaggatatgcaggaggtgaatgtgaaatcgcgggcaacatcagctcacaatttatcactgcaatcctgttcgccgctccgctggctcaacacagtaccacgctacgtatcacaggcgagattctttctctgtcttatatccgtcagacacttgcaacgctaaaagctgctggaattcatttctcacataatgcggacctttccgagataacagtattccccggtgaatatcgtcctgctgaatatacgatcaccggggactatacctcttgttcctatttagtggctgcttcaaccttgttcccttgtgacttaacacttaaaaatattaacagtcacagcttacaaggtgagcaggcaatccttaattttgtcgaaaaaatggggctgcaagttatccgaaatgatgaacaaaacgaattacgtcttattaataagataggtcgtttacgcggtaacttcgcgttcgatgtgagtgactgcccaaatattgtgccgacattggctgcactcgggagttttgtcgacgggaatttccgcattacaggtggttcaattactcgcctgcataagtctccacgtattaaggcgatggtgagtgaattaagtaagctgggagtaaatatcactcctctgtataaaaatgacatttatgatgggtttgatattcagggtgcggccaattataacggtgattgctcactctccagttggggagatcatcgcatattcatgtcactatttgtcgcctcattgcgttgcaagcaggctaatcgcctggacgggtatgaagacgttcattgctccttccctgacttctttaaagaattccagcaattgggcgtcagatttgaagaaaaaataccgcaaaaagaagaagtcatttaa

SEQ ID NO: 223905 - DNA, 576 bp, Klebsiella pneumoniae
atgaaaccaaaatatcatgaaattattaatttatcgtctcaattttttaatcgagaaggtttccttaatcctagtatcgatcgtattgcagaagcggctggcatctcaaaaatgactttttatcgttattttgaagataaagaggcactgattaaggctgttctcgaagagaaacataatacgttcatactggagctgaaatctttaattgcggaaaacgaaacagccaaagataagttattcacaatatttgatttttatcaaaattggtttgccagagaaagttttcatggttgtatgttcactcgggcagttgttgaactcggtaatacaatgccagccttgaagagcattacctttgattttaagagcggtctatatcggctaatacaggagattttactggattattttagcccaataaaatctgagagagtcgcttttgtcattctgatgttgattgatggggcgatatccgttagtcagacaatggataaagagattcgcgagttccctccggccatgtctgcatgggcagcagccaaaactataattgctgctgaaaaaggggattaa

SEQ ID NO: 223906 - DNA, 1065 bp, Klebsiella pneumoniae
atgagcctggatgaatatttaccgacgattaacagcaaaggtgctggacgagaggacaacggttgcctcgatgagcttttctttagtctgattgaatcgacagcgttgcatctggatgtagcaggcaaagaaggaccatttgagcagttagttgccttagcaaaaaaacggtgcgatgaggcgtttatcttccggtcaactgaggcattacgtcaaattcatcagacgcttttttactcttatcgggcaaatttggccgagcccctctctaatcttagcctgaatcaataccatccagtattgctgcatgtacgtcacttacttgaatcacgttggcttgattctgaaacaaaacgttgccctccatgtttaaaaactttaacgcctgataatatcggcgctgaaataaaaaacttatggagctgtcataaggtatctgaacatcctctttttgattttcttgaaagtgaagcgaataatcagcagttgtattatttttttaaaagtgacagtgcattaaatcttcttttttttgatttagtagcgatgactctggttggatctgttcccgaaacgcgtggtgaaataagtcaaaatttgtgggatgaaattggccagggcagtaatgactttacgcacgtcaatctatataaagacctccttaaaagacgagacatcgatttacctgaagaccacttcagccatctctatgactggcaaggtttggccggacataacctctttatgatgggaggcgtcactcgtcgtcattattataaattggttggtatgatggctatgacagaacttctcgacccgtcacaatataaaaaattggtcaatggaagtcaccgcctgggactttctgaacgtgatgtctattattacgcggaacatattagagtcgatattggtcatgcagatggctggcttaataaggtcatcgagcctgtcgctcgtcgtaacccagagtcgctcgaagaaatctactttggcgcgcagctccgtctgcaaacgtgccaggattactacgataatttactggatacgttgcgcagaatttaa

SEQ ID NO: 223907 - DNA, 858 bp, Klebsiella pneumoniae
atgacagacgctgctgatattaaattttaccatgacaatggttatgtgctggtaaaaaaactttttggtcaagataaaatcacgaagggacttatagcaattgatgaaatattattacgtaatgatgccgataaaaattctgagaaagagccaaaagatagcaccgttgtgagacgtatctggtctccgacacaaaaacatgaaacatttgtggaattggcagaggataaacagttacttgatgttgtgcagagtttaattggtgaaaacatcttatttcattacagcaagctgaatatgaaaggcccacgggttggaagtatagtggaatggcaccaggatttttcatattacccacacaccaatactgacttattaacggccttgatttttctggatgatgcaaataaagagaacggttgcttgcgggttattcctggctctcatagaaaaggtcttttatcgcatgatattgacgggttctttcgggggaaactctctgatattgatgaagatgatgcagtttatatagaggcggaagcgggtgatgtgctatttcttcactgcctctgcatgcatgcctctgcggtgaacagctcacctgttccgcggcgtacctttctacctgcatatcgtagtgctgatgcttttccaatctatttcggcccccacgcagcacataacgaggcagggataaaactacttcgtggacaggtatcgagacaggctagagttgatagtggcattcactacttacctattgccagatccgaatttggttctatttatgaggtgcaagaaggatctcacgaaagtaagtctgttgatgcaatgaaaaaatcaggttacgctgtctaa

SEQ ID NO: 223908 - DNA, 1380 bp, Klebsiella pneumoniae
atgcaaaaaaacgctgaggttacttataaatggcgattgtcattagtcgccatttctattgttatctgtatggcgacaatagataccgctatagtcaatacggcgcttcctgttatttcacgggaactaggttcaaatccttccagcgcagtatggattattaatgcatatcaaatgattatgatatctatgctactgcccttagcttcgcttggcgaagttattggatatcgtagagtatatataactgggcttagcgtctttcttgtctcatcattaatgtgtggtctgtcaaatagtctgttttttttgatactgtcacgttcattgcaaggattcggcgcggcagcgattatgagtgttaataccgcacttattaaattcatctaccccccaaataaactgggtcaagggttaggttttaatgcacttattgttgctgtttcgttcactatcgcgccattgatttctgctgcgattttatccattgctcgctgggaatggctgttttttattaatattcctgttggttgtatggctctgatactctcagctatttatttgcctaaggagcaacacaacgaccatttgccagtaacgaaatttgattggttcgcagcaatgctttgctttctgttatttttattctttattctggggtttggagagctaacgcatcaagggtattggccggtggtattacttgagtggtcagtcacccttgttttttccatcatactggcatacaaacaatcaacgcatccctcacccatattagctatcgacctgctgcagtctgctaaccttctactctcttctcttacttcaatatgtgcttttaccgtacaggggttagcatttgtttcattgccatttctgtttctaacggtattacataaaaatcaaattgagacagggttacttatcaccccctggtctgcgatggtcgcggttatggcaccaattgcagggcgactttctgaccgttataaaagtgaaattctcagcggtgccggtctacttattctgatgggaggaatggtctctctcgcaatggtatcagactcctcctttatgtttggcacaggagtcaaaatggcgatttgtggcattggattcggcttgtttcagtcaccgaacctgcgggctataatgggctccgtaccagccgccagaagtggaagcgcaagcggtattgtcgctatatcccgattgcttggtcaaacgtttggcgctgggcttgtcgcactgtgcctaagtctatttccaggcaaaaacataacaattgtactctggataggcggtggtgttgcaatgggtgggtttattatttgtactctccgctgggtgcttagcctaaatcatgaggcgataaaataa

SEQ ID NO: 223909 - DNA, 696 bp, Klebsiella pneumoniae
atgaattttgtattaatacccgggtttatgactgaccgggccttatggcgcgatatggaagagagtattcgttctctgggagaaattatctatggtgatttatcctatggacagagcctacaagagatggcgctgagtaatattgctgtattaccagatcggtttattttggttggattttctttaggcggctatgttgcgcgctggatagcatcgctggtcccggaaaggattgatgcaatgatattgattgcctcttcaaataaacccgatgacgttaatctcatgactgcgaaacacctaacagcaaaaatggtcaataccgtatcttttggcggtctgagtacggcgacgatacgctcatcgctgcatgattcaaataaaaagaatacaacgctaattgagtttattcgtgcgatgagcctgagattaggtccggatgtttttgttcgacaattgcagttacagcgtaacagcccagtcagtttgacaggaactgttaattttcccgtattgatagtggcttctgccagtgacgagctcagaacactctctgaggctgaggcgctgcattctgactatcctgcatcagtattacatgttattgagaatgctggccatatgctgcctcttgaacaacctgacaaactcatgcaggtaataaaagagtggcttcacgatacggggataatctaa

SEQ ID NO: 223910 - DNA, 216 bp, Klebsiella pneumoniae
atggcaagaaaaaccaagccgttaaccgatacggaaatcaaagccgccaaacctaaagatgccgattaccagctgtatgatgatgctgggttgacgttgattatcaagtccagtggaagcaaactctggcagttccgttatcatcgacatttaacaaagcagagaactaaacaaagtatcgctgcttacccttttgacctgcactccgttgattaa

SEQ ID NO: 223911 - DNA, 1680 bp, Klebsiella pneumoniae
atgttgtgtctgccctctgccaggtatgggcttcttttagcagctttaatatcagcaggtctatctgcagcgccgctgagtcctgctgatcagaatgctattgagcaacaacaaaaggcattactggaacagtcgcagcagcagcgcgacatgctccgctataccacacctgccccctcactcccgaaagccgcctctcctgaagcaaccggaccgtgtcttgaactccggcatatccgactggaaaatgtcacggtgctcccgcgttctgtacaacgaaaactaacggcaattccggcagaggggtgtatgacccttaaggatatccagctgcgggtgcgggatgtcactcaggactatatttcccggggattcatcacttcacgagcctggctgccagagcaggatatttccggagggagtctggttattgccgtgatggaagggagggtggagaccgttactctggatggtcatcaggaaaatgctctgaaaatggccttccctcaggctgaagggcaagtattgaatctccgtgatatcgaacaggggctggaacaactgaaccgtatgagctcacgtgctctgaccgtcgatattttgccggggagctgtgaaggtttttcccgggttgtattggtgccggtcagtcagcgttttcccgtcagtctggatgtgagcgcagataacagcggacagaaaagcaccggtagtgggcagatgaatgcccgcctgatggcagacaatccgctggggctggcagaccaatggacactggcagctgggagggatagtgagtttcaccatgacagacgtagccgcaatatgcaggggagcgtttcgattccttatggatactggttgttcagcgcgcagtatggatggtctgatttttatcagacactttctctcggtgaatttccgctgagctggcgttatgaaggcaccgtacagtcacaccgactgggtgccagtcgtacactactgcgtgacggcaaacaacgtcttgtgctcgatattgccctgtcccgtagggaaaccgaaaaccgattgggtggtgtacgccttgacgtcagcagcccgactctgagcagcgtgaccgccgggctgagctatagcaggagtatcggcggcggttatctgactttcggtccttccctttctcacggcctctctctcgccggagcaacacaggatgatcctgcacaccccgacctgccacgcagtgaattccggcgtttcagtgccagcacaagctggttttacccgctgaccagctctatctactggcttacctcggcatacggacagaccacgccggacaacctctatgccagtgagcgtctgtcagtcggggggcaatattcagtgagaggttttaaagagcagtatctctccggaaaccggggtggatactggcgaaatgagctgaccgggcagttgctgacgcttcctgttacagaaggaagactgtcagcgactggtgcggtagacattggacatgtcattagccagagaggaataacaggaggtggcacacttactggagcctcatttggctttgaattgtcaaatgcatggctgtcccagtcactaacggtgggtgtcccgttgtcctggccgggttccattcgtccggataaacacgtggtttactggcaggccacggtttcactttaa

SEQ ID NO: 223912 - DNA, 1209 bp, Klebsiella pneumoniae
atgtgtactcatcagatgctcaccgatacaaagcttaaaaaagcgcttggaaagaaacgtgacgatattgaagtgctgtccgactcccatggtcttaacgtcaggatcagccaggctggaaaaatcaccttcttctatcgctaccgatggcaaggtaaaccagtaaaaatcaatgtcggtgattatcctgcaatgagtatcgcccatgcaagagagcgccgacagcaattcagggcatggcttactgagggaaaggaccctcgcgagcaagccaaactggagcggataagccgacaggatgctctgtcagtagaggaagcttttaattactggatagagaggcactgtattgctaataacctgactaatacgacctattaccagtcagtgtttgcgaagcacatatcagcgcagatgaagggggttaaggtcgataactcaacccggcggcactggacagagcttttcgacagcatagaaagtagggtaatggctcactatatgctttctttgtgcaaaagagctttccgtttttgttttaatcgtggtgttatctctacgaacccactggatggacttatccccacagatgtagggcaaaaaccaaagatcagcacacgacgactcagcgatgaggaacttcgggctgtgtaccagtggttaaaaagtcacatgtccatagagtcggtattcctggtgaaatttattatgctgaccggttgcaggacaggggaaatcaggcagagcgaaagatcctggttccagctcgacgaatgcgagtggacggtgcccgccaagatttataaaacgagggtcaatacgcgacgtgggttgcctgatgctgctgttagccttgtgaaaagccatcttgaaatgataggcactaagcatcttgtcacttcacaaagacgtgtcgatggggcgatcctggacaagcctgttcagggacccgtggcttcaaattatgcgaggtcaatttggtctggcgcaaacatgcaggagtggtctatgcacgatttgcggcgcactatcgcaactactctttctgagcttggcgcacctccccacgtgatagaaaaaatccttggtcaccagatggtgggggtaatggctcattacaaccttcatgattacatcgatgaccagaaacactggctccgcgtttggcagagccacttagagaaggtcatcggcgagccattttgttag

SEQ ID NO: 223913 - DNA, 195 bp, Klebsiella pneumoniae
atggacgatattttgctgacatccgacctgaccagtcgatacaaaatttcgcgcaaaaccctgtggtcatggcaaagcgaagaaaccatgccacggggttttgctcgccccttccctgcgcctgacttccccgggaatcctaaccgctggaaagcagagtcgataaaggagtgggaagagacaaagcagcactaa

SEQ ID NO: 223914 - DNA, 216 bp, Klebsiella pneumoniae
atgccagaaatcatcgatcaagccaacgagctggcagagcgccggctggaaatgaccatccagaacatgcgcatcaactatgcggcggtatcggctactcactgccgcgactgtggggaagagatacccgagcggcgccgggaactggtggcgggctgccagcgctgcgctgactgtcaggaagttgaagaaatactgaaaaagcatcggaggtga

SEQ ID NO: 223915 - DNA, 552 bp, Klebsiella pneumoniae
atgaaacgcattctgacccttggcctggcgctgctgatgctgatgctcgccggctgcagtaccgaggtcaccgaataccggcagcagcagcccgccctcgacatctttcactattttcaggggcgaaccgaggcgtgggggatggtgcaggatcgcaacggcaagcagctgcgccgcttccatgttgagatcgatggcgacgtcgtcggcgacaccctgacgctccatgagcgctttgtctatgacgatggcgagaagcagcagcgggtatggcgcattcgccgcaccggcgataaccgttatcagggcaccgccggggatatcgaaggcgtggccagcggccaggcggcaggcaatgcctttcactggcgctacagcatgaacgtcgaggccagcggcagccggtggctgctgcactttgacgactggatgtacctgcaggacggcagccatttgtttaacaaaaccgagatgaagaaattcggcattacggtcgccaccgtgacccttttctttacccgagccacagcagaagagaggacagcgccatga

SEQ ID NO: 223916 - DNA, 234 bp, Klebsiella pneumoniae
atgcttaccgctgagcgtaatatccccggaagcacgcagcggctctccgggcagcatgcggttaaacagttcctgtttgcgggccagggtcagaaggacgcctggctgttcatggcccagcatcgcttcatttttatccagggtgatatcaccattcgcaaccagagaaatattctgactctgaaccggaaggcgcgtatttctcagcagaatattcccacccgcagaaattga

SEQ ID NO: 223917 - DNA, 303 bp, Klebsiella pneumoniae
atgaaaaaaagaaatttcagcgcagagtttaaacgcgaatccgctcaactggtcgttgaccagaactataccgtggcagatgcagccagcgctatggatgtcggcctttccacaatgacgcgatgggtgaaacaattacgtgatgagcggcagggaaaaacaccaaaagcctcccccattaccccggaacaaattgaaatccgtgagctcagaaaaaagctacaacgtattgaaatggagaatgaaatattaaaaaaggctaccgcgctcttgatgtcagactccctgaacagttctcgataa

SEQ ID NO: 223918 - DNA, 654 bp, Klebsiella pneumoniae
atggggcgctggcttgctggcagactcatgaaagagctggggctggtcagttgccagcagccgactcaccggtataagcgtggtggtcatgagcacgttgctatcccgaatcatcttgagcgacagttcgccgtaacgcaaccaaatcaggtgtggtgcggtgatgtgacctatatctggacgggtaagcgctgggcgtacctcgccgttgttctcgacctgttcgcaagaaaaccagtgggctgggccatgtcgttctcgccggacagcaggctcaccatgaaagcactggaaatagcatgggaaacccgtggtaagccagtcggggtgatgttccacagcgatcaaggcagtcattatacgagcaggcagttccggcagttactgtggcgataccggttcaggcagagtatgagtcggcgtggaaactgctgggataacagcccaatggagcgcttcttcaggagtctgaagaacgaatgggtgccggcgacgggctatgtaagcttcagcgatgcagcccacgcaataacggactatatcgttaaatattacagcgcactaagaccgcacgaatataatggtgggttaccaccaaacgaatcagaaaaccgatactggaaaaactctaacgcggtggccagtttttgttga

SEQ ID NO: 223919 - DNA, 624 bp, Klebsiella pneumoniae
gtgaaaactgaaaaaacgacccagcttgatattggcgcacagtattccggcaaacgtacaaacgcctgggtttctgcttatgtcggtcacgtaaatgattttatccttttccgctacgatcccaacgatgcatatatcagccaggtcgataacatcaacgccaccatcatgggaggcgaagccggtgtcagctataagctgaccgacagctggaaaaccgacgccagtctggcctattcctggggcaggaacatggaagatggtaaaccccttccgcaaatgcctcctctcgaagcccgtctgggattatcctgggaaagtggtaactggagcagtaccgggctggtacgtctggtcagtagccagcatcgggtggcgattaatgaaggtaatgtggtgggcaaagattttgacagcagcgccggttttgccgtggtttccgccaatgccgcttaccgcgtgaacaagtactttaaagtgagcgccggtgtcgataatcttctggacaaagattacagcgagcatctcaacctggcgggtaacagtagctttggctactccaccaatacctccgttaacgaaccaggaagaacattctggggcaaaattaatgtgacattctga

SEQ ID NO: 223920 - DNA, 267 bp, Klebsiella pneumoniae
atgccgacgctggggcgttttatgagcctgctgtcaccctttgacgtggtgatatggatgacggatggctggccgctgtatgaatcccgcctgaagggaaagctgcacgtaatcagcaagcgatatacgcagcgaattgagcggcataacctgaatctgaggcagcacctggcacggctgggacggaagtcgctgtcgctctcaaaatcggtggagctgcatgacaaagtcatcgggcattatctgaacataaaacactatcaataa

SEQ ID NO: 223921 - DNA, 141 bp, Klebsiella pneumoniae; identical to SEQ ID NO: 223068

SEQ ID NO: 223922 - DNA, 879 bp, Klebsiella pneumoniae
atgacccttgttctcagcgcttttgccatgagcgcttacgcggcgctggatctgcgcgccaatgagcagccattgccggtcacccgcgacccgcaggcgatagcgaaaattccgccgggctatcgcttcgtcgagccggggacgctaacggtggcgatctcggcgctcaattcgccgccgctggccctgctggccagcgacaaccgcacgcggatcggtagcgacccggatatagcccgcctgctggccggaagccttggcctgaagctcaggctggtgcccaccgcgtgggaggactggccgctgggcatcgcctccggccgctacgatgtggcgctgatcaatatcgcggtaaccgagaagcgcaaagagaagttcgattttgcgacttaccgggtggactccctggccttctcggtgaaatccaccagcgatatcgccgcggtaaacggacccgccgaccttgccgggcgcaaagtgatcgtcgggtccggcaccaatcaggagcggatcctgctgggctggaacgaggacaaccgcgccgccggacggccgcaggcccagccggtctacctgaccgatgatgcctccggcaacctctatatccagtccgggcgggcggatatctttttcggcccgcagtcggtggcagcctataaagcggcgcttaacggtcagacccgggtggtgggcctggggccgaaaaaagcgtgggtggcgacaaccaccaaaaaaggcaacggtctggtctatgccctgcaggcggctctcgacggggcgattgcccgcggtgaatatcagcaggtgctggcgcgttggggggagcagggcgaagcggtggcgcagtcggtggtcaacccgccggggataacctactaa

SEQ ID NO: 223923 - DNA, 1311 bp, Klebsiella pneumoniae
atgcaacagcaaataaaacgcagcaacgtgcgttacggtatattagtttttttatttcttgcgaccgtatttaattatgcagaccgggccaccttgtctgttgtcgcgccgattatgagtaaagagttaggttttgaccctgaagcaatgggcctggccttttcggtgtttggtatttcctatgttattatgcaaatacccggcggctggctgctggataaatatggttcgcggttggtctacggctgcgcactgattggctggtcggtcgtcactatgtttcagggcactatttatctgtttgccagtccgctggtagtgctggtgatcctgcgtctgatgatgggcgccattgaagcgcccgcttttccggccaacagtcgcctgagcgtccagtggttccccaataaagagcgtggatttgtcacctcggtctatcaggccgcgcagtatatttcgctgggaataattacgccgctgatgaccatcattctgcataatttaagctggcactatgtcttttattatattggcgctattggggtggtactgggaatattctggctattaaaagttaaggatccttcacatcaccctaaaattaacccacaggagctcgattatattcgtgaaggcggcggcgtaccggaattaggtagccaaaaaacgccgcaaaaattaactctcgcgcagattaaaagtgtctgcgtcaatcgtatgatgatcggggtatatatcggtcagttctgcgtcacatcgattacctggttcttcctcacctggtttccgacttatctctaccaggccaaaggcatgtcaatccttaaggtcgggtttgtcgccagtatcccggcgattgccggatttatcggcggcctgttgggcggcgtattttcggactggctgctgaaacgcggttacagtctgaccaccgcccgtaagctcccggtgatctgcggcatgctgctctcctgcgtcattgtcgtcgccaactacacctcttcggaagtggtggtgatcgccgccatgagcctggcgttctttgccaaaggtttcgggaatctcggctggtgcgtgctgagcgacacctcgccgaaagagatgctcggtattgccggcggcgtgttcaatatgtgcggcaacctggcgagcatcattaccccgctggtcatcggggtgatcctcgccgacacccactcgtttgattacgccatcctctacgtcggttccatgggcgtgctgggcctgttctcttatctgtttatcgttggaccgctggatcgcttgacgctcactccgcgcaccgtttga

SEQ ID NO: 223924 - DNA, 297 bp, Klebsiella pneumoniae
atgaaagacgaattgtttgccgatctgctggcgagtgcagaagaaatggtcaggatcgagaaaggtgaacaaatgctgatggagcagcacgttcataccttcagcgaaattgacgtgaaagcgatacgtgaagccacaggtttaaaacagcaggactttgcagcggccgttggcgttagctacgagttggttaaaagctgggaaacgaaacgacgtcacccaaccggtgcagccagaaaactgcttttattgcttcagggtaatccattgattatcaacttgttgaaggttgtttga

SEQ ID NO: 223925 - DNA, 843 bp, Klebsiella pneumoniae
atgtcgaacggattagctatcaacattcctacgtcatttagtcgtgttttaaccgatttaagttttatccctgacgtacaatctgactcgctggcgtacacaggactctacgggtctgatgcagcgagtagcattattaatgacactactggtggattatcttctaaaatcttactggtagaagtccgaaatagcgaacgcgtggcctatggaaagggatatttttccataacgggtactggcgctgacacgtcaggtgggactggtgtacgcgctcaagtgaacttaacagacctcgacagaattggcttcccgtgttcttttattactgcattccgtaatattaaaaaagtgcgagaaacagcaccagtccgccgtttatatcctatcgcgtcattttattataattcatctgtgactgatgggtccccgtttctaactattgccgcaggaataacagaggatgatgcgcattacatcgcggcatattcagggtctatagcctcgctcgggtctgacgcaaatgctcgtcgttgttatgttgatatcgactggtcagctactgatagccttatcacagcggggatttcacgcgcggcgaacggaacggttaatcttgcagtgatagttgatggcgtggtgaaaactgcatcatatgggttcccagtacagacagatgtggcggtaagtagcgcgtatgttctattcggctcgcagaacaaaaacacgttagactcgggtgagtttattatggggcaatactggtacaacacgacactaacactatctgagcttcagcagcaggtggctgttactaacttaaaggcatctgctcgtctttaa

SEQ ID NO: 223926 - DNA, 1731 bp, Klebsiella pneumoniae
atggcagaagtaccgttaccaactccaacagacaatcaggtacccagcactgatatccgggacgcagtttatgctggcgccatgctggataaggttgtcaccagtaccgaaccgacatacatcgatcgtctcggcggcgagcactacaccgtagacggaatgaaggcggaaggggataaagttgtcgaagagacgcggaagaacctgatccctctaagccggcagtacatgaccctggaggcagctcaggcggatattgcgaatataccaatgggttctaccacgtattaccgcagcccggatgacagcgcacttgcagtagaggtaatcaataacgccggcacactggagcccaccgggcgcaagatgccgtcgcagcagtccatagataagtattttcaggttcttccggacggaacatttgcgttgatggtcgataacgggatgattctggccattgataaaaacgcggtaacgcgtgctgtttccctcgccgtgcaggacctgatcggtattggaggttcctcgattcagatatacccacacgccgctggtttttatattcagggagataatggtatgccgttggcattgggccctgacggggtgttgcgcctggtatctgcaaatataggtggtacgggttttgaatcagagtcgtttggtattcctgtgttattccgggggactaatggggtcgtgggtgctgttgatacggacggtaactggcgcctgccaggggtggttacagatacactaattgtcgacggaaaaaaaattactggtgatggcggtggctccacgggtgcggaatttacacgtagcgatcgatacgttgacgctaacggcaatatcatgcctgtgatacccgatacattaaaaatgagtgcctggggatcgtcatcgttacttcgttatggtgctgatgccgctttctctgcgctggctggcagtctgggtgtaactaactggaataatcaggggcagggaggggaaacatcttttcaggttgccgcgcgattcggtagtgtcccgttctcgttgattttccccgataatacaatcccagccagcggcgctgtcggtgttacgtgtactcaactgccgagcaattttagaaactcctacctcaaagcgtattctggtactgttggcggggtctcggggactctgtcctggtcatcatctttatcttcattgctgttcacaagggcttcctccgggtcacctgtggtattaactggcgccactgacttcataccgacgctgcctgaatcttaccgtgatggagtggtcctgctgtggatgtataaaaacgacataacgtacggttcgggtaatcctgaagttagcgcggaggttacatacaataatgttgtaaaaacgtttacgcatctatcaacgcttgcgaagcgttgtcttgttattggtatttttaacgattcatcatactcaaatacagattatttgaaccgggtagcaacgctcaactcaatgatgcggaataaatttggcgatttgtactgtgatacgcaggattatttgtgcagcgcgcaggtgtgggttgatacaggtatcacacccacagagcaggaccttgctatgcaggctgctggatataaggcgacatctctctcgggagacacattacatttaaacgcggcagctagtaaagcaataaccgaccacgtcattaaaccaaaattaatcagcctgggctggtacaaatag

SEQ ID NO: 223927 - DNA, 624 bp, Klebsiella pneumoniae
atgtcttctctcatttgcttttctacggatgaattcgcggttgtagcgacggatactcttggtgtggatgccgaagggaatccctttatccttaccaataaagcgacatatctaccaactataaaaacgattatatgcggcacaggaacgggtggatttcattcccgctgggcggaatttgtaaacagccgcatgattttattagacgtggataatcttgattaccatgctccatccacactaaaggatatgtgggaggagtataagaaggaatacaacgtaggtgatgagtgtacggtcaccatctatcatgttggaatatctcagtcatcgggaagaataaagagatttgcctaccgatcttcagaatgtttcaggtcagaggaaataactcatggttggttttgcaaaccagagtgctcagtccctgacggggaagacatcttgggaattatcaaggcaatgatgtttgaacaaagggcaatacaggatgcaatgccaagtgctgaaagggtttatattggcgggcaagttaacgtcataatccttgagaaagatagcgttaggctcatgactatagccgacttccctgacttttcatcggtgatcaacaagttgttttaa

SEQ ID NO: 223928 - DNA, 522 bp, Klebsiella pneumoniae; identical to SEQ ID NO: 200157

SEQ ID NO: 223929 - DNA, 174 bp, Klebsiella pneumoniae
atgcaagacgtactctataccggccgcaagaacgacagtttccagcttcgtctgccagagcgaatgaaggaggatatccggcgcttagctgaaatggatgggatttcgattaactctgcaattgtgcagcgtttggcaaaaagcctgcgtgaggagcgcatgaatggtcagtaa

SEQ ID NO: 223930 - DNA, 363 bp, Klebsiella pneumoniae
atgagcagattccctagccaagaaatggacaggtttaacgtaaggctgccctcaggaatgcgtgaagcaatagctgagcgcgccaaggccaacggcaggtcaatgaactcagagatcgttcagatacttcaagaggcgcttgataccgataaggctatttctgaaagcgatctggttgacttcgactcaactcaggctgcttttaatgccacctcaacgcctgaagaaaaagaaatattcttaaccactcttgcgaaaaaagatccgttcacggcggaaatcctgcgcgaaggtgaagagcacgccaggagacttgcagcaatacttggtagacgcatgggatatctggatgacgaaaagtaa

SEQ ID NO: 223931 - DNA, 222 bp, Klebsiella pneumoniae
atgatttatcccttcgacgcgtcctatgcgcaggaagtgctgaggaaacactatcagtatgcggatgtcctcgctaatccccgcgaaagtcttgctgcaaagacggctgggctcattgctcacgacggacacctctcgaaatgggatggcgataaaagcacgtcagaaattcgccgggagttgtcgagaaacgccgaagatattgaaactcgggcggcataa

SEQ ID NO: 223932 - DNA, 297 bp, Klebsiella pneumoniae
atgtctaagattgatgagtttaaggaccatatcaaggtctacataaatgctggtaagcaggttgcagagtcgccacttggtacagccagactggttggcgggtttagcaccttaaaaaaaggtgctgatgccggtgttactcctgagcaatttcgtgcaatgtttggcgacttgcacaagtactccaatgaaaaagttgcaggatttattgagattggttcggatctggtaaaaggtgatgtgattatccctcaaaccattttcgaagatcctgcgggtgagccagaaaaagagtaa

SEQ ID NO: 223933 - DNA, 798 bp, Klebsiella pneumoniae
atgtcagtaagtcaattaatctcaaaatctacagttagaattgagtgtgatgttgttggtgggggcgtttcggttggcacgggcttttggtttgctttttcaacttcggaaaactccgggattcctttactcgtcactaataaacatgtgattgcaaattccacagccgttcgtatcagattgaacgtatcatcttcaactgaccctaatcttaagttttacgatgtaataatagacttaccaagtgactttatacaccaccctaacccaaatgttgatatatgtgcccttcctgtaacgtcttttttaatgacgctaaggtcgcaaggaatagaagtcgataactttttttttactgatgagtatttccgaaatcgacagtacgtgacccctgttgaagaggtgtttatgattggatatccgaacggtttgtgggattcggttaataacagaccaatcatcaggaagggtattactgcctcttcattgctggagagttggcagggaagacctgagttcatgattgatatggcatgttttggaggttctagtgggtctcctgtattcatcatgaatgacggaggatttccaacatctaatgggtgggcgattggaaatagattcatctttttaggattgttatatgctggcccaactcttgatgtaaatgggagtattaatatcgtagatgtgccaacagtcgcgactccagtagtgagtactacactaatgatgaatttaggaatggttatcaaagccgagcagttaaatggacttaggccattgctaggtatttaa

SEQ ID NO: 223934 - DNA, 462 bp, Klebsiella pneumoniae
atgagccgcttaaccgccattatcagcgcagtggttatctgccttattgtttgtctcgggtggctagtcaatcactactacgacaacgccaccgagtttaaaaagcagcgcgataaagcgactgagcaactcaaccaggcgaacgccaccatcaccgacatgcagatccgccagcgcgatgtcgctgcactggatgccaaatatactggagaactggcagatgctaaagccactatcgatcagcttgagcgtgatgttattgctggcaagcgtcggctgcaactcaacgcaaaatgtccagcaaacggagcgaccgcagccggcggcgtgggcgatgcttccagcccccgacttactgactccgctgagcgggattatttcaccctcagagagcgaatcaacaccatcactggacaggtgaactacctgcagcagtacgtcagggggcaatgcctgaaataa

SEQ ID NO: 223935 - DNA, 501 bp, Klebsiella pneumoniae
atgaaactggaattaaccaacgaacagcaccagtggatagatcagtggctccagctttggggcgcatggtgccagacagggaagatagacaaggcgatgataaatatgattgccaagttcatggccacggttgaaccgcaagcaccatcaaggcctgtatgcagcgatgatgatgggttgctgattgatgccgtaatccgacattacctgaaaaacgtagatgagaacgcatggaaggtgatttttgcctattacgtctgtaactcaagcgagataaggatcgcttcatggcagcatgctgtgagcaaacctcgcctgatgaagacccgcgccggaaaccagtataagcacccgagcatttcaaccatccgccgggaagttaagcagattatcaacgcggcgctcttctgcctgtaccagccgctgcaaaatgcgtttaacgatcgcgaaagtgtgagaaaaattgcaaaaaatagccacaacgtgcttgcatttcaatga

SEQ ID NO: 223936 - DNA, 171 bp, Klebsiella pneumoniae
atgcacagtctgctcgctaaggtcatggagcgcggcatcttccgcgtaccggcgcgccgcaagcgcaaggtcgaagttaagccttccgacatcccgaccctgaaagactataccgcccgcctggtcgataagaagtggctacgcctgagagcaaggaggccacatgcgtaa

SEQ ID NO: 223937 - DNA, 201 bp, Klebsiella pneumoniae
atgacatgttctgtgtgtgaaaagcagccaaggcagcggcgtcaaccacctttagagtgcatgaagtatattcctgaagaacaaggggaatacatgagtctgaatggtcgtggcactaaggaaagctactacatttgtactgagtgtggacataaatggttgcatgaaacaggcaattacggaatgggctggcagccttaa

SEQ ID NO: 223938 - DNA, 942 bp, Klebsiella pneumoniae
atgaccaaatcaaccataaccagagagcgagttgtcgctctcatcgcagagcactcttacgatagcgcgttagttgatactcttgaacatctgctggccgcaatggacagcgagccacacacagacggcgaattatctaatttgctgtggtactcacaagaggccacctgtcattctgacccgaactactactgtgaatttcatcgtctggcaacgcccggattaattgccgggataattcgtgagctacaggaacgccgcaaggccgacagcgaaccggtggcgtggcttctatcaggtggaggaaccaagaatgtagtgtgttttgatagcggcaatgcgtatgcagacccactacgcgaggtcactccgctctatcgccacccgcagccagcgccggaatatccagaaacattaccatgtcccgtattgctggagccgggaatgcgcttcgggaaaggcgttaaaaccagactggtactggatgccattcagcgcagagccgagcagtacgccgaacttgaggctatgacgcaggaagagcgtgcagaacacgacgctaatattgaagcattcaaagccatgttgccgcagccagtgccggtagcctatagcgattttgagtcattctggtcatcttacattcatcctctggcgcaggatgacgagctgaagggctttgcgtgggacatctggtgcgccgccatgctcgcagccgccccgcagtcacccggcagtgaacccgctaccgtgccgggtaaatggattccggtatgcgagcgagtgccaacaaagcaagatggttctgtgtttctgacatggaatggccagtacatcggtaaagaattatttctgatgggttctttccagtgcctcaagccggaaattatcacccactggatgccgctgccggccgccccgcaggaggtgaaaggtgaataa

SEQ ID NO: 223939 - DNA, 276 bp, Klebsiella pneumoniae
atggaaactgtgaaatttgctgtgcaattactcaaaagcgatgactgcgtaaccttgatggggcgcggcgaggtcagcaaggaagagcttatcgaagaggctattcgccaaggtgagatagacgccgatgaccgcgaacgctttgaaaaggctgaattctgcgccaataagtggatgaaagccgttccgcgtgagggttattcaacatactactacgagtcgcgtgaaggcgttcgcggggcattcaaagcaacctgtttgcaatacctgtggtga

SEQ ID NO: 223940 - DNA, 423 bp, Klebsiella pneumoniae
atgactgatatcaccgaactggcgcagagagccagaatcaacgctgaatgtggtgagcatctttccccagcggagaccatggagctggtagaggcactggaatcagagaaaaggatttgcgcaacgtggagaaaaacagctgaggctaacagcgaaaagctggagaaggcgcagaccaaagcagatgtatacgacatgcttcgggatgactacggtttgcgcgaaaaaggtgttgggcttgcagacttcgttgactggcaggctaatcgcatcgccgagctggagtcccgtaccgtgaagctgccagacttacggcagattgtatctggggacagatatgtctggtctgatggcgtttataactacagccaggacgtaaaggtagcgctggccgccgctggcatcaaggtggaggctgagtga

SEQ ID NO: 223941 - DNA, 303 bp, Klebsiella pneumoniae
atgaaaaagaactcgggcaaacaagccgtaatcaattacatcggccagcatcctggctgcagctttcaggatatccgccgcggtaccggtcttgactcttcagtggtcaattcctccctgtggcagatgcaccgtgacggccaggttaagcgagaaggtgagtgcaggagctaccgctacaccctgattgacacaacagccgtaaccgaaagcgatccgtctgttcagtatcgccagcgtcctggcggcgtaaacccaatgaccaacctttttaaccagtgcctggcgggagtaagaaaatga

SEQ ID NO: 223942 - DNA, 189 bp, Klebsiella pneumoniae; identical to SEQ ID NO: 204875

SEQ ID NO: 223943 - DNA, 219 bp, Klebsiella pneumoniae
atgacgccagaaatagaaaacgttatgcgcaatcaggggcgccaatgcgttgatgaaatccgtcgcgccctgaaggccaagccaaaaccgaaatggaatgaggtggtgccaccgatcctcaaaaagcaccacgaaaaaattaagccaatgggcatcagccttacggcattcgtcagcagcattggccgcatgaatgggcggtatggagtggaatcatga

SEQ ID NO: 223944 - DNA, 735 bp, Klebsiella pneumoniae
atgaaagagcgcggaatgatttttaacggggagatggtgcgggccattctcgacggacggaagacgcagacgcggcgcccggtaaagtttccggttttagataaaaaccttgggtgcgagctggctggcaatgaactggccggggagctgtcggcaggcaactatctgaacagcgcatttggcaagccaggcgatcgcatttgggtgcgtgaaacttggggcgttgtcagtcacgcctttagtgaagatggcttgatgattgactgggttcctgatcgccccgcgactgccattcacgaaatgctgtttggcaatggctattactctggctacgccatttatgcagttgatggtgattttacctggggcgatgacgatggttatgaagatggccgttcgtgttggaagccttccattcatatgccgagagcagccagccgaattctgctggaaatcaccgacgtgcgcgttgagcgtctgaacgctattagcccggaagatgcagagtcagaggggctggagcgtaccaactttacaggtttcggcgacgagcctggattacctagctatccagagccggatgtttatttcgatccactgaagaaacagtggaaggaatatccgcctgaagcattcgcggggctatgggaatccatctacggcgaaggaagttggcaggccaatccctgggtttgggttatcgagttcaagcgcgttgaaggcggtgcagcatga

SEQ ID NO: 223945 - DNA, 225 bp, Klebsiella pneumoniae
atgatgctgaatgcccgaaaggttgaagccgcgaaaggaaaagagaagagctacaagctgtctgatggaggtggtctgtatcttcaagtagaacccaatggctcgcgttactggcgtatgaagtaccgttttgctggcaaagagaagcgtttatcttttggtgtctatccaacggtttctttggctgatgccaggcaaaagcgtgaagacgcagggacggattaa

SEQ ID NO: 223946 - DNA, 1179 bp, Klebsiella pneumoniae
atggataacggctctattactttttttgatattaaaacatttggtttttacagattaaaacataaggcaaaagatctcgattataaatatggaacactgaatgaaatatttagtgagttcgatatttggttaaaaggaaaagcgattgaagaaacaatcccatgggatgttaataccagccctatgcgctctaaaacatattgccgtggggtcgctattgatccgcaaacgaatgatattgttgttgtattactgagagcagtaggtgacggttcgggtaatttacatggagtaaaaatgggatcggccgtaggggctggcgaaagtgaaacagtgaaagctggaactgatgtaaaaggtgataaaattatttggggagaaccatgttattattggatcatacctgaacataataaaatcgcctcaataatatttccgcattctggagctgatacatttagattttgtcagtattttactactttcgttaataatcactcaaatgttgatggaaccaggaaacagtcaactacgagccatcaacatagccgtgatccaggcagaatgattaatgtcgttaagacaatgtttgaatacggggaaggaaaaaataaatgcaactgcatttttaaatttgatgttgaacaaacaaaaatgaaaacagcagtaggaaatttggaagaaataattccaaatattactcaaactataattagagatgttgcaacagcgcgtgtagaagatgagcgtagtcctatccttcaattggctagtgagtatttaccatctcttttcggggaggctcctccattgcaggctcctaagcgtatagaagtgcgcattgatggtgctccttcagctgaggaaattgcgagattatttgcccaaagagcggaagaaactgattgggctgatgtcggttttaaagttaaagattcagaaattccaatttggctaactaaatatgttgtgaaatcaacgcttccaatcgattcagatggactttcacattattcccctgaaaaattattagaagaaattaataaaattcgcggggatattcttgagtctgtcatggcgcaagaagatgccatagaagaaggtattcaggtcggtccagttgccaatgatggtgatgaaaacgaaaatgaccaattaattgtaaatggtcaagcttaa

SEQ ID NO: 223947 - DNA, 534 bp, Klebsiella pneumoniae
atgaatcccaaactcaggaaggcatggtcagaattgattgctggagccaaatgggatgtaattgctctggttgttgttgccataattatttactttttgaaaaacaccttaaagtttgcagatgttaaagatgttgtagggactttacaaaatatatccgcggcaatattcacgattatcggtttgtgggtcggttttttgtatcctaatgcgatacaagggatagtaagtgataatgttgattatattaaaaatacaaaggatgttccaagaatagaaaagttgatctacgtgataattgtttctgcattagtaatgttaggaactcttgtattttatatattcaaggctttactaggcaatgcatctttatatgttgagcatcagtcagtgattaaatattttgcgttagtatttgttttttacttgtgctggctccaaagtcgatgcatttttagcgttattaaaagtaatttcagatttgctaatagtctctactctcgtattaatgagtcaaagctaaaacacgattga

SEQ ID NO: 223948 - DNA, 786 bp, Klebsiella pneumoniae
atggaaaacaacttaaaaaattttttgacaaatgcattaagagtcattccgggatacgatttcctgtcggaaatgtttattttcattaaacacccagaaatatatgatggtacccacgagtatgctccactggaaaaatctggtgctaacttattaaaatcgatgctcttcgtcggttcattaatagcagcattcagttttctttccattaaatcaagccctataactagttttaaattaatattcaatcaaatctattggtacattcttttgatgatccaacctataaagtttggtggttttttctggttatgcatgtctaccgcgaccagagtaagaaaaaatgagttgcatagtgtttatttctttcaagtgattcaaacttacgcagttattaatataataatcttcttcttattttgcatagcaatcaacaggattttacttactggagattttaaccaaccatttggcaacattgatcttatgataggaagtatattggcattacttgctcttatacttatatacaggctatttatagttccatcatttaattacttgtcgatatattacaacaaagtaaccagtttaatcgttcttcttttgtcaattattatttcttattattcatctagttatatacggataatagatgaaaaagaaattatcaacccaaaagaatactgcgaattatcttatatattaaaattttcaccttcacatattaatgaaataaataaaagcttatacctgaataaatgtataaatctcttcccccagtag

SEQ ID NO: 223949 - DNA, 858 bp, Klebsiella pneumoniae
atgaataatgaaaatacgtatggctacgtatatatactggtatcagataaaacaccgtatattaaaattggtggcacggattatttgccagagaagcggtgtaaggagattaatacccagccaccctattgtttatatgccccatggcgggtagcagactaccgtagcgtacctgactggcataatgtcgaaacctggctgcactatctttttcgcgattctcgcgtgcggactattgcaaatcagaaagagctatttaatgtcacgcctgaactggctgcccatcatcttgccagccttgatcaacaaccgttgacgactaaacctaaaatcgaccgactttttcatcaccaggggttgagagattacctggtaaaactattcgctatcgccggttgtgagaaatggcgacataaagaaggggtttgggtgtttagtctattcccaggggcgcatagcggatggtcccggtattttacgcttagtatccatagccacgaagtcgctttttcaacgcggtcccgcgattgtcaaattcatatgttattagcagatgagcttatcatggactatcccgatattgttcagtgggtaacggaccataaaggagggtttgaaaaaccaatttataaaacagccttatcgcacgcgcagcaaatctggtttgagggtgagtttgaagtgggtcttcagttactctcgttccctgaagtccagcaggctgttgccacctactgggaccgcgcattaacaaaatacgattatagtcttcaggcgaagtatcataaccggatggcagttgaggagatcttcaaacagttacaagtacaacggcagcgagaatcgagcgcaatgtaa

SEQ ID NO: 223950 - DNA, 987 bp, Klebsiella pneumoniae
atgctttcaattataatccctctttataatgctgagttgcatgttcctaatctacttaataatataaaagagctagaccttgaaactatagaagtcatactagttaatgatggttcaaatgattcaactgagttattgattctggattttataagctcactgcaaagcacaaatgtaagattggtaaataaaaataatggtggggtatcttctgcaagaaatgtcggcttgaataatataagttgtgactcattatatttggctttttttgattgtgatgattggttttattctgacgttttgaattcttttttaaatgatgttaaatcattaaatgatccagatttgattttatttaatttcataagtaacaatggtaattactcaaaaataaacgatcataagttagagggggatgtttctctttcaaataatttcgtcatgttatatacgtcgggtttgatccaaccatgttggaataaaatctacaaaacaaaactgattaaagaaaacaacttgctttttgaagaaggtattaatatgggagaggattttcgttttaacatttcctttcttgaagtatcaaataacgtggccgcatttcgttcttctctttatcaatataatactgatagtgccaactctttaactaagcgttatttacctgattcatttgagtatttcaagtatggtatttcaaaagtaaatgatttatgcagattgaaagggatcgactatccagatattcacaatcgatatattattgctttgaaggatcgatgtagaaatttgtctgtaagcaccttgccgtacaaagaaataaataatttatttgaaaaagattttacgtttgtgagaaataatttaggaaaaatagacattaaaacgctatcattccaaaatcgaataatatatatgctcgttaagtttaatttgcctaaattcatttggttggcatttacttttcatcgtttaatgaagttgtag

SEQ ID NO: 223951 - DNA, 1149 bp, Klebsiella pneumoniae
atgatttttaccaaaatcattaggggattcatcagggcggagtatcagcacaacggcatggcgcggcgctttcccgatattcgctttatctggtgggccggcggcgccaactttactcatcatcaggacaccaaccgactgattcaggcgtggcagaaaccggagcttatcgttatttccgaatgcttctggaccgccgccgcgcgccatgccgatatcgtcctgccggcgaccacctcgtttgagcgcaacgatctgaccatgaccggggactacagtaaccagcatctggtgccgatgaagcaggtagttgccccgcgagatgaagcgcgcgacgatttcgcggtctttgccgacctcagcgaacgctgggaggcgggtggccgcgaacgcttcaccgaagggaagagtgatttgcagtggctggagactttctatcagatggccgcccggcgcggcgcccagcagcaggtgacgctgccgccatttgccgaattctggcaggctaaccagctgattgagatgccggaggagccggagaatgcccgttttgcgcgtttcgccgccttccgcgccgatccccaggccaacccgctgaaaacggcgagcggtaaaatagagatccactcgccgaccatcgccgcttttggttacgccgactgtccaccgcatccgatgtggctggagcccgacgagtggcatggcaacgcagaggcggggcagctgcagctgctgtcggcccatccggcccaccgtctgcacagtcaactgaaccacaccgcgctgcgcgagcgctatgccgtcgccgggcgcgaaccggtgactattgatccgcaggatgcgcaggcgcgcgggattgtcgatggcgatttggtgcgggtatggaacgcccgcggtcaggtgctggccggcgccgtggtgacggaggggatccgcccgggggtgatttgcctgcatgaaggagcgtggcccgacctggatccgcaggtcggcatctgcaaaaacggggcggtgaacgtcttaaccaaagatattccgacatcccggctgggcaacggctgtgccgggaacaccgccctggcgtggctggagaaatataccggcccggcgctgccgcttacggcatttgatccgccggccaacgcataa

SEQ ID NO: 223952 - DNA, 165 bp, Klebsiella pneumoniae
atgtcagagatcgtccgcgagctgacccagctcggctggacgccgcagaaaatcggcaaagagctggggatggatgccgatgaagtgctgcgtctgaagcaaattagcggcctgacagaaatgttcgccggccgccagttctcccaggcgtggacgattaagtaa

SEQ ID NO: 223953 - DNA, 750 bp, Klebsiella pneumoniae
atggccagaaaaattattgtcgttaccgctgcgtatggtaatgaccatgttaaatccttaggcgggcaggccgccgtcctgccgtttatcgccaacgccggcgcggacggcgtcgaaatccgccgcgagctgtgcagcgcggaagagctcaacgctctgccctcgctggcggccaccattgagcgccacggcctgctggcctgctactccgcgccgcaggcgctgttcaccgacaacggcgagcttaacccggatctcccgacgctgctcgcggaagcgcaaactctgaacgctctgtggctgaagctctcccttggccatttcctccacaatcagcagttggatgagctgcgcgatatcctcagcgacagcggcatggcgttggtggtagagaatgaccagaccgactgcggccagctggcgccgatgcagcgcttcaaagccgcctgccgggtccatcagctgccgatcaccttaacgtttgatatgggcaactggctgtgggttggcgattcgccggaagaggcggcacgtcatcttgcgccggcagtcagctatattcatgttaaagcggcggagcctcatcatgagaaattccgcgctgtaccgccggatcaggccgccgaacgctggctggccctgctcgataatcttcccgccgacgcgccgcgtggaatcgagtttccgctgactggccatgacctgacggccgtgacccgccgctacgtcaacctgttacgcgaggattaa

SEQ ID NO: 223954 - DNA, 522 bp, Klebsiella pneumoniae
atgaaaactcaagctcgagagcgtctaaaatatcttcatatctttcccttggctgtgattgtttgggccagttttgcatatcggtctgatattactagtcaggatttagaaccattaatttctattttacaaaatgtttctgtaatggtttttactattatgggtatatggatagcatatctataccctaatgcaatattgaggattactcagccttcaaaagtggatgctattttttcaaacgaggatagtgaacgagtgaaggttattgttggtgttgtcgttctatctgcaatagttctatctcttctcttgataggggttgttataaaacctttcatcattaaatcttggttatttattaatgtcccaactttctttgttgccgttggtatattctcattgcttattctgagttatttacaacttatagcgctttatattgttattgcatctaatgttaattttatagttgagcttaaaaataagagaaacaagcgcgatcttaatgatagactttaa

SEQ ID NO: 223955 - DNA, 1086 bp, Klebsiella pneumoniae
atgagcgaaggactggtcactttcttcaaatataaaaaattagggttccataaaagaggtgattcatattatgaaccactaatgatggccgatatgttggaatctttacatacttggttctcaagtagaacatcattggcagatacattgccttgggatgataatacgcctggttattccttaaggaaaaaagtttacttgaagggtattgagcgaaacgacaccacaggtgattatgttgtaatattatggcgagcgatagggaatggaaacggggtttatggtattcgttctgactctgccttaagtgatgatcgtttatacagcgccgatgaagaattagatggtgaaaatgttatctggggtgagcctgcttattattggtttattccagctttaaatgtttttgcgtcaataaaattccatagttcaatttcagatacggaactaatgaataagtatcttcgtgatttcatgactctacacagcgatatcagaccgaagcgtcgtgaaatgaaagaaggtaaggcaggaaattatttaagtatatcttttaattcttcctcaggtgacaatctatggcttaggatatatagtgagcaatatacgaaattaacaaatgaagccgatttagatagaatcgctaaccagataacacactttgttaaacgagatgtcattagcgcatctgtgcaaccagatgacggctggagtaggtacttcaggggccttccatttatttccagcgaagtaacaagagatactcgcaagattgaattaaccattgaagcttctcctacaggcgaggagttgcgttccatttttgagacgtataatgatgaatataatgttagcactggtgattgggctaatttaggttttagaaaagagggggttggtggaacatgttggttaaacgagttcgttgtaaggaatacattattagttagtagtataggtcagtatgatgattcaggtttttacactactaatagaattttcaatgcattacacttaactagagataatcttctggctgcttttacaacaagttctccggattccgaagagcaggcgaattcttga

SEQ ID NO: 223956 - DNA, 567 bp, Klebsiella pneumoniae
atgaccacccttacgctacagcaggcctttgaagcctgtcagaagaacgaaaccgcctggctgaaccgtaaagcagaactggcggccgcagagcaggaatatcaggaacaggtgctggccggggatgagcgtataccgggcagaatgcagacactgcgcgatattatcgatgtcaaaaaatgggagataaatcaggccgccgggcgctatatccgctcccatgaagcggtacagcgcatcagtatccgcaaccggctgaatgactttatgcaggcgcacggcacagagctcgccgccacgctcgccccggaactgatgggactcagccagcagcccgcactcctgaccggccatgcgctcgaccgttcggcgcattacctgcgcgaagcgctgtccgtgtggctgagtaccggtgaagaaattaattatgccgcagaagacagcgatattttaacggccatcggattcaggcctgacgcggcttcgcgggtggataatcaggaaaaatacacccccgcacagagcctgatttatgcccgccggcgcgcggaactggccagtaagtag

SEQ ID NO: 223957 - DNA, 246 bp, Klebsiella pneumoniae
atgatgcactgtccgttctgcaaaaagtcggcgcatgcccgcacctcccgctatctgtcggagaacgtcaaacagcgctatcaccagtgcaccaatattgagtgctcggcgacgttccgcaccactgaagccatcgacgaggttatccggcctccggcggagaaagcgccgcctgtcgcggagccggtcacacctccggccccccgtaaagtgcagggctgctacagctcgccataccgtcattaa

SEQ ID NO: 223958 - DNA, 1509 bp, Klebsiella pneumoniae
atgaatatggtttatctctcagtctccgcattaattgttgcagttttgtctgttgtcatcgtttttgtccttttgacaaaattacgcgcgttgaaggcctctgatatcagtaaaacagcacaacttgagcgttatgcagtcatttctgatgcagaagcggaagcaactcgagtcacgcaagaggcggaacaacaagctcgagaaatcatcgacggtgcaaaaagtacagccacctctctggaggaagaagcaagcgcattactgagtaatgcacagtcaactaccctattattacaagataaaattacgtcattacgtgcttcttatgccgagaaaaaaagtatctatgacgaactcgaaaaagcgatagctctttatcgtgaggatgtagattttgcagagatggggatgtttgagccacatttcgatttcgatacctccgaagagtttaaggaggcgatcaaagatatcagaaatgagcaaaaagccttgttacgccttaagaaccgatccggagctatctggtgtggaactgactggacagttcataattcccgcgttgaagggaaaaaaatgactacacgggctattaacctaacagcgagagcgttcaatggtgagtgtgatgctgcaattgccaactgtacatttaagaactggtcagtcatgcatgacaggatccaggcggctttcgataaaattaatgcactcaacgaagtgaatgatgtacatatcagtaaagaatatctcagactgaaattaaaagagctcgatcttgtacatgcctacaaaatgaaaaaacagtcagagaaagaagaacagagagaaatccgtgctcaaatggcagaagaacgcaaagcacagcaggagattgagcgggcgattagagaagcggaagcagaggagcttcgtgcacaaaaagcactggataaggcccgcaaggaaatggagtcaaagttggcgcaactgactgcagaacaggctgaaaaatatcagtcgaaaattgacgagttgcgtgacgcattaactgaagcagaactgaaaggtcaaaaagctttgagcatggcacagcaaaccaaacgtggacatgtctatatcatctccaatatggggtctttcggcgaaaatgttttcaaaattggtatgacgcgccgtctcgatcctcaggaccgagtggatgaactgggaagtgcctcagtaccttttctcttcgatgttcacgctatgatccatagtgaagatgctccagctttagaaaatgcgctccatcaacactttgatgccaaacggacgaatctcgttaatagacgtaaagagtttttcaacgtcagcctgaaagagatcaaaagtgcagtttatgaacttgctggtaatgacgtcgattttatcgaaacggttgtagcacaacattattacgagacattagcattacgtaagaaacaaagtgggatggtagaagtgcaagcgcagaatactaccgtccagccacgttttgctgagtcaatttga

SEQ ID NO: 223959 - DNA, 267 bp, Klebsiella pneumoniae
atgtgtatccaccttaacttaatgatttttaccaaaatcattaggggattcatcagcactaaacccccttttataaaggtattcagcgaatcctttataaaatccctgtacaacggccgtcgccgggtgaacgatcaccaatgctttggctttgtgtctttgccagagcgtggcgacgacaaagccgccctggcttacggggatgatgacagattccatgagtctcgccttgtgtggtcataccagtttaacctggatttactgtag

SEQ ID NO: 223960 - DNA, 597 bp, Klebsiella pneumoniae
atgaaggcttgggcttccggccacggcaaggcggctatcaatgccgtcatgattgattgcctgtttactgggcaatgtcaccccagtaaaccagcctccctcgccgacaaccttcgggaatggcatgagaaatttctcagacaaaatacaaccttaagtcgtctggatagcattcactgcaaaactacaacagtgattaaaccatactgcaaaaagcctggtgataatagcattgtctgtaatagagcacattacgccgtatttcaacgggtaagcttaatctggtacatgcggttgaatgagatgaaaactcgtcacggtcaacgtatacaggaagatatcaatgggaggtatagaggacaggtaagtattgcgacacggtctggcggcgggttggaatgctcgcttcggcgcgggaaggactcacatccaggatacgccgaagcctgccggttcaccacttttcgtcacgtgcctcctggcgcttgtcgctgcgccaggtggcctgtacggaaagcgatggcagcagtaaccagggtaagtaagcctcttttcatggaagtgatcctgctgaagagtacaataaatagcagttaa

SEQ ID NO: 223961 - DNA, 1329 bp, Klebsiella pneumoniae
atgttcgcctttttaaaagccccgccggacgctgcgccgattagcgataaacgcgaacttgatgcgcgttatcgctactggcgtcgccatatcctgttgaccatctggctgggctacgcgctgttctatttcacccgcaaaagctttaacgccgcggtcccggaaattctcgccagcaacgtcctgacccgcagcgatattggcctgctggccacgctgttctatatcacctacgggctgtcgaaatttttctccggtatcgtcagcgaccgctccgacgcccgctattttatggggctggggctgattgccaccggggtggtgaatattctgttcggtttttcttcctcactatgggctttcgcgctgctgtgggcgctgaatgccttcttccagggctggggctcgccggtctgcgcccgactgctgacggcctggtattcgcggaccgagcgcggcggctggtgggcgctatggaatacggcgcataacgtcggcggcgcgctgatcccgatggtggtgggagcggcggcgctgcactacggctggcgtgccgggatgaccatcgccggctgtctggcgatcctcgccggactgtatctgtgctggcggctgcgcgatcgcccgcaggcggtggggttacccgccgtgggcgactggcgtcacgatgcgctggaaatcgcccagcagcaggaaggcgctgggatgtctcgtaaagcgatcctgacccgctacgtgctggccaatccctacatctggctgctgtcgctgtgctatgtgctggtgtacgtggtgcgggcggcgattaacgactggggcaatctgtatatgtcggagacgctaggcgtcgatctggtgaccgctaactcggcggtgaccatgtttgagctgggcggttttatcggcgcgctggtggcggggtggggctcggataagctgtttaacggcaaccgtgggccgatgaacctgattttcgccgccggaattttgctgtcggttggcggcctgtggctgatgccgttcgccagctatgtcatgcaggcggcctgcttcttcactaccggtttcttcgttttcggcccgcagatgctgatcggcatggcggcggcggaatgttcgcataaagaagccgccggggcggcaaccgggtttgtcggcctgttcgcttatcttggcgcctcgctttccggctggccgctggcgcaggtgatggatatctggcactggaccggattcttcgtggtgattgcgattgccgccggcatttccgcgctgctgctgctgccgtttttaaacgcgcaggcgccgcgtaccgccagcgaagcgtga

SEQ ID NO: 223962 - DNA, 1392 bp, Klebsiella pneumoniae
atgctggcctttctgaatcaggtgcgcaagccgaccctggatctgccgctcgatgtgcggcgcaaaatgtggttcaaacctttcatgcagtcctatctggtggtcttcatcggctacctgaccatgtacctgatccgcaagaactttaacatcgcgcagaacgacatgatctccacctacgggctgagcatgacccagctggggatgattggcctgggcttctccatcacctacggcgtgggcaagacgctggtctcttattatgccgacggtaaaaataccaagcagttcctgccgtttatgctgatcctctccgccatctgtatgctgggctttagcgccagcatgggggcgggttctaccagcctgttcctgatgatcgccttctatgcgctgagcggtttcttccagagcaccggcggctcgtgcagctattccaccatcaccaagtggacgcccagacgcaaacgcggcactttcctcggcttctggaatatctcccacaacctcggcggcgcgggcgcggcgggcgtggcgctgtttggcgccaactatctgttcgacggccatgtgatcggcatgtttatcttcccgtcgattattgcgctgatcgttggctttatcggcctgcgctacggtagcgactctccggaatcctacggcctcggcacggcggaagagctgtttggcgaagcgatcagcgaagaggacaaagagaccgaagaaaatgcgatgaccaagtggcagatctttgttgagtacgtgctgaaaaacaaagtgatctggctgctgtgcttctccaacatcttcctctacgtggtgcgtatcggtatcgatcagtggtccaccgtgtacgccttccaggagctgaagctgtcgaaagaggtggcgattcagggctttaccctgtttgaggtcggcgcgctggtcggcacgctgctgtggggctggctgtcggatctggccaacggccgccgcgcgctggtggcctgcatcgcgctggcgctgattatcgccaccctcggggtttaccaacacgccagcaaccagtacgtctatctggcctcgttgtttgcgctgggcttcctggtgtttggtccgcagctgttgatcggcgtcgccgccgtcggtttcgtaccgaaaaaagcgatcggcgccgccgatgggatcaagggcaccttcgcctatctgatcggcgatagcttcgccaaactgggtctcgggatgatcgccgacggcaccccggtcttcggcctgaccggctgggccggcacctttgcggcgctggacgccgccgccgtcggctgtatctgcctgatggccatcgtggctatctttgaagagcgtaaaattcgccgcgagaaaaagaaccgtattttgcagaccgcctga

SEQ ID NO: 223963 - DNA, 1527 bp, Klebsiella pneumoniae
atgagaattagtgatgttaattttgggagtatcgatgctaaacatgaagtcgatgggaggacgccagaagaaattagatattttgaggatagttatgttttgcctccaaatataaatttagatgattatttgagtggtaagaaatattatatatcaggccttaagggtacaggaaagacagctttgttaagatttattcagataaaagctgataaaaaaaatattaaaacaagttttattttatttaaatctgattttgattcgtatgaaagggagtctttgcataactcaataatttcaaccactcctcagccagatgtgactagtagccaatatgattatgaacaagcgtggagaatgtacatatataaaacgatagtgtctcttactctctcagataaaattgatgcatttcaaaaaaataaaatatggagtgagtttaaagatttaattcttgctatatctcctggtaatattaattcatctatatcattacctaaagttaaagcaggtaaggtagttctctcaaaagatccaaaaatcgaatttgattttgaaatgattgataagaaaaaggttgtcaacttttctgagtattgtaaggtatgtgatgaaaaatataaggaattaattactacatctactagaaacattatatttgtagatgagcttgaaattagggttttagatgatgcatctacaagcagggatattcatttggttagagaccttataactagtgtagacagattaaaccaaataagtagaaagcaatcttttaatataaactttatattggcagttagatctgaggttatgcagtccgctagaagtattggcaaggaaattaataagccactgtttgattttggagatactttagcatggagtcgttattcaaaaaataaaagcaatcaccctttaattaaaattattgaatcaagaataatagctactgaaaagattaatggaatctctgagcatggagatatatggagtaaatattttaaaggtaacttccatggtaaagattttagagagttcgctttagatcaaacttggtatcgtcctagagatcttgtaagattaatggaagttgcattaaaatcttttaaaaatgtagatgctttactgcagcgccattttgatgagtcaaaaaaattatatgcttcagagagttgggttgaaattggtgaggagttatctgcttcgatgacagcagtggaaatagagggtttgtcgcgagtgttaggtaaatttagaagcccatttacaatacatgaattcaaaacccaaatgacggatcttgctggaatttattccgaagttgataagctggatcaaaaccataaggctggtgatcttttaaaaaaattatatactgtgggtgttgtgggtaattatatcaccggtaaaagaggaaacaagattcctcagtatgcagcaagggataatcctatggtgcatctcgaggagcaatttattgtgcatcctgcggtgaaaccatttttcagtactaatctttaa

SEQ ID NO: 223964 - DNA, 3852 bp, Klebsiella pneumoniae
atgagcaagttaccaaaagaaagttcaagccaggaaattggtcgactcgctgggcgcgcaataatgagcaagcttccagtatcatggattgaaacgcctcagtcgggtgatagtgactttggaattgattacctcattcaattaaaaaactctcaaggcaatgtctgttattccttttatcttcaattaaaaggcactacagctccaaattacataacaaataatgaattcgtaagttttagctttaaaactagcactttggcgtattattacactcaagaacctttagttatggttgcccttgtggatttaagcatttattcggatgaactttccaaatgcccaatttatttcttgtggctagacgatgactggtttgatattaataaagaaaaaattgaagggcaagattatctgactttgaatataccaacaaatcaagaaattaataataaattggatgtttttagtttttatgaaaaacggataatggataaactggctgttcaagggttaaagaaagcaataaaaccacattctgaagatataagtcgtagcatagtaaagttttcagaatatattgaagacaaaccagttcttataaaagctgtcgaagaaagcggtgatgagccttggatctcaaatccaagcggggaagcggtaacacttctaaaagaatgttccgatgcactgaacgaaaatctcataaaaaaagcacaagaaatactatcgcagcttgatgactggcctaatcagctgagtaaccatgagagtgcagagttaatattacagaagtcaattctatgtgagttactgggagaagtatctgaatcattagacataatcagaaatgcgaagaactatagtgataaacctcggtataaactagccttttacgagtcaaaaataaaaaatggtcaaatgttaaaccaagaagaaattgatgacattgagagggaaatatcaaccggtgattttagagcaacatttttaaaagcaaagtgcctagcaatctctggccaactgaaagaagccatttcgacaatagatgaaagacacagtgaaagagtaacagcaaagttgttattactaacattgtctgaatgcactgaagaattagacgaagaaatagaaagaattgatctttcaatgcttaaatctgatagagaaaagtatgtttatcattctatatcagcaagaaggttcttttttaaagcgcatggcgatgttttcaattatgatcaaaccctaccatttacgggaaagtcaaaccttaattttgatcatatgaaaacttcatatgatcactgtgaaaaagcatggcatttcgcaaaaaaattaggttacccatcagactttgtaataatcattgacatatcaccacttttatatttttacttctataacatagaggtattattcgaacgctttgatgaaatccttaaagaaaggcctaatcacagtgaattatgtgtgttatattcacgtctcttatataattgcaatgaatataaaaaagtggtttcattactgacacgggtgaaatctgacttaagtttagataataaatccattttatttgcatctaacttctaccttgaggaatatgatactgcacttgatattttcttgagttttgaacatgagttactagaaaaaagtcctgaaaacactccttttgtactttgtttagccattgatattgcaatcgccaaatttgaggaccttttagccaaaagacttagagttattcttcttggttatgaaaatggagaggcttttttagctgttaatacatgtgtaagaaaaatcaaagaagaaccaagcacgcagtccgaatgtgttgaaaacctttatcagaagtatattgaattagataagcctatagtcatagctgagcatttattgaggttttttaatgttcacaatgaaaaagctgaatataaaataattgaggttgctgaagcaatattattaactaaagagcttgatgaaccctgctcattaaaattggctgaggcatatcttaaggctggagatgcaaataaagtatttgcaactgtggataagaatcttgaaaaagttaatatagaccctcattggcatgtactaaagacttatgctttggaactatctggtagagttggagaggctgtagatgaaattgaacaagctctgaaaagctctaactactcaacagagtacatgaaaatatatgttagcaaatgtttaagttttggtatgtttaaacaggttgaaaatgttttacaacgacttttatctattgaaagttctcgaaaaaataaattaatatatctatctaagttaataactgtatacgcctcaaaaccggaatatagtgaaaaattgattagtagcataaaaagattcggtgaattagttgacaggaatgactgtgatgaagaaggaaagtatttagcatttgtgttatcttccccgattaatatgagcaatgaagcccggtcagaatataacatcaggatttcagactattttaaaaaattccctgagtctaacgtgcttcgaaaagcaaatattgacattaataatggtcccgaggcattactcaattcaattcgagaagttactggtgtaacggatgagcaaattgcactatgggagaaacacaggcgttctatcaggagaggggccttaccaattccatttgccattcttggtctatttctaaacaatacaaaagatgtttacacaagttggaaccttgcaaaaaatacgtcagatgaatttttagagttcaaaataagtcaagcaccacaatcaccccaaaaaatattcaacaattatttcgaacaagaaacaaactttcttattgaagaaacatcattaatcttgatgcaagaaattggtattttagatattttcttggagagtattaaaaaattcaccatccttaattcttgctttgaaagaatgaacgcatcaatattgtttaatttacctatgagcgtagaccctctcccacaaaacattttaaatacaatcactaaacatagagcaaaactaagagttgaacagggttgcaaagaaaatatacttgagtcatatcgtaaattaacatctagggatggggagggttatgtatttttaacggacgatgctaatatgctgttgctctgtggtagtaatgttgaattcctatctcatggaaacatatataatattctgttaattttgaacagcaaaggttacattaaagaacataagctatatgaactgattgcgaaggtatcaacttatggcttcaaatcaattaatatggaaataggtgtaatggctcgtgttttttgtcacttcacaaatgaagatgaggattatacaaaaacagcatttaaaagtcttttcgataaggttttcaattcacgacgaaaatttgatgaggtagttggcatattatataatgtattaagacgatccattgatgaggggggaatgaaagtcagcagcaatattatattgccattactcacaaatttcttattgagatacccgcatgataacaaaatcgacttcatcctaaattggtttttgtatcagtgcacaaatggaaaagacggttacatttctgatttattgcccatgagtgtaactcatgctactttatggaatgtttgttacgagatgtgttgtatctcaatggagagagaaatagcccatcgcgaactgttctttaaaatatctaatttcattctcggacagaaccctgactcccgtgaaaaatcatataatagtgtcattaagtgttttattcccggaactacaaattacaatctattttcaaggacttacaaagaattgtcattaattagataa

SEQ ID NO: 223965 - DNA, 627 bp, Klebsiella pneumoniae
atgagcactgtcacaataagcgacaccccgtttgtcggcaacgatcgcctgctggtggggattgtgttaagcgttttaaccttctggctgttcgcccagtcggtgattaacgtggtgccggcgatgaaaagcagccttgatatctctcttgaaaccttaactctggccgtcagtctcagcgcgctgttcagcggctgcttcgtggtcgccagcggcggcctggcggacaagtttggccggatgcggatgaccaccctcgggctggggctgagtatcgtcggcagcgccatgctggtggtcgctcagggaccggggctgttcctcgccggccgggtgctgcaggggctgtcggcagcctgcattatgccggcgacgctggcgctgattaagacctggtatgaggggcgtgcgcggcagcgggcggtcagcttctgggtcatcggctcgtggggcggcagcggtctctgttccttcgtcggcggggctatcgccaccggtctgggctggcgctggatcttcgtcttctcgatcgccgttgccctgctggcgctgtttttctgcgcggcacgccggagagccgcagcgccagcgccagccagcataagctggacgtcggcggtctgctga

SEQ ID NO: 223966 - DNA, 906 bp, Klebsiella pneumoniae
atgcgtatatttcttaccggcgcgagcggatttatcggctcacgtattcttccggcgctgcaggcgtcgggccatcaggttatcggcctcgcgcgcagcgaaagcaccgcacaggccctgaaggcggccggcgccgaggtgcatcgcggcacgctggatgccccggagtcgctgctggctggcgtcgggaatgccgacgcggtgatccataccgccttcgaccacgacttcagccgctttgccgctaactgcgagaaagaccgccaggcgatcctggccctgggccaggcgctgcgaggcagcacgcggccgctggtgatcacctccggcacgctgatgggcgacgacgggagcggcgccccggcccgggagtcgttcttcaactcagcgcactccagcccgcgcaccgcctcagagctcgccggccagcagttgctggaggcgggagtggatgtcagggtggtccgcttaccgcaggtgcatgacaccgtgcgtcagggactgctgacctgctacatcgaacgcgcggtcgccaacggggcggtagccctgcgcggcgagggaagcaaccgctggtcagccgcccatgtcgatgacgtcgcacgtctgtatgtcagcgcgctgcttcagggcgcggccggcgagcgctatcatgcggtggccgaagaggggatcgcgttacgcgatattgcagcggtaattgcccacggattaaacctgccgctgacccacctggatgactcgcaggtcgacgcctggttcggctggtttgcgccgtttaccgcccttgacctgcgcgccagctcggcatggacccgcgagcgcttgcagtggcagccggttggccccgggctgctggaggacctgcagaacatggactatcataaagtgacactgtcacaataa

SEQ ID NO: 223967 - DNA, 1800 bp, Klebsiella pneumoniae
atgatggacatcaccttttctcgcatccgcaacgtcgttgacttcaaaatcgatcatgaatcattacgtaaagctaaagacagcattaaagggattaaagactttgcagagaatcagaaaatagctattaagccatttgtagaccagcgagcacttaataagagtatgaagcaagctattaaacaggctaaagctaataatgttattatgcagaatgcacagaataaagctaataacagaggctctaactcttctaattctgctaataacactcaggctaataatgctgctaaacaacaagcaagagcacaggctgctgctaataaaagacaagaccaggctgatttaaaaatgagagctacacgcttacagctgggtgggattgttgggagaacagaagaggaagaggcaaaagtattacgagaggctcaggctattacagaccagtataaagccgggacaatcagcatggcccgccagaaccagcttatcaaagaacagattaccctgttacgtagagcagccagaacaagacaggctggagctaatgcacagactacaggtggatttggtaaacgccttggaagcctcgccaatggcgctacaggcggattagctaccgggggcgtgttaggtatggctggaggtatgttagggcctctcgctggcgctgctgtcgttgcagggggcttaactggagtcgctaacagtgctaaagaaactcgtatggttgtgcagggtgctaaggctgtaggtgtcgatccgaacctccttcttgctatgtctcaatggggacagagtaatggtgtagatagcgctagccctgataagattcaggataacttaaaagatatccgggaacgtttaggagacactgctgctaactccacatttgatactaaatcagggaaatggaaaggtggtgatcagggtgtaaatagcataatgaatgctactggaatgagcctcaacgaggtgaaacaatatcaggatagtcctgctgatttcctcaatgtcgctattaagaagatgcagaccaggggaatgagcgatgctgaaatcggacaccagattgaggacttaggggatgaccttctctattaccttccattatttaaagataatgctaaagctctgtcagaccagtttgcacaaatgaaacaggatggctctctgttaacagaagagcagaaaaactctgctgttgtattaggagacgcattaagtagagcaagcggctcattagatggtgcatggcgagaggctcttgtcggatttgtggatgctatgggtggccctgatggaatgtctaagactattgagggactcacaccattatttaaaggcttaggcgctgtattagggcttctggtgaatattgtctcttctgtaactcaggctatgacagcattagtaacatgggtagctgatttattacatattcctgaactctctgctaatgtgaataagcaaactcaactggcagactcacagcctactccctcatattggggaattaacagagatagtgataataatagtgggtataagcctaatgttcctgtagcaaatgaccttgtatcaggtgccaaagccagtatcgttaatcagcctgtccaggtggcattagctccagtaattaatgttgctcctgctacagttcagcaaactatcgaactcaagcctgatacatccagcattggcccattcattgatttccaggtgacaaataagcttcaggctcaagctaatcaactagcaattgacattcaaggtgctacgagtgctggcggtaactaa

SEQ ID NO: 223968 - DNA, 189 bp, Klebsiella pneumoniae
atgagatttataatgaaagcggctaatttagcattgaaaggtgaagatgcagagaagcttattaatgtgtcagagttatgcagacaattcaacttaaacgtgaacacattcaacacaatgagatttagatatggctggagcattgagcaaactctgtgcgtaatgttagcagataataaagaggaataa

SEQ ID NO: 223969 - DNA, 1041 bp, Klebsiella pneumoniae
atgtctgaactaatgaatctatttactggacagaatgccagttttgcatctccttttgagttcgctaataaacaaaataaaatcatcacttctctcggtttattccgtgctgagaaccacgatgtaaataaaattgcccttgaccgtatcgtagatgagaagatgctaaaaggtctggagagagcaatgcatgttcagagtgactggaacagtgcaagccttccagaatttggaacatttctctaccagatgaaatattcaaactccctgaactctgtaacgagtcgtgaagtagaagagtatcgccgccgtggggctattgtagaagactcaattgctgctgttctctctgatttctctgatgcacagtatgaccagatggctaatactgtagaagctgatttgattagcgctctgctggccctgaaagttgaaagtcagtatgcaggacaaggtgaccttaatttcctggatatggctgaaactactaagacaggctttgctcttgatgtaagctcttctgctaacgtattccagcaattgtctgcaatcaaccgtgtagtgaatgtgaagctgggaaccagtcttgcacagcaacgcacaggaacgattatccttgctgctggcactgccgctgatgctctgcattaccacaccagtattaaagatttcctgctctacactgtgcctatgggaagcgatgcaaacctgtttactcaggttcagggtgctaatcctgcatatgaaagctggatgctgaaagggaacattgttattgatgtaactggatacactcagatcactgatgtaatcggtgaaaacgggtttgttgttattcctaaaatgtcagatgcatctaatgcgtatgttctgcatcaagggattgggacacgtcatgccacgctgggtaaagaaagtggattgtatcaccagtatattaccacagacccacagtggaactatccaagtattgcaactgaaacggcctatctgccgattgtaaatattccagatgcaattgtatttggtggagtggcttaa

SEQ ID NO: 223970 - DNA, 243 bp, Klebsiella pneumoniae
atgaaaacaatcaataacaaatctatgtccctttctgattttactaccacttgtgaaaaggtggcagagattatgaaatgtgacgtaaatactgttatgcgggaagccgctaaacgacttcttgatgaagagcaaacccttgttaaagggcttaactactctgaattagaaactctctctcaagaagaaaagaccaacgctttcattgaaaaaatgaagaaacataagaataggaataaataa

SEQ ID NO: 223971 - DNA, 378 bp, Klebsiella pneumoniae
atgtctaaagaaagaaacattttaaatgtcaacaaattacaacttagagcagtaggcagaaataaaagaaaatctaaagagaagagcatccctaaatgggatgccattccagaatatgaagactccccagcactaactaaagaagaacaagaaatcattgatagcatttgtgatagcaacactgtttattttaatcctcgtaaacgaataaccactaaatttaacgatgaattagaacggtggcaagcgttaggctttaagagcgaggatgagcatattgcatggaaaagactgaataacagggacgatacttccagcacttatacagaccttgcagacactattctaaaaatcacacagggacagaaaattgactga

SEQ ID NO: 223972 - DNA, 639 bp, Klebsiella pneumoniae
atgactacagttaacgacacatccagcactaaatcaactagtaaaaataaatcagacaatggattctgtgtaatagcaagtatgagcaatgaatcctctaccagttacattcaggaatacagtgcactatcgtttgattcagttcctcaaattggtgtaaagcgtaaagcagacgttacgagctacgctgttgaaaagtcctctgatgtatcagaccatattcaaataaaaaacgacacaatcactctctcaggctggatcacagagagtcctatcgaactacgaggcgatattatctcaagcgctggggccaacggcacaagggtgaagcaggcaatcgactggctcaacacgacatttgaagcccgccaaacaatcagtttaataacccgtgatactgtattagagaatgttgttttaacaggagtatcttacgattacgatgatgcactagatgcaatgaagtttgatttatcatttgaaagaatccgattagtttcttctaaagaagttgatgtcatcgccactaaaactaaatctattacaaataaaggcaagactgtaaagacaaaagctaatacaacaaccgttaaaaaagacagcacaattactaccctgtcctctcaatacaattcctaa

SEQ ID NO: 223973 - DNA, 153 bp, Klebsiella pneumoniae
atgcaggaatacgaatatacagaaaatgaaaaggcactgtttagaagcatagctgaaggtttagatcttacatatgaagaacttgaatccaaaattatcaaggagtatctggaaaatctcctcgatagaatcaaatataacagaggggaataa

SEQ ID NO: 223974 - DNA, 366 bp, Klebsiella pneumoniae
atggcacgaaataaatcaagggatttagaaatttacaactatataaaagaaaataaacattccctctattctataaaatccctcgcagtaacacttgatatcacagaagaagatgtaaaaaagaacctctcctctctgcgttttggtgatcagattaattattttatgttcggtaatgacacattccgtgttacagacattgctaattcatttgaagaggggcagacggataaaatagataaacactggaaacaacacactaagaagctcgttaagatttacagagagcagggatacactcctgaacaatgttcagaaattagtgatgtagacatagaaacagtaaacaaatattggagtaaataa

SEQ ID NO: 223975 - DNA, 744 bp, Klebsiella pneumoniae
atgaccaataataatcaattcattatggttcctatggaacttttaaaaattaagaaggtaaatggcatcacatttaatgatggattaaaaacgctttactgttacttaaaggggtgggatggaaatgctttcccttcttactctaaaatggctgaggttttcggtgtaacctcaagggctatggaagaaagaataaagattctggttaaaatgaatctaattaacaaagtgaacagggtttacacttcaaactattacgaagtattagacttccctcatatagacccacctgaatcaatccatgcaagccctgtagaagacgttaagccgatttctaatgcaataccacaggttgttatagaagagtcagcacagagcgatacagaagctctcagcgacgatgtagaagaatgcccattctttaccacttcagaggaagcctttaataatgaatcagaaccttctcaggagtcatctgattataactacatggaagatgaagaagagattaataccatctcaataaaagataaagactatctgattgcaagggctaaccaattctatgctaaccatgcagtaggtgactcagaaaacactttatcaagtctactgattagtgagatgaatatagaaggcgttcatcttgattttgtcatagcacatttcagacaggaaaaaagagcattcacagaaagatttaaacaggagaataaatggcacgaaataaatcaagggatttag

SEQ ID NO: 223976 - DNA, 189 bp, Klebsiella pneumoniae
atgagtaatttcaaatactacgatgttcaggcaattctcgatgctctactgtcaggtgaacttaaaagaattaatgctaaacgtagccaacacacagctaagagcatgggtcacttagatagagcagagcgttatcgtaaagctattgcactgtttgaccagattgagagcattaagaaaatcaaataa

SEQ ID NO: 223977 - DNA, 2487 bp, Klebsiella pneumoniae
atggatacctcttcaataattaccggcaccacccttaaccgttaccagctgggtattccttcatgtaccgcatcgctggatgtggaagaattcagtggggcagaaaaactgagtgaactttattattacactattacgtttaccagcgcagagaaaaatattgatgccgcacagctcctgagcaaacccgccatgctgacgatgggcggcggcgcactgcagcagctggcggactgcaaacgcgtccatggtgtgattaccaccttccggcgcgtcaatcgttctgaagatcagtcgacctatcagataaccctccagccgtttctctccctgctagataaacagtttcgcagccatcgttttttcgtcaacaaatcggtaccggaggtggtggagcaggtattgcaggaacatcacctgcatgactgggagtatgagtttaatctcaagcaacactatccacggcgcgagcaaattaatcagtatcaggagagcgacctggcgtttatccagcgcctgctggcagaggtggggatattttatttcttcaccctgcaggaagaggcccagagcgaagtggtccatttcgccgacgcgcagcgggcgctgatgttcgataaaacacttcctgtaaacagcccgtccgggatgagcgacagcggtacggaatcgatatggggtctgagcatcacccacaatgtcgtagaggcgaacgtcactacccgggattataacccccgcgatgcgcagagcgttctccagtcggcaacagcggatatgacccggggaaatggtgaaggcctcacttacggtgaggtataccactataagcttcgccaccgggagcgtggcgataaaatcgacccgcagacggagaccgccaacttttatgcccgcctcgaccatgagcgttttctggctcaccagacgcttattaccgcgagcagtactgcagcctggctggcgccggcccaggtgctgaacgttaccgacagtctgccgtcgaccctgtctgcgcccgtacaggatccgctgttaatcaccggcaccggttttaccgccagccgccgggaggcgctgcgggtgtccctgcttgcggtgccctacagcgaaacattgtgctggcgtccgccgctgctgccgcgcccgaaggtgactggcaccatgacggcgcgggtgaccagcgcgaaggcgaatgatatctatgcctggcaagatgcgtccggcctgtaccgggtgaaatttgacgctgacagagacgagaaagggcagggtcaggaaagcatgccggtgcgtctcgccaaaccctacggcggcgacgtgtacggctttcacttcccgctgatccagggcacggaggtggcgattgctttccacgaaggcgatcccgaccggccgtatattgcgcatgcgctgcatgactcgcggcatgtcgatcctgtgacggagaaaaacagcacccgcaatgtgattcgtactccggccaataataagctgcgaatggaggacaagcgcggcgaggagcatatcaagctcagcaccgagtacggcggcaagacgcagctgaacctggggcataacgtgaatgcgcagagggagttgcggggcgagggtgcggaactgcgtacggataaatgggtgagcatccggggcggtgcgggggtgtttatcagtgcggataaacagccttcggcaggcgacaggatgctggcaatggaggaggcgattgcgcagcttgaaaatgccctgggtattgcgaaaagcctggcgtcggcagcggaatcggctcaggccctgccatcggataccggcaaccagcagacgctgaacgatgcgctgaaagagctggcgcagccggggatagtgctgaatgcgccgcagggcgtgagcatcagcagtccgcaggcggtacggttgtcttcgggtagcgccagcgtggggattgtgtcacagcagaatacggacatcagtgcgctgaaacgttttacggtggcggcgggagaagccgtcagcctgctggcgcgaaaggcggggatgaagctgtttgcggcgaagggaaagattgaaatccaggcgcaggatgatgcgctggaggcgacggcgaaaaaggatatcaccgtgaccagcgtggaagggcgagtggaaatcacggcggcggaggaactggtggtgaactgtgcgggagcgtatatcaggctaagtggtggcaatatcgagctgggctgccctgggaatattctgctgaaatcggccaatgtgcagaaaatgggtaaggcggattttcgggtgcctccgctggaattgcctaaagggttcgaagagcgttttactgtcaaagatcagaagaccggtgccattgtgccatttgcccgttaccgcatcaccactgaaaaaggcccggtattcgaaggccgggcagatgctgaggggaaaacggccagcgtttataccgcattgcctgagtcaataaaaatagagctactgtga

SEQ ID NO: 223978 - DNA, 897 bp, Klebsiella pneumoniae
atgaaactcccgccgctgaatgcgttgcgctgctttgaggcggcggcgcggctgctcagcctgaagctggccgccagtgagctttgcgtcacgcccagcgccgtcagccagcagattgcccgccttgaggagacgctgaatgtcccgctatttatccgtactccgcgacggttacagttaacggcggtgggagagatctacctgcgggccgttcagccggcgtttcatcagatagccgccgccacccagcgtctgcaggtgcccccgggaccaaaaaaggtggctatcagctgtaccagcggcttcgccattcagtggctgctgccgcggctggctgattttgaacgacgctatccgcagatagagatccagatcggcaccaccaaccggcgagtggatttgctgagtgaagggatcgattttgccgtgcgtcatggtgtcggcggctggccggaactgcaggcttaccgcctgctggatgacgacctgatgccggtctgtagcccgcaactgattgctccgcgccggacgctcaccgatgcgagcgatctcctgcagtatccgctgctgcacgatgaacatcgtgaagactgggcgctgtggtgtgaggccgtggggctggcgccgcacttcgcgcggcgtgggccggtgttcactgattccaacggcgtgacggaggcggcgttcgccggtatggggatagcattgctgcgacgctcattcatagcgcctgcgctgacgcaggggcggctggttaatcctctggcgcagcccatcgcctgtccgctggcctatcatctggtttaccacgagaccgcgctgctggcgcctgccaaccgctgttttcgcgactggctgcttggccagcgcccggccgttgctgaggagcgcgcgtag

SEQ ID NO: 223979 - DNA, 1659 bp, Klebsiella pneumoniae
atgggtaacagagtggacaacaaagccccaaaattcactaccaaacgcggcaacactttctacatcaattttcgtctccctgatgggacattctttcgtcgcagtctgggcactgattccctaaaagctgttcaagtgacgatgagtcgcctaagcccatacatcccccttgttcaaaatggttcgctatccgtcgagcaattcaaaatgcatattgacggtttcagagaagccactcagcgcgattttgatacctatttgttggattggttgaggctaggcgttgatgaggttaagcggatgccagaactcggacgattgaacaagtcaattttccctgatacccctatttcagcatcaaagagtgtggaagaggctaaggggcaatctgaggcccttcttaaccgtgtctatagcggggatgactctaccgctcggatgttacttgccactctgcaccagaagaaagtttctttcggtcaaaatgacgtagaacaagcttatgaggtggcggggcagattgatatgcatcaggccatgctacaccaggcttatgaggcattctattctggcgatattgtccgttatcgtgctcttgttgaatccatgcaatcccaactgactgaaacagagacacgtaaaaaaccagcagctagacaggctgtagctactgttgatgctccagacgatgacaatacgccgttactctcagatgcgtggaaactgtttgtagcggagaagggcaaaaactgggctatcaccatagctcgggagaataatcgcttctacgaggtgctgattcacgttttaggggatgttcctgtagggagtattaccaaacagcacatacgccaaacactggcagtaatcgagaacatgccacgccgaaatgtgaaaccctactcagagatgacgttagaggagtgcatagattttgatgttcctgaagacgatttgatcagtagtgccaacgtcaaaaaacacctcaagatttattcctcgtttttcaaagttttccttaaagatgaaaaggatatcttaggaatttctcctaccgaggggatcaagtatgaagtaatagagaacaaaggcgggcattactcaaaaccagaaatgaaacgtttgatagcacggttatcagcttttaccgattggcgtaaagattacttcctgaccttgatctacacaggtgcacgccggggagaaatagcggctatccgtaaggaacatatacgcaaggatgaggagacggggcgttactatatctttatcgagggaggtaaaactgagcatgcgcagcggcagattccccttagtaaagagatagaaacgctgctgttagcgcgtatcaagccccttaagtcagatgatcttgtgtttggagacttgccaacttacgagcatattgctctcgtgtggcgtagtttaatggatgattgcaatgttccgaaatacaatgaatttgggcaaaagagggtgatccatgcatgccgccataccttcatatctgaagctatagcgaaaacgggtaacgctgcgctagttcaattcgttgtagggcatagtagaacacaatcactaggcataacggcaagatacactcataggccagcgcttagccaactgctaactgtggtagattgtgttagctggggatag

SEQ ID NO: 223980 - DNA, 291 bp, Klebsiella pneumoniae
atgacagtaagtaaagaattaaaggttcgctacactcgaggcggggaacagtttgaaaagtcatttacatgggatggctgtgatcctgttggaagtgtcctagcgtgtctggttgaagaacatgatttagtgatgttgatccctgctcaggaaagggctgaattcggtgggattagaaatcttcgtaaaccattaaatcttctcgaacatggtattgatgatgtgttcttctttgacgatgaaataaacgactggcaagaaatcccccataaatggcttacggatgcataa

SEQ ID NO: 223981 - DNA, 702 bp, Klebsiella pneumoniae
atgactatatctgatggggtaaaggttcttattatcacggtctgtgggtatacattcacttatgcttattatttagggcgttatgccgcgaaagaaatacctatcgaatttattgatgtttcattattaagcatgatgaaaattggttttggaacatgtgtaatattatcttttgtattgtactggcttgatttttttaaagaagaaatagaaaatcctgttggtgtgagtgcaaatacaaaaggatttctaatccgacattcaatagggattattacaatgctattgtttgttgttaatatgacattgtcaggaaagtggcttccgattattcttccatttattgtctggtgtgtttatttaaagcgggatgttactatttcgttcaaaaattcagaggttaaacgttttaggtttaatgtttcaatcaatcctttgaaaaaattgggtagcactatagttgcagagaaacttaatgtacatttatattacgtatactttagttggtatttagctctgttatttctattgtttaatgttggaggtgttttttcacatatgacaaaagaaactcttgtttgtaataatgatatttatgtcgtcagtgtaggcgattctgacgtgcttgtaacaagagattataaagtttttgaatatatggataagaaaggttgtaaattttcgattcccaaaataaaatag

SEQ ID NO: 223982 - DNA, 243 bp, Klebsiella pneumoniae
atgaaaagagacggtaaaggcattctgttaaaattgttgatacccgcattcattgtgctagccctgctctattgtatcagtgcaagagccggacaaatcaccctaaccaacccacaggaggaacagacggagaacggaaaaacgctatgcatctatgagaacagcaattacacattcacctatctaactaaacgaaaatgcccctatgccaaaacgttcgatacagacgagaatgagaaatag

SEQ ID NO: 223983 - DNA, 1140 bp, Klebsiella pneumoniae
atggcagccagaccacgtgatcacaaagttaatattccaaatctttattgcaaattggataaacgtaacagcaaaacttactggcaataccggcaccccttaaccggtcagtttatcgggtttggcactgatcaggatgcggccagtcaggccgcaactgaacttaatcgcctgctggcacaacaggaaacggctcagtcgtttgccctcatagatatggtgaatcataaaaaggttaattcaaaaaaatccatacggatgcgggtatggatagaccgttatctaaagattcaagaggagcgactcagtgataacgaaataaaacttaatacgctcaaatcgagaaagacatgcgtcggtgttcttgcacaacggatgcctgatgttgggatacaggaagtaaccacgaaaatgcttgcagccattaccgacgaatataaagccaaaggtaaagcacgaatggcacaaacgcttcgtagcgtctggatcgatttgttcagggaagcacaacatgcgggcgaagttgagccaggatacaacccggcactagctaccagaaaagtcgttgctcgagtaaaccgctctcgactgaattttgaaatgtggcaagcgatctttgaagcggccagcgatatggccccttacgttcaaaactccatgctgttggcgatagtcaccggacaaaggcgcggtgatctcgccaaaatgaagttctcagatgtttgggatggatacctgcacgttaaacagctaaagacaggtgtgaaacttgctattccactcagtttgcgcagtgaggtgctggacattagcctggcacaagtgatcaagcgctgtagggatcgggttgttagcccgtggcttcttcaccacgtaatgtccagcgggaaagtaaaagccggcgatcaggttggcgagaacagccttagcgtttccttcaaactcgcagtggatagcactaacctttccattgaaagagggaaaacaatgcctactttccatgagcagcgctcactgtccgaacgtctgtatgaggcacagggaatcaatacccaacagctgttaggacactcatcagaaaaaatgacagcacagtatcacaacgatcggggtctcgattgggtgaaagtaaaggtgtag

SEQ ID NO: 223984 - DNA, 240 bp, Klebsiella pneumoniae
atgcgactgattaaccgaagcaaacaatcaccgctgggccgccaggcgtgcgatgcggcactggcaaaacatgttgagctttatggcgattatggcaggcagaaaatgaagcggacctataccgtcgtggttcagggcacaaaaatcactgttgaggtcgttaataggaattgcagctacgtggccacggccatgaactgcgcccggcggctccggcatttacccggtcaggtttcctga

SEQ ID NO: 223985 - DNA, 156 bp, Klebsiella pneumoniae
atgcagaagaaatgcggttactgcagtaaagcaatcgagggaaagccagtggtaagcaccctgttgtacctccaggggaaccagctagcacggaaagaaaaagagtattgctctgaacgctgcgcctcttacgaccagatggcgcacgagagctaa

SEQ ID NO: 223986 - DNA, 429 bp, Klebsiella pneumoniae
atgaccagcaaattaaccagagagcgcctgcaggaaatcgctgaagatggattcctgaagcatggcgaaagcaaagaactggcccgtatggcgctggccgaaaaggccagcgagccggtgatattgtaccgggagcgcaatccctacaacggcttaaccacaggctggcaagagcttaccgaaaacgagttctcattcctcaaagagaatgccggggaaaatgcagagttcctcacgctctatcgccacgcgcagccagcgccggtaataccggatttcaaaaaactggctcgcgaactggttgttaatctcgtcgattgcggcggactggatgaaggggtgaaagagaagtatctggagtgggtggagaaaacctgccgcgccgccatgctcgcaaccgccccgcaggaggcatcagatttgacgtaa

SEQ ID NO: 223987 - DNA, 459 bp, Klebsiella pneumoniae
atgtcgaagtggagcattgcagccaaaccgaaagacgagcagaacaaggttaacgttgaccttgcgttctccggcgttgcatgcaaaatgcgtattagtgaactctggacgtatggaaaacaacagttggtatcgtttatgaaaaaaacatcacttctggtttgtgcttcccttatatcaaccgtggtgtttgctcttgataataaacaagaaatagcaccttcgcgtataagttgtcccacgccagtgatgccagtcaaggctcaggcaatgagaactgaagggcgtgtcgattatgcagcatgggttaatgataaaggcgaagtgtactcagtagacattaagggcgatgaggttttcttcagggaaactgaggttgctattaaaaagtgtaagtttgtgccaggccatccagggatatatcgggatacaataaaatttagtctggtaagaccttga

SEQ ID NO: 223988 - DNA, 3828 bp, Klebsiella pneumoniae
atggccgatatcgagaacattggctcctcttcgcctgcaatattactgttgaacgccaagaatcttgatgtggcagtcaatagtattacggacgctatctggaaagatcgtttcggaaaagaaagaaaaacatggcacggaattgaatctgactttgccacccagattgcatcacagcgggatcagtttgccacgcaaataactgctcagaaaaaccagtttgaaggccagatttcagaacagcatgatcaattcacggcacaaatcacggggcaaagagatgaattcaacgacatgctcgcagcctcaggctattcgtggctgaaagattatgttgacgggccagttacatttacaaatcgcagtcaggtcacagtttataatggcgtggcatatcgccttgctgcaagtgcgcctattggatttacgactacaggcactgacgcaacgagctgggaaaatgattctcagtatcttgttgctattggtgacaatgatatccgtcagcaaatccaataccagttaggacaatggcttcctgatgctgtttctctttttaatgtgaccactgattataccgcaataagggtcagagggttttatttcgcctatgatggtggtgcaggtatatggattaaaacaggtaatacagatctatcgaaggcaggaagtcatgtagttgatgaggcgaagatttataacgcaaatggtgtagagtatgcgctggatgtgagttatggcgaaattagcgtcctgagtaatggcgctaagtcgtattcatttgcaaaacttctagaccaaacaaccgacaactttgtatgtcttggtcaagtgataaatggaattgaatcacatttaactcttggaatatctactgctaatgaccgtaaaacatatgatggtggggctcgcctcgatattatagtgccaacaaacgactatagaattggtaaaaaatatgccaagctctatactggtgttgattattatttgaataaatccaggatctttattcaggctggagcttcgtataaatactcggttacaggtaaacgccttaacggtttccaacatggcgtggatgagattacagagaaatgggaggctgtaaacaaaggtatttattggggttcagttagccttcagaacgttaacatttacggtggaaccatttctggagaccatgatattcgctctttacgcgattcatgttctgctggggtagggattctggttttaaacccggaagggttttctacgcatggtaccgtagttcgtgaggattgcttgtgggccgttgttgaaacaacggcagaagttgaggcgaccgagtttaataaaaatggccacgcttttgacaataatgaaatcgattatgaatatattgttcctgcatgggttaacgcgggtataactacccgttttggcaacttgaaccgcaccacccactacaacagtaaatttatgggcggtcgccggggtacgtaccgcaatggttgtgactggtcagctctgtacaactgtgaagtaaccaaccgtctggcatggcggaatgcggccaacgtgtccggtgatatacccgaatatatcgccgtgtgtactggtactgttctgaatgtctctggtggttactgggggccggcagcagcaaaagattataacgcgcgttacgggactgtatactcaacagcgcaaaatcattcatttttagctgtttatactgaatggacctacaatttcttgactgtaagcgcatggggattcaatggcaaggcgtcgcgtctttccggccttgagcttaaacttatcagtcagtataaagataactttacagaatactcatcactgcgctttgagggtgggtgtttcccgacaacggatgacggtggtaactcgctttacccggacggcttctaccattacgatacgccgaacggtgtatcacaatttgcgtggggaaccccaatccgagatctgggagcattccgacatggcggattcgatttttactacggtacatataacgtatatgtatttagtggtactgactgggattcaatacgtaaccgcccgtatgcgaaagaaatgtttaacgcaaacggattacaaataaacgcaaaaccagtcatgttgccatggcaaaccccctcagttaagtcacatatttgcatctggtataaagaccattcagggaattttaatccacgtaatatttacgcctggattactgccgcaagccaggacggcccgaacacagatgaagcgctatataagtcctttgcagagcatatgtttgatttcggcaatgggacaaaaatggcgatgatcccgaataaaaggctgacggcatgggatggcctgtacacgtatgcgcgaaattgtggggttatggtagatgtgcccgctgatggtagcacgccgataacgcttattgcggtagaggcttatcagggtggcgttccattgtttccagctggctgcggaaactacatcccggaaacgaacggtaattccgtgttaagtccggtcaccaaccctgtggggctggacagctctctgggcggtggtctgttcttccctggtgatatcatcgggccgtggtcgcatgtgcgacgtacgcagaatggttacatcatctccccgacgctgacccctggatatacactcgatcggaaaatggtgacaggtggctgcacgcttgaagctgctttcaaagttgcattcagcgcgaccgttgaaacggtaaatagtaatgccacaacaataatcagcatacctgccgcttatttgccttacgttgctgtgggtataccgctgtatatcaccggcggctcatcaaccggcgtgaccggtcaagttcggctgattaagcgtctgctgaacagtgacggaacatcgtctaaccgttacctcgtacaaggaaacaccggggcggtgggtgacactctgaccatcgaccaggcgcaaattccgccgtacacgttctataatgaccgcaacttcaatgctgttaccgcaaactcggtgaccgtaaacggggtatcgatcgcaactgcccatcgctcaagcgtatcctctggtattggttacggtggcgcatccggagctaaagcgctggagttctacgtcaatggtggaaccgcctacacgcaaaggattgttgccacgtctacgacggtaatgagcctggaaaccggcgggaacctgtcagtaaacgggaatacctacccgaatgctgacggcacctattcgcttggcaccccatccggtcgctggtcgcaggtctttgcatcgaatagcgttatcgggacgtcagatgagacgcataaaacccgcccccgggcagacaccccggcggaaaccgacgcctattatgaaatcgggcagctacccggcgtctggcagtggctggaaaaatacatggtggaaggagatggcgcccgcctgcactcagggccgaccgtgcaggcggcgattgccgtgatggataagtacggtctggactggcgggaatattccgcattctgctatgacgagtgggacgcacaggatgcgattatcgagacctgggatgacgagtgggaggtgatacccggcaccccggctgaactggacgaggagggtaacgtagttgttgaggcggtaccggaaacgcgcaccctcatcagagcggccgggagcaacgttattcaggaggcgcgagaagccggtaacgtctacgcatttcgcaaggaggagttacttttctggatcagcagggcaaccattgcaaaacagcaggatatcgaaaaacgcttggcagcaattgaagccagcatgtcatcttaa

SEQ ID NO: 223989 - DNA, 1044 bp, Klebsiella pneumoniae
atggcaaaagaaagaatagtatggatggatatgatgaggggttctcttattcttctcgtcattattcagcattggatctcagattttaatttacatgataatttatctggctcgttaatctattatgggatatatcaagttaaaatattttttgcgccatacagaatggaacttttgtttttcctttcgggtttcattgttcacaagtcaataaataaaaatcttaaagaataccttaaaggcaaaataaaaaacttactctacccttatattttttggtctctcgcctttctagctctatacaatttttcatcattactatcaggggaatatataccgatcttacactatttacaaagaatagctataggcgcaactaatttaacttggtttctgtattttctttttgtatacttcgtaatttcaccaataataatcagaacaaaagcaaatatcgtttgcgtattcattacggctataatactttgctacttctcctcagtcattaatatttacgaccgtattggtgttgaatacttagaagagggggatattttttactattttatttttttctactcggggtgttattgtgggttaaaaaaatatgatattcagggcctatcaaaaaatccaaccatgctgaccattgctctactatgtgttatcgccactgcaattataaattttcatacgggcattcataaaacaagtttgttatatttacctcctgtaatgttaagtatccctttgctgatatttttagccacaaagatagaaaaagtaaaaataataaaaagagcactcacacatgttagtttaaactcaatcgtatactatttaatgcaccttgtattattgataatcttctcaaagattttcgaggtattacacataaatcaaaattacgcaatcccaataaaactcccacttactctattaaccatctatttatttatcaacctgaaaaggaggttgtctttcttagatatcctatttcaaccaccacgcaggaagttttctaacataaccaatgcaatatag

SEQ ID NO: 223990 - DNA, 1059 bp, Klebsiella pneumoniae
atgaagcttaaatatgtattgctttttgctgtttggtcaattagttgttatggcaataatacatcattcaaccctggggaaatgtggtttgatgatgatggaaataaaattaatgcgcatggtggtcaagttataaaagtcgatgatctatattattggataggagagtatcgagatactggtcgtaagaatacaggtaaggttaatgaatattcatctaaggatttatataattggaaaaatgagggagtaatcttggatctttcaagattgccagggaagtattctgttgaacgacctaagataatatataatagaaaatctaaaaaatttatcatgtggtttcatttagagttaaatggtaaatatagaacagctaaagcgggtgttgctatatcaaactcaataaatggcccttttaaattagttaatcagttatggccgaatgctggtgttctaccaataagtactcagtacgcagttgctgccaataatttaaaaaataatataatggatgctgactcgaaatttgaatcgaggattgcaacaggtaatttgcttagagatatgactgcatttgtcgatgatgacgataaagcgtatataatttattcttctgatggcaataagtcgatacaaattgcagagctcaatgatgattatactaattttaatggtcgttatatcaggatcctgataggagagatgaacgaggcaccaactttagtaaaacatgataatcgatattttctcattacctctggcgtaaatggttttggaccgtcttcggctcgcttatcattttcagacaacatttttggtaattggaaatcatccggttcaccagtaaaagactcttctaaaaataatataactacaacttttttcagccagggaacgtatatattaaaagttaactcacaagaggtcgataaatatatatttatggcagatcggtgggaccctgataatttaaacaatagtacatatgtttggttgccattgacatttgaaaataatttgccaacaataaaatggcatgataagtggcaatattaa

SEQ ID NO: 223991 - DNA, 879 bp, Klebsiella pneumoniae
gtgaaactgaaaatgcaggatttgaggctgtttaatctcgtgtttgagagcgatcctggctggatacttgatttctctaaccgcaccttgtctgctttttttgatgaagaactgaacattgatattgatgataaacgttatcaggaagaggggacatcaaaagccaaacgagttagatgcttgctgaaacagactgatcgtgagaccgctctgcgggttcttggcgctctctggcagtataaaacagaatccatgcctgaacaggctgaacaaagccgtaatgactatcttgcactgatttcccgcttagaaaacgctgacaccaatgaagccaaaggcgtaaagcctgtccaggcatggcatggtgttgactggccttcacttatcgctgaaatgaacgagatgaaatctctgccgccacaactacgtggttttcggtttgaaacttggcttgctgaactgttcagtatctttaagcttgctccccgttcgtctttccgaaatacaggcgaacagattgacggaagtttccgactgaatgatgaattttacctgatggaggcaaaatggcatcagaaaagaacgtcggctgccgatctccatgtatttgaaggaaagctcagtaccaaggcaacctggacacgcggcgtttttatcagttggatgggatttacgcctgaaggtctgacggcttttggtaaagggaagcgggttatctgtgtcagtggttatgatctttaccactcactgagtcatgggatccctttgcccgaccttctggacgctaaaacccggcacgccgctgaaacgggagagccctatgctgagttcgaccgactatatgcaatgaagaacaaacagttcggcacgctgaaataa

SEQ ID NO: 223992 - DNA, 606 bp, Klebsiella pneumoniae
atgtctggtagccacaatgatagtaacattagtgcacactctggaaatgcgcagaacaaagctgaagttgttaaagcatctttagacataggtagtgcgctattggtcgcaataatcgcagctttagggggaatggccggctcatatctcacgggttcaaagttagttgaaagcacaagagtcccagcactcatcaatgccagaacgatttgtactactgctgttaacgaagatgaatacaaatttcgtgaaaaaacctctgattttttggctgcggtagctgcatttgatgctgataaatctcttttatataaagctaatcataatcaactttaccaaccagcgaaatcagccataactaaagcaatgtcgataagttcttattcttctgaacgtctatcagtactggcagtaaatattgcatcatctataaaacaacttgcaatttctgatatggattatgttatttcagatagtggcgcttataaaaaactatcttcctcaatggaggaatggccagaggcatataatgaatatatgaaaaccttcgatgtcaaacgtgcttcttgcaactccgatgctataagctataaatcagaaaaataa

SEQ ID NO: 223993 - DNA, 465 bp, Klebsiella pneumoniae
atgaaagtgaggtttgcagtttttgcgctggtcttcagtgtcagtctcagtaccgtggcccgggaacgggccgatattccggcgaacactatctggtcgtttaaggaccctggtggtcgggtgttatgggatgtctgtggcggaaaacaaagctcctgcaccatcgtgttggcggcaacgaacagggtggccatcgttaatcgtaaatctactaacggctgcgccctgggggatttttacgtggtgggcaaacccgaaaaagcctggaaccagtacgacacggggacctgcagcagcaatgcttacttcagtcaggggaccatgaacaacgggcagtaccggactatcgatgtccgtctcaacggggaactggtaaaacgattcccggtggaatactggtcgctggttaaatccttttcgggtagcaaccggccaaaatggaaggacaagacgacagacagataa

SEQ ID NO: 223994 - DNA, 474 bp, Klebsiella pneumoniae
atgcgtttatctcatgccgccctggcggtcgttatgctggcctcagcctccgttgcacaggccatccccaatatgtggagcagcggcttcgctcagggggtgaccgaatacatcatcaccagtccggagaaagtggtctttaatcttaactgcactaccagccccgataagcagaatgtgctgcagcacagcgtatacctgaccctgcccgacggtaccttgctgaattctcacgatgacggaaccgacatcaccgtggtgatggataacagccagtatccgttaccgtcatccctgggctggcgaaacggtgataatgcctgggtgtcatttattgacgcactggggcaggcagcgaattttgatgtttacgtcaacgataaaaaagtcggcactttcagtccgggtctgaagaatacgcaaaaagagctgtctgacctcagtgagtgccggaccacacactacagcgattag

SEQ ID NO: 223995 - DNA, 3108 bp, Klebsiella pneumoniae
atgttctcccgtttcttcgtgcgtcgcccggtctttgcctgggtgatcgccattctgattatgctcgccggggtgctggcgatccgcacgctgccggtaggccagtacccggatgtcgccccgccggcggtgaaaatctccgccacctataccggggcgtccgccgaaaccctggagaacagcgtcacccaggtgatcgagcagcagctcaccggcctcgaccatctgctctacttcagctccaccagcagctccgacggctcggtcagcatcaccgtcacctttgagcagggaaccgacccggacaccgcccaggtgcaggtacaaaacaaagtgcagcaggcggaatcgcggctgccgagcgaagtccagcagtccggcgtaacggtggaaaaatcgcagagcagctttctgctgatccttgcggtgtatgacaaaaccaaccgcgccaccagctccgatatctccgactggctggtcagcaatatgcaggacccgctggcgcgcgtggagggcgtcggcagcctgcaggtattcggcgccgaatacgcgatgcgcgtctggatggacccgaccaaactcgcctcctactcgctgatgccttccgacgtccagtcggcgattgaggcgcagaacgtgcaggtttccgccggtaaaatcggcgcgctaccgtcgtccaatgcccagcaattaaccgccaccgtgcgcgcgcagtcccggctgcaaacccctgaccagttcaaagcgatcatcgtgaaaagccaggccgacggctcggtagtacgcctgagcgatgtcgcgcgggtggagatgggtagcgaggattacaccgccaccgccaatctgaacggccaccctgccgccgggatcgcggtgatgatggcccccggcgccaacgcgctggacaccgcgacgctggtgaaaagcaaaatcgccgaattccagcgtcagatgccgcagggttacgatattgcctatccgaaggacagcaccgagttcatcaaaatctcggtcgaggacgtgattcagaccctgttcgaagcgattatcctcgtcgtctgcgtgatgtatctgttcctgcagaacttccgcgcgacgctcattccggcggtagcggtgccggtggtgctgcttggcaccttcggcgtgctggccctgttcggctactcgattaacaccctgacgctgttcgccatggtgctagcgatcggcctgctggtggatgacgccatcgtggtggtggagaacgtggagcgcattatgcgcgacgaagggctccccgctcgcgaagccaccgaaaaatcgatgggcgaaatctccggcgcgctggtggcgattgccctggtgctgtcggcggtgttcctgccgatggccttcttcggcggttcgaccggggtcatctatcgccagttctcggtaaccattatctcggcgatgatgctgtcggtggtggtagcgctgaccctcaccccggcgctgtgcggcgcgctgctcagccactccaaaccgcacaccaaagggttcttcggcgcctttaaccgcctgtggggacgtacggaggcgggctaccagcgccgggtgctcggcggcctgcgccggggcgcagtgatgatgggcgcttacgcgctgatttgcggggcgatggcgctggcgatgtggaagctgccgggcagcttcctgccggtggaggaccagggggagatcatggtccagtacaccctgcccgccggggccaccgcggtgcgtaccgccgaggtgcgccgccaggtgaccgactggttcctcaccaaagagaaagccaataccgatgtcattttcaccgtcgacggcttcagctttagcggcagcgggcagaacgccgggatggccttcgtgtcgctgaaaaactggtcgcagcgcaaaggggacgacaacaccgcccaggccatcgccctgcgcgccaccaaagagctggggacgatccgcgacgccaccctcttcgccatgaccccgccgtcggtagacggtctcgggcagagcaacggcttcaccttcgaactgatggccagcggcggtaccgaccgtgacagcctgatgaagctgcgcagccagctgctggcggcggccaaccagagcagcgaactgcagtcggtgcgcgctaacgatctgccgcagatgccgcagctgcaggtggatatcgataacaacaaagccgtctcgctggggctgtcgctgagcgacgtgaccgatacgctctccagcgcctggggcggtacctacgtgaatgactttatcgatcgcggccgggtgaaaaaggtctatatccagggcgaaagcgacgcgcgcgcggtgccgtcggacctcggcaaatggttcgttcgcggcagcgataacagcatgacgccgttctccgccttcgccaccacccactggcaatacggcccggaaagcctggtgcgctacaacggctccgccgcctttgagatccagggcgaaaacgccgccggcttcagctccggcgcggcgatggacaagatggaaaagctggccgacagcctgccggcgggctccacctgggcgtggagcggcatttcgctgcaggaaaagctggccagcggccaggcgatgagcctctacgccatctcgattctggtggtattcctgtgcctggcggcgctgtatgagagctggtcggtgccgttctcggtgatcatggtcatcccgctcggcctgcttggcgcggcgctggcggcgacgctgcgcggcttaagcaacgacgtctacttccaggtggcgctgctgaccaccatcggcctgtcgtcgaaaaacgccatcctgatcgtggagttcgctgaatccgccgtggatgaggggtattcgctctcccgggcggcgatccgcgccgcgcagactcgcctgcgcccgattgtcatgacctcgctggcgtttatcgccggggtgctgccgctggccatcgccaccggcgccggagccaacagccgcgtggcgatcggcaccgggattatcggcggcaccctgacggccaccctgctggcggtgttcttcgtaccgctgttctttgtgctggtgaagcgtctctttacccgcccacgtccttctcaggagtaa

SEQ ID NO: 223996 - DNA, 243 bp, Klebsiella pneumoniae
atggccatatccggcgaggcggcggtggtctgcgggttggtgatcacgtcgacctttttgttggccgcggcgtcgattttcgcctggcggtcggccagcgctttatcaacggctttggcgacgatggcgtcgatctgttcctgcgtaaattcttgcgccatgacagaaattgggcacagcgcggcgaccaccgccatggctaaaggcagtttttttacagtattcatggttatctcgctttaa

SEQ ID NO: 223997 - DNA, 444 bp, Klebsiella pneumoniae
atggaaattaaaaaaatttcaataaatgactttaggggtgaaatgggagttatgcgagggtataacgatgattcagaggatataaagttagcaaaagaatattactacacgcaagctgtaaaccagttaaaagcaattcgctttggtatcgaaatcataaaggaagatgaagatttcaatatacttatatttaagataaatgaagatctaaaaattcagttaactcttatgaattttattaaatatttgcgaattgatctgcaattatatcaaaagaattgtaattttgaagaaattttaagcgaagattatcattattattgtgagtgtgattgtaattacagttttaatgatgttgaagaaagactagagggtgaggatgttggaagacatttccgccatatgctggtatcacttgttaaggcaatcgctaaaattgaataa

SEQ ID NO: 223998 - DNA, 276 bp, Klebsiella pneumoniae
atgagcatttactttaatgagcacggtagcgcgattggataccaggtagaaggacgctggacaatcaagggcgattatttgcaaatcgaacatggccccaacatcccaggtggcttgtacaaaattaacgataataaggtgaaattcccactcgactacaaagaggttgagggagtgatcgatactgagaaacttacttttactgtgtgtggtaccgtatataaaatgattaaaccatctgaaccgtttgccatacctgtacgttttcctacctaa

SEQ ID NO: 223999 - DNA, 327 bp, Klebsiella pneumoniae
atgacaaaagaacattttaaagcggctgcacagtttgacgattgggaaggaagcgtcgcagcagatgagcttgagaaaaataatttcagcgacttcttaagagggaaaggagtactcaaacaaggtgaagtcgtcaaaggcatctccctttattcgggtgtacatcgctttgatgttgaagcgtacatcgctgatgataaaaacttactacggaaagaagacattcagattacccttgaagaatttttcaaaacgttcaaaaggttctctatcaaaatttctcgcaaaggggaatttgacgatcaagaaatcgagttcagggagtag

SEQ ID NO: 224000 - DNA, 189 bp, Klebsiella pneumoniae
atgctggccgacgacggctatcaatggttcgtggagcagggcggtttgacccgtgagaacggtcagcgtttccgtgaggcgattttatcacgcgggaacagcactgatttagctgaactgtatcgccagtggcgcggacacgatccgcagattgagccgatgctgaaaaatcgcgggttgagtgcgtag

SEQ ID NO: 224001 - DNA, 198 bp, Klebsiella pneumoniae
atggcaaaaatagaactaacagattcccagggaaataagtactccctggatgttacagacggcgacctattccgcatttttaatatcaccaaactttccagcgtggtgggtataaataagtacacgttaagtgcaagggtatgccgtcaatatcccgatggtgaatatcgaagtctcgttacagcattaaacaaataa

SEQ ID NO: 224002 - DNA, 1020 bp, Klebsiella pneumoniae
atgccttttgatacccgaaacaatgcgtttgaatattcgtctccatttacatattcaaatgaacttaacttaattattaccaatctgggattgtttgaggaagagaatcatactaaaaactcaattcttctggataaaatctttgttcaatcgaacgagacagcacctgagaaaatgccgtatgctcagagtgactggaacagcgcccagcgctctgattataccagcgttctctatgacatggtttacacaaacagcctgaatactgtttcaagccgtgatatcgaattgctccgtgctccaggtactgaccatgaagaaaacattgcaatggtgctggctgaatactcacaacgtcagtactcacaaatttctaatacagttgaacaatatctgattgatgccctgtttggtcttaaagtcgaatctcagtacacaggtcagggaaatattgacttcctggcaggcaatgctaaaacatcctatgtgatgaatgttgcaacctcagcaaacgtctttgaacagctagacgaagtgaaccgcatcattaacgttaagttaggttctggcctcgccaaaaagcgtaagggaacggttattttggctgctggcaatgctgctaaggctttgaaatatcaccagtctatcaaagattacatggtatataccctgagccttaatgacagtgacaatttcgctactaaaatcgttagccaaaacccggcgtttagctcatggaaacttgattcagtaaacgttatcgatgtaacgggttatagtgaaatcacagattatatcggtgaaaacggttttgctgttgtgcctatggttgacggtggctttaaacttcatacggggattggtgttcgtcatagccgtttaggtcgtgagcctggtctcgtgcatcaatatatgacagatgttgatcgaatgggatggcctgctatccataccgaaagtgcattcctgccacaggttaatattcctgattctattgtatttggttctatctccagctaa

SEQ ID NO: 224003 - DNA, 384 bp, Klebsiella pneumoniae
atgtctttttttgaaaaatatggtgaaaccttttcaggtcgccgtggatacgtgcgtgataccgttgtagcatacgtgagcgacggtgttaaacaggatgaactagttaagctgtcagcagctattcctgctgatttacctgttggttctgtcgtggatactaccggagcaattatcaccactgctgccgatgctgattacgtcgtcgtcgaatttgccaaggcaggttctaccgcaattgttgttgcgaatccatatcataccattttaaaaaaatcaggtctgattaccaatggtgttgatgtaaacagcgttgttgaacaactacaagctctgcatcattcgtttgctgatttcgccactgttgcgctgcgcacaacctga

SEQ ID NO: 224004 - DNA, 204 bp, Klebsiella pneumoniae
atggtaactatcacaaaaggcgtccaaacgtttgacgggaaaatccccgttactctgttagtcgacgacgtagaaacagctaatactttagtgaaaatggcaaaagatgccaacgtcactgttattgaacagaacgttgatttaaataaatctacaatcaatccggtgttcaaacatctggatcggattgcatccaaaaaataa

SEQ ID NO: 224005 - DNA, 285 bp, Klebsiella pneumoniae
atgtttaaacggaagaaaccctcggagcatccaacaatcacctttggaagatatcatacacaggacgggaatatttatatccaacgtgatgatggtatctggcgtcagaatgttaactacctcgcaggtgttcccactcagtataattgcaccacctatgaagaacagtttgagaagattataactcatatcgaaaacggtaaattacgtggtacatacgcctctacgctgcattataaaatggtagatggtaaactctatagatttaatgagaaaacgtcttag

SEQ ID NO: 224006 - DNA, 414 bp, Klebsiella pneumoniae
atgggaaaaacaaaagataattactttaaatcacattacgacatttttaaaatcaacactatcaacggcaaaaggttttcaatctctgcaaaatccatctacagttacctaaaaagttttagtgatgctggtctcaaggtatttcccagtcataatgaaattgctgatacctttggtattacccgaaatgcagcgataaaacagatagaaaaactgattgaactaggtttgatcgaacgtgagacacggcccggtaattgcaatgagtaccacgtcctccccattcagatagagaatacagcaggacggacgtattcggaaaacaggggaaccaggcacgaggttgtcggcgatttcgggaataactcaggaatagtattaattgaagaagataatgatgatttaccgtggtaa

SEQ ID NO: 224007 - DNA, 1236 bp, Klebsiella pneumoniae
atggtgaaggaacattacggcgtaaaatcacttatctgtgtaatagataaagaaaacatcgatatggattatgttgagggtgaaagctgtattcgccttaccggtttttttagagaagcgattcatgaagatacggaagatattgagacatttactgtcgatattcaacgggacatgttctttaacttaaagtcccgcaaaggtaattcctacattccctatcatatcaaaaagttttatcgtggtgaatgttatatacttttaacatttcatgaggttaggcgctctcagtcttattattaccgcacttatgtttcaccagaagaaaaaactgctatggcacagtctccgatttattttgagatagatgctctagcatttgcgcatcaatacaacaatattatccataataatcagactgtctttaattttctttttcgacgcccatctctgcccgcgggtaattatgaattcagcttgttgggtaatgtaactttgcattcctatcatgtagggcaggggatgtgttctctgttgcacaatgatagcgaaggttttttactcgactgcggtgctggtacgccaatcaagcggctgggatatgcctccttaacttccaataaattaattgctgacttaaatggattaaaaaaggtttcaatgattctttcgcattttgatagcgaccatcataggttgctatcctgggacagcaatattttggctaaaattgataatctctatgttccagcaaatatgcctgcggagcttgttaaagatgtaaatatctatcctatcgttaaaccctgcatctcaattacgattcatttcaataacggtaagcttcaagcctatcgcaccgagccgacgtgtacggaaaaaacaaaaaataatcatgcgctgatttctgttattgattcgaataaagaaacagtattgctgcccgcagattatgtctattctaaaatagttacagataaaaatttggatatcgcaagattatcttataaatcatatagttatgtggttgtgccgcatcatggtgatgaagccagtagtattggggtttttaaatcaagtaatgtatctgccaaagcatatttttctgcagggaatcatgcaacttatcttcatcctcggaaaaattcgctagatgcacattctgccgcaaaatataaaatcattgttgacaatgaatatgcacaaattgattattcagttacgctcaaattgtag

SEQ ID NO: 224008 - DNA, 2652 bp, Klebsiella pneumoniae
atggagttaaaagactatcaaaatggtgttctggataagcttgattactacctgaaaactctgtcagaaagtaaagaagaagcggaagattttgttgcctttcaaaaaatgaagggtaaagatgcacgcataaacgactacgccaaagacgcctgggaacagctggtacaggaacgtcgaattgatttacttaaagataaaagtggtcattttgtgcctgcgccatatgtatcaaggttcgatggtttagaacagcctatccctaatgtgtgccttaaagtaccgactggtggtggtaaaactttattaggtgtggcggcgattgaacgactgcaaactgacttatttacacagcaaacgggcatggtactttgggtggtgccgtcggacgccatatataagcaaacatggaagcaattagccaatcgtgagcatccttatcggcaaatgctggaacgtgcttctggcggacgggtcaaaatgctcgaaaagaacgatgcgtttacaaagcgagacattgacgaaaatctttgtgtaatgctgttaatgctgcaatccagtgcacgccaatctaaagaaacactccgtatgtttcgtgatagcggtcgattcaccacctttttccctattgaggatgatacgacggctaatgaagcattactgactcaaattcgcaatctagactgtaacgacctctctgattatggctggcaggaaggcatcgcgccaggatctgtatcggtgaagcagagtttaggcaatgtattacggttagtccgtcctgtgattatcattgacgaaggtcataaggcatacagcgacacggctagagatacactttgcggctttaatccgaagtttattcttgaactatctgctacccctaacgcaaacggcaaacaccattcgaatgtattggtcaacgtatcggggcaagccctgaaagatgagcaaatgattaagttgccaatcaatttaattaatgaagataaaagtgagtggaagcacactttattgctcgcacactctaagctgagtgaacttgatcgcgatgctcagcagtttcagaacgaaacaggtcgttatattcgccctatcatgctgatccgtgtagagcgcacaggtaaagatcagcgtgattcggcttttgttcatgctgaagatgcgcgtgagtatctgatggataagttgggcgtgaatgaaaatgaaatccgcctgaaaacttcagacaaggacgaactaggtgatgatgatttgctcagtgatatgtgccctgtgaagtacatcattacgaaagatgcattgcgtgaaggctgggattgccccttcgcttatgtgttgacagtgttatctaagatgactgcgagaactgcgattacgcaaatgattggtcgggtactgcgccagccgcatgcgcgtttaacgcaaaaaccaagcttagatgaatgttatgtctatacctttgatcaagacgtaatgaatgccgttgccagtgttaaggaaggtttagaagaagaaggtatgggagatgtggcaaatcaggtcaaagcctctgaagctaataaacctaccacagctgtgaccaaagaaattttattgctcagagagcgttttcgctctttacctaaagtatttttgccgagagttttacatcgtgataatcgttgtaaagacggctacagattatttgattacgaaagagacgttttaggtaatatagattgggagtctttgttatacctgaatgccgataattttcagttagtcaatgacaagttacaacgtaccattgctcgcatcgactacaaaatgtcaaaagataaccaaggtgaattggatttagctgacccagtgcaagaaaatatagtgtttgatgccagtgtgggattggatatttcctatatggttcgccagcttactgatgttatccccaatccgtggcaagcaatgcgggtattaacgcacactttagacattttgcgtgataatggcgtcagtgaagagtcgttgttcaccaatcgccttgaattgctcaaggaaatgaagcgtgatattaaacaacaggttgttcaattgtcggaacaaatcttcaggaccaagttggaaaagggagatatttctcttcgattactagcatccgacaatgacaaactgaattgggaactggcgcaaacgttagaaataaatgtcacggagcatgagcaagtacttcgccgcaaagacggctcagagctagaaagaagcttgtttgagaaagtgtaccaaaatggacttaatggcctagagcgagaaactgccttgtatttggataaacaagaatcagtgtattggtggcatcgtatcgcggtaaatcaacgcgaatatagtcttcagggctggcagaagcagaaagtttaccctgacttattggtgtgtgtcgaagaacctagttcaggcaattaccgtttctcagtactggagaccaagggcgagcatttgaaagggaatgatgacactgaatacaaacgtcgcttatttgaattgttgaccgaacacgtcaaaacggcggtggatgcgggagaacttactttggaagcggcatctggtggtatttcattccgcatgctcatggaaaacagctggtcgcaggaaattgtgcatgaattgaactaa

SEQ ID NO: 224009 - DNA, 1809 bp, Klebsiella pneumoniae
atgccaactttggattttaaaggtaagcagtttgtttattcccatcatctgagtgtaccttttcgcgagttaaaagtagaaacggataaatctttaccactagaaggcaactcaccttcactcgatgataacctgatcatccacggtgataatctagaagcccttaaagctttgctgccaacccatgcaggtaaggtggactgtatctttatcgatccgccttacaacactggtaatgaaggctggtgctataacgacaatgtacgctcacctctcatgcaagaatggcttaaaaaatcagcaaatcccgtagataaagatgacttagaacggcatgacaaatggctctgtatgatgtggcctagacttttattgctaaaggaattattagctgaagatggaagtatctggattactctggatgataatgaagctcaaagagctaaagtacttttagatgaaatattcggtgaacattgtttcattgcatctatcgcatggcaatcaaggtattcagtgtcaaatgacacctcaatctcaatgtcacacaactatattttagtttactccaaagctccggatacttggaagaaaatcagaaatgaggtaacacgtacagaaaaacagggtcttcaatactcaaacccagacaatgatcctgaaggcccctggagagctatcccttgggatgctcctaatattagggaaaatctttcatatccgattgttaccgaaaaaggaacaacaagatatccaccaaaaggtagatgctggtctcgagaagaatctcaatggttagacattgtagaaaaaggtcttgcatactttggaaaaaatggggatggagcaccttcttacaagcgctatctaaaagatgcaggaacagttgttcctacaacatggtgggagcacgaggactccggtcatactgatgaagccagtaaggaaataacagccttcggtttagatgtacagtttgcaacccctaagccaaaaagacttttagcaaaaattcttcagattgctactagagaaaatagtattgttttggatagctttgcaggttctggaacaactgctcatgctgttctcgaggctaataaaaatgatggtggtaaaagaaaattcattttagttgaatgtgaggattatgccgatactttaacagccgaacgcattcgccgtgtgattaatggttatccattcaaaggaaaacaaaaacaagaactactttctgaaaaaataacttggtcggtatttgaaaagaaacatgctgagttattggaaaaaatcgctcatgttgaagcaaaacataaccacgaattcgataagataaaaaaagaactgaaagatggagtgctaactgttaccggcgagcgaaaagtggataaaaatgcacccggtattggtggaagctttacctattgtaccttgggcgagcccattcaaatcgaaacgctattgactggcgaaaaaatgccctcatttgatgcattggcacgttatgtattctataccgcgacaggacaatcattagaagctgttgcgaaggcctctgctgatggttttatcggtgaaacagacctcttccgtattcacttattctaccgtcctgaaagtgagtggctgcgttctaatgaagctgcacttaacgctgacaaggttgagatcattacaaaaaataatgcaacgaaaaaaagaactatcgtttttgctgtcgctaaatttatgagccaaaaagacttaactgaaaaacgtattgagttttgtcagttaccatacgccatccatcggattatgggggcataa

SEQ ID NO: 224010 - DNA, 3150 bp, Klebsiella pneumoniae
atggccgataagcaccccagtattattgccccgctcacgggattgaaagattttcagcaacgcaccgtgaattatgtttttcagcaattttatggtgataaacagcaaaatcgctttctggtagccgatgaagtgggtctgggaaaaacgatggttgcgcgcggcatcatcgccaaaaccatcgagcatttacaggataaagtcggcagtatcgacatcatttatatctgctcaaattcggctgttgcggcgcagaatattaagcgcctgaatgtcagcaatgaggaacaattttcgcactcaacgcgcctgacattcctgccaaaacaggtacggtctctgcgcaaaaacagaatcaattttatcagcctgacgccaaacaccgccctcgatcacacccgcagccgtggcggtcataaagaagagcgcgcgatcctgtatcgtattttgtacgatttgccgttggcaaaaggcgagcgtcgtgaacgtttacgcttgggtatgcttaacctgctacaggcagcagcaagccggtctggttggcattccacagttgaccagctttctgtcgacgacattgacagggaactggcaaaagattttcgtagcaaggtgttagacgatgccaaactgtacgctctgctcaaggaggggtgcgagtatttcgccgacgacgacgaggacagcgagacgcacgattctaaactgcgctacaccctgatcggcaaactcagaagcaaactggccgcagtgtgcttatccgcgctgcagcctgatctggttatccttgatgaatttcagaggtttaaagccttactcgatggtgatgatgaagccgcattgctggcaaaagcactctttgaacaccccggagtacgcgtgctcttactctctgcaactccgtataaaatgttcaccctcgatcaagaaagcgaagaggataaccactacgccgactttatccgcacattgcagtttttgtacaacgatgacagtcaaatcaagaatattcagcagcatttgctcaatcaccgtaccgctttgcacgcctcagtaaacgcagcggagacgaaaaaagctctggaaaacgctttattacaggttatgtgccgtaccgaacgggtaacgatgacaaaaaagttagatgcgatgacgaaggaagtctcacaaccagccatgattacgcccgccgatctttatcacgcggcggcggttgatggcgtcgccatggaagtacaagctcgcgatgtcctagaatactggaaatcgatgccttatcttttcaatttcctgaaacattacgaattacgtacccgtatggataaggcactggaatcgccttcagatgcattgcgtaaactcgtcaaatcagcaaaaccacagttgctgacgaaggcaaaactggagcgctaccagccgcttgaagccgccaacccacgtatgaggatgctgtttgaagacacgctggataaaggcatgtggcagcttttgtggatgcctccttctctgccttatatgacaccaaacggggtatatgccaacaaaggcaacctaaccaaaacgctggttttttccgcctggagtgcagtacccaatgcgattgccactgtctgctcttatgaagccgaacgacgcatgattggcgccgatccccaaattctgcacagccagctcaagaaaaaagtcaaaccgctgctcaattttgcaaaatcatcgaaagatggccgcctcaccggaatgcccgttatcgcctggatgttaccttcaccgacacttgcccgtcatatcgatccgcttgaaattgcccgccaaaaccccggcgagcagctgagtgtaaaggccttgagagcgatttcaattgcgaaatgtgaagcgctgcttgagactctgcccaatggcgggccggggtctcgtgcggacgaacgctggtactgggcagccccggcgttactagatgcccgtaccgaaacgccagactggtggctgatcgaacatgactggtacacagggccatcccaaaatgagccagccgaaaacttccaggaacatatcgacctgtttgcccggatggcaaagggtgaaatctccctcggcccgcgtcctgaagatctggtagaggttctttgtgacttcgcgcttgccagccccggtacatgcgcactacgcgcgctcagccgtatcgacacaggcctggcaaccgattcggctgagatgttgtccgctgcagcgcagatcgcctctggatttcgttcgctctacaatctggcagagagcatttcgcttctacgcggcacaggggatgacacttactggcggctgacgctgcgttatggcatcgatggcaacattcaggccatgctggatgagtatattcatacgctgctggagtcaatggggttgcaatatgaacccgccgaagcgcaactggcggctattgcatcccgtattcaggctgtggtttcactgcgaaccacacaattgaacgttgatgagctcaagacgaaaggcggtaattatacttggagcgatttgtatacgcggtgccgctttgccttacgctacggccaactgcgggacgacacggatcaggccgtcgctcatgcagagtcggtaaaagatgcgtttaactccccttttcacccctttgtattggcttccacttcaatcgggcaagagggactcgattttcacacctggtgccatgcggtgatgcactggaatcttccatcaaacccagtcgatatggagcagcgtgaaggacgagtacatcgctataagggccatgcggtaaggaagaatattgccgagcattatggtttgagtgcacttcattcgctggcagaacgtgcagatccatggacacagctcttcgcacttgcgacaagtcagcgcaaagcggggcagtcggatttgattccctactggatttttgaagaaggaacctctcgcgtcgagcgccgtgttcccatgctgccctacagcaaagagagcattaagtttaagcggctcaagcgagaactggcactctaccggattgtcttcggccagccgcgccaggaagacttgctgttcggcctgaaacacaatggcgatgagtctttaacggatttaacacagtggctcatttctcttgaaccaccaaaggtgtga

SEQ ID NO: 224011 - DNA, 1797 bp, Klebsiella pneumoniae
atgctaaaccccaataatcgcagcttatatacttcggcactaacctctccgcccggcatggtgtttgacgaagccatcgccaccagcttctcactcgacccggtatttttactgcaggcgccggtctatttggcgttcacagcgactgacagcaatcgtgctcaggatccgctatccatttttgaagccattcgtcgttattccgaacgtatcacggtgtacgtccaaaaagggcgtattcaagtcccagcaaagctcaagcccaaccccttattcggcctgcttgaagagatgattgttgaatcaaaagccaaaggccgcggagtctttcacccaaaaatctgggcgattcgttttatcaatcctgaaacagacgaagtgatgtaccggctggtcgtactgagtcgaaatttaaccaccgattcatcttgggacctctctttgcaactggacggctaccccgtaaaacgtaagcaaagtgccaataaaacgctggtgcatttattctccgtactgcccaaacgggcgacgggaaaaatggcgaaacatcgccgggcgcaggcgcagcgctttgcagatgaactgttgtatgtggaatgggaatgtcccgcaggctttgatgaggttgcttttttcctgcctggcgaaggatacgactggcagccacccgaagcggatcgtgcggtggttatctcaccgttttgcaccgacgaggcactgcaacacatcgtgaagcattgccagcaagccgatgcgctgatttcacgcccggacactctgcttaccttgagtgaagagacgcgcagccttttcacgcgtcagcttcaccttgacgatgccgcagaagagcaagcatccgatgagagtacccctgacgacatcatcgcttccggcctgcatgccaaagcgtatctgtttgaaaatggccgggacagtgagctggttctgggttcagcaaatgccaccagcgcagcgctactggggaaaacgaactgcgaaattttagtctcgctcaaaggtaagaaaaagcacacgggtaccattgatgaccttctgagcagcgatggaatggaaagctatctgcaagatttcgaccctgcccagccgtttgaacccgatgtcctgcgtgtagaagccgagtcccatgctgaacaggcacgtgcgttgctcgccgacgccgcattgactcttcactgtcaccccggtgaaaacaaccaaagttgggcattgtggcttgttggtgaaattcctgagctaccgggtatcgtgcaggcaactgcgtggcccgtgacggtagctgacggacttggctgtagcctgctggaccaggccgatgggaataaaagagcactcggtgagttttcagtcccggccattaccgggcttacagcgttttccctcaaaacatcgcacccggatgtatcgatcagattcgtcctcaatctgccgattgatgccttgccccccgatcgccacgcaatgattttacaaagcagcatgcagaaacaggattttctgcgttatttattgatgttgataggcgaggcgggacagcaatccttctttgccgaaaacgcctttggcgatggccatttctttacagggcttgccagtggcgaagaatttgctgtactggaagagctgacgcgtatctatagtcgtgagcctgaacgcttaaaagatatcgccgcgctgattggcaatatgcgcaaaggacaaagcgacatgattccgcaagattttcttgctttgtgggccgtatttgaatcagccatgggaggccgaaatggccgataa

SEQ ID NO: 224012 - DNA, 1230 bp, Klebsiella pneumoniae
atggcatccgcgttaggttggcttgatcatgatgcaaacgcacaggccaaaacgttaaatattcttgcgctctttcaacaaaaagagagccgagatgagctgggtatcggcactatcagagatagttttgctgaacaactatttccaggaaccagcaccattcaaacccgtttacgttacatgctttttgttccatggatctatcagcgtctcgaaaataaacgcatatccgctgcaaactttggtacccaggccgcccgtgacgaaagagccttaattatccccctctccaagctcgaagaagattcggccggtacatttggtaaaaactcacgcgaaaagcttaaacgtctgcccagttccgtttactggtccgggctacgtcgctggggtattcgcgagatcctgtggtcacaggaagaatatcatcgacgtgttgatgaactttatcgctcacgcacggaaatcagtgagcagaaatataaagaagaaaatcgtggtgatatgggcgacaccagcttgtacaaaccagcccagagctggcactccagcctgcctgcgccaccgcccaattttcctgatgatgcaacgtttgcactaacacgccaggaagccagctttcttcgcgaccgtattcaattgtcctgcaaaggcagtctgttggcttggctgacgctgcatagcgaaccagcagatgtgagttcaccatgggaacatccggattacgcgaggttcccagatgaactcaaggaactgctgactcacgcgcggcttttttcttatacgatgcacggcgcagccctgctttataactatttgctcgccaaagagcgttcagataacgaccttctgtctcaacacaatgacaacttcgtcaactggtttactgcactcccacgcaaagaaatcggtacctggtcgctcggccgtatgtgggaactcgccgccgaaccgggctatagcattagcctaaaaacccgccgctttgtggaacagtggattgctcttatccgacagtcccctgagacattactcaccagtaaagaagcctgtgctctaatccgtgcccgcgaaatgaccctcaaaggcccacgttcgcgcttcaaaaacagacgcgctctggagcaatggagtggatatgccggaaccctgcggctggtctaccgctggcataacgtccagataatacttaaggatctggcgcacggtctcaggagagaagaatgctaa

SEQ ID NO: 224013 - DNA, 573 bp, Klebsiella pneumoniae
atgcaaaacaatcaacgatgggagtcagactggtttctacagtcactcctgaacaaccatatcgacaaactggtagagcgctattcttgcctgcgggcattccgaacagatctgttttaccaggatcataccgctaagtatttcctgcaggatcaccagcagctcgaatgggatatccgaaagctgatgaaccgtatgatgcaactcgaagcggtggtcggtttcttctgggttatcgaatggacagaagaccaccactaccatgctcatgtcgtgttctggctggatggtagtaaaactcagaatacctatacctgggcgcagcaggtcggtttgtactggagcgatatcactaaccgggaaggctggtatcaccgatgtgagtttaaagagcattacgaggccaacatcaacattccggtacgttacagcgatccggacagtatcaccaacatccgacaggtactggcgtatatgaccaaaattcagcagaaacatggcctgctgctgtacggctgcaatgaagtccccgggcgcccagcatccgggcgtccacgcagaattgatttctga

SEQ ID NO: 224014 - DNA, 222 bp, Klebsiella pneumoniae
atggaagacagcattatgacagaacaaatttctttgcttgatgaccaactggtggatatgcggttcatcacgaagctaacgggactttcggataaatggttctataagctgattcaagatggtgctttccccaaaccagtcaaactggggcgcagttctcgctggttaaagagcgaagtagaaaactggcttcaggaacgtattaaccagtcccgtaaataa

SEQ ID NO: 224015 - DNA, 1206 bp, Klebsiella pneumoniae; identical to SEQ ID NO: 19666

SEQ ID NO: 224016 - DNA, 498 bp, Klebsiella pneumoniae; identical to SEQ ID NO: 91874

SEQ ID NO: 224017 - DNA, 624 bp, Klebsiella pneumoniae; identical to SEQ ID NO: 10353

SEQ ID NO: 224018 - DNA, 624 bp, Klebsiella pneumoniae; identical to SEQ ID NO: 10352

SEQ ID NO: 224019 - DNA, 1206 bp, Klebsiella pneumoniae; identical to SEQ ID NO: 129164

SEQ ID NO: 224020 - DNA, 462 bp, Klebsiella pneumoniae; identical to SEQ ID NO: 129165

SEQ ID NO: 224021 - DNA, 417 bp, Klebsiella pneumoniae; identical to SEQ ID NO: 10349

SEQ ID NO: 224022 - DNA, 1008 bp, Klebsiella pneumoniae
ttgaaagtattttattataagtctaaaaatggaaattttggtgatgatattaatggttggttgtgggatagattactgcccaatttttttgataacgatgaaaatacaagactttcaggtataggtactattattgattcttatatgccacacgcaagaaagtggtacgtattatcaagtggtgtaggatatggttttcctccctcacattttggaaaggataattggaatatactatgtgtacgtggcccattgtcagctaatatacttaatctacctccggaaaaatttataactgatggagcagcctttttaaataaaatccctgagttttcacccctatctgagaaggaaaggaaagggataatttttatcccacatcattatgctgttcatgcaggggaatgggaagaagtttgtaaacttgctggtgttgaatttgtaaaccctgaaagtgattctaaatatgttttagataagattagaaatgctaaattagtattggctgatgctatgcatgcagctattattgctgatgcttttcgcgtcccttgggttccgatggtaacatctcctcaaataaatacatttaaatggcttgactggacctcaactattgaacaaagatatactcctatagtattagggagcagttccttaaaagaaatggtaaggagcaaaggtttatttttatatggcgaaaaatattacaataataattgtgatgtagagtcctcgatcaaacaatttaaaattcaaagaaaaataaaatcccacactctttggcctttatatcgcaaacctgccagttttctagctaatcgagtggcaataaatgcggcttctttagtcgagaaaattgatagatcgttaaatcaaaagtttatagatgaaagcgttaaaataatgattagcgcctcacagcaacatggtttcctaagtgatgacaaaatctttgaaagtaatttagggcgtttatacgattgtctctatttactaaagaaataa

SEQ ID NO: 224023 - DNA, 594 bp, Klebsiella pneumoniae
atgaatgtccaaaagtctgctggattacattcttattatgacgctataagagaagataaaggacagcgtttatatacagcttttaaaaaatgtaacaatgacgatttttttatggttgttgattatgatgactttattcataaagatatctccttatatgttaacaaacaccagaatgaaaatggatggtatattgataaaggttatttttactctggtggtaacgtcttaattaagacaaaaaaattcgatacaaaatgtgggacttcaaatattctgaaagtttcattggtttacgaatttaataatggagaaaaggaattgtcaatttcattgatcaaagaacttcttggcagccatcgatttttaaagaaatacatggttgataaaaagaaagaatttaaaagtattccgttttatgcagccctatataatatcggtatccctggctcaactagcggaacttcaggggtcatgagtaatttcttttcgttaaatgttttgattagaagacctgatcgttttgtcagaaatttttttaatataagatggttttcttcaaaaaagaaaaaattctttggtcttgttaattaa

SEQ ID NO: 224024 - DNA, 786 bp, Klebsiella pneumoniae
atgggaaaactttctgtactgtatgcgtttctttcattttttagttttaaaagtttgaataatacatttgcatgtgaacatgtatcatattcttctttcccatggtatgttaaattacttaaaatattcaccttacgtttttataaaaaagttatcgtgctgactgaaagagattcaaaaaaattaacttctttagctattaaaaacttgaagatttctaatccagttcatatgaaaaatatcgtgagaacggaaaagcctaaaatagtactggcgataggaagattagaacatcaaaaaggaattgataggttaattagtatttggtctttattttataaaaaacatccggactggatacttaatattgccggaacgggaagttgtgagcatcaattaatagatcaggtaaagaaagaaaacttagagggatcaatatttttccttggtaaagtaaaaaatgtcgatgaactatataataatgctggtatttatgcaatgacctcacggtatgagggtttacctatggttttgttggaagctaagtcgtggtcattaccagttgtagcattcgattgtccaacaggtccaagagagataataaatcatggtgaagatgggttccttatagaagatggtgatattgacgtttttgtggaaaaactatgcttattagcagaagaagatgatatatatttcaagttttgttcaaatattaaaaatacctccaatccattttcagtggaaaagattaaagagcaatggaaaatgctcattagtgaataa

SEQ ID NO: 224025 - DNA, 957 bp, Klebsiella pneumoniae
atggcctggatcaccgcctggcgcatcgaccgctatgccagaggctcgatgctgaaaacgcccttctatcagcgcgccaagaataccgaagcgctgcctgccgcgcgtaaggcggcagaagaggttcgtgatgaaaaacaggcggcggtgctcagggctcgccagaaccagatagcaaaccagcctcctgacaggatggatgagctggttctgcagccgggcgtgaaggattttgacccaaagatggatcaaacccagctgttcgacgcggcgaaggagttcggaaaagattaccacgacggttaccgtatcccggataacctggcgcagctggtgctggataccgtgctgcagccggtgattttcattctgaataccgatgatgaagcgcaggaataccggcgcatgaagcgtgacggagaggcccgggtggccgtcctgttcccagaggccggggaggccagcaacgcggaacagcctgccgggctggtgagggcgctgtttgatgaccagatacatgactcacgcgcctggtttatgtatgccgcgctcggcacgcgcgagatgtggaccggttacttccgctaccggatgatttacttcagcgagcgctgcagtaaaccgctctcgccgctggtgctcgccggagacctggtgggttttgcgaccgtgaccgcgggtgtcgtgctcagtttccggcaaaagcgcctgaccggcaagctggccgggctggctgcgacaggcgccgtgcgctcgctggaggtggcggtgctggaccagataaccggggaagcgctgccggagctgcccggaggggagcagttgcgggcatttacccacgagccgggaaccgttgtcgcacagcaaaaggtgcggaaagcggaagatcagctggcgcgggggcaagccgcgctgccggccagctggctggaggacgttctgacgacaacggtctga

SEQ ID NO: 224026 - DNA, 222 bp, Klebsiella pneumoniae
atggcgccggaggtgccctgcccggcggcgctgcgcttgccgggcctggggtataggaccttacgggaggatcccgtaggccggataagcgtagcgccatccggcacaaaggcgggtatggccccggggatgtcctccccggcggcgctgcgcttgccgggcctggggtatatgggcctgcggggtgccggagataatgttattggtatgcaactctattaa

SEQ ID NO: 224027 - DNA, 396 bp, Klebsiella pneumoniae; identical to SEQ ID NO: 210560

SEQ ID NO: 224028 - DNA, 9492 bp, Klebsiella pneumoniae
atggataacttgcgcttctcttctgcgccgacagcagattccattgatgcatcgatcgctcaacactacccggactgcgaacctgtcgcggttatcggctacgcctgccattttcctgaatcgccggatggcgaaacgttctggcaaaatctgctggaaggtcgtgaatgcagccgacgctttacgcgcgaagagcttctggccgtcggtctggatgccgccatcattgacgatcctcattatgtcaatatcggtacggtgttagacaacgccgactgcttcgacgccaccctgtttggctattcgcgacaggaagcggagtcgatggacccgcagcagcgcctatttttgcaggcggtctggcatgcgctggaacatgccggttatgcccccggcgccgtcccccataagaccggcgttttcgcctcttcccggatgagtacctaccccggtcgcgaagcattgaacgtgacagaagtcgcgcaggtaaaaggtctgcaatctctgatgggcaatgataaagactatattgccacccgcgccgcgtacaaactcaacctgcacggcccggcgttatcggtacagaccgcctgctccagctcgctggttgccgtgcatctggcctgtgaaagcctgcgcgcaggcgaatccgatatggcggttgccggcggcgtggcgctctctttcccccagcaggcaggctaccgctaccagcccggaatgattttctctcctgatggtcactgtcgtccctttgacgcctcggctgagggcacctgggccggtaacggtctcggctgcgtggtgctgcgtcgcctgagagacgcgctgctgtcaggcgatccgattatctcggtgatcctctccagcgcggtcaacaacgacggcaacagaaaggtcggctataccgccccttccgtcgcagggcaacaggcagtcatcgaagaggcgttaatgctggcggccatcgacgacaggcaggtaggttacattgaaacccacggcaccggcacaccgctgggcgacgcgattgaaattgaagcgttacgcaacgtctatgcgcctcgcccgcaggatcagcgctgtgcgctcggttccgtgaaaagtaacatgggccatctggataccgcggcgggcattgccggactgctgaaaaccgttctggcagtcagtcgcgggcaaattcctcccttactgaattttcacacccccaacccggcgctgaaacttgaagagagcccctttaccataccggtgtcggcacaggcatggcaggacgaaatgcgctatgcgggcgtctcctcctttggtattggcggcaccaactgccatatgatcgtcgcctcgctgcccgacgcgctcaacgcgcgcctccccaatacggatagcggcagaaaaagtaccgcgctgctgctcagcgccgccagcgacagcgctttgcggcggctggcgacggattatgccggggcgctgagagagaatgcggatgccagctctctggccttcacagccctgcacgcgcgccgtctcgatctccccttccgcctggcggcgccattaaaccgtgaaaccgccgaggcgctcagcgcctgggccggtgagaaatcgggggcgctggtttacagcggccacggcgccagcggcaagcaggtgtggctgtttaccggccagggctcgcactggcgcactatgggtcaaacgatgtaccagcactcaacggcgtttgccgacacgctggatcgctgtttttccgcctgtagcgaaatgctcacgccgtcactgcgcgaagcgatgtttaaccccgattcggcgcagctggacaatatggcctgggcgcagccggcgattgtcgcgtttgaaatcgcgatggcggcgcactggcgtgctgaaggactgaagccagacttcgccattgggcattccgtcggtgaatttgccgctgccgttgtctgcggacactatacgattgaacaggtcatgccactggtttgtcggcgcggcgcgctaatgcagcagtgcgcaagcggcgcgatggtggcggtatttgcagacgaagacacgctgatgccgctggctcgccagtttgagctggatctcgccgccaacaacggtacgcaacatacggtattttccgggctggaagcccgtctcgcggtattttgcgccacgctctcgcagcatgacattaactatcgtcgcctgagcgtaaccggtgcggcgcactccgctttactggagccgatactcgatcggttccaggacgcctgcgcgggactgcacgcggagccggggcaaataccgattatttccacgctcaccgccgacgtcattgatgagtcaacgctcaaccaggcggattactggcgccgacacatgcgccagccggtgcgttttatccagagtattcaggtggcgcatcagctcggcgcccgcgtttttctggagatggggcccgatgcccagctggttgcttgcgggcagcgcgaataccgcgataacgcatactggatagccagcgcccggcgtaataaagaggcgagcgatgtcctcaatcaggccctgctccagctttacgctgccggcgtcgccctaccgtgggccgacctgctggcgggcgatggacaacgtatcgctgcgccatgttatccgtttgatactgagcgttactggaaagagcgcgtctccccggcctgcgagcctgccgacgcagcgctgtctgccgggctggaggtggcgagtcgcgccgcgacagcgctcgatctccctcgcctggaagcgcttaaacagtgcgccacgcgactgcacgccatctacgtcgatcaactggtacaacgctgtaccggcgatgccattgagaacggcgtggacgccatgaccatcatgcgccgtggacgtctgctgccccgctaccagcagctactccagcgcctgctgaataactgcgtggtcgacgtcgattaccgctgcaccgacgggcgatacgtccgcgcccgccccattgaacatcaacagcgggaatcactgctgacggaacttgccggttattgtgaaggttttcaggctattcccgacaccatcgcccgtgccggcgatcggttatatgaaatgatgagcggcgcggaagaaccggtggcgattatcttcccgcaaagcgcctccgacggcgtggaagtgctgtatcaggaattcagctttggccgctatttcaaccaaatcgccgccggggtattacgcggcattgtccagacgcgtcagccccgccagccgttgcgtattcttgaagttggcggcggaaccggcggcaccaccgcgtggctgctgccggaactcaacggcgttccggcactggagtaccatttcaccgatatctcggcgctgttcacccgtcgcgcccagcagaaattcgccgactatgattttgtgaagtatagcgagctggatctcgaaaaagaggcgcagtctcaaggtttccaggcacagtcttacgatcttatcgtggcagcgaacgtgattcatgccacccgccatattggccgcacgctcgataatctgcgccccctgctcaagccgggcgggcgcctgctgatgcgcgaaatcacccagccaatgcgtctgtttgacttcgttttcggcccgctggttcttccgctacaggatctcgacgcccgcgaaggtgagttattcctcaccaccgctcagtggcaacaacagtgccgccacgccggattcagcaaagtggcgtggctaccgcaggatggcagcccgaccgccgggatgagcgaacatatcattctcgccacgctgcccggtcaggcggttagcgccgtaacattcaccgcgccatcagaacccgtgttggggcaggcgctgacggataacggtgattatctcgccgactggtctgattgcgcaggtcagcccgaacggtttaacgcccgctggcaggaggcctggcgtctgctttcacagcgtcatggcgacgctctgcctgtggaactgccccccgtcgccgccccggagtggctggggaaggttcgcttaagctggcaaaacgaagccttttcccgcggtcagatgcgcgttgaagcccgtcatcctgctggcgagtggctgccgctatcgcccgccgcgcctcttcctgcgccgcagacgcattatcaatggcgctggacgcccctcaacgtcgccagcattgaccatccgcttacctttagcttcagcgccggtacgcttgcgcgcagcgacgagctggcgcaatacggcatcattcacgatccgcacgcctcttcgcgactgatgattgttgaggagagcgaggatacgctggccttagcggagaaagtgatagcagcgctcaccgccagcgcagccggattgattgtggttactcgccgcgcgtggcgagtcgaggaaaatgaagcactctctgcatcccatcacgcgctatgggccttgcttcgcgtcgcggccaacgaacagccggaacggttgcttgccgccatcgatctcgccgaaaacaccccgagggaaacgctgcatcaagggttgagcgcagtctcactatcacagcgctggctcgccgcacggggtgacaccctttggctcccttcactggcgcccaatacgggatgcgccgctgaattaccggcaaacgtgtttaccggcgatagccgctggcatctggtgaccggagcgtttggcggattaggccgccttgccgtgaattggctcagagaaaaaggggcgcgacgcatcgccctgctggcgccgcgcgtggatgagtcatggctacgcgacgtggagggcgggcagacgcgcgtctgccgttgtgatgtgggcgatgccgggcaactggccacggttcttgacgatctggcggccaacggcggcattgccggagcgattcatgccgctggcgtattagctgacgcgcccttgcaggagcttgatgaccaccagctggctgccgttttcgcggtaaaagcgcaggcggcaagccagctgttgcaaaccctgcgcaaccacgacggacgctatcttattctctactcctccgctgccgccaccctcggcgcgccgggtcagagcgcccatgcgctggcctgcggctacctggacgggctggcccagcagttttccacccttgatgcgccgaaaacactctctgtcgcctggggcgcatggggagaaagcggtcgggcggccacgccggaaatgctggcgacgctcgccagccgaggtatgggcgcgttaagcgatgccgaaggctgctggcacctggaacaggcggtgatgcgcggcgccccgtggcgactggcgatgcgcgtttttaccgacaaaatgcccccgttacaacaggctctgtttaacatcagcgccacagaaaaagccgcaacgccggtcattcctcctgctgatgacaacgcctttaacggcagcctgagcgatgaaacagcggtgatggcatggctgaaaaagcggattgcggttcagctaaggctgagcgatccggcgtcactgcatccaaaccaggatctgttgcaactcggcatggactcgctgctcttccttgaactcagtagcgatattcagcactacctgggcgtacgcatcaatgcggaacgggcgtggcaggatctgtctcctcatgggctcacgcagcttatctgttctaagccagaggcgacgcctgccgcttcgcagccggaagtgttgcggcacgacgccgacgagcgttatgcgcccttccctttgacgcccattcagcacgcctactggctggggcgaacccacctcattggctatggcggcgtcgcctgtcacgtcctgtttgagtgggataaacgccacgatgagttcgatctcgccatactggagaaagcatggaaccagctcatcgcacgccacgatatgttgcgtatggtggttgatgccgacgggcagcagcgaatcctggcgacaacaccggagtatcacatcccgcgtgacgatctgcgcgcgctttccccggaagaacagcgcatcgcgctggaaaaacggcggcatgaactgagctatcgcgttttgcctgccgaccagtggcctctttttgagctggtggtcagcgaaatcgacgattgccattaccgtctgcatatgaacctcgaccttttgcagtttgatgtgcagagttttaaagtcatgatggacgacctggcgcaggtctggcgcggtgaaacgctggcgccgctcgctattaccttccgtgattatgtgatggctgaacaggcgcgccgacagacatcggcatggcacgatgcctgggattactggcaggaaaaactgccgcaactgcccttagcgccagagctgccggtggttgagacgcccccggaaacgccacacttcaccaccttcaaatcgacgatcggcaagacagaatggcaggccgtgaaacagcgctggcagcagcaaggcgtcacaccgtctgccgcgctgctcacgctgtttgccgccacccttgagcgctggagccgtaccacaacatttacgctgaacctgacgttcttcaatcgccagccgatccatccgcaaatcaaccagttgattggtgattttacctccgtcacgctggttgattttaacttctcagcgccggtgacgttgcaagagcagatgcaacagacccaacagcgcctctggcaaaacatggcgcacagtgaaatgaacggtgttgaggtgatccgtgagctgggccgcctgcgcggatcacaacgtcaaccgctgatgccggtagtgtttaccagtatgctggggatgacgctggaaggcatgactatcgatcaggcgatgagccatctgttcggcgaaccctgctatgtattcacgcaaacgccgcaggtctggctggatcatcaggtcatggagagcgacggcgagttgatgtttagctggtactgcatggacaacgtgctggaacccggcgctgccgaggcgatgtttaatgactattgcgccatcctgcaagccgtcatcgccgcccctgaaagcctgaagactctcgccagcggcatcgccgggcacattccccgccgacgctggccgctgaacgcgcaggcggactacgacctgcgggatattgagcaggcgacgctcgaataccccggcatccggcaggccagagcggaaataaccgaacagggcgcgttgacgctggatatcgtgatggccgacgatccgtcgccatcagcggcgatgcctgatgagcacgaacttacccaactggcgctgccgttgcctgagcaggcgcagcttgatgagctggaggcgacctggcgctggctggaggcgcgtgcgctacaggggatcgcggctacgctaaatcgtcacggcctgtttaccacgccggagatcgcccatcgctttagcgcaatagtacaggcgctgtccacgcaagcgtctcaccagcgtctgctgcgccagtggctacagtgtctgacggaaagagagtggttaatccgcgaaggtgaaagctggcgctgccgcattccgctcagcgagattcctgagcctcaggaagcgtgcccgcaaagccaatggagccaggcgctggcgcagtatctggaaacctgcatcgcccggcacgacgccctcttctccgggcagtgttctccgctggaattgctgttcaacgagcagcatcgcgttaccgacgcgctgtatcgcgacaaccccgccagcgcctgtctgaatcgctataccgcgcagattgccgccttgtgcagcgcagaacggattctggaggttggcgccggaaccgcagccactaccgcgccggtgctgaaggccacgcggaacacgcggcagtcgtaccacttcacggacgtctccgagcagttcctcaatgacgccagagcccgtttccatgatgaatcgcaggtgtcttatgccttgttcgacatcaaccagccgctggatttcaccgcccacccggaggcgggttacgacctgatcgttgccgtcaatgtgctccacgacgccagccatgtcgtccagacgttgcgcagattaaaactgttgctgaaagccggcggacgtttgctgatcgttgaagcgacggagcgaaacagcgtattccagctggctagcgtgggctttattgagggattaagcggataccgcgatttccgccgccgggatgagaaaccgatgctcacccgctccgcatggcaggaggttctcgttcaggccgggtttgcaaacgagctggcgtggcccgcgcaggaatcgtcgccgctgcgccagcatctgctggtggcgcgttcgcctggcgtaaatcgcccggataaaaaagccgtgagccgctatttacagcagcgctttggcaccggtctgcccattttacagatccggcaaagagaagcgttatttacgcggctgcatgccccgtctgatgcgccgactgagccagccaaacccacgccagttgccggggggaatccggcgctggaaaaacaggtggctgaactctggcaatcgctgctgtctcgccccgtggcaaggcatcacgactttttcgaactgggcggcgacagcctgatggcgacaaggatggtcgcgcagctaaaccggagagggattgccagggctaaccttcaggatctgttcagccattcgacgctgagcgacttctgcgcccatctacaggcggctacgtcaggagaggacaacccgatacccctttgccagggcgacggtgaggaaaccctgtttgtcttccacgcttcagacggcgatatcagcgcctggctgccgctcgctagcgcgttgaacaggcgcgttttcggcctgcaagcaaaatcgccgcagcgctttgccacgctcgaccagatgatcgatgagtatgtcgggtgcatccgtcgtcagcagcctcacggcccttatgtgctggcgggttggtcgtatggcgcgtttcttgcggcgggcgccgcacagcgcctgtacgccaaaggcgagcaggttcggatggtgttaatcgatcccgtgtgccgacaggatttctgttgcgaaaaccggacggccctgctgcgcctgttagccgaaggacaaacgcctctggcactgcccgaacatttcgaccagcagacgcccgacagccagcttgccgactttatcagcctcgctaaaacggccggtatggtgtcgcaaaacctgacgctgcaagcggcagaaacgtggctcgacaacatcgcgcatctgctgcgtttactgactgagcatacgccgggcgaaagcgttccggtcccctgtctcatggtgtatgccgccgggagacccgcgcgctggacgccagcagaaaccgagtggcagggctggataaacaacgccgacgacgctgtgattgaagccagccactggcaaatcatgatggaagccccccacgttcaggcttgtgcgcaacacattacgcgctggctttgcgcaacctcaacgcaaccggagaacacgttatga

SEQ ID NO: 224029 - DNA, 228 bp, Klebsiella pneumoniae
atgaataaaattattgccatcgttgccctttcacttgtagcaattatttcaggatgcaaggaagaagcgaaaacaacgaaatggtatcgtgatcaccctgatgaattaaaagttgtttatgaaaaatgtcaaaaaagcggagacgcttctgaaaactgcaaaaacgcaaatgaagcccattatcaaatacagcaattaaacgcaccaacgctaaaattccatgattag

SEQ ID NO: 224030 - DNA, 1080 bp, Klebsiella pneumoniae
atggccgaactcggtacatttgaatttatagataaacagctaattggtggtataactcaatctaccagtgggttgatgatggaacattcatcaatggttatggggctggccgctgtgtcagccaccatatacatcatgtggcgtggctaccagacgctggcggggaagctctccacgccgatggaagacacgatgtgggacatcatgagaatggcgatcatcctgtcgtttgtggctaacgtcagtggttatctcgatggcgtgatcgatgccatcaacggtttaaaggagggtttttctggaggcgacaatatctggcaaatactagataccttatgggataaggcaaaagttttggggaaaacattacacgatatggataattccacatatgtaaaagatgaggggatgaccgctcaattttatgtatggcttgggatatttattcttatggctttaacagcttttgtttcgatggtcgctgagataatgatcttacttcttagcatcactgcgcctatttttattttttgccttatgtatggttttttgcgaccgatgtttaataactggttgcaaaatatatttgcagcgatattaaccgttctattttcagcattatcattaagagtagtcataaactttatgactaaaatattagcccaatctcaagccggagctgcacagtcaaatattgtggaactaggcgcacaggtctgtttggctggtatctgtgccgcaatactggtgtatatttccgctaaagtagccgctgcactggccggggcaagcgctaccgtatccatgcaggggctggccgctgtaggtatcggtgctgcttttggtgccgggaagctggccgggggggtacttaaagaaaccaaacgttccgcccaggacaacattcagggctggaaggatgcgaatgcatgtaagcccggcaagcccggaggtgagttaggctataacgcttctaaagcgcgtaaatacgcgattgagcagatgatagcccggaacgaagcgcggagactggcacagaggagggaatccgcggttaagaagttcaacagccaggtctga

SEQ ID NO: 224031 - DNA, 1026 bp, Klebsiella pneumoniae
atgaccgctaagaatatttccctcgaccgctataaacagcgtttctttggcgactttctggagcttcctggcctgacggagatcgccgtcaaccgtccaggtgagctgtataccaaaatcaacggcgtatgggagcagcacgccgttcctttgtcctatgaggattgctacaactttgcccggtgcctggcaaagcaccacggcgacaatatcgaagatattaagccggggctgtcagccacgctggaatctggcgaacggtgccaggtgattgttcccccggcctgtgagcgcgatacggtgtctatcaccatccgtaagccatcaaaggtacaaatcccgcatcagtcgtatatcgatgcgggattttataaccgggtaataggcgaggaaaaaacggagacgcacgacgaggaattaattgcattgtacaattcaaaaaatattcctctgtttatggagaaatgcgtcgagtacggtaaaactctcgcggtcgccggggaaacaagtaccgggaaaaccacctatatgaaaatgttgatagggtttattcctatacatcttcggatatcaaccattgaggacaacccggaaatcacgttctttatccataaaaactacgtccatcttttttatccgtcagaatcatcagatgaaaaaggttctatcgttaccccggcgagccttttacgctggaattaccgtatgaaccctgaccgaattttattaacagaggttcgcggtgcggaagcctgggacttccttaaaataacgggttccggccatgaagggagtatgacctccattcatgcaggatcagcgaaagaagctatagatgggtttattacccgttgctatgaaaatccacagtgcgcccagctcccctatacatttatgttacgtaaggttctggatagcctggacgtgattgtgagcattgatttagacagaaatgtccgccgtataaatgacatttatttccgtccaattcatcgcaatcaatattttgaggaaatgaaagcatga

SEQ ID NO: 224032 - DNA, 1149 bp, Klebsiella pneumoniae
atgtttgagtcgattgagccactggacatatataataagaacattaacttactgattggctcaggtgcttcagcagacttattccccacgctggcgttagccatcaaagatgctaagggacggcaggaaacgattgaaacactcgccacgaaatttcaaacttctgacgagaagcgaactgcattgttcatgcactactacaactcgtgcatttttccagtacagaccttcaatcctagttccgtcacctcagatgaaggaactgcaaacctcaaaaattatgagactttattaacaacccttttaggtctgctggacagaaggaaagaccttaaccgtaaagtcaatattttcaccactaactatgacgggtgcctatctcatatatccgacagcatcctcatgaaaggctcacatgattttgtggtaaacgatggtacctctggctttcacaggaagcaccttcattcaaaaaatttcagtacgtttcaatgccaaacaggaatatttgaacgaagcaactatggtatcccgcagcttaacattattcaccttcatggctccgtctattggtcaaaaaatggcgataagattgaggttaattaccgccgtgattttagtaaccttttggaaagaaagatactggaaaatctcaatggatactcggagtttcttgctaacaaaaaaaataaaaccgcagacatacccaccttatcttttagtgaagagcaaatggccaacttctgggatgaatataacaagctgcccatagttaaccccactaaatggaagttttacgagactgtctttgaagagcactactaccagatgctcaggctattaagttacgagcttgagaaaccaaattcaatactcatcacatatggtttttcttttgctgatgaacacattctcaggcttatacagcgctctctctctaacccgcagcttcaaacatttatttgctgctacagcaacggcagtgcgagcagcatgcgggaagaattcaggctttggaaaaacgtccaagtcattggaccgccggaagatatgaggatggacttcaccaatttcaataagtatgttttctccctcaagccagataaatacgaacctccagtcccatctgaagaggaggatctgctatga

SEQ ID NO: 224033 - DNA, 1776 bp, Klebsiella pneumoniae
atgagtattgttataggtgaggtcattgcagtaagtggagtacgcatctctcttcgcatttttgaagactccaatcatgagagcatcttctatgggggagtaaagtatcggggaatttcacttagagaacatgtttctatccaacgaggcttcatagacatagtctgccttgttgaaggtgaatttctggacgagaaaaggctagaggctgatgccgataagatccattacatccgaaaggtggatgttcgtcccatcggttacattgtggatgacaagttttttgaaggcgtgaaatacatgccgatgatcagagataaagcatcccttctcagcgaactcatggtgggtaaaatctatgggacagagagtaaaactagtttttctattgggtccatgctcaaagaggatgtatgcataaatcttccatggacacgcttattcaacagccatctgggtatctttggtaatactggaagcggtaagtctaacactctagcgaagctttacacgactctgttcaacgagagactagaggcactaaagcacaaaagtcagttcgttatcattgactttaatggtgaatatacggaagaccaactcctgccagccaaggacaagcggataattgaactggattctaaaaaagccaagcataagtttaagattgaagccgttcatttttgggatgtagagaccctaagtcttttatttcaagcaactaccaacacacagcagccgttcttgcgccgcgtactatctggcaaagaaaaatttaaggcaactccactcaaaaggtatgtagaaaaggtttttgagaaagtttttagcactggtgaggcaaaatcagatgcattggacctgagtcgtgaaattgcacggatgattgaatgcgaaccgttgcaggattacctaaaaggaataatttattataacaaagataaatatttcaaacacaataatggtacttactataactcaaatggtaatggctttgacatcagcatcaacccaatcattaatgagtatgttaatttggatgatatcgaccaattcgacgaactcatcttgagatgctacctccaactctgttcagatgttgtgttcggttatgcacaatacgagcatatacagccaatgcttgctagagcgaaatcatccacctcggctcttcgcaatgttttggaaatcgttgatgtgccgccgccgccacatctcttgcatgttatttctttgaagaaatgcaagaatgagatcaagaagattttgccattgctcattgccaagaatttctacacaaatcacaaagatgccgagaaccttaagagtccaccgagccgaacccttcacctcattattgatgaagcccacaatattttgtcagagcagtccgctcgtgagcatgaaatatggaaagactaccgacttgaactttttgaagaaatcatcaaggagggacgcaagtatggagtctatctcacactatccagtcagcggccagccgatatttcacctaccattatttcccagattcataatttcttcatacacaggttggttaatgatcgcgacctcatgctaattgacaacactattagtaccctagactcaagctccaaagctctcatcccgaccttagctaaaggctgttgtgttgtcactggaacggcatttgatctaccaatgatcctgaaaatcgatccgttattgaagcagcatcgaccaagcagtgatgatgtaaaccttgaagaactttgggcattgccaccagcttag

SEQ ID NO: 224034 - DNA, 2277 bp, Klebsiella pneumoniae
atgttaagcattcaagaaattatcaatgacgaagatccaaataaatccattggacagatattagaagatttgcatagcaaaggaccagtggataacaagttggtcgagaagttaacatattataaagaatttcatgctgaggaatttgcagagcatgaggaaaatataatatctaccttgggattgttctataaaaacaaatccccttcaaatctctactcattcattttagggacaataggaaaccagtataaaaagcaatacggtgaatatcttactcctgtacaagcaagtattcgtaatgctgttgaagaaaaacaattcatttctatatcagcgcctacaagtgcggggaaatcattttcaataaaggaatacatcagcacacaggatggcgacgctgttattatcgtaccatcgagggcattaatagcagagtacgttgaaaacttaaaaggatactttgaacatgacaaaaatgtgatgattagtacttttgtagattatgtctatactaacaggaatttaagaagaatatttgttctcacgccagaacgggctaaagatctaacaacttttagtaaaaagctaaatattaatttattcttttttgatgaagcccaagtttctgaagaacaagaacgaggtgttatattcgatgttaccgttaggcgagtacagaaaatttttccaacagcaaaactaatctttgcgcatcctttcgtagataatcccgaagctcagttcaaaaaacacaatattgacacccccgaaaaatactctcggagttatgctcataacactgtaggaaaaattttcatttatgcgcataagaatggcaatgactattatttttcaccatatatgaataagggacatttgttaaagaaagccgcacctttttcgggcagctttgaacaatttgcattttcaggtaataaatcagtccttatttatgtatcaaaagcatctgtctatgatggaaaattcatcaacaaattcaagaaatacaccgctaaattcaaaaaaatagtagatagagaagcgctgaaaataattaacagcgtaggagatatattaggcgctaataaccaagaccatagatctgtattggtagaactattgaatatcggtgtagtaattcaccatggttcagtacctttagaagttagatacttagttgagaaatttattaaagccggatttgctaggatttgttttgctaccagcacgttagcccaaggcatcaacatgccatttgatatagtctggcttgcaaatatgaagatgtatggcgagtctgaacagaaaagatgtctggcatttaaaaacttaataggtcgcagtggacgtttatcgaagaataaagaatttgactatggatatgtatatacacataatgcagagttgttatcacgccgagtcaaaacaccattcaaattagaagagaagtcagtattagagaatccagttgattcagacgatgataatcatgaactcataaaatccatcgttaatgaaacgttcaatgaagatataaaccttcccgaatccaagatcgaaagattacagaatgataacatatataaaaatatgacatttattttagataccgttttcaacgcacagtttggtagtaaactaattggccctgagaatagagtgggaagggatgaagtcaagtcttgtttcttatcgttgtatgaaacatctttagggcgagagttatatgacggtgaaagaaatgtattcaaatcagcaattgaaattatgtttcttgtaatggctggtcgaagttttaaagaaattgttggaataagatacagctacatatcagatagagatggtaataataatggtatttcaaggttttctcaaccagctaataaattacctgatagtaatctgactaggtcctactctctatttcactctgtaaactcaagggatgtaagctatgataccgttgtgtttgatacttacgactaccttgatactgtaatctcattctctcttactgatgttttcgtaggggcattcaaattatatttaaatgataccaaagatcaaagagctgctgttttcattgatttccttagatacggaacaataaataaggctcacataatgttgatgcgatatggaattcagcctgaagatgttcctttagttgctccatacttaaaattcatctccgaagaaaggattgaacttgatccggcattagaatttagtgataacgagctttggaaaaaaatcagctggtatcttccataa

SEQ ID NO: 224035 - DNA, 732 bp, Klebsiella pneumoniae
atgcctgaagaaccaaaagccatagttatagaagatactgagtgggggtgtatccactcgcagtatcactaccaagataaagatcctgcgataataacatgtatcgtaaacgtaaataatactgacttaatagctacagagcttgtgaactcagtgttgaatacatcttggatttcttctctcgatgctggtacacagcgatcatataaagttaccgcgaaagaaacgactgttgcattggttgaaatattcaataaagttcttgatggtgatcccttaggggctgagtttggtgaagttatggtttccatcggatcctctcgagcattaagtcagatattacaccacatttccctacctattgctgagttatggaaacctcaattaaaacaaaacgaggggtttgattttcatacaacatgtactggaaatcttataaacttcggagaagccaaattctcagccaccattaacccacacggaaatgcgatccgccaagcacatgactttatcacacaagataaacatttccgagatcgcgttcatttagtaaacctttgtcataaagacgcgatcaaaaatctcgatgaagaaaaatatggcatcatcgcagctttctctatcaactcagataatcctgaaataataatgaataatgcgattaaaaccgttatggaaatagagttattaaatcgcgttagttttatatatttggtgggtgtgaaatgttaa

SEQ ID NO: 224036 - DNA, 1284 bp, Klebsiella pneumoniae; identical to SEQ ID NO: 210670

SEQ ID NO: 224037 - DNA, 294 bp, Klebsiella pneumoniae
atgacggtgcgcgttgaatgggaaaccgggcagggttcatccgcgggtttcccggggtttgctgatgaggcgaaataccttgcctggaaaaaagggattgatgcccaaaaacgccagcacagccaaaccgttccgctgcccgactataacggccaggatgtgtgcggcattacggtgcactttttaccctgcgatgacgtgaaagtgaccaccagctgctggtcaccgagaaatgcgaattatccgataaaagagcccgtcaggatgaaggagcccgccgtatgtccgaaataa

SEQ ID NO: 224038 - DNA, 1365 bp, Klebsiella pneumoniae; identical to SEQ ID NO: 214942

SEQ ID NO: 224039 - DNA, 252 bp, Klebsiella pneumoniae
atgaaagttaaagtactgtccctcttggtaccggctctgctggtagcaggcgcagcaaatgcggctgaaatttataacaaagacggcaacaaattagacctgtacggtaaaattgacggtctgcactacttctctgacgacaagagcgtcgacggcgaccagacctacatgcgtgtaggcgtgaaaggcgaaacccagatcaacgaccagctgaccggttacggccagtgggaatacaacgttcacgtatag

SEQ ID NO: 224040 - DNA, 651 bp, Klebsiella pneumoniae; identical to SEQ ID NO: 209639

SEQ ID NO: 224041 - DNA, 2841 bp, Klebsiella pneumoniae; identical to SEQ ID NO: 209638

SEQ ID NO: 224042 - DNA, 1365 bp, Klebsiella pneumoniae; identical to SEQ ID NO: 209696

SEQ ID NO: 224043 - DNA, 1395 bp, Klebsiella pneumoniae; identical to SEQ ID NO: 209699

SEQ ID NO: 224044 - DNA, 258 bp, Klebsiella pneumoniae
atgccttatctgttactgacgctggcggctctgttctggggcgggaattatgttgtcgggcacgtgctggtgcagggcgtggatccgatcctgatgaccgaagcgcgctgggcgctgacggcgctgctgctgggcctgctctaccgacggcaaatcgccggcagtcgccgcctgctgcgggcaaacgcgccagcggtggtggtgctaaccctctgcggccaggtcagtttcccgctcacgctctatattggcctgtaa

SEQ ID NO: 224045 - DNA, 891 bp, Klebsiella pneumoniae; identical to SEQ ID NO: 213045

SEQ ID NO: 224046 - DNA, 1065 bp, Klebsiella pneumoniae; identical to SEQ ID NO: 209643

SEQ ID NO: 224047 - DNA, 1635 bp, Klebsiella pneumoniae; identical to SEQ ID NO: 209648

SEQ ID NO: 224048 - DNA, 267 bp, Klebsiella pneumoniae; identical to SEQ ID NO: 215002

SEQ ID NO: 224049 - DNA, 1173 bp, Klebsiella pneumoniae
atggcgcaagactaccaccacggcgtgcgcgttgtagaagttaacgacggcacccgctctatcacgacggtgagcacggcgattgtgggcatggtgtgcaccggcgatgatgccgatgcctccatgttcccgctcaataagcctgtactgcttaccgatgtactgaccgccagcggtaaagcgggcgagtccggtacgctggcccgctcactggacgcgatcgcagaccaggcaaaacccgtcaccgtagtggtgcgcgttgcccagggcgaaaccgaagcggaaaccacctcaaatattatcggcggcgtgactgccgacggtaagaaaaccggcatgaaggcgctactttccgcgcagtcgcagctgggcgtgaaaccgcgcattctcggcgtgccggggcatgatacgcaggccgtatccactgagctgctgagcgtggcgcagagcctgcgggcctttgcgtatatgtcagcttacggctgtaaaaccgtggcagaggcgatcacttaccgcgacaacttcagccagcgtgaaggaatgattatctggcctgacttcataaactttgacacggtgctgcaggcggatgcgaccgcctacgctaccgcccgcgcccttggcttgcgcgctaaaatcgacgagcaaaccggctggcacaaaaccctgtctaacgtgggcgtcaacggcgtaaccggcttgtctgcggatgtgttctgggatctgcaggacccggcaactgatgccggactgctgaaccagaacgacgtcaccaccttgatcaggaaggatggtttccgcttctggggttcccgctgcctcagtgatgatccgctgttccagtttgaaaactacacccgcaccgcgcaggtactggctgacaccatggcagagggccatatgtgggcggtggatatgccgcttaacccgtcgctggcccgcgatattatcgaaggtatccgcgccaaaatgcgcagcctggtgaatcagggctacctcatcggcggtgattgctggattgatgacagcgttaacgacaaagacagcctgaaagccgggaagctctggatcgactacgactatacgccagtgccgccgctggaaaacctgatgctgcgccagcgcatcactgaccgttacctggtggatttcaccacccgcgtaagcgcataa

SEQ ID NO: 224050 - DNA, 1521 bp, Klebsiella pneumoniae; identical to SEQ ID NO: 221211

SEQ ID NO: 224051 - DNA, 2340 bp, Klebsiella pneumoniae; identical to SEQ ID NO: 214773

SEQ ID NO: 224052 - DNA, 321 bp, Klebsiella pneumoniae; identical to SEQ ID NO: 121671

SEQ ID NO: 224053 - DNA, 261 bp, Klebsiella pneumoniae; identical to SEQ ID NO: 121670

SEQ ID NO: 224054 - DNA, 513 bp, Klebsiella pneumoniae
atgaacgttatgcgtaccaccgtcgcaacagttgtcgccgcgaccttatcgatgagcgctttctctgccttcgcagcagcaagcctgactggcgcaggcgcaactttccctgcgccggtgtatgccaaatgggctgatacctatcagaaagaaaccggcaataaagtgaactaccagggtattggttcctctggtggcgttaagcagattattgccaacaccgttgatttcggtgcttctgatgctccgctggctgatgacaaactgacccaggaaggtctgttccagttccccaccgtgattggcggcgtggtactggcggttaacctgcctggcgtgaaatccggcgaactggtgctggatggcaaaaccctcggtgatatctacctgggtaaaattaaaaaatgggatgacgaagcgatcgctaagctcaacccgggcctgaagctgccgtcgcagaacatcgccgtggtccgccgcgccgatggttcaggtacacgtataggaaattga

SEQ ID NO: 224055 - DNA, 576 bp, Klebsiella pneumoniae; identical to SEQ ID NO: 215006

SEQ ID NO: 224056 - DNA, 531 bp, Klebsiella pneumoniae
atgaaatctgcattaatcagcccgctgctggcggggctgctgctgttaaccggctgcgcacagcctgccgcacaggccggaggcggcggtggcggaacaataaaagccatcaaccacacaaaatgggcaatcaaccacttcagtatcaacggccagtcgggcatcgattcaataggcccgtttcaggggggcggaggcggctgctgcttcagcgtgcccgcccgctggacgccgggtatgacggtgcgcgttgactgggaaaccggggtgggggatatggaaggatttcctggctttggcaatgatgaaaagtaccttgcctgggctaagaaaatgaaggcccagaaccggcagcacagcaaaactgtcccgctgcccgactataacggccaggatgtgtgcggcattacggtacactttttaccctgcgatgacgtgaaggtgaccaccagctgctggtcaccgagaaatgcgaactatccgataaaagagcccgtcaggatgaaggagccggccgtctgtccgaagtag

SEQ ID NO: 224057 - DNA, 189 bp, Klebsiella pneumoniae; identical to SEQ ID NO: 214502

SEQ ID NO: 224058 - DNA, 393 bp, Klebsiella pneumoniae
atgatgctgtttcttcgaaagtatggatttttgtttatccctccagtctactggctcatctatctgggcgcccggttgacttacaatggactgacaggagagttttctgctgatttccttcagggtattcgacatgaaggcgtctatattatctgtagtctgtgtgtattttattttttctgcttagaggtggaagttggtgatggggagttctcagcgaacattctgttcctgattgttttctttcatgtggttttattatttatcactctgcttatttgtttgtggcaaggggaggtgttgttggattcgatctttatgggtcagattattgcctccatgtgtttattgttttttattccagtgctttccattataagaaggagattctag

SEQ ID NO: 224059 - DNA, 1965 bp, Klebsiella pneumoniae; identical to SEQ ID NO: 14368

SEQ ID NO: 224060 - DNA, 402 bp, Klebsiella pneumoniae; identical to SEQ ID NO: 198506

SEQ ID NO: 224061 - DNA, 2961 bp, Klebsiella pneumoniae; identical to SEQ ID NO: 223548

SEQ ID NO: 224062 - DNA, 219 bp, Klebsiella pneumoniae; identical to SEQ ID NO: 92430

SEQ ID NO: 224063 - DNA, 402 bp, Klebsiella pneumoniae; identical to SEQ ID NO: 214728

SEQ ID NO: 224064 - DNA, 231 bp, Klebsiella pneumoniae
atgtcacccggcttcagaaacgttcttcgctttgccggcgtccccgtcgacagcagcgaaccggtacgcaggcagtacggcagtcgcatgattggcattgtgacggtatgcctgctcccgctcctggtgttcgacgtcccgctgtgggttttcgtgctctcccaggtcatctggggcgcgggcgtgtatatcgggctctccgtggccggagataaaacccggagccgttga

SEQ ID NO: 224065 - DNA, 768 bp, Klebsiella pneumoniae
atgatgaaaaatgaaacccttaacacgcttattctgcgtcacggcgaccggatgctgcgccaggctggctggcccgacactgttgatatggcgcccgtcgcccctgaaaccgtacccggctggcttgccgcctgcggctctctcagtggcgtggaaatcctcacacttacggaacagctttgtcagccgctgacgtatggccgggcagcgttgttgctcgccagcgcccggcggctggcgggaaccccggctcgtctgcacctctttccggtgcaggcacatccgcatccggagcggctggctgactgtcaggttatccgcctgccttacgctcaggagtggctgacggcggcggaatgtgacgatctgctggccttcctgaaagcctccctcacgcagatatcggaaatcgtccaccgggatacgaagcgcatcgccgccgcgctgacgtcgtccgtcaatccccgtctgatggacaggcggatcggtgactggcgcttgctggccgtcgagtatgatcatgataactgcctggacgaagacgaaaccgacaggctggatcaggtcctcgatgccattcttattcgcgatgcgcgattctgcccgatcctgctcaccctggttaacgagcgggaggaaactatcaggagcgcaggggttatcgctgatcagctgcgttttacggacactccggtccggcgctggtttgatcgccgggttttaagggaaatggtgagagaggcccgcgccagcagaactcaggagtga

SEQ ID NO: 224066 - DNA, 876 bp, Klebsiella pneumoniae; identical to SEQ ID NO: 213968

SEQ ID NO: 224067 - DNA, 231 bp, Klebsiella pneumoniae; identical to SEQ ID NO: 213969

SEQ ID NO: 224068 - DNA, 2118 bp, Klebsiella pneumoniae
ttggacgttctggacgccatgctggccgttatcatccgtgacgccagaaagattgggcagaaaaaacggctccgctcgctgaaggatctggataaatctgcattggcgctcgccagcgcatgttcgtacctgctgaaagaagaaacaccggacgaatcgattcgtgctgaggtgttcagctacatcccaaggcaaaagctggctgaaatcatcacgcttgtccgtgaaattgcccggccctcagacgataattttcatgaagaaatggtggagcagtacgggcgcgttcgtcgtttcctgccccatctgctgaataccgttaaattttcatccgcacctgccggggttaccactctgaatgcctgtgactacctcagccgggagttcagctcacggcggcagttttttgacgacgcaccaacggaaattatcagtcggtcatggaaacggctggtgattaacaaggaaaaacatatcacccgcaggggatacacgctctgctttctcagtaaactgcaggatagtctgaggcggagggatgtctacgttaccggcagtaaccggtggggagatcctcgtgcaagattactacagggtgctgactggcaggcaaaccggattaaggtttatcgttctttggggcacccgacagacccgcaggaagcaataaaatctctgggccatcagcttgatagtcgttacagacaggttgctgcacgtcttggcgaaaatgaggctgtcgaactcgatgtttctggcccgaagccccggttgacaatttctcccctcgccagtcttgatgagccggacagtctgaaacgactgagcaaaatgatcagtgatctgctccctccggtggatttaacggagttgctgctcgaaattaacgcccataccggatttgctgatgagtttttccatgccagtgaagccagtgccagagttgatgatctgcccgtcagcatcagcgccgtgctgatggctgaagcctgcaatatcggtctggaaccactgatcagatcaaatgttcctgcactgacccgacaccggctgaactggacaaaagcgaactatctgcgggctgaaactatcaccagcgctaatgccagactggttgattttcaggcaacgctgccactggcacagatatggggtggaggagaagtggcatctgcagatggaatgcgctttgttacgccagtcagaacaatcaatgccggaccgaaccgcaaatactttggtaataacagagggatcacctggtacaactttgtgtccgatcagtattccggctttcatggcatcgttataccggggacgctgagggactctatctttgtgctggaaggccttctggaacaggagaccgggctgaatccaaccgaaattatgaccgatacggcaggtgccagcgatcttgtctttggccttttctggctgctgggataccagttttctccacgcctggctgatgccggtgcttcggttttctggcgaatggaccatgatgccgactatggcgtgctgaatgatattgccagagggcaatcagatccccgaaaaatagtccttcagtgggacgaaatgatccggaccgcaggctccctgaagctgggcaaagtacaggcctcagtgctggtccgttcattgctgaaaagtgaacgtccctccggactgactcaggcaatcattgaagtggggcgcatcaacaaaacgctgtatctgcttaattatattgatgatgaagattaccgccggcgcattctgacccagcttaatcggggagaaagccgtcatgcagttgccagagccatctgtcacggtcaaaaaggtgagataagaaaacgatataccgacggtcaggaagatcagttgggagctctggggctggtcactaacgccgtcgtgttatggaacactatttatatgcaggcagctctggatcatctccgggcgcagggtgaaacactgaatgatgaagatatcgcacgcctctccccgctttgccacggacatatcaatatgctcggccattattccttcacgctggcagaactggtgaccaaaggtcatctgagaccattaaaagaggcgtcagaggcagaaaacgttgcttaa

SEQ ID NO: 224069 - DNA, 231 bp, Klebsiella pneumoniae; identical to SEQ ID NO: 112534

SEQ ID NO: 224070 - DNA, 228 bp, Klebsiella pneumoniae; identical to SEQ ID NO: 213970

SEQ ID NO: 224071 - DNA, 1365 bp, Klebsiella pneumoniae
atgaaaatgtttggtataaaaaagggattttcactattggagctgatccttgctctaggcatcggcagtgcaatagctttaataaaattccaagatatgaaagttgaacaagaggatttagttgctaaaacagcaggggaacaaattaaacaattaggtgaggcagttaatggttatatcagtatgagatatgataagctatctacattgacatcaagcagtaatcaaagtagcgatccgggaccaagaacctgtaattctacaggctgtgaaattgattaccatactcttgttaatgagggattactacctgcatcatataacgggaataacatatataagtctccctataaaattatacttaaacgtgaaggaaccgcacctaactatgttattaacggtttgattacaacatcatcagcatggatcgaaggcggacacatccgttatgatcttcttggtaaagcaatgcaagttgctggtgttgacagtggtatgacaaaggatgcgacctctgttgctggattccaaagccagtggaaggaacaaaacaccgcattcaacaatattacaagagatggattacttgccttcagagtcgggtataacagctcgttatatgctatctatcttcgtcgtgatggaacattacctatgacgggtaatctaaacatgggtgggaacgatataaataatgttaaaaatattactgcatcgggaacaggtaatttcggtggtaatattactacggcaggaagtgtcactgccactggtcaggttactgctcataatgggtatggtgatactattacattcggtggcgatggcgctggcgacgattatgaaatcaggctcagcaatggtgttcgccccttaagtatctactctcctaatgctgcaaattatacaactgtattaaaagtatggaaaaatgctttgatacaacaacgcctttctaccaatggtcttgatcctaatgatttgccttcaggctggagtggtggtttaagaactaatgatgtctatgctgctggtacggttggtgctggttcaggtggtgctgttaatgcctatatgaacagcagcggtaatatatacgcttccaatgatgttaatgtcgggcatcaggttaatgctcagtatgtctgggcctcgggtaatcttaactctaactatattcattccaatggtaatattgatgctgatggcagactgaatgcaggggagttcctatatattaatgggaaagcaaatgtaggagcaaactgttcaccaaatggtttacagggcacggattcaacgggattgttgttgtcatgtgtcggtggtaaatggacaaaagcttctggtggcggtgctacgtga

SEQ ID NO: 224072 - DNA, 228 bp, Klebsiella pneumoniae; identical to SEQ ID NO: 213970

SEQ ID NO: 224073 - DNA, 231 bp, Klebsiella pneumoniae; identical to SEQ ID NO: 112534

SEQ ID NO: 224074 - DNA, 558 bp, Klebsiella pneumoniae; identical to SEQ ID NO: 7707

SEQ ID NO: 224075 - DNA, 246 bp, Klebsiella pneumoniae
atgatgcactgtccgttctgcaaaaagtcggcgcatgcccgcacctcccgctatctgtcggagaacgtcaaacagcgctatcaccagtgcaccaatattgagtgctcggcgacgtttcgcaccactgaagccattgacgaggttatccggcccccggcggagaaagcgccgcctgtcgcggacccggtcacacccccggcaccccgtaaagtgcagggctgctacagctcgccataccgtcattaa

SEQ ID NO: 224076 - DNA, 228 bp, Klebsiella pneumoniae; identical to SEQ ID NO: 213970

SEQ ID NO: 224077 - DNA, 294 bp, Klebsiella pneumoniae
atgacggtgcgcgttgaatgggaaaccgggcagggttcatccgcgggtttcccggggtttgctgatgaggcgaaataccttgcctggaaaaaagggattgatgcccaaaagaggcagcacagcaaaaccgttccgctgcccgactataacggccaggatgtgtgcggcattacggtgcactttttaccctgcgatgacgtgaaggtgaccaccagctgctggtcaccgagaaatgcgaactatccgataaaagagcccgtcaggatgaaggagccggccgtctgtccgaagtag

SEQ ID NO: 224078 - DNA, 507 bp, Klebsiella pneumoniae
atgaattcatccatcaccactccggccatctacgtgggcacgtatcaccagtacaactgcggcagtatttttggcaaatggtttgatttaaccgatttcgacgacgaagacgaattttatgacgcctgccgggcgttgcatgccgccgaggatgaccccgagtttatgtttcaggactgggaagggatcccgtctcagtttgcctctgaatcctctgttaagtgggcgtttatcgaggcattccggcaggcgcaggacgaaggacgcgccgccgcgtttgtggcctgggcggactataccggcgagtgcgactatgacgcctttgatgatgcgtattgcggcgaggctgaaagcgaggaggattttgcttatggctttgtggaggatcacggcctgttaaacgaggtgcctgaatccctgcgcgtctatttcgattatgaggcttacgcgcgggatctgttcagcagcggctatgtcttccatgaaggctatgtattcagcaactga

SEQ ID NO: 224079 - DNA, 462 bp, Klebsiella pneumoniae
atggctgccggaatgagtcgcagggagcccctgtttgacccggaggcggtgttcactcttccggccacgccatcttccctgcagctgcccctgtttgcggatgcctgtgcggcgggttttccgagtcctgccggggattacgttgagcaggagctggacttaaacagcctgtgtatccgccatccggcagccacttactttctgcgcgccagcggggaaagtatgcgagacctgggtctgtatgacggcgacattctggtagtcgaccgtgcagagaaggccgtggacggcgatgtggtgattgcggaagtggacggcgggtttacggtaaagcggctgcgtctgcatccccgccctgccctggagccgatgaatccggcttatccgacgctctggccggaagaactcacgctgttcggcgtggtgatgcacttcattcatcgtacccgcgcccgcctgtaa

SEQ ID NO: 224080 - DNA, 198 bp, Klebsiella pneumoniae
atgagctctcagaatcggcagcacagcaaaaccgttccgttgcccgactataacggccaggatgtgtgcggcattacggtgcactttttaccctgcgatgacgtgaaggtgaccaccagctgctggtcaccgagaaatgtgaactatccgataaaagagcccgtcaggatgaaggagcccgccgtatgtccgaagtag

SEQ ID NO: 224081 - DNA, 1089 bp, Klebsiella pneumoniae
atgcaagtgaaagcagccgtcacgctgggctaccagcagccttttgtcatcaaagacgtcgaggtcgccccgccggggaaggacgagatattagtgaaaattgtcgccaccggcgtctgccataccgacgccgtgatgcgcgacaaccccggggtggtgcctatgccggcgatcctcggccatgaaggcgccgggatcgttgccagcgtcggcgaggcggttagcggcatcagagtaggagaccacgtagtgctcagctacgccgcctgccaccactgcgaaaattgtttaagcaaccacccttcggcttgcgaagattttaatacgcttaattttggcggccgacgcgaggatggcaccaccccctaccggctgggagaccaggatctgtccctgttctttggccagtcgtctttcagccagtatgtggtcacccgcgccagcaacgcggtcgtggtcgacccggaggttgatctcaccctgctcggcccgctgggctgcggtatccagaccggtagcgggacggtgctcaaccgcctgaaaccggtggtcggcgaatcgctggtggtgtttggctgcggcgcggtggggctcagcgccatcatggcagcgaaattaaccggctgttcacagattatcgcggtggatatccatgccagccgcctcgccctggcgcgcgaactgggcgccacccatcagatcaacggcaaggaacaggatgccgtcgccgtgattaaacaaatcaccggtaaaggcgcccactacgcggtggaaacgaccggcgtctccgctatcgttctgcaggccgtacacgcggtgaaaccgctgggaacggtggcgattgtgggctttaccggagatatcacccttaacgtgcagaacgacctgatggcggagggaaaatcgctggtcggggtgattgaaggcgacgccgtgccggcgctgtttattccgctgttggtgcaactctataaacagggaaaattccctatcgataagcttatcgcccgctatccgttggccgatatcaaccaggccttcgccgattcggcgtccggcaaggtgatcaagccggtggtggtcatgtga

SEQ ID NO: 224082 - DNA, 624 bp, Klebsiella pneumoniae
gtgcgcggttattgtcgccttgccgacgaggcgcgtcttctcccccactgccaggtgattgccgcgcgcgggttaaccgccgatcgcgacaaagtcctgcagatctatcagagagccaccgtcagcgcctcgcgcattctccaccaggcgcaaatctacggcgatgccttcgttgagcatgcgtttgtcgaacatcgggcggaagtgtttgaccaggcaagacttgaagggaacgaagaaaacgacgtctgggtatgcgataacgcccgggtatacgggcacgcgcgcctgatcgccggtcgcggagaggatgccattcccaccgtacgctacagttcgcaggtggcagagaatgcggtgattgaaggcaactgcctgctgaagcatcgggcgatggtcggcggcgaggcgcagctgcgaggtggtccgattctgctcgacgacgatgtgctgatccaggggcggacagtcatcatcggcgatgtgatcgttgagcaccaggtctccatcaatgacgaggtgcagattgccgcacaggagggagaggccattcatctgcgcggcccgaaaacgcttgacggccagcagcacatcacccgcacgccgctgttaggcgcgctttaa

SEQ ID NO: 224083 - DNA, 3051 bp, Klebsiella pneumoniae
atggaatatttttatctgataaaagcgactcaaaaatcgcgtaaagctgatgccgtaatctggcgcactaataaatcagaagctcgcgcccttctgcagctggacgtcgatctggaagacgctgggatcgaaacaggccgcggcaaagactatcaaaaaccaattcgcaccgattttccggtattcaatgacctgccggcggaaggtgttctcgattactcatggtgcgaacgctaccagctcggcgacgatggtcgcacctgggctctgaagccaggtcaggtgcctgcggatcatcacatcgatgatgcaggagtaacctctgagaccgtggaaactttcggtagtgatgaataccaggacgattccagcgcgctttttaacgtggccgaactcccctttcgcgcgcagctgctggcgcagtacatggccgaagaacgtcacgtttatcatatcagcatgcctcaccggcaggagctgtcagctcttgaaatggacactgataacgcagccgtccaggatctgattctggccgccgagaatatccctgaaatcaaaaaatacgatatgccgacgctctggaaattcaccagcgccaataaaaaagtcttcccggaagggaaacggcatgagctcggtaagcgtatccagtttgctaagctgtggttcgccacgaacgcgatcgaccgcggcattctcaccagggaatgggctgccggtaactgcatttcttcggttttgaaaaccgatgcaggtacgaatgctggcggcggtaataaaaccgatcgcaaccctgactacacccatacccttgatacgctcgatgtagaaatagccctggccacaatgccaatggatttcgatatctacaatttcccggcatcaattcaccgccgggccaaagagatcgttcagaagaaagaaagtccgttcaaggaatggtcggcagcgctgcgcaaggttgcaggcatcctggattattcccgcgccgcgatttttgcccttattcgtggcgccaccagcgacattcatcatttcccggtaagtctgcagacctatatcaatgcgaacctgaccgagcataagcatgacgccccttctgctgagactcttgaaaaagctggtcatgtttcatctgccgccgtcactctggacgctgtgaaaaaggctatcgatggagatgaaggtgtgcctgacctggaaactctcccaactgactttcaggtaattggcaccgaactggtgaaagaagctcaaaagaaacgccctgacgctaatcaggttctggccgccgaacgtggcgaatatgtcgaaggcatcagtgaccccacggatccgaagtggataaccgaagacctgaccaaacccaaacagcctgaagtttcaatcatgggcaatggtgttttttcgattgatggtctgatggatagccagccatcaccagcaccagcaccagcactttctatcgtggaccaggcgcgccagcgcgctgcagaggaaaaattacatccagctaattccggggaaaccaacagcgatgtgcagatggaaacggctcagccggtcgaagacgaaaatgataatgcggtatcagcaggcgaaggcgctgatgagcctcctgcgcaaacaattgccgtgaacatgagcaaaatactggctgaacgctgcccggatcttaccgccgaagtgctgaaaagccaggtttccgagagtgctcatagcgatgaagagaaagaggctgaacaagcagcaccagcatggccggagtatttcgagcctggtcgatatgaaggcgtgccaaatgaggtctaccacgccgctaacggcatcagctccacgatggttaaagatgcccgggtatcgctgatgtatttcgaggcgcgccacgtatccaaaaccatccagaaggtgcgctctcctgttttggatatgggcaatctggtgcatgcactggcgctgcagcctgatcagctggaaaaagaattcagtatcgagccggaaatcccggaaggtgccttcaccacgacggcgacgatccgcgcatttatcgacgaatacaacaacgggcttccggttttgctcagcgcagaggacatcaagagattcctggaggaatacaacgcgaacctgcccgcccaggttcccttgggtacatcatttgaagaaaccggccagggttatatgtctttacctgctgagttccagcgcattgaagacggtcagaagcaaaccgccagcgcaatgaaggcctgcatcaaagaatacaacgccaccctgcccgcccaggtgaaaaccagcggtggccgcgatgtcttactggaacagctggcgcttattaatcctgacatggttgctcaggaagcacagaaggcgcagcccctgaaagtctctggtacaaaggccgatctgattcaagccgtgaaatcggtaaaaccggatgccgtgtttgccgacgagctgctggatgcatggcgcgagaacccggaaggaaaagtgctggttacccgccagcagctggctacggcactggccattcagaaagcactgttgaatcacccgaccgctggcaagttgttgacgcacccgagccgtgccgtcgaggtgagctatttcggcattgatgaggaaaccgggctggaagttcgcgtgcgccctgaccttgagatagacatgggcggcctgcgcattggtgcggacctgaaaaccatcagtatgtggaacattaagcaggaaggcctgcgcgcgaagctgcaccgggaaatcatcgagcgcgattaccacctgagcgcggctatgtactgcgaaaccgcagcccttgaccagttcttctggatattcgtcaacaaagacgagaactaccactggatcgccatcatcgaggcatccgaagaactgctggaactcggcatgctggaatatcgcaaagcaatgcgtgccatcgcgaacggtttcgacactggcgaatggccggcgccgattaccgaagactacaccgaagaacttaacgattttgatatgcgccgtctcgaagcgctgcgcgtacaggcataa

SEQ ID NO: 224084 - DNA, 156 bp, Klebsiella pneumoniae; identical to SEQ ID NO: 107789

SEQ ID NO: 224085 - DNA, 195 bp, Klebsiella pneumoniae
atgactggaagcctattcgcccttgtcctcaccgtaagcatgctgacgggcggtaatcaggatgtcctgctcggcgtttacgacagtgagaatgactgcaaggcagctgcagaagagcaacacgtgaaagctgaatgttatccactgaaaggtttactggacgagcatccggccgggttcacggtgcaaatgtag

SEQ ID NO: 224086 - DNA, 144 bp, Klebsiella pneumoniae
atggttaaaaaatatagggatgtgcaggttatagacctgctttgtatttatgaggttcagggagaagaaactccatgtgacgctgacaatcaggaagtcgtcattgaatcagcaacctacgaatggttaacaggtactttatga

SEQ ID NO: 224087 - DNA, 1074 bp, Klebsiella pneumoniae
atgcctaagtcaatttgtttttttaatcataaaggcggtgtaagcaaaacaaccacagcctttaatattggatggggtctagctagtacagggaaaaaagtaatgctggttgacttagactcacaatgcaacttaactggcatggtgctaggttacacaacagtgagtgaaagcctagacaacttttatagtagtagatacaacctaacaatggagtctatcgttgacacattgatgaatggttcctctgttgaagatcttgtgaataacgatactgcaaaactatttcagtgtcagaataataatttgtttctccttcctgggcatcttagtgtctccatgcttgactcgcaaataagcgttgcactcaagattgcatcaggcgtgccattgactcgcaacctaccaggaaacctaccaaaagtaataaatttaatagcaaaaaaaaatggcatcgattatatagtttatgatttaagcccaagtgtcggtgggttaaatgaaatagcacttatgtcaagtgattactttattgttccagcgactcctgacttcttctgttggcaagcgataaattctctttctgaaacaatcactgcatggcatgctgagttagagtttttcaaacaaacttctcgatccaatactgccgcaaatatttcaaataaacctaagttcattggcgcgatacatcagcgttacaggccacgaaatggaatgccagttaaatcgtttgaacattgggttaaagagattcacggcgcagtaaatagtgtactggctcccgctctccatcgtattggttgctcagcaaccgagcatgaaatacaaaaatctctcgatttgacagatacgtcgcatctgaaggcctatgaccttgcgcaaatatcagatttcaattctttaattgcaataagccaaaagctctcaaaaccggtttttgctatcactgatcaagatttgagagatgatgggaaggcgggtaacgtgtttgatacgatgagtgagaatagaaatcttttcctccagcaatttgaaagactttgccaacgtgtactgattttaaccgcttaa

SEQ ID NO: 224088 - DNA, 375 bp, Klebsiella pneumoniae
atggaccgtcagcgcgcagctggtggaggacaaaaatccgcctcggccagactctcgctggcgcaacaggatgtgggggtgagtatggcgaaccttcgcaaagcggcgcgcggccgcgaatgtcaggttcgtatcccgggcgtctgcaacggtaaccctgaaaccacggtattggcccatatccgcattgctggattgtgcgggaccgggattaagccgcctgatctgatcgccgctatcgcctgttcatcctgtcacgatgaaatagaccgccgcacgcgcctggtagatgcggagtatgcgaaggagtgcgcgctggagggaatggccagaacgcaggttatctggatgaaagaggggctgataaaagcatga

SEQ ID NO: 224089 - DNA, 363 bp, Klebsiella pneumoniae
atgaaccaatatcgaatttcattaccctggccaccaagcaacaaccgctactaccggcataaccgggggcgcacacacatcagcgcggaagggcaggcataccgcgacagtgtcgccagaatcatcaaagacttgatgcttgatatcggcctttccacgccactgagaatccgtattgagtgccacatgccggatcgccggcgccgtgacctggacaacctgcaaaaagctgcattcgacgccctgacgaaatcgggtttctggctcgatgaccagcaggttgactactacagcgtgaagagaatgcctgtcgtcaaaggtgggcggcttgagctaaccattaccgaaatggaggccgcatga

SEQ ID NO: 224090 - DNA, 141 bp, Klebsiella pneumoniae
atgagccgtgacgttatcgaacgcatccgcgaccgctggcaaaagcttcgcctcctgcgtagccgaggcaccgtgctggttgactacaaaatattacgcaatttcgtccgtatctataagcgcctgggagaagaagcatga

SEQ ID NO: 224091 - DNA, 690 bp, Klebsiella pneumoniae
atgacagctcaatacttggaatttgttcgccagcagctgatagtggccaccgccgatctgagcggtgcgacgaaagggcagttgattgcctttgcagagaacgcacaattcaccgctacggcgcgcagccggggaaggaagaaggtttatagcgaagtaaagcaaaaaatggttaacccggatgggccgccgatgagcggcagccagtcccgcgctaagggttcatcaatcgctctcgttctgcccgttgaatattcgacggcaagttggcgacgggctctgctgtcgctggaagaccaccagaaagcgtggctgctgtggaactacagcgataatatccgctgggaacaccaggagacgatcacccggtgggcatgggggcaattcaacgaaaagctggccggcgtgcgcattgcaaagaaaacagtcgatcgcctgcgccaacttatctggctggccgcgcaggatgtcaaagccgagctggcagggcgggaggcgtatgaatatcaggcgctggcggagctggttggtgtagcaaagtccacatggacagaaacctacctccctcattggctggcgctgcgcagcagttttgtgaagcttgatagcgacgctctcatatcggtaacgcgatcacgttcacaacaaaaggcgacaaatttagatgtaagtcttgcaaaaccgaactga

SEQ ID NO: 224092 - DNA, 3183 bp, Klebsiella pneumoniae; identical to SEQ ID NO: 216390

SEQ ID NO: 224093 - DNA, 1062 bp, Klebsiella pneumoniae
atgagcgaaccgttaaaaccgcggattgattttgatgggccgctgcaagcggagaaaattccgccgctgaaaggcgctcgcgccttcgacaccctggaggcggacaacttcgcgccagcgcggctggtgaccggcgaagaggaagagggggcggcggaagcggtggtggagtcggtcctgcgacccaaacgcagcctgtggcggcggatggtcagcgccggactggcgatcttcggcgtcagcgtcgtggcgcaaggcgtgcagtggacggctaacgcctggcagacccaggactggattgcgctgggcggctgcgtcgccggggcgctgatcgtcggagccggcgtcggttcgctggccaccgagtggcgccgtctgtggcgactgcgccagcgcgcccacgaacgcgatgaagcgcgcgatatgctgcacagtcacgcggtcggtaaagcgaaagcgttttgtgagaagctggcgcagcaggccgggctggatcagtcgcatccggcgctgcagcgctggtatgccgcgatccacgaaacgcaaagcgaccgtgaagtggtgagcctttatgcgcagctggtgcagccggtgctcgatgcccaggcgcggcgggaaatcagccgttcggcggcggagtcgacgctgatgattgccgtcagcccgctggcgctggtggatatggcgtttatcgcctggcggaacctgcggctgatcaaccgaattgccacgttgtacggcattgagctcgggtattacagccgtctgcgactgtttcgcctggtgttgctcaatatcgctttcgctggcgccagcgaactggtgcgcgaggtgggcatggactggatgtcgcaggatctggcggcccggctgtcggcgcgcgccgcgcagggcattggcgccggcctgctgaccgcccgtctcgggatcaaggcgatggagctgtgccgcccgctgccgtggatcgccgatgataaaccgcgactcggcgattttcgtcgcgagctgattgggcagttgaaagagaccctgcagaaaagcaaaacccacccggagaagtaa

SEQ ID NO: 224094 - DNA, 855 bp, Klebsiella pneumoniae; identical to SEQ ID NO: 211966

SEQ ID NO: 224095 - DNA, 912 bp, Klebsiella pneumoniae
atggagcgactgtgtcccgacgcctggctgctgaactttaccaacccgtcggggatggtgaccgaagcgatcctgcgccacagccgcatcaaagccgtcggcctgtgtaacgtgccggtgattatgcaaaaagggataaccactctgctgcaatgcgctgacgaaaaagaggtggtgatgcaggtcgccggcctgaaccactttatcttcgtgcgccagatcctgcacaaaggtaaagaatggctgccggaggtgatagccgagatcaacgccggtcgggatccgctggtgccgcgcaacattccgccgttccgttggccgtcgcatctgctgcagggcttaggcatgatcccctgcgcctatctgcgttattactacatgaaagacgatctgctgcgccaggagctggcggaggcgggcggcgaaggaacccgcggggaagtggttaagcagctggaaaaaatcttgtttgaccagtaccgcgaccctcacctggcggtcaaaccgaaggcgctggaagggcgcggcggccagtattattccgaggcggcctgcgagctgatgaatgccatctacaacgacaagcggattatcatgcacgtcaatacgcgtaataacggcgccatcaatggcctgccggatgactgcgcggtagaggtcagctcgctgattaccgcttctggtccgctacctctcaatgtggcgccgttcccggaagataccctgcgtttgctgcagctgatgaaatcatttgaacggctgactatcgaggccgcgctcaccggcaaccgccacaccgcatggcgtgctctgatgctgaatccgctgatcgtcagcggcgagaagctcgaactggcgttggatgaggtgatcgctgagaaccgtcagtggctgcctgctttccacgcctga

SEQ ID NO: 224096 - DNA, 1053 bp, Klebsiella pneumoniae
ttggcgtcgcgtcgcgcgatcgggcactggctgatattgctgctgctctctgttctcttttcctcgctgctgttacgaatacacctgccggcagcgctgctgctggggccgctgatcgccggtctcattttgagcctgcgcggggtgaagttgagcatccctcgcccctgttatctggcggcgcaggccatcgtcggctgcatgatcgcccgggcgattaatccctctgtttttggcgtgctattcaacaactgggcgctggtgctggcgatcctgttgaccaccctggcgataagcggccttaccggctggctgctggtccgctacagcgcgctgccgggcgccactggcgcctggggaagctctcccggcggcgcgtcggcaatggtggtgatggcccaggagtacggggccgatgtgcggctggtggcgctgatgcagtatctgcgggtgctgtttgtcgtcggcgcggcggcgctggtggtgcgctatgccctgggcaatgaagcacaggagatgactcaggatattgtctggtttccatcgttgaccctgaatttccctttcacgctgctgctgacggcggtggcctgttggctgggcatgcggctgcgcatcccctccggggccatgctgctgccgatgctgcttggcgccctggcccagggcggcggctggctgatgctggagctgccggagtggctgctggcgatggcctatgcggtgctgggctggacggtggggctccagtttaataaagccatttttctgctggccctcaagacgctgccgcagattatcgcctccatcatcggactgatcctgatgtgcgccctgatggcccttgccctgacccacattctgcagatggactttatgaccgcctatctggccaccagccccggcgggctggacacggtggcgattatcgccgccggcacccgggcggacatgtcgtttattatggcgctacagacgctgcggctgtttaccattttgctgaccggcccggcgatggcgcgggctatctcccgctatgcgccgcggcaataa

SEQ ID NO: 224097 - DNA, 966 bp, Klebsiella pneumoniae
atgcgtaacgtgcgagtgtatgaggaagcctggccgctccataccccttttgtgatcgcccgcggtagccgcagcgaggcaaaagtggtggtagtggaactggaagaggacggcgtgaaaggggtaggcgaatgcacaccctatccccgctatggcgagagcatcgcctcggtcatggcccaggtgatggcgatcggcgagcaactggaggcggggcttacccgcgaacagctgcagcggctgctgccggcaggcgccgcccgcaatgccattgactgcgcgctatgggatctgcaggcccggcgcgaaggcaaaaccttggcccagctgttgggcgtggcgttgcctaaccgggtgattaccgcccagacggtggtcattggcacgccggatcagatggcggccagcgccgcggcgctgtggcaggcaggggcccagctgttgaaggtgaagctcgacgatcgactgatcagtgagcggctaatcgctatccgccaggcggcgccggaggctacgctgattgttgacgccaatgagtcctggcacagcgaggggctggcggcgcgctgtcagctgctggcggacctcggtgtggcgatgcttgagcagccgctccccgccgacgacgactcggcgctggaaaacttcgttcatccgctgccgatttgcgccgacgagagctgccacacccgggagagcctgccgcggctgcgcgggcgctatgagatgatcaatatcaaactggataaaacgggcggcctgaccgaagcgctggctctggccggggaggcggaacggcaggaatttgaacggatgctgggctgtatgctctgcacctcgcgcgggatcgccgccgcgctccctctggcgccgctggcgcgcttcgctgacctcgacggcccgacatggctggcggtggacgttgagccggcgctgcggttcagcaccggcgtgcttcatctttaa

SEQ ID NO: 224098 - DNA, 201 bp, Klebsiella pneumoniae; identical to SEQ ID NO: 214892

SEQ ID NO: 224099 - DNA, 507 bp, Klebsiella pneumoniae
atgaatattgatgtcgaaacacttgtgaagcaattaggtaaaccttatcaggatatttatgatcaaggtttaattccctacaaaacaaaaccaactggtactattagtgatgatatttccaggttgaatatgaggcgagaaggaatatttttatcttttatcaataaccaagaaaaaaatcttgaagaagtgactttgcggttagaagatgaaaataaaatggattggttatttcctaatccgctgccatttggtcttgaaccagtaatgacccagaaatgggtaagggccaaacttggtcatccaatgatttacactgatgcgcagataatcatgactatttatgttggtgtgaaggaattttatactttgcctgtccctcatcaatatatcgttgctgcatttacctataacaaagatttttttgtacaaaaagtcacattttactcaattgagcgagccaaagaaatacaagccgcgttagagataaaaaggttgggtgggtaa

SEQ ID NO: 224100 - DNA, 171 bp, Klebsiella pneumoniae; identical to SEQ ID NO: 211392

SEQ ID NO: 224101 - DNA, 507 bp, Klebsiella pneumoniae; identical to SEQ ID NO: 211393

SEQ ID NO: 224102 - DNA, 510 bp, Klebsiella pneumoniae; identical to SEQ ID NO: 211394

SEQ ID NO: 224103 - DNA, 1698 bp, Klebsiella pneumoniae
atgcgtgataacgcccgtcgtctgcttacgatactgaccgtcatcctggccctgtggctggtgctgggcttctggccgctgtccatcggcaaccaggtgatcttcagtctgtgcatcctgctggcgggcggcgcggcgctctggcgtcagcgtcgccgggcagtcagccgtcagcgatcggaaatcgtcctgccgcccgaggattttcagggggcagtggttctggtctgcggggataccgacggtctgtttcccgggcgttcggcgcacggcgaaacccgtcacggctggtatctacggggagacagcgcggagcaattgccggggctggcgcagtacctggcggcggcgcgtccggcgctggtatcgcaggtttccgtgctgctggcggtggtaccggagcaccacccctccggggagcatctggcgcagtcgctgcgcgactggcggcggagtatcgttgagtgccgaacctggctaaacggtctgccgccggtgtggagcgtgttctgggtgacgccgccaggcggccaggcagggcaaagccgctggtttaccatcacgccggagaggcctgggctccaggtgcagcagaagggacaagcgccccagtcggttgccgggtggcagcgggagggcagccctgcctcacgcctgcatcagacgctgtggctggagagcatcctgaccttggccgaaaacgctctgttccggccattccgcgcccggcaggcggaacttcctccgctgaacctgtgtgccgcgggcatctgcctgacaccggtggcggcggtggcgaataacctctggcaacagcaaatcgccgcgatcaccacgctctccccgggcaacgacgcggcgccaggtcctcacccgctgccggatcttcttctgtcgtcactgccgcaccgccacggggtcagccgccggatgcgcgatgccggtcttgccgctggggtgggcttcctctttctggcgctggcgatgctggcttcctttatcaacaaccagcgcctggtgcgcagcgtcggcgatcatctggcggtgtatcaccgcctcagcggcacgccgccgacgccgaagctgcaggcgcagcagcgtctgcgtgccgacagccgcctgctggatgactggttgcgccggggggagccgctgcgttatcggctggggctgtatcagggggggcggctgatccccttcgttgaagccgctatcaatgactgggcgccgcccccgccgccgcgtccggtcatcaagcaggttgtgcaggggccgcagacgatccgcctcgatagcatggcgctgttcgataccggcaaatcgacgctgaaaccgggttcgacaaagctgctggtgaactcgctgctgggcattaaggccaaacccggctggctgatcgtggtggcaggccataccgacagcatcggcaacgatagatccaatcaacaactctccctgaagcgtgccgaggcggtccgcgactggatgcgcgataccggcgatgtgccggagagctgttttgcggtgcagggctacggcgcaagtcgtcctgtcgccagcaacgagacgccagaggggcgggcgcaaaatcgccgggtggagatcagtctggtcccgcagaaggacgcctgtctggcgccgggcacggccaatacctcaggagcagagactaacggattaaaaagcgaaaccgagtaa

SEQ ID NO: 224104 - DNA, 654 bp, Klebsiella pneumoniae
atgaatacctctgaaagcgatctgatcaacaaaaccttttacccgggctggctgatggtcagccagttacgctgcggccagccggtgaccgatggcgaggcgctctatcgccaggcctgtcgatgggtgaccgaggcgcgcgaggcgctgacggcggggggagtcagtgaagccagcgctgagcagatgctctatgcctactgcgcgctgctcgatgagagcgtcctcaaccgcgccagtcaggatgatggctaccgcaggtggcgcaaggatccgctgcaggcgcgctttttcagcactctcaacgccggggaagagctctgggaacggatccgccagctgctgcgagagcccacggcggatgcggcagtgctgacctgcttctttcgtactttacagctgggatttgtcggacagtaccgcgccgaggatgacgaacggcgtgaggacgtggcgcaagcgcttggcgcgcgggtcccgccgttcagcctgacccaggaggcgccggtggtggttcgtgcctcccggctgcgcagcggacggcggatgtactggtgcggctgggcggctggcattgtggcgctggcggcgctgtggttgaccttctcctccgtgctgtcacagatggtggcgcagatagcagggcagggataa

SEQ ID NO: 224105 - DNA, 1341 bp, Klebsiella pneumoniae
atgaagattttccgcccattatggcgcgacggggcttttctggtcccgcagcagtttcagcaacaggcccgctgggacgcgcacgtcgccgatacggtctcccgcatggctctcgcccacccgtggggggtattgcgcgcggagtttgacgcgagcgcgctcaccctttcccggctcaacgctacccggctgatcgtgcgtttcgccgacggaacgctgattgacaccgagctggcggatattttgccaccggtccgcgatgtatcggacgtgatgcaggacagcgtggaggttctgctcgctctgccgctgctcagcgccagcggcggcaatcttgatgacggccaggagagcgcccgcccgcgccgctggcgcgccgagcaggtgaccgtccaggagctggccggccatgaacgcagcgagctggccgttctgcggcacgcgctaacgctgcgtctctccaccgaggaaaatgcagcctttctcacctgcccggtagcgcgtctggtgcgcgacgcccaggggcagtggatcgttgacccggaattcatcccgccgctgctgtcgctggcggcaagcccgacgctggtcagcgagctgggcgagctgttatatcgcctgcaggcccgacgcagacgcctgatggccatgcgtcgtgaaagcaatgcgcggatggctgattttgccgtggcggatgtttccctgttctggctgctcaacgcgctgaacagcgctgaaccggtgctcagcgagctgcatcaggacccttcgcgccatccggagctgctctatcgcgaactggccaggctggccggcagtctgctgactttctcccttgaacatcatctggaagcaatcccccgctaccggcatgcctcgccagagcaggtattcccaccgctgtttgccctgctggatacgctgctcgaagtcagcctgccctcaagggtgatcgccatcgctctggagcagggcgccgaccgggagatctggcggggcaggctgcacgatgcgcggctgcgcgagggggcggatttttatctgtcggtgcgctcttcactcccccctcaccagctacagagccgctttccgcagctctgtaaggcgggtagccatgatgatgtcgccgaggtcgtcaatattgccctcagcggcatcgcgatcaaaccgctgagccatgtgccggcggccattccgctacgtctggaaaaccaatatttcgctctggatctctccaccgacgccgcccgcacgatgctggaggccggcaactgcaccttctataccccggaatcgcttggcgacgtgaaacttgaactctttgcggtactgcgctcatga

SEQ ID NO: 224106 - DNA, 330 bp, Klebsiella pneumoniae
atgaaaccgctatttgtctatgggacgctctgtcccggtcgcagcaatgcgcatattctggaggcgatcgggggcgagtggcgtcccggctacgtcaccggcaccttttacgcgcgcggctggggcgcagccgccgatttcccggggatcgtcctcgacgctcacggcccacgggtcaacggctatctgttcctgtccgatcggctggcggcgcactggcccatgctggacgactttgaggaggggtacgatcgggtgccggtggaagtgaccaccgacgatggacagcagatcagcgcctggatttatcagcttcagccccgggggtaa

SEQ ID NO: 224107 - DNA, 540 bp, Klebsiella pneumoniae
atgacaaaactcaccttacaagagcagatgctcaaagccggcctggtcagcagcaaaaaaatggctaaagtccagagaacggcgaaaaaatcccgcgttcaggcccgtgaggcccgggaagcggtggaagaaaataaaaaagcccagctggagcgtgataaacagcttagcgagcagcaaaagcaggcggtgctggcgaaagagtataaagcccaggtaaagcagctgatcgagatgaaccgcattacggtcgcccggggcgatatcggctttaactttaccgataataatctgatcaaaaaaatcatggtcgacaagcccacccagacccagctgattaacggccgtctggcgattgcccgcctggcggtggataacaagcccgaaggtgaatatgcgattattccggcggtagtggctgagaaaattgcccagcgcgacgccagcagcatcgtgttgcacagcgccctgagtcaggatgagcaggatgaagacgatccgtacgccgactttaaggtgcccgacgatctgatgtggtaa

SEQ ID NO: 224108 - DNA, 699 bp, Klebsiella pneumoniae
atgtccaccattatcgatacctttgtcgcgccgccgtgtcgcgaacagatcaccctcttgtatcaggacgaacacctggtgctgatcaataagcccgccgggctgctgagcctgtcgggcaaagatccgcgcaacctcgactccgtgcatcaccggctggtacagcgctttccgggctgcaccctggtgcaccgcctggacttcggcacctccggcctgatggtgatcgcccgcaacaagggcattaacgccttgctgtgccaacagttcagccagcgcacggtggacaaggtctatacggcgctgttgtgcggccatctggcggaagatgaggggatagtggaggcggcaatcgccaaagatccggcccgtttcccgcgcatggcgctctgcgcccgccacggcaaaccggcgcgttcgcgctatcgggtcatagaccgcctgtatcaggcgcgagaaggcgagagggcgctggcgttaacccgggtgacgctcaccccggagaccggacggacccatcagctgcgtattcactgccagctgctgggctatccgatccttggctgcgatctgtacggtggccgggagctgcccggcacggaacaggctccgcggctgatgctgcacgccagcgaactgcgctttgtccaccccgtcagccatgagccgatgcatatccagcaggcgagcccgttttga

SEQ ID NO: 224109 - DNA, 483 bp, Klebsiella pneumoniae
atggcgatgaacggaacaatcacaacgtggtttaaagataaaggttttggatttatcaaagatgaaaacggcgaaaatcgttattttcacgtgattaaggtcgccaatcctgatcttatcaagaaagacgcggcggtgactttcgaacctaccaccaacaataaagggctgtcggcctacgcggtgaaggtcattccggaaagcaaatatatctatattgccggcgagcggttgaagctgacctccatcaaatcctatgtggtgtaccgggaagaagagccggtcgagacccgcgtcgataaagaaaacgccgtgctgtcggtcgggctgctgatgaacagcatccggccaaaagccacggtgcagccgggagagatgcgctcggtgaaaaagctggcgatcaccacctttcaggggacaaccctgattttttcggaagacgaaatcgatatcgatgccacggtaaaactgcttaaggtgtaa

SEQ ID NO: 224110 - DNA, 900 bp, Klebsiella pneumoniae
atgcccgtaaattttgacttcaacgatctctacgcctttcgcgccctgatggaatatggcagttttcggctggcggccgaatccatctgcctgtcgcagtcggcccttagccgacgcatcgaaaagctggagacggcgctgggcaaccggctgttcgatcgcaccacccggcgggtgaccctcacgctgtatgggcaaaattttgccgaacgttcggagcagctgctggcccatgtcgagacggtgctggcggatatcagccaggtcagcaaggcgcgcaccgggctggtgacggtggcgacagtgccttccgccgcctactactttatgccggaaatcatccgcagctttcaggcgcgttatccccaggtgcgcatccggttgattgacagcagcgtcgggaatgtgatcgaggcggtcagcagcggacaggctgactttggcctctgctttgccaaaaacctgccagccagtatcgaattcacccctcttgccgacgaccgctatgtggccgcctgtcggcacgatcatccgctggcgcgcaagacgcacctaagctggcaggcgtattttgaacaggattatattggcctggatcgggtctccggcaaccggacgctgcttgaccgggagctggcgcatctgacgccggcgcggccaagtatctgcgaaacccgccacgtcaccacgatgctggggatggtggaagcgggcatcggcattgccgccgtgcccgcgatgtcgatgcccgccggggagcattccgttctccgcgctgtgccgctcaccgacccggtggtcacgcgtacggtaggcctgatccgcctcagcggccgtattcagtcctacgtggcggcagagctggagaagctgattattgaacagtatccttctggctga

SEQ ID NO: 224111 - DNA, 807 bp, Klebsiella pneumoniae
atgcgtaaaacgacaggaaccctgctagccacgctgctgctggccgccaccggcggcagcgcgttgtccgctgaggtcaccgtgatgatctccggcggcttcaaagcggcgctggaaaagctggccccggcgtgggaaaaacaaaccggcaaccacctcgtggtgatccctggcccgtcgatgggaaaaacgccgcaggcgatccctaaccgtctggcgcgcggcgaacacgcggacgtggtgatcatggtcggggacgtgctgaccagcctcgagaaagcgggccgtacgcaaccggattcgcgccgggagctggccgactcgccgatcggcgtggtggtgaaggcgggggcgccgctgccggctatccacaacgcagaccagctgcgggcgacgctgctggcggcgccatcggtcgcgtactccgacagcgccagcggacgctatgtcagctcgacgctgttccacaccttgggcattgatgacgcgatgcagagtaaagcgcagatggtggagcgcattccggtggcctcggaagtggccaagggacggtatgcgatcggttttcagcaggtgagcgaactgctgccggtgcccggcgtaaccttcgtcggcgaactgccggataacctgcagtacatcacccgctttgccggggcggtgaccatcagcgccgaccacccgcaggaaggcaaggcgctgctgacgtatctggcgtcaccggcggcgcaggagaccatccacgccaccggtatgcgaagcgtagccgccgccgcgccggtcagccagaaggatactgttcaataa

SEQ ID NO: 224112 - DNA, 1296 bp, Klebsiella pneumoniae
atgcattcaacaacctcacagatgagtacccgtgaccggatcggcgccattctgcgcgtcacgtccggtaactttctcgaacagttcgactttttcctgttcgggttttatgccacctacatcgcccataccttttttccggcgagcagtgaattcgcctcgctgatgatgaccttcgcagtctttggcgccggctttttgatgcgccccatcggcgctatcgtacttggcgcctatatcgacaaggtggggcggcgcaaggggctgatcgtcaccctgtcgatcatggccaccggcaccttcctgatcgtgctgatcccctcttatcagaccattggcctgtgggcgccgctgctggtgctgatcggccgtctgctgcagggcttttccgcaggcgccgagctgggcggggtgtcggtctatctggccgagatcgccacctcgggccgcaaaggcttttacaccagctggcagtcgggcagtcagcaggttgccatcatggtggcagccgcgatgggctttgccctcaacgcggtactggagccgagcgctatcagcgactggggctggcgtattccgttccttttcggctgcctgattgttccgttcatttttatcctgcgccgtaagctggaggagacccaggagtttactgcccgccgccatcatctggcgatgcgccaggtattcgccaccctgctggcgaactggcaggtggttatcgccgggatgatgatggtggcgatgaccaccaccgcgttctacctgatcaccgtctatgccccgacctttggtaaaaaggtgctgatgctcagcgcctctgacagcctgctggtcacgctgctggtggcgatttccaacttcttctggctgccggtgggcggggcgctgtccgaccgctttggccgccgatcggtgctgatcgccatgaccctgctggcgctggctaccgcctggcctgcgctgaccatgctggcgaacgccccgagctttttgatgatgctgagcgtgctgctgtggctgtcgtttatttacggcatgtacaacggggcgatgatcccggcgctgaccgaaattatgcccgccgaagtgcgcgtggcaggtttctcgctggcctacagcctggcgaccgcggtgtttggcggcttcacgccggtgatttccacggcgctgattgagtataccggtgataaagcgtctcccggctactggatgagctttgccgccatctgcggtctgctggccacttgctacctctatcgccgtagcgccgttgcgctgcagacggcacgttaa

SEQ ID NO: 224113 - DNA, 927 bp, Klebsiella pneumoniae
atgaatattatgcatcctgtcctgcgccggattgacctcaacctgttgccggtctttgacgcggtctatcgctcccgctcggtacgcctggcggcggaagagctggcgatgagcacctcggcgctgagccatgcgctttcccggctgcgcagcgccctcaacgatccgctgttctaccgcgaaggccaccggatgtgccccagcgtctatgccagccagctggcgccctctatcgcttcggcgctgaagtttctcaaccaggagctgacgccgccggcggcgtttgtgccggccgccagcaccgactgcatgcagattgcgatcaccgatttcaccgcgttctgcgtctttccgacgctgatgcatcacctgcagcgtgaggcgcccgggctgcggtttgagctccgttatctgccccacagccctgcgctgaccgagctgctggcgggcgaggtcgacctggccctcgggttcaatacccctgacgagccagcccatcccgatcttgaggagattaactggctgcgggacgaatatgtggtcatcagccaggccaaccggacggcgctgaccctggacgcctaccttgcggcccgtcatctggtggtgaccccgtggaatgagcggcagggggtgctggactgtgagctggagcggcagggctattcgcggcaggtggcgatgaaaaccccctcgatgctgagcgcgccctttattattgagcagagcgacctgttgatggcgctgccccggcgggcggcggagacgatggcccgcgccgcccggctgaccattttcccgctgccgtttccggttccgccgtttgacgtcaagatttacgcccaccaacgcagcgggaaacgcgaggctacccgctggcttatctccctgttgcagacgctggtgggggagtccaccgcttcctga

SEQ ID NO: 224114 - DNA, 477 bp, Klebsiella pneumoniae
atgagcatcacaatccgccaggccaccccggacgacgccaccgctatctacgacatgatttatgaactcgcggtctacgagaaagcccccgaagaggtagtgacgacgccagaggagatcagagagacactgtttgccagcggcagcaaaaccgaagcgctgatctgcgaggtggcgggcaaagcggtgggctacgcggtgttcttcaccagctactccacctggcttggacgcaatggtatctatatggaggatctgtacgtcacccccgactatcgcgggatcggcgccggaaaagcgctgctgaaaaccatcgcgcaatatgctgtacaacgtcagtgcgggcgtctggagtggagcgtgctcgactggaaccagccggcgattgatttctatctgagcattggcgcgctgccgcaggatgagtgggtgcgttatcgcctcactggcgatgcgctgcgggcctttgcggagtaa

SEQ ID NO: 224115 - DNA, 1644 bp, Klebsiella pneumoniae
atgtcacaacaaattgaatcagtaaaaatggctctgcaggagctggggattaatgcaagcggcgaattcttttacaaccctgattacgatttgcttattgcacatgaaacctctcctgagctgaccggcgcggcccgcggcgtgatgaccgactctggcgctgtggctgttgataccgggatcttcaccggccgttcgccgcgcgataaatacatcgtccgcgacgaacagactcgcgacaccgtctggtgggcagactccggcctcggccgtaatgacaataagccgttatcgccagacgtgtggcgcagcctgaaaagcctggtcgcgggccagctgagcggcaaaaaactgtacgtcatcgacgcctggtgcggcgccagcccggacacccgtcttggcgtacgcttcgtcaccgaggtggcgtggcaggcccactttgtcaaaaacatgttcatcgtgccaagcgccgacgagctggccagctttacgccagacttcgtggtgctcaacggcgcgggctgcaccaatgccaactggcaggcgcaggggatgaactccgagaactttgtcgcctttaatctgagcgagcgtattcagctcatcggcggtacctggtacggcggcgaaatgaagaaagggctgttctcggtcatgaactacctgctgccgcagaaaggcatcgcgtcgatgcactgctcggccaaccgtggcgaagcaggggacgtggcgctgttcttcggcctctccgggaccgggaaaaccaccctgtcgaccgatccgcatcgtcagctgatcggcgatgatgagcacggctgggacgatgacggcgtgtttaacttcgaaggcggctgctacgctaagaccatcaatctcgatccgcaggcggagccggagatttatggcgccatccgccgcaatgcgctgctggaaaacgtggtggtgcgcgctgacggcagcgtggattatgccgacggcagcaaaaccgaaaacacccgcgtctcctatccgctgtcgcatatcgacaatatcgtcaagccggtgtcccgcgcgggccatccgtcgaaggtgattttccttgccgccgatgcgtttggcgtcctgccgccggtctcccgtctgaccaccgagcagatgcagtaccatttcctgtcgggtttcacctcgaagctggcgggcaccgagcgcggcattacccagccgacgccgaccttctccgcctgctatggcgcggcgttcctgctgcttcacccgacccagtacgccagcgtcctggcggcgaagatggcggaatccggtgccgaagcctggctggtcaacaccggctggaacggcgaaggcaaacgcctgtcgctgcgcgatacccgcagcatcattagcgcgatcctcaacggcactaccggcccgctgcgcgaggagaccatcccggtgttcggtcttgcgatcccgcagagcattccaggggtagacagcgcggtgctggatccgcgtaatggctggagttcagcggataaatggcaggagaaggccgagagcctggctcagctgtttatggataacttcaagcagtacagcgataccgaagcgggcgcgcgtctggcgctggccggtccgcagctgcagaagagcgcggtcgaagcctga

SEQ ID NO: 224116 - DNA, 894 bp, Klebsiella pneumoniae
gtgttggcaaatctggaagtaaaatggctgtatgatgtgattgcccttgaggagtcgcgcagctttaccctggcggccaaagcccgcaacatctctcagtcttcgttcagccgacgcatccagtcgctggaggcttccctcggattcagcatcttcgatcgtagcgccaaccctctgcagctgaccaaccgcgggaaaatttttgtcggctatgcgcgaaatatgctcgatgacatggattttcagatcagccgtattaaaggcttaaataacactacccagaaaataagaatcgacgccgccccttcgctgtcggtgttattactgccggagatcatcgccggttacaccgaccgtaaaaataagacttttcatgttgaatcgattaacgtcaacgacgccgtatttaacctgaaagagggaaaaagcgattttatcctctccttctataatgaagaattaatgaactatccgtttattaatcataaaatttttgattcttacctgcacctggtctccccctgcgacgaacatggccggccgctgtttcatttacatcgcggcgtgctgccgctgatgaaatacgccaacgacagctatatggggcgccaggtgaaccaggtgatcgaccgcacgccggagatcaccttctctctcacctttgtttcttccatgagcgagctgctcaagcgcatgatcctcaatggcgacggcgtgggctggctgccgcaatactctattcagcgcgagctggacgaaggccggctgacgatcctcgatgagagcctgtcgctgccgatcggcgcctggctctaccgctccggctcgcggcttaaccaggccgccgaacgtttctggcagcacattaaaacccgtaacgaaccgcgggaataa

SEQ ID NO: 224117 - DNA, 1287 bp, Klebsiella pneumoniae
atgggtgaaattacgcgccagcctgcgcgggctatccaaaacgcgctgatcgacagcgtactggccggcctttgcgcgttaattgtctttggcccgatcgtcggcgtggtgctcaaagggtatggttttaccctcgcgcctgcgcgggtggcgattctggtggcggtggtgatggccggcaggctggcgctcagtctgctgctgcagagccacaggggaaaagcctttattgcccgctttgagggggcggatgacggggtgaacgtccggccgccgggctaccgctcgcggctgcgctggataataccgctgctggtggggctggccattgtctttccgtttctcgccacaaaatatctgctgaccgtggccattcttgggctgatctacgttctgcttggcctggggttgaatattgtggtgggcctcgcgggcctgctcgatctgggctatgtggcgttttacgccatcggcgcctacggcctggcgctgggctaccagtacctgggacttggcttctgggcgatgctgccgctgggggcggtgatggcggctctcgccggggcgttgctgggctttccggtgctgcgtatgcatggcgactatctggccatcgtcaccctcggctttggcgaaattatccgcctggtgcttaacaactgggtgagcttcaccggcggccctaacggcgtaccggtgccatcccccacgctgtttggcctcgagtttacccgccgggccaaggatggcggcatccccatccatgagtttttccacgtcagctacaaccccaacctgaaattcatctttctctacgccgtgctgtgcctggtggtgatgctggtgctgctggtgaagcatcgcctgacgcggatgcccatcggccgcgcctgggaggcgctgcgagaggatgagatcgcctgtcgggcgatggggctcaatcacgtgctggtgaagctctcggcgtttatgctcggcgcgtcgacggccgggatcgccggggtgttcttcgccagctatcaggggtttgttaacccgacgtcgttcaccttttttgagtcggcgctgatcctggcgattgtggtgctcgggggaatgggctccaccctgggagtggtactggcggcgtttgttctgacggtcaccccggaactgctgcgcggttttgacgaatatcgggtgctgctgttcggcgtgctgatggtgatgatgatgatctggcggccgcgcggcctggtgcgcaccagccgcagcggggttgcgttgcgaaaaggagtcgcgccatga

SEQ ID NO: 224118 - DNA, 915 bp, Klebsiella pneumoniae
atgacggcgttttttctgcaacaactgatcaatgggctgacgctgggcgcagtgtacggcttaatcgccatcggctacaccatggtgtatgggatcatcggcatgatcaacttcgcccacggcgaggtgtatatggtctccgcctacctgtgcgccatcggcctggcgctgctctctttcttcgggatccactcctttccgctgctgattttcgccaccctggtgttcaccatcgtggtcaccggcgtatacggctgggcgatcgagcgcatcgcctaccggccgctgcgcaactcgacgcggctggcgccgctgatctcggctatcgggatgtcgctgatcctgcagaactatgtccagctgagccaggggccgaaccagcaggggatcccgacgctgcttagcggcgcgttgcgcatgacggtgggcgatggggtggtgcagatcacctggaccaaggtgtttattctcgtcgcggcgctggtggggatgcttatcctgacctggattattcagtatacccggctggggcgcatctgccgcgccacccagcaggaccggcgcatggcggcgatccttggcatcaataccgaccgggtgatctccctggtgtttgtcatcggcgcggcgatggccggtctggccggcgtgctggtgaccatgaactacggcaccttcgacttctatatcggatttattatcggcatcaaagccttcaccgccgcggtgctgggcgggatcggctcgctgcctggcgcgatgctgggtggtctgctgcttggggtggccgaagcccagttcgccgggctggtgaattcggattacaaagatgtcttttcctttgcgctgctggtggcgatcctgatttttcgcccgcaggggctgctgggacgtccgctggtggccaaggtctaa

SEQ ID NO: 224119 - DNA, 1065 bp, Klebsiella pneumoniae
atgagcatggccttttacgcccaggcagacgtgaagatcggcgtcgccgggccctttaccggccccaacgccacctacggcgcccagtactggaagggagcctcgcaggcggtggtcgatatcaatgccgccggcggcatcaaaggcgaaaagattgtgctggtgcagggggatgacgcgtgcgaaccgaagcaggcggtggcggtggccaaccggctggtggatgaagcgaaagtctccgccgtggtggggcacttttgctcttcctcaacgatgccggcctccgaggtatatgacgaagccgggatcctgaccattacccccggctcgaccaacccgcagatcaccgagcgcggcatgaaagatctcttccgcatgtgtggtcgtgacgatcagcagggggcgatcgccgccaactatatgctggacgtgctgaaggcgaagaaaatcgccgtcatccacgataaagacacctatggtcaggggctggccgatgccacccgcgcggcgctggcgaagcggggtaccaaagaagtgttgtacgaaggcctttcccgcggtgaaaaagactttaacgccctggtgaccaagatcggcgccctcaagccggacgtggtctactttggcggctgccatccggaagcgggcccgctggtgcgccagatgcgcgagcagggggtgcaggccaaattcttctccggcgactgtatcgtcaccgaggagctggtcacggccgccggcgggccgcagttcaccaacggcgtgctgatgacctttggtcaggatccgcgcaccctcccggacggcaaagcggtgatcgagaagttccgcgccagcggctttgagccggaaggttataccctctacgcctacgcctccattcaggctatcgccgcggcctggaacgccgtcggtaccgataacgccaaagccagcgactggctgaagagccacgacgtcgagacggtgatgggcaagaaagcctgggatggcaaaggcgacctcaaggtgtccgactacgtggtctatcagtgggacgacaagggcaaatatcaccagctctga

SEQ ID NO: 224120 - DNA, 2295 bp, Klebsiella pneumoniae
atgaaagtagatatcgatacccaggatgtacgatacgccgacgcctggctgggctttcgcggtacggcgtggcaaacgcagatcgacgttcgcgactttattcagcataactacaccccttacgagggcgatgagtctttcctcgccgacgcgacgccagcgaccaccgccctctgggagcaggtgatggccgggatccgcgtcgagaacgccacccatgcgccggtggatttcgacaccaatgtcgccacctccatcaccgcccacgcggcgggctatatcaaccagccgctggaaaagatcgtcggcctgcaaacggaccagccgctgaagcgcgccctgcatccttttggcggcatcaagatgatcaaaagcgccttcgaggcctatggtcgcgaaatggatcctgactttgagtatcagtttacggcgctgcgtaagacccacaatcagggcgtttttgacgtctattccccggatatgctgcgctgccgcaaatccggggtgctgaccgggctaccggacggctatggccgcggacggatcatcggcgattaccgccgcgtggcgctgtacggcattcgctacctggtccgcgaacgtgagctgcagtttgccgacctgcagccggcccttgagcgcggcgaggcgctggaggccaccctgcgcctgcgcgaagagctggccgaacagcggcgcgcgctgctgcagatgcaggagatggcggcccgctacggctgcgatatcgcccacccggcgcgcactgcccgagaggcggtgcagtggctctacttcgcctacctggcggcggtgaagtcgcagaacggcggcgccatgtcgctggggcgcacggccaccttcctcgacatctatatcgaacgcgatctgcgcgccggtttattgaatgaggagcaggcccaggagctcattgaccacttcatcatgaagatccgcatggtgcgtttcctgcgcaccccggaatttgattcgctgttctccggggatcccatctgggcgacggaggtgctgggcggcatggggctggatggtcgcaccctggtcagcaaaaccaccttccgctatctgcatactctgcacaccatgggcccggcgccggagccgaacctgaccgtgctctggtcgcaagcgctgccggcggcgtttaaaaaatatgccgcccgggtctctatcgccacctcgtcgctgcagtatgagaacgacgatctgatgcgcagcgattttcacagcgacgactacgccatcgcctgctgcgtcagcccgatggtgatcggcaagcagatgcagttcttcggcgcccgcgccaatctcgccaaaacgctgctctacgcgattaacggcggggtggatgagaaactgaagatccaggtggggccgaaaaccgaccctctgcgtgatgaggtgctggactacgacaccgtgatggccagcctcgaccactttatggactggctggcggtgcagtacatcagcgcgctgaacatcatccattgcatgcatgataagtacagctacgaggcggcgctgatggccctgcacgaccgcgacgtctaccgcacgatggcctgcggcatcgccggcctgtcggtggcggcggattcgttgtcggcgataaagtacgcccgggtgaagccggtgcgcgatcaccacgggctggcggtggactttgtcattgaaggcgactatccgcagtacggcaacaacgacgatcgggttgatgccatcgcctgcgacctggtggagcgctttatgcgcaaaattcaggcgctccccacctggcgtcaggcggtgccgacccagtcgatcctgaccatcacctccaacgtggtatacggccagaaaaccggcaacaccccggacggacgtcgggcggggacgccgttcgctccgggggccaatccgatgcatggccgcgaccggaaaggggcggtggcgtcgctgacctcggtggcgaaactgccgtttacctacgccaaagatggcatctcgtataccttctccatcgtgccggcggcgctcggcaaagccccgtcagctcaggaaaacaacctggtgggcctgctggatggctacttccaccacgaggagacggtggaggggggacagcatctcaacgtcaatgtgctgaaccgggaaaagctgctcgatgcgatagaacacccggagcagtatccgaatctgacgatccgcgtctccggctatgcggtccgctttaacgcgctgacccgcgaacagcagcaggatgtgatctcccgaacgttcaccagccaactctga

SEQ ID NO: 224121 - DNA, 1209 bp, Klebsiella pneumoniae
atgactgaatttccggtagtactggtgattaactgcggctcgtcgtcaatcaaattttccgtcctggacgccgccagctgcgactgcctgctcaacggcgtggccgagggcatcaacgcggaacgggcgtctctctcgctcaacggcggcgagccggtggcgctggcgcagcgcggctacgaaggcgccctgcaggcgattgccggggcattagcccaacgcgacctcatcgacagcgtggccctgattggccaccgcgtcgcccacggcggcgacctgttcaccgagtcggtcattattagcgaggaggttatcaataacattcgccaggtatcgtccctggccccgctgcataactacgccagtctcagcggcatcgcctcggcgcagcggctgttcccggaggtgatgcaggtggcggtctttgataccagctttcaccagaccctggccccggaagcttttctctatggtctgccgtgggagtattaccagaatctcggggtacgccgctacggtttccacggcacctcgcaccgctatgtgtcccagcgcgccctggcgctgctcgggttgccggagcaggagagcggcctggtgatcgcccacctgggcaatggcgcctcgatctgcgcggtgcgtaacggccgcagcgtggacacctcgatggggatgacgccgctggaggggctgatgatgggcacccgcagcggtgatgtcgacttcggcgccatggcgtggattgccggggaaacccggcagaccctcagcgacctggagcgggtggccaacaccgcctccggcctgctggggatctccggtctttcctccgacctgcgggtgctggagcaggcgtggcatgagggccatgcccgcgcccgcctggcgattaaaacctttgtccatcgtatcgcccgccatattgccggccacgccgcggcgctgcagcgtctcgacggcattattttcaccggcgggattggcgagaactcggtgctgatccgtcggctggtgagcgagcggctgacggtctttggccttgcgatggacgccgcccgcaatcagcagcccaattcggccggcgagcgcctgatctccgccgacggcagccgggtgcgctgcgcggttattcctaccaatgaagagcgcatgattgccctcgatgcgatccgcttaggccggatccacaccgcggcggcgctggcctga

SEQ ID NO: 224122 - DNA, 1332 bp, Klebsiella pneumoniae
atgagtacgactgagagcattgcatccagccagacaagcctttcgtcctggcgtaaatctgacaccacctggaccctgggcctgtttggcaccgctatcggcgccggggtgctgtttttcccgatccgcgccggcttcggcgggctgatcccgatcctggtgatgctggtgctggcctatcccatcgccttttattgccatcgggcgctggcccggctatgcctgtcgggggctaacccctccggcaatatcaccgaaacggtggaagagcattttggcaaaaccggcggggtggtgatcacctttctgtacttcttcgccatctgcccactgctgtggatttatggcgtcacgatcaccaatacctttatgactttctgggagaaccagctgcagatgccggctctcaaccgcggggtggtggcgctgctcctgctgctgctgatggcgtttgtcatctggtttggtaaagacctgatggtcaaggtgatgagctatctggtgtggccgtttatcgccagcctggtggtgatctccctgtccctgatcccctactggaatagcgcggtgattgaccaggtcaacctcagcgatatcgccttaaccggtcacgacggcattctggtgacggtatggctgggcatctccatcatggtgttctccttcaacttctcgccgatcgtctcctcgtttgtggtctccaaacgcgaagagtatgaagcgcagtttggccgcgagtataccgaacgcaaatgctcacagatcatctcccgggccagcatgctgatggtggcggtggtgatgttcttcgccttcagctgcctgtttaccctctcaccgcagaacatggcggacgccaaggcgcagaatatcccggtgctctcctatctggcgaaccactttgcctcgatgtcgggcaccaaatccacctttgccaccctgctggagtatggcgcgtcgatcatcgccctggtggccatcttcaaatcgtttttcggccactatctcggcacgctcgaagggctgaacggtctgatcctgcgctttggctataaaggggataaaacccgggtctccagcggcaagctcaataccctgaacatggtgttcatcatgggctcgacctgggtggtggcgtatgccaaccccaatatcctcgacctgattgaggccatgggcgcgccgattatcgcctcgctgctgtgcctgctgccgatgtacgccattcgtaaagcgccttcgctggccaaatgccgtggccgtctcgacaacctctttgtgaccgctatcggtctgctgaccatcctcaacattgcttacaaactgttctaa

SEQ ID NO: 224123 - DNA, 990 bp, Klebsiella pneumoniae
atgcatattacctacgatcttccggtatctattgacgatattctcgaagcgaaacaacgcctcgcgggaaaaatatataaaacaggcatgccccgttcgaattattttagcgagcgctgccagggcgaaatatttcttaaattcgaaaatatgcagcgcacgggttcatttaaaattcgcggcgcctttaataaactgtgcggtttaaccgcggcggaaaaacgtaaaggggtggtggcctgctcagcgggcaaccacgcccagggcgtctcgctctcctgcgccatgctcggcattgacgggaaagtggtgatgccgaaaggggcgccgaaatcgaaagttgccgccacctgtgattattcggcggaagtggtgctacatggcgataactttaacgataccctcgccaaagccagcgatattgttgaacttgagggccgcatttttattcccccctatgacgacccgcaggttatcgccgggcaggggacgattggactcgaaatattagaagatctgtatgacgtggataatgtcatcgtgcccattggcggcggcggcttaattgccggtatcgcgatcgcgattaaatccattaacccgacaatccgcattatcggcgtgcagtcggagaatgttcacggcatggccgcctcctggtatgccggggaaatcaccagccatcgccacgccggcaccttagccgatggttgcgacgtcgcccgcccggggaaactgacctatgaaatcgcccgccagctggtggatgacatcgtcctggtgagtgaggatgacattcgccagagcatggtcgccttaattcagcgcaataaagtgatcaccgaaggggccggggcgttagcctgcgccgcgttattaagcggcaaactcgacagctatatccagaaccgcaaaacggtcagcctgatttccgggggcaatatcgatctctcccgggtatcgcaaattaccggttttgttgacgcttaa

SEQ ID NO: 224124 - DNA, 942 bp, Klebsiella pneumoniae
atgaatactttttctctgcctaaaacacagcatctggtagttttccaggaagtgatccgcagcgggtcaatcggggccggagcaaaagcgttaggactcactcagccggcggtcagtaaaattattggcgacatggagagttattttggcagcgaattaatcgtccggcgaaataccggcgtctcgctcaccgaggccgggcaggtatttctcaactggtcagaagcgatcacccgtgaaatgaaaaatatggtcaatgaaatgaatgctctgaccaacagcgcggtggtggatgtctcctttggtttcccttcgctggtcgggtttacctttatgtcggagatggtgcatcagtttaaaatgactttccccaaggcgcgggtctcgatgtatgaggcgcagctctccgcctttttgccggcaatccgcgacgggcgcctcgacttcgccatcgggacgctgagcgatgagatgaaactgcaggacctgcacgtcgagccgctgtttgagtctgagtttgtgctggtggcgaaccgggcgcggatcggcaacggcaccgtccgcctggcctcgctccagcacgagcagtgggtgctgccggagaccaatatgggctactacagcgaactgctgaccaccctgcagcgcagcggtatccgccgtgaaaatatcgttaataccgattcggtggtgacgatctataacctggtgctcaatgccgattttctgacggtgatcccctgcgacatgaccacgccgtttggctcgagccagtttgtcaccatccccattaaagaggccttgccggtggcgcgctatgcggcggtatggtcgaaaaattaccggttaaaaaccgccgcggcgtcgctggtggagatggcgaaacactattcctcggggcagggcaaccgccactggcagccattacaaattattgcgtaa

SEQ ID NO: 224125 - DNA, 801 bp, Klebsiella pneumoniae
atggctgaacgcatgacctttccgatgtatgccatccaccgtcaacagacccaggccctgtggcaggcggtgcagtcgctgttggccgaacgcggcgtgatggtggcgggggaccctccggcggctgaccccggggatctgctggctcactggcgccagccgacgctgttgctgagccagacctgtggctacccgctggtgacccaattgccggaggtgcagacggtgggctgcttccactacgctgcgcccggttgcgaagggcgccgctatcgcagcctgctggtggtccgcgaagcggatagccaccggatgctgggggactttttaggccgtcgggcggtgtgcaatgccgagcactcgcagtccggctacaacgtactgcgtaaaatggtcgcgccgctctcccgggaggggcgttttttttcagcggtgatgttcagcggcagccatcggcagtcgctgcgcgaactgcagcaggaaaacgccgatatcgccgccatcgactgcgtgacctacgcgctgctgcagcgctatcagccgcaggctctggctggcctggtggcgatcggctggagcccggccgcgccagggctgccgctgatcaccgccggcgtcaccccagcggcaacgctgaatagcctgcgcgaggcgctccagcagctggtaagcgatgatcgctatcgttccctgtgcgacgccttgctgatctgcggctatagcgatatgtcgcgggaggcctatgcgccgctgctggcgtggcgggatgaggccgcggcgctgggggtcagccagctatag

SEQ ID NO: 224126 - DNA, 1014 bp, Klebsiella pneumoniae
atgaggcaacacggcaaggtatcggaagtgacggaaaagaagacggctgtctatgtggatgaccaacagcgcatcctgatccgccagctggcgcgcggctggctgtggcgcagcgagctgccgacctggctgctgattgtgacggtttacggcggctggtttgcctgcgtggcgggctggcggacgctgggactgtttccggccacgctgctgttgatctggtttaccgcctggtatatgtccttacagcatgagctgatccatgggcatcccacccggctggcatggtttaaccagctgttggggacgctgccgctggcggtctggtatccctatggcgtctaccgcgacagccacctggcgcaccatcgcaaccatctgctgacgcaccctgaggatgaccccgaatcgtactacgtaacggcggaaagctggcagcgcttctcagcctggcagcgccgccttatccacctgcgcaacaccttctgggggcgtctgctgctggcgccgatgatggatattcttcacaccctgaacagcgcgctgcgggctttccgcgagggcgaccgccgcgctatcgccatgtggagtctgcatctgttgctgctgacgggcctgctgacctggatggcggcgcagggtttttctccgctgtggtttgtgctggcggtgagctacccggcgctggccctgaccaaagtacgctcttttctcgaacaccgcgccgcggatgacccgctggcccgctcggtgatcaacgaggccgggctcccctggcgggcgctgttcctcaatctcaactaccatgcggtgcatcatgatctgccaggggtcccctggtacgctttacgtcaactgtatctgcatcgccaggcggcgtatctgcagcgtaatcaggggttcctggtgcgcgggtacggcgagtggcgacgccattttagccgccgggcggtggcggtgaacgcccatccgggctttggcgagcaggcgcaggcgggaggagaacatggctga

SEQ ID NO: 224127 - DNA, 747 bp, Klebsiella pneumoniae
atgacctactgtgtggccatgtgcctggcggatggactggtgtttgcttccgactcccgcaccaatgcgggcgtcgaccatattgccacttttaaaaagctgcacgttttccatcaggagggggaacgggtgctggtgctgcaatccgccggcaatctggccaccacccagagcgtgataagcctgctcagcgcgcgcatccgtacccagcaggagccgaatctgatgcaggtcacttccctctacgacgccgcgatgctgatcggtaaaacgctgctggaggtgatccagcgcgacagcagcaaccagcagacctgcagtaacaccaacttcaactgcaacctgctgcttggcggccagatcgccggcgaaacccatcgtctgttccatatttatccggagggcaactttattgaagccacccgcgacacgccttatttccagattggcgaaagcaaatacggcaaaccgatcatcgatcgggtgctgaccatcgacacgccgctggagcaggcgatgtgctgcgcgttgatctccattgattcgacgctgcgcagtaatctgtccgtcggcctgccgctggatacgctgctctaccgcagcggcagcttcagcagtgccgggcagcatcgcatcaccgacagcgatccctacttcaaccgcattcgcaaggcgtggtccgaagggctgttgcacaccttccagactctgccgacctggacgccagcggagcgggaagaggagtag

SEQ ID NO: 224128 - DNA, 816 bp, Klebsiella pneumoniae; identical to SEQ ID NO: 211426

SEQ ID NO: 224129 - DNA, 930 bp, Klebsiella pneumoniae
atgctaagtcgtacggcgagtgaactgttctggatggcccgctatctcgagcgggcggagagctacgcccgggtgctggacgtgacctggaaattatcgatgatcccccgccacagccagcagtcgcgggatctggcgctgccgctgaatttgtcgatgacccacgagttgtttcaggcgcgccatgcccgctttaccatgagcaatctgctcaacttttttgcccttgatggcaacaacccctgcagtatttacagctgcgtggagatggcgtggaacaatgcgcacgccgtgcgcggcagtctgtcggccgaagtgtgggagagcatcaatgccacccgcattgaactgcgaagcctgcgccagcaggggctgggcgagctggggagcgatggcttttttgagtgggtgaaagagcgggtgcatctgtttcgcggagcggtgataggcacgctgctgcgcaacgacgcgctgagctttatcggtatcggcaccctgattgagcgcgccttcgccaccacccagctgctgctgattaaggatcaacagctgaccaacgatccggacccggtgcgggaatactaccgactggataccctgctcaatgcggtcagcgcccgcgaagcttacaacagcctctaccgccagccggtcagtcgcgaaacggtgatggagctgctgatcctgcgcaacgatattccgcgttcgctgcgcgccagcattgccgacctggtgggcgaactggagaagatcgccaacgaccgctcctatcaaccgctgcgcctcgcccatcagctcaacgttgacctgcgcttcagcacccgtgacgacctggcgcaggcggacctgcagaccacccttaacgggctgctggcgagaattaacgcgctgtccgacagcatcagacaaacctacctggaggccttatga

SEQ ID NO: 224130 - DNA, 1440 bp, Klebsiella pneumoniae
atgattaaaattacgctacctgacgggcattattatgacgagatgctgaccgcgcagggtgaacagcggccgcactataatgcctggtggcaatggtttcgcaacaccgatcaattctctatccggcagaaaaaagcgcaagcggaactgctttttcaccgtatcggcatcacctttaacgtgtacggcgaggatgaggggaccgagcggctgatcccgtttgacagcgtgccgcggatcatacccgccggggagtggcagcgcattgaccgcggcatacgccagcgggtgaaagcgctgaacgccttcctctatgacatctatcatgagcagaatatcctgcgcgcggggctgatcccggccgagcaggtgttggccaacgagcagtatcagccgtgcatgcagggcatcaacctgccaaacaatacctatgcccatatcaccggcgtcgatatggtgcgcaataacgacggtcagtactacgtgctggaggataatctgcgcacgccgtccggcgtctcctacatgctcgaaaaccgtaagatgatgatgcgtctctatccggagatgttcgagcagcatcatattgcgccggtggagcgctacccgagctacctcctgcagaccctgcgcgaaagctcgctggtggatgatccctgcgtcgtggtgatgaccccgggtcgcttcaacagcgcctacttcgagcacagcttcctggcgcagcagatgggggtcgagctggtggagagcgccgatctgtttattaaaaacggcgcggtgtatatgcgcaccaccgaggggccgcggcgggtggatgtgatttatcgccgcatcgacgacgcctggctcgacccgctggccttccgcgccgattcgatgctcggcgtcccggggctgctgtccgtctatcgcgccggcggcgtagtgctggccaacgccatcggcaccggggtggctgacgacaaatcgatctatccgtacgtcccggagatgatccgcttttacctcggcgaacagccgatcctcagcaatatccccacctggcagtgtcggaaagcggaggacctgcgctacgtgctgagcaatctcgagctgatggtggtcaaggaggtccatggcgccgggggctacggcatgctggtcggcccgcgttccaccaaagaggagcgggaggccttccgccagcgcctgctggccaatccggccaactatatcgcccaggacacccttgcgctgtcgacctgccccaccttcgttgatgaagggctgtcgccgcggcatatcgatttacggccctacgtgctgtccgggcaggagatgcggctggtgcccggcggcctgacccgcgtggccctcaccgaagggtcgctggtggtcaactcgtcgcagggcggcggaaccaaggatacctgggtgatggaggatgacgcatcatgctaa

SEQ ID NO: 224131 - DNA, 1746 bp, Klebsiella pneumoniae
atgacgagtactgatgcacgtcgtcccgctgctttgccctgttccctgcgcctggcgatcggcggcgctctgatcgccctgatgagcctgaacgctcaggcggaagacggcaaaaccgcgccgcccccctcgccggatattctgctgggcccgctgttcaatgatgtccagagcgcgaagctgtttgccgatcagaaaaccttcgccgacgctatccccaacagcgatccgctgatgatccttgccgattaccggatgcaaaaaaaccaggccagcttcgacctgcgccacttcgtcgaactgaacttcacgctgccgaaagagaacgacacctatgtgccgcccaaagggcaaactctgcgtcaacatatcgatggcctgtggccggtcctgacccgcagcaccgtcgaggtggaaaaatgggactcgctgctgccgctgcctaagccctacgtggtgcccggaggacgtttccgcgaagtctattactgggacagctatttcaccatgctgggtcttgccgaaagcggtcactgggataaagtcgaggatatggtcgccaacttcgccgcggaaattgacgcctggggccatatccccaacggcaaccgcacctattatctcagccgttcgcagccccccttcttctcctttatggtgagcctgctggcgacgcacgatggcgaccaggtgctgaaaacctaccagccgcagctggagaaagagtatcgctactggatggccggagcggacgcgctggctcccggcagcgccgacaaacgggcggtgcggatggcggacggcgcgctgctcaaccgctactgggacgataacgacaccccgcgtcccgagtcctggcttgacgacgtcaaaaccgccaaaagcaacccgaatcgtccggcaaccgagatctatcgcgacctgcgctccgccgccgcctccggctgggatttcagctcccgctggatggacaatccgcagcagctcgccaccattcgcaccacctcgattgtcccggtcgatctcaatgccctgatgttccatctggagaaaaccctcgcccgcgccagcaaggcatccggggacagcgctggcgctacgcagtacgatgcgctggctaacgcccgccagcaggccatcgagaaatacctgtggaatgataaagagggatggtacgccgactacgatctgaaaacccacaaggtgcgcaatcaactgaccgcggcggcgctgttcccgctgtacgtcaatgccgcgtcacgcgagcgggcgacgaaagtggccgccgccgccgagtcgcgcctgcttaaacccggcgggctgaccaccaccaccgtcaacagcggccagcagtgggacgcccccaacggctgggcgccgctgcagtgggtggcggtcgaggggctgcaaaactatggtcagcagaagatcgccatggaggtcacctggcgcttcctgaccaacgtgcagcatacctatgacagtaagcaaaagctggtggagaagtatgacgtgagctcgaccggcaccggcggcggcggcggggaatatccgctgcaggacggctttggctggaccaacggcgtcaccctgaagatgttggatctgatctgcccgcaggagaaaccctgcgatgcgctgcccgctacccgtccggcgacaaccccttcaccgcaggacaaacctgttgcggcgcccgcggctaacgaccccgcccctgcggaaccgcaaaagaccggctcctga

SEQ ID NO: 224132 - DNA, 2121 bp, Klebsiella pneumoniae
atgaacgtggctatttctcgaaaacgcccggggctgctgtatgcccttgcggtcacactccccttcaccgcgcaagccgaagagacggtggtggtcactgccaccccgccggcgtccgccagcgcgccgacggagggctacagcgccagcacctcgctcggggcgacgaaaaccgaccagccgttaatcactaccgcccagtcggtgtcggtggtcacccgccagcagatggcggatcagggggcgaataccatcagccaggcgctggaatataccccgggggtctactccagcttcggcggcggcgccacccggttcgacgccatctccctgcgcggctaccacggcggcgacgtcgataacctgttcctcgacggcatgcgcctgatgagcgacggcggcagccataacgtactgcaaatcgacccgtggtttatcgaacgcgtggatgtgatccgcggcccctcctccgcgctctacgggcagagcgtgccgggcggcgtggtcaacctgacttccaaacgtccgcagttcagccagcagggccacatccgcctgaccggcggcacgcaaaataccaaaggcgcggccttcgattacaccgacgccatcaatgaccagtgggcatggcggctgatcgggatgacccgcagcagcgacacgcagtatgaccatacccgcgaagagcgctacgcgatttcgccttccctgctgtggcagccggacagcgacacctcgctgctgctgcgcgcctatctgcaaaaagatccttccggcggctaccacggctctttgccgctggacggcacccgctacgcgcacaatggccgtaaactctcccccagcaccaacgaaggcgatccgggagatggctatcaacgccgccagcagatctacagctatgagtttgaccaccagttcaccgacgtctggtcggtctattccgccgggagctacacccataccaacgtctccctcgatcaggtctaccaggtcggctggatagatgacagcgacatgctggcccggggctacagcggttcgcgcggttcgctggacggctggtcaaccgataaccgcctgcgcgccgatttcaatacaggcgacctggcgcacaccctgatcctcggcgccgaatatcatcgcttccgtaacgacctgtggaccggcgccggcggcgcggcgccccttaacccgtttagcggctataccgcgcagaccggacataccgttacctacagcgacgacaataatcgccgctattaccagaccgggctgtatctgcaggatgagatggtctggaaccgctggcatgtggatgtttccgcccgctacgaccgcatcgtttcccagcaggtcagcgatacccaggggacctcaaaccgccgttcagacgaccatatcagcggccgcgcctcgctgttgtacgccctggacaacggtctgtcgccctacctgagctacagccaggcgatcactccggcgatgctgccgggcgcggacggcaaaccgttgaaaccgaccaccgccgaacaggttgaagccggcctgaagttccagccgccgggcagcagcgatctctatagcatcgcgatttacgacctgacgcaaaaggatgtcgccactcgcgacccgaacatcgccaccgccacctatattccggcgggtaaggtccattcccagggcgttgagctggaagcgcaccaccagatcaccccgcagctgagtactatcgcctcgtatacctggaatcgtctgcgtttccaggacaccaaagacgggaccgacaataacacgccgcagctgtccccggatcagatggcctccttctgggcgcgctatcagttcccggcggggatctccgttggcgccggcgtccgctacatcggtaaacagtgggcggatgatgccaacaccgcgcggctgccgtcggtcacgctgatggacgccatgatgcgggccgacctcggcgtctggtcgccaacgctgaaaggcgcttatgtgcaggttaacgccaacaatatcggcgaccgcgagtatatttccggctgctatggcaccggcaactgttactggggagcagagcgcagcgttatagccaccgtgggctacgatttctga

SEQ ID NO: 224133 - DNA, 612 bp, Klebsiella pneumoniae
gtgaaattgagatggttgcttattttagtcgtttttctggccggttgtagttcgaaacatgattacaccaatccgccgtggaaccctgaggtcccggtgaagcgggcgatgcagtggatgccgatcagtgaaaaagccggcgccgcctggggcgtggatccgcagctgatcacggcgatcatcgccatcgagtcgggcggtaatcctgcggtggtgagtaaatccggcgccgtcgggctgatgcagctcaagccgtcgacctccggacgcgatgtctatcggcggatggggtggcgcggcgagccgtcggtcagtgagctgaaaaacccggaacgtaatatctcgatgggggccgcctatctgagcattctggagaacggtccgctggcggggatcaaagacccgcaggtgatgcgctatgcggtggtggtctcctatgccaacggcgctggcgcgctgctgcgtaccttctcctcgaaccgccaggacgccatcgaggagattaacgatctcgacgccgatgagttcttcgaacatgtggtgaaaaaacacccggcaccgcaggcgccgcgctatatctggaaactacagaaagcgctggacgccatgtaa

SEQ ID NO: 224134 - DNA, 915 bp, Klebsiella pneumoniae
atgtctcagttttatctggtcgcgccatccggttattgcatcaaccagcaggcggcagcccgcggcgtcgagcgtctgcagcaggccggacacgaggtggcccaccagcaggtcattccccgccggcagcagcgtttcgccgggactgaacatgaacggctggccgatattaaccagctggcccagttgcccggccgcaaccggatcgtcctcgccgtgcgcggcggctacggcgccagtcgcctgctgccgcatatcgactggcagggactggttgcccgccagcagcgcgacccgctgctgatttgcggccacagcgatttcaccgctatccagtcaggcctgctggccatgggcaacgtcatcaccttcagcgggccaatgctcgccggcaacttcggcgcggagaccctcgacccgtttaccgagcaccatttctggcaggcgctacgccagccggaattcaccctcgaatggccgggcgaagggccgaactgccgggtggaaggcaccctgtgggggggaaatctggcgatgctgacctcgcttatcggcacgccgtggctgccggcgatccgcgacggcatcctggtggtggaggatatcaacgagcacccgttccgcgtcgagcgcatgctgcttcagctgttgcacagcggcgtgctggcggcgcagaaagcggtgatcttcggcagcttcaccggcagcgcgccgaacgactatgacgcgggatacgatttgccgcaggtctttgattatctgcgccagcagctatccctgccgctgattagcggactggagtttggccacgagcagcgcacggtgaccctgccgctgggcgcccgcgcgcgcctggtgaatcaggcggcggccaccaccctgacgatcggcggccatccggtgctgacagaataa

SEQ ID NO: 224135 - DNA, 1734 bp, Klebsiella pneumoniae
ttggacgccgctgcggtcattagtctgtttattctgggttctgttttagtaacctgcagtatcttattgagctccttttcttcgcgccttggcatcccgattctggtcatctttctggccatcgggatgctggcaggcattgacggcatcggcggcatccccttcgacaattaccccttcgcctatatggtgagtaacctggcgctggcggtgatcctgctggacggcgggatgcgcacccaggccagctcctttcgcgtcgcgctgtggcccgcgctgtcgctggcgacggttggggtgctgatcacctcggcgctgaccgggatgatggcggcctggttgttcaagctggatctgatcgaaggcctgctgatcggcgccattgtcggctccaccgacgccgcggcggtcttctcgctgctcggcggcaaggggctcaacgagcgcgtcggctcgacgctggagatagagtcaggcagtaacgacccgatggcggtcttcctgaccatcaccctgatcgaaatgatccagcagcaccaaaccggcctcagctggatgttcgccgtgcatatcattcagcagttcggcctcgggatcgccatcggcctcggcggcggctacctgctgctgcagatgattaaccgcatcgtgctgcccgccggcctctatccgctgctggcgctgagcggcgggatcatgatttttgccgtcaccacctccctcgacggcagcggtatcctcgccgtctatctctgcggctttctgctgggcaaccggccgatccgcaaccggcacggcatcctgcagaacttcgacggcctggcgtggctggcgcagatcgccatgttcctggtgctgggcctgctggtgacgccctccgacctgctgccgatcgctatcccggcgctgctgctgtcgatgtggatgatattcattgcccggcccctgtcggtgtttgccggcctgctgccgtttcgcggctttaacctgcgcgaacgggtgtttatcagctgggttggcctgcgcggcgcggtgcccattattctcgcggtgttccctatgatggccggcctggacaacgcccgcctgttcttcaatgtcgccttcttcgtggtgctggtgtcgctgctgctgcagggcacttcgctgtcgtgggcggcgaaaaaagccaaagtggtggtgccgcccatcagctggcccatctcccgcgtcgggctggatattcacccggaaaacccgtgggagcagtttgtctaccagctgggggccgataagtggtgcatcggcgcggcgctgcgcgacttgcacatgccaccggatacgcggattgccgcgctgtttcgcaacaatgtcctgctgcaccccaccggcagcacccgcctgcgggaaggcgatatcctgtgcgttattggtcgggagcacgacctgccggcgctcggcaaaatgttcagccagtcgccgccggtggcgctcgatcagcgctttttcggcgacttcattcttgatgctgaggcccgcttcgccgatgtggcgcaaatctacggtctcgacggcggtgaggagttccgcgagcatcagcagtcgctcggggaagtggtgcagcagctgctgggcgccgcgccggtggtgggcgaccaggtggagttcgccgggatggtgtggacggtagctgaaaaagagaacgatcacgtgctgaaggttggggtgcgggtcgcggaagacgaggcggagtga

SEQ ID NO: 224136 - DNA, 1071 bp, Klebsiella pneumoniae
atgacccgtccggtagtggccagcatcgacctgctggccttgcggcagaatttacagatagtgcgtcgcgcggcccccgggtcgcgcctgtgggcggtggtcaaggccaacgcctacggccacggcgtggcgcgcgtatggagtgcgttaagcgcggcggatggtttcgccttgctcaacctggaagaggcgatcctgctgcgcgagcagggctggaaaggcccgatcctgctgctggagggcttcttccatgccgatgagctggcggtgctggatcaatatcgtttaaccaccagcgtccacagcaactggcagattaaggccctgcagcaggcgaagctgcgcgcgccgctggatatctatctcaaggtgaacagcggcatgaaccggttgggctttatgcctgagcgggtccacaccgtctggcagcagctgcgggcgataagcaacgtcggcgagatgacgctgatgtcgcacttcgcggaggcggagaacccgcagggaattgtcgagccgatgcgccgtatcgaacaggcggcggaggggctggattgcccgcgctcgctggccaactcggcggcgaccctctggcatccggaagcgcattttgactgggttcgtccaggcatcgtgctgtatggcgcgtcgccttccgggcagtggcaggacatcgccaacaccgggctgaagccggtcatgacgctgcgcagcgaaatcatcggcgtgcagaacctgcgccccggcgaggcgattggctatggcggcctgtaccgcaccagccaggagcagcggatcggcatcgtcgcctgcggctatgccgatggctatccgcgggtggcgccgagcggcacgccggtgctggtggatggcgtacgcaccactaccgtgggacgcgtatcgatggatatgctggcggtcgatttaacgccttgtccgcaggccgggatcggcgcgccggtcgagctgtggggcaaagagattaaaatcgacgacgtggcggccagcagcggcaccgtcggctatgagctgatgtgcgccctggcgccgcgggtgccagttgtgaccctgtaa

SEQ ID NO: 224137 - DNA, 1299 bp, Klebsiella pneumoniae
atgcgtgtcgtcatactgggaagtggggtggttggggtagccagcgcgtggtatttgagtcaggcgggtcatgacgtgacggtcatcgaccgtcagcccggtccggcagaggagaccagcgcggccaacgccgggcagatttctcccggctatgcggcgccctgggcggcgccgggggtgccgctgaaggcgatcaaatggatgtttcagcgccatgcgccgctggcgatcggtcttgacggcacctcgttccagttgaagtggatgtggcagatgctgcgcaactgcgacacccgccactatatggagaacaaaggccgtatggtgcgcctggcggagtacagccgcgactgcctgaaggcgctgcgcgacaccaccggcattcagtatgaagggcgccagggcgggacgctgcagctgttccgtaccgccaaacagtatgaaaatgccacccgcgacatcgcggtgctggaggacgccggcgtgccgtatcagctgctggaagcgaagcggttggcggaggtggagccggcgctggcggaggtcagccacaaactgaccggcggcctgcgcctgccaaatgatgaaaccggcgactgccagctgtttaccacccgtttggcggcaatggcggaacaggccggcgtgaccttccgcttcaacaccgcagtggatgcgctgctgcacgagggcgatcgcattgccggggtgaaatgcggcgatgagattatcaagggcgacgcctatgtgatggccttcggctcctactcgacggcgatgcttaaagggctggtggatataccggtctacccgctgaaaggctactcattgactattccgatcgctcaggaggacggcgcgccggtttcaactatccttgatgagacttacaaaatcgccatcacccgcttcgatcagcgcattcgggtcggcggcatggcggagatcgtcggttttaacaaagcgctgctgcagccgcgtcgcgaaaccctggagatggtggtgcgcgatctgttcccgcgcggcggccacgtggagcaggcgactttctggacgggcctgcggccgatgacgccggacggcacgccggtggtcggccgcacagcgtataaaaatctgtggctcaacaccggccacggcacgcttggctggaccatggcctgcggctccgggcagcttatcagcgatctgatctccggccgcacgccggcgatcccttacgacgatctggcggttgcccgctacagccccggttttaccccggcgcgcccgcagcacctgcacggcgcacacaactaa

SEQ ID NO: 224138 - DNA, 1533 bp, Klebsiella pneumoniae
atggctacgattgactccatgaacagggacaccacccgtttaagcgatggacccgactggacgttcgagttactggaaacctacctggccgaagtggaccgggtcgccaagctctatcgtcttgacacctacccgcaccagatcgaagtcattacttccgagcagatgatggacgcctactccagcgtcggcatgcccatcaactatccgcactggtcgtttggcaaaaaatttattgagaccgagcaggcctataagcacggtcagcagggtctggcgtatgagatagtcatcaactccaacccctgtatcgcctacctgatggaggaaaacaccatcaccatgcaggcgctggtgatggcccatgcctgctacgggcataactcgttttttaaaaataactatctgtttcgcagctggaccgacgccagctcgatcatcgactatctgatctttgcccgtaagtacatcaccgagtgcgaagagcgctatggcgtcgacgaagtagagaaactgctcgactcctgccacgcgctgatgaactacggcgtcgaccgctataaacgtccgcaaaaaatctctctgcaggaggagaaagcgcggcagaaaagccgggaagagtatctgcaaagccaggtgaatatgctgtggcgcaccctgccgaagcgcgaagaggaaaaagcgattgaatccgctcgtcgctacccttccgaaccgcaggagaacctgctgtactttatggagaagaacgccccgctgctcgaaccgtggcagcgcgagatcctgcgcatcgtgcgtaaagtcagccagtatttctacccgcagaaacagacccaggtgatgaacgaggggtgggccaccttctggcactacaccatcctcaaccatctctacgatgaagggaaagtgactgagcgctttatgctggagtttctccacagccataccaacgtggtgttccagccgccgtacaacagtccgtggtacagcgggattaacccctacgcgctgggcttcgccatgttccaggacatcaagcgcatctgtcagtcgcccacggaagaggataagtactggttccccgatatcgccggttctgactggctggaaacgctgcatttcgccatgcgcgactttaaggatgaaagctttatcagtcagttcctgtcgccgaagatcatgcgcgatttccgcttctttaccgtgctcgacgacgatcacaacaattatctggagatctcggcgattcacaacgaagagggttatcgcgagatccgcaataagctctccgcgcagtataacctcagcaatcttgagccgaacatccaggtgtggaacgttgacctgcgcggcgaccgatcgctgaccttgcgctatgtgccgcacaaccgcgtcccgctggacaaaggccggcgcgaagtgctgaagcatgtgcatcgtctgtgggggttcgatgtgctgctggagcagcagaacgccgacggcagcattgagctgttggaccgctgcccggcgcggccgaacgtgctatag

SEQ ID NO: 224139 - DNA, 720 bp, Klebsiella pneumoniae
atggtcattaaggcgcagagccctgcgggtttcgcggaagagtacatcattgagagtatctggaataaccgcttccctcccggatcgattctccccgctgaacgcgagctttctgagctgatcggtgtcacccgcacaaccctgcgcgaagtattgcagcgtctggcccgtgacggctggctgaccattcagcatggtaagcccactaaagtgaataacttttgggaaacctcaggcctgaatatcctcgaaacgctggcgcgcctcgatcacgacagcgtaccgcagttgattgataatctgctctccgtgcgcaccaacatttccacgatttttatccgcaccgcgtttcgccagcatccggataaagcgctggcggtcctggacagcgcccgggaggtggaggatcacgccgacgccttcgccgagcttgattataatattttccgtggtctggcgtttgcctccggcaacccgatctacggtctgatcctcaacggcatgaaggggttgtatacccgcatcggccgccactatttctccagcccggaagcgcgcagcctggcgctcggtttctatcatcagctggcgaaagtgtgtgaggctggcctgcatgaccaggtttacgagctggttcgtcgctacggccatgacagcggcgagatctggcaccggatgcagaaatcgctgcccggtgatttagccatgaatatgcgttaa

SEQ ID NO: 224140 - DNA, 1551 bp, Klebsiella pneumoniae
gtggaaatttcttatggccgcgcgctgtggcgcaattttcttggccagtcgccggactggtacaagctggcattaatcattttcttaatcgtaaatccgctggtgttcgccgtggcgccgtttgtcgccggctggctgctggtggtcgagtttatctttaccctcgccatggcgctgaagtgctatccgctgctgccgggtggtctgctggctatcgaggcgctgctgatcggcatgaccagcccggcgcacgtgcgggaagagatcgccggcaatctggaagtgctgctcctgctgatgttcatggtggcgggtatctactttatgaaacagcttttgctgttcgtgtttacgcgcctgctgctggggatccgcagcaaaatgctgctatcgctggccttctgcctggcggccgccttcctctcggcctttctcgatgcgctgacggtggtggcggtagtgatcagcgtcgccgtcgggttctacggcatctatcaccgcgtcgcctcggcgcgcccggacgatagcgacctgctcgatgacagccatatcgagcagcactaccgtgaggtgctggagcagttccgcggctttctgcgcagcctgatgatgcacgccggcgtcgggaccgcgctcggcggcgtcatgaccatggtcggcgagccgcaaaacctgattatcgccaaagccgcgggctggcattttggcgagttctttcttcgcatggcgcccgtgaccctgccggtgatggtctgcggtctgttaacctgtctgctggttgaaaagtatcgcctgtttggctacggcgaaccgctaccgccgacggtgcgcaaggtgctgcaggagtttgacgatcgcagccgcgcccagcgcagccgtcaggagcgactgcggctgattgcccaggcgctcattggcgtttggctgatcgtggccctggcttttcacttggctgaggtcggcctgattggcctgtcggtgatcatcctcgccaccacctttaccggcgttaccgatgagcacgccattggcaaggcgttcaccgaggcgctgccctttaccgcgctgctgacggtcttcttctccatcgtcgcggttatcatcgatcagcagctgttcacgccggtgatcgagtttgtcctgcaggcctcgccgcacgcgcagctgtcgctgttttatctgttcaacggcctgctgtcgtccatttcggataacgtgtttgtcggcacggtctacatcaacgaagcgaaagcggcgctcgaacatggcgccatcagcctgccccagtttgagatgctggcggtagcgatcaacaccggcaccaacctgccctcggtggccaccccgaacggccaggcggcgtttctcttcctgctgacttccgccctggcgccgcttattaggctctcctatggccgtatggtgtggatggcgctgccctacaccatcgtactgacgctggtcggcctgttatgcgtcgagttcaccctgatgccagttaccgactggctgctggcgcacggctggctggtgacgcccaccttgccctga

SEQ ID NO: 224141 - DNA, 531 bp, Klebsiella pneumoniae; identical to SEQ ID NO: 138205

SEQ ID NO: 224142 - DNA, 345 bp, Klebsiella pneumoniae
atgtcatctttactgatccccgcagactggaaagttaaacgctccaccccattctttaccaaagagaatgtccctgccgccctgctgagccaccataacaccgcagctggcgtcttcggccagctgtgcgtcatggagggcacggtcacctattacggttttgccaatgaacaggcgacggagccggagaaaaaagttgtgattcatgccgggcagtttgctaccagtccgccgcagtactggcaccgcgtcgaactcagtgacgacgcccgcttcaatattcacttctgggtggcggaagaaaccgacggtgaaaacgggctgttccacgcgaagaaagcgtga

SEQ ID NO: 224143 - DNA, 447 bp, Klebsiella pneumoniae
atgagcgaacaacctttctggcaacaaaaaacactggatgacatgagcgacgcggagtgggaatcgttgtgtgacggctgcggccagtgctgcctgcacaagctgatggatgaagacaccgacgagatctacttcaccaacgtcgcctgtcgtcagctcaatatcaaaacctgccagtgtcgtaactacgcgcgtcgttttgagtatgagccggactgcatcaagcttacccgcgaaaatctgccgaccttcgaatggctgccgccgacctgtgcctatcgcctgctggcggaaggcaagcctctgccgaactggcacccgctgctgactggctcaaaagcggcgatgcacggcgaacgcatctccgttcgccatattgcggtgcctgagtccacggtggtcgactggcaggaccatatccttaatctgcctgacagggcgcgctaa

SEQ ID NO: 224144 - DNA, 660 bp, Klebsiella pneumoniae; identical to SEQ ID NO: 138202

SEQ ID NO: 224145 - DNA, 282 bp, Klebsiella pneumoniae
atgttttgtgtgatctatcgaagtactaaacgtgaacaaacctatttatacgtcgaaaaaaaggacgatttctcgcgcgttcctgacgagctaatgcacagctttggcacgccgcaaatggcgatgctgctgccgctggatgggcgcaaaaaactggttaacgccgatctggaaaaagtgaaacaggcgttaagcgaacagggctattacctgcaactgcctccgccgtctgaaaatctactaaagaaacacctggcggaacaggggaaacaatccgattaa

SEQ ID NO: 224146 - DNA, 699 bp, Klebsiella pneumoniae
atgtcaaatacgccaatcgaacttaaaggcagtagcttcacgttatctgtcgttcatttgcacgatgcaaatcccgaggttattcgtcaggcgttagaagacaaaatcgcccaggctcccgcctttttacgtcatgctccggtggtggtgaatatcgccagcatcgaggaggaggtagaatggcgcgccatcaacgaggctatcgccgcgaccggtttacgtattatgggcgttagcggatgcaaaattccgcgcctgaaaaccgaaatcgaccgcgccggcatcccgttattaaccgaagggaaagaaaaagcctctcgtccggcaccgtccgaacccaccccgccgccgccagttgctagtcagatcacaaaaacgcgtttgattgatcagccggtacgttccggtcagcgcatttatgcgccacactgtgatcttattgttacaaatcatgtgagtgccggtgcggaacttatcgctgacggaaatatccatgtatatggcatgatgcgaggacgcgcgctggcaggcgccggtggcgacagagacgcccagatattttgtacccaccttgcggcggagctggtctccatcgccggggaatattggctgagcgataacatcccggccgaattttatggcaaagcggcgcgcctgcgtttaggtgaaagcgctttggcaattcaaccgttaaattaa

SEQ ID NO: 224147 - DNA, 813 bp, Klebsiella pneumoniae
atggcacgcattattgttgtgacttcgggtaaagggggcgttggcaagaccacctccagcgcggccatcgctacaggtttggcccagaagggaaagaaaaccgtcgttatcgacttcgacatcggcctgcgtaacctcgacctgattatgggctgcgaacgtcgcgtcgtttatgatttcgtcaacgtcattcagggcgatgccacactgaaccaggcgctgattaaagataagcgcacggaaaatctctacattctcccggcttcccagacccgggataaagacgctctgactcgcgaaggcgtcgacaaggttctcgaagaactgaagaaaatggaattcgatttcatcgtctgtgattccccggcaggcattgaaaccggtgcgctgatggcgctttactttgctgatgaagccatcatcaccactaacccggaagtctcctccgttcgcgactccgaccgtatccttggcattctcgcctctaaatcccgccgcgcggaaaatggcgaagagccaatcaaagagcatctgctgctgacccgctacaatccaggccgcgttaataaaggcgatatgctgagcatggaagacgtgctggaaattctgcgcatcaacctggtaggcgtgatcccggaagaccagtcagtcctgcgcgcatccaaccagggtgagccggtgatcctcgatgccacctcggacgcaggcaaagcctatgccgataccgttgaacgtctgctcggagaagaacgccctttccgcttcattgaagaagagaagaaaggattcctcaaacgcctgttcggaggataa

SEQ ID NO: 224148 - DNA, 270 bp, Klebsiella pneumoniae; identical to SEQ ID NO: 139205

SEQ ID NO: 224149 - DNA, 1116 bp, Klebsiella pneumoniae
atgatcaccaccgacgatggcctgcgcgctgtctgcgaagcggcaagcacggcctccgccgtcgctctggatacggaatttgtccgcacccgcacctattacccgcagctgggcctgctgcagctgttcgacggccagcaggtctctctgatcgatcccttgacgattaacgactgggcgccgatgcgcgacctgctgctcaaccaggatgtgactaaatacctgcatgccggcagcgaagatttagaagtcttccttaatgcatttaacctgatgccgcagccgctgattgacacccagatcctggcggccttctgcggccgcccaatgtcctggggcttcgcctcgatggtggaagagtattccggggtagcgctggataaaagcgaatcccgcaccgactggctggcgcgcccgctgactgagcgtcagtgtgaatatgccgcggccgacgtctggtatctgctgccgatcgccagccagttaatggcggagaccgatcgcgctggctggctgccggcggcgctcgacgagtgccgcgtgatgcagcagcgtcgtcaggaggtggtcgacccggccgaggcctggcgcgatatcggcaacgcctggcagctgcgtacccgccagctgggttgtctgcagctgttggcggagtggcgcctgcgcaaagcgcgcgagcgcgacctggcggtaaactttgtggtgcgggaagagcatctgtggagcgtggcgcgctatatgcccaccagcctgggcgagctcgacagcctcgggttatccggtagcgaaattcgcttccacggcaaaacgctgattagcctggtcgaaaaagcgcaggcgctgccggagtcggccctgccggcgccgctgcagaacctgatcgacatgccgggctaccgcaaagtctttaaagatattaaagcgctggtgcaggaagtgagcacggagaagggcgtaagcgcggagctgctggcgtcgcgtcggcagatcaaccagctgctgaactggcactggcagctgaaaacgcaagccggtgaacctgagctgatttccggttggcgcggggagctgatggccgagcggctgaagaggctgttaaacgactatccgcgctag

SEQ ID NO: 224150 - DNA, 1719 bp, Klebsiella pneumoniae
atgacgacgaataactatttcagaggtgatgcagtgaaaaaggtttggctaaaccgttatcccgcagatgttccggcggagataaatcctgaccgctatcaatccctggttgaactgtttgaacatgccaccacccgttacgccgaccaaccggcgtttatcaatatgggtgaagtgatgacctaccgtaagctggaggagcgtagtcgcgccttcgccgcttatcttcaggaggggttggggttacagaagggcgatcgcgtggccctgatgatgcctaacctgctgcagtatccggtggctctgtttggcatcctgcgcgccgggatgatcgtggttaacgtcaaccccttatataccccgcgcgaactggagcatcagctcaacgacagcggcgcggcggcgatcgtcatagtctccaactttgcccataccctggaaaaagtggtggcgaaaactcaggtccagcatgtgatcctgacgcgcatgggcgaccagctttccaccgccaaaggtacgctggtgaactttgtggtcaagtacattaagcgcctggtgccgaagtaccatctgccggacgccatctcgtttcgcagcgcgttgcagcacggctatcgcatgcagtacgtcaagccggagatcgttgcggaagatctggcgtttctgcagtacaccgggggcaccaccggcgtggccaaaggtgcgatgctaacccaccgcaatatgctggctaacctcgagcaggtcaatgccacctacggcccgctgctgcatcgcggcaaagagttcgtggtgaccgcgctgccgctgtatcacattttcgccctgaccatgaactgcctgctgtttatcgaactgggcgggcaaaatttgctgatcaccaacccacgtgatatccccgggctggtgaaggagctggcgaagtatccttttaccgccatgaccggggtcaataccctgttcaacgccttgctgaacaacaaagagttccagcagcttgatttctcctcgctgcatttgtccgccggcggtgggatgccggtgcagcaggcggtggccgagcgctgggtaaaactgaccgggcaatatctgctggagggctacggcctgacagagtgttccccgctggtcagcgttaacccgcacgatattgactaccacagcggcagcattggcctgccggtgccctccaccgaagccaaactggtggatgatgatgataacgaagtggcgccgggtcagccgggcgagctctgtattaaagggccgcaggtgatgctgggctactggcagcgccctgacgcgacggatgagattatcaaagacggctggctgcacaccggggatatcgcggtgatggatgaagaggggttcctgcgcatcgtcgatcgcaaaaaagatatgatcctggtgtcgggttttaacgtctatccgaacgaaatcgaagatgtggtcatgcagtatagcggggtgctggaagtggcggccatcggcgtgccgtccggcagcagcggcgaagcggtgaagattttcgtagtcaagaaagatgctgcgttaaccgaagaggcgctgattacgttctgccgtcgccatttgaccggatacaaggtgccgaagctggtggaattccgtgatgaactgccgaaatccaacgtcgggaaaattttgcggcgagaactgcgtgacgaagcgcgcgctaaagtggacaataaaggctaa

SEQ ID NO: 224151 - DNA, 582 bp, Klebsiella pneumoniae
atggcgggtcaaaaacagggcgttcgctggctgctggccgcagcgattgccgttgcgctaagcggctgcgtatcggtgccggatgccatcaaaggcaccagcccgacgccgcagcaggatttggtgcgggtgatgaacgccccgcagctgtacgttggccaggaagcgcgctttggcggtaaggtggtcaatgtgcaaaaccagcaggggaaaacccgcttagaaatcgccaccgtaccgctggacagcggcgcgcggccagtgctgggcgagccgtcccgcggaaggatttttgctgacgtcaatggcttcctcgatccggtggatttccgcggtcaactagtgaccgtggtcggaccgatcgccggggtggttgacggcaaggtgggcagcacgccgtataaatttatgctaatgaacgccaccggctacaagcgctggaacgtagtacagcaggtggtgatgcctccgcaacctatcgacccgtggatgctgggtccgcgcccctggggctacggctatggcggctggggctggtacaatcccggccctgctgaggtgagaaacgttgtaaccgaatga

SEQ ID NO: 224152 - DNA, 696 bp, Klebsiella pneumoniae
atgcgaattttggctatcgataccgccacagaggcctgctccgcggctctgtggaatgatggcacccttagtgctcatttcgaaatttgtccccgcgaacatacccaacgtatcctgccgctggtgcaggaggtcctcaccgagagcggcaccacgctgagcgagctggacgcgctggcctttggccgcggtccgggcagctttaccggcgtgcgcatcggcatcggtatcgctcaggggctggcgctgggcgccgaactgccaatgattggcgtttccacgctggccaccatggcgcagggcgcctggcgcaaaaccggcgccacccgtgtgctggcggccattgatgcgcgtatgggcgaagtctactgggccgagtaccagcgcgacgagcagggcgtctggcatggcgaagagacggaagcggtgctcaaaccggacgcggtagccgaacgactggcacagctttccggcgaatgggccaccgtcggcaccggatggcaggcgtggccggatctggcgaaagcgagcggactgaccttaagcagcggcgaaattgaattgccggcggcggaggatatgctgccgttagcctgttacctgctggcggcggggaaaaccgtggccgtggagaaagcggagccggtttatttgcgaaacgaggtggcgtggaagaaacttccaggccgcgagtga

SEQ ID NO: 224153 - DNA, 1911 bp, Klebsiella pneumoniae
gtgatcgacgattttgcagcagacggccagctagccaaagccataccgggatttaaaccgcgcgagccgcagcgccagatggcggtggcggtcagcgaagcgattgaggcctcccggccgctggtggtggaagcggggaccggaaccggtaaaacctacgcttacctggcgcctgcgctgcgggcgaaaaaaaaggtgattatctccaccggctcgaaagcgctgcaggatcagctttacagccgcgatctgcccaccgtcgccaaagcgctcaaattcaccgggaaactggcgctgctcaaagggcgctccaactacctgtgtctcgaacgtcttgagcagcaggcgctggcgggcggcgatctgccggtgcaaaccctcagcgatgtgatcctcctgcgctcctggtcgaatcaaacccaggatggcgatatcagcacctgcgccagcgtcgcggaagactctcaggcctggccgctggtcaccagcaccaacgataactgtctcggtagcgactgcccactgtataaagattgcttcgtggtgaaggcgcgtaaaaaagcgatggacgccgacgtggtggtggtcaaccatcacctgtttctggccgatatggtggtcaaagagagcggctttgccgagctgatccccgaggcggaagtgatgatcttcgatgaagcccatcagctgccggatatcgctagtcagtactttggccagtcgctctccagccgccagctgctggacctggcgaaagacatcaccattgcctaccgcaccgaactgaaagacactcagcagctgcaaaaatgcgccgaccgcctggcgcaaagcgcgcaggatttccgcctgcagctgggagacccgggctaccgcggcaatctgcgcgagctgctggcggacagccacattcagcgagcgctgctgctgctcgatgacgcgctcgagctatgctatgacgtcgccaaactttcgctgggtcgctcggcgctgctcgacgccgcttttgagcgcgccaccctctatcgcgggcgcctgaagcggttgaaagagatcaaccagccgggctacagctactggtatgagtgtacctcgcgccactttactctcgcgctgacgccgctgaccgtggccgagaagtttaaagaggtgatggcgcagaagtcggggagctggatctttacctcggcgacgctgtcggtgaacgacgatctgcatcactttaccgcccggctggggatcgacgaggcgcagactctgctgctgccgagtccctttgactatcagcaccaggcgctgctctgcgtgccgcgcaacctacccctgccgaaccagcccggcgcagcgcgacacctggcggcgatgctcaagccgctgatcgaggccaacgatggtcgctgctttatgttgtgcacctcgcacgccatgatgcgcgatctggcggagcagttccgcgccaccatgacgctaccggtgctgctgcagggcgagaccagtaaaggccagctgctgcagcagttcgtcagcgccggcaacgcgctgctggtggctaccagcagcttctgggagggagtcgatgtgcgcggcgacgcgctgtcgctggtgattatcgataagctaccgttcacctcgccggacgatccgctgctaaaagcgcggatggaagattgccggctgcgcggcggcgatcccttcgatgaagtgcagctcccggatgcggtgatcaccctcaagcagggggtgggtcgcctgatccgcgatatcgacgatcgcggggtgctggtgatctgcgacaaccggctggtgatgcgcccctacggcgcggtgttcctggccagtctgccgccggcgccgcgaacccgcgatatccgtcgggcggtgcgctttctcgccgtaccgccggcaaggtaa

SEQ ID NO: 224154 - DNA, 345 bp, Klebsiella pneumoniae
atgacaattacgcgtattgatgccgaagcccgttggtcagacgtggtgatccacaaccagaccctgtactacaccggcgtgccggcaaatctcgatgccgacgctttcgagcagaccgccaataccctggcgcagattgacgcggtgctggaaaaacagggcagcaacaagtcgcgtattcttgacgccaccatcttcctcgccgataaaagcgactttgcggcgatgaataaagcctgggacgcgtgggtggtggctggtcacgccccggtgcgctgcacggtggaagcgacgctgatgaacccgcagtataaagttgagatcaaaattatcgccgcggtgtaa

SEQ ID NO: 224155 - DNA, 186 bp, Klebsiella pneumoniae; identical to SEQ ID NO: 138168

SEQ ID NO: 224156 - DNA, 1356 bp, Klebsiella pneumoniae
atgttgtcccccgcgattattaccctgccctggcgcccggatgcggccgaacactattttgcgccgttaagcgccctgccctgggcgatgctgctgcattccggctttgccgaccatccgcataaccgctttgatattctggtggctgccccgcgcgccacgctactgacgcgcgatgaacagacgtgggtcgacgacggcgaaaccgttgttgtctcagcggaagatccgctgcagctcctgcagcagcagttggatcgtcagccgttcacgccgcaaccccatgacgatctgccgtttctcggcggcgcgctgggattattcggttacgacctgggccgtcgctttgagcgtctcccttcgcacgcgcaggccgatatcgcgctggcggatatggcggtggggatctatgactgggcgcttatcgtcgaccaccagcgccaacagatatcgctgctcagctatgacgacccgcagcagcgtctacagtggctggaggcgcaaacgccgacgccgggtgaaaccttcgccctgacctctgcctggcagtcaaatatgagccgccagcagtacggcgaaaaatttcgccaggtacaggcctatctgcacagcggcgactgctatcaggtcaacctcgcccagcgttttcaggccagctacgtcggtgatgaatggcaggccttccgccagctgaacgccgtcaaccgcgccccctttagcgcctttattcgcctcgatgaaggggcgattttaagcctgtcgccggagcgctttatccagctgcgccagggggagatccagacgcggccgataaaaggcaccctgccgcggctcgattcgccgctggcagatgcgcagcaggctgagaagctggcgaattcgccgaaagatcgcgccgagaatttaatgattgtcgacctgatgcgcaacgacatcggccgcgtcgccgtcccgggcagcgtccgggtccccgagctgttcgtggtggagccgttcccggcggtccatcatctggtcagcaccatcaccgcccgcctgccaatgacgctgcacgccagcgacctgctgcgcgccgcctttcccggcggctcgatcaccggcgcgccgaaagtgcgggcgatggagattatcgatgaactggagccccaacgacgcaacgcctggtgtgggagcattggctacctgagctattgcggcaatatggataccagcatcaccattcgcaccctgacggcatggcagggacagctgtactgctccgccggcggcggaattgtggcggatagcgaggaagcggcggaatatcaggaaacttttgataaagttaatcgtatcctgcagcaactggagaactag

SEQ ID NO: 224157 - DNA, 579 bp, Klebsiella pneumoniae
atggcggatcgcgcccttaatctggatgattttctgtcccgctttcagcttctgcgcccgcagccttcgcgccatgcgctcaatcagcggcaggcggcggtgctggtgccgatcgtgcgccggccgcagcccggcctgctgctgacccagcgttcgccgctgctgcgcaagcacgccggccaggtcgcctttcccggcggcgcagtagataataccgacgcgacgcttatcgccgccgccctgcgcgaagctcaggaagaggtggcgatcccgccggaggcggtcgaggtgatcggcgtcctgccgccggtggacagcgtcaccggctttcaggtgacgccggtggtgggcattattcccccggatctgcactatcacgccagccaggacgaagtctccgcggtatttgaaatgccgctcgccgaagccctgcgccttgggcgctaccatccgctcgatatccaccgccggggcaacgaccaccgcgtctggctctcctggtaccagcattattttgtctggggaatgaccgccgggatcattcgcgagctggcgctgcaaattggcgcacgtccttag

SEQ ID NO: 224158 - DNA, 1365 bp, Klebsiella pneumoniae
gtgattagtctattcgacatgttcaaggtggggattggtccctcatcttcccacactgttggcccgatgaaggccggaaaacagttcgtcgatgacctggtcgaaaaaggattgcttaatgcagtgactcgtgtggcggttgacgtctacggttcactgtcattaaccggcaaaggccaccatacggacatcgccattatcatgggactggcgggcaatcagcccgatacggtcgatattgacgcgatcccggcttttatccgtgacgtcgaagcgcgcggtcgtctgctgctggccaacggccagcacgaggtcgacttcccggcggatgacggcatgcgttttcgtagcgacaacctgccgctgcacgaaaacggcatgaccattcacgcctgggccggcgagaaagagatctactgcaagacctactactcgatcggcggcggctttattgtcgacgaagagcacttcggcaaggaaaacgccaacgaactgcaggtgccctacccatttaaatcggcgcaggaaatgctggcctactgcaaagagactggcctgtcgctctccgggatggtgatgcagaacgagttggctctgcacagcaaaaaagagatcgaggattatttcgccaacgtctggcagaccatgcgcgcctgtatcgaccgcgggatgaacaccgagggcgtgctgcctggcccgctgcgcgtaccgcgtcgcgcctcggcgctgcgtcgtctgctggtggccagcgataagctctccagcgatccaatgaacgttgttgactgggtcaatatgttcgcgctggcggtcaatgaagagaacgccgccggcggtcgcgtggtaaccgcgccgaccaacggcgcctgcggcatcgttccggcggtactcgcctattacgatcactttatcgagtccgtcagcccggagatctatattcgctactttatggcctgcggggcgatcggcgcgctgtataagatgaatgcgtccatttccggcgcggaagtcggctgtcagggcgaggtgggcgtcgcctgctcgatggcggcggcgggactggctgaactgctcggcgccagcccggaacaggtttgcgtggcagcggagatcggcatggaacacaacctcggcctgacctgtgatccggtcgccggtcaggtgcaggtgccatgcattgaacgtaacgccatcgcctccgtcaaggcgatcaacgccgcgcgaatggcgatgcgccgcaccagcgaaccgcgcgtctcgctcgataaggtgatcgagaccatgtatgaaaccggtaaagacatgaacgccaagtaccgcgaaacctcgcgcggcggcctggcgattaaagttcagtgtgactaa

SEQ ID NO: 224159 - DNA, 1584 bp, Klebsiella pneumoniae
atgcagactgcacaaaaagtcattacggcctatcgtcacaaacgcattattgtctgcctgctggtagccctggcgaccctgggcgccacattagccatccgatttatttcgcagcgcagcgtaaatgaagattatattcgcacggccgccagccaacgggtggcggcgctcaatgacatcttgcgcccgctaagcgcgcagcgagccaccctgctccctctggtgggcaaaccctgccctgatatccatctgacgctgcgcaaaatggcggcctcgttgcaaaccattcgttccgtcgccctcgtcacgtcaggtatcgtttactgttccagtatttttggcccgcgacaggcagacttacatcgcctgcagcccgcgcttcctgcgccccgccctctgctactcttctcgaacgacagctccttgctcaaaggctcgccggtactgatccaatggtatccagccgcggagagcggcctggacggcgtgatgctggtggtgaatattgagctgctgggaaccttaattcttaatgaaaaatcggccctgatcagcgacgtcagcctgcaggttggcgatcgttattttagcagccgccatgggcttctcgaaaaagcgcatgtcccgcagggcacggtgatttatcgccagcgctctacggagtttccgtttactgtcaatattaacggccctggcgcctcggcgattgcgcttgaggagctgcccggcgagctgccgctggcgctgatttttagcctgctaatgaccggcatcgcctggctggccaccgcaggcagaatgagtttctcgcgggaaataagccttggcatttcggcccgggagtttgccctctggtgccagccgctgcaggatgcgcgcagcggccgctgctgcggggtggagatcctgctgcgctggaataatccccgccgtgggacgatttcgccggaggtatttatccccatcgccgaaggcaataatctgatcatccctctcacccgctatgtgattgccgaaaccgctcgccgcctggacgcttttcctcgcgaccgccattttcacatcgcgatcaatgtcgccgcgcgccatttcgctaacggactcctgctgcgcgacctgcacaattactggttcagcgtggatccggtgcagcagctggtggtcgagctaaccgaacgcgatgtcctgcaggatggcgaccagcatatggccgaacatctgcactttaagggcgtacagctggcgatcgatgattttggtaccggcaatacttcgctctcatggctggaaaagctgcgcccggatgttttgaagatcgaccgctcgttcaccagctcggtcggcatagatagcgtgaacgcgacggtgacagatattattatcgccctcgccaaccgcctgcatattgttaccgttgccgaaggggtggagacgctggagcaggaaaactacctgcgtagccacggcgtcgatgtgctgcaggggttttattatgcgcggccgatgccggtggaggcgttcccggcgtggctggccagcagggaggagagtgagagtgagagtgagagcgagacgacagaataa

SEQ ID NO: 224160 - DNA, 1560 bp, Klebsiella pneumoniae
atggaattgttaatggatccctcaatctgggccggcctgttgacgcttatcgttctggaaattgtgctcggtatcgacaacctggtgtttattgccatcctggcggacaaactgccgccgaagcagcgcgataaagcgcgtctgatcggcctgtcactggcgctggtgatgcgcctggggctgctgtcggtcatctcctggatggtgacgctgacgaaaccactgattaccatcgccgatttctccttttccgggcgcgatctcatcatgctgctcggcgggatcttcttattgtttaaggcgacaaccgagctgcatgaacggctggaaaaccgccagcacgatgccggtcacggtaaaggctatgccagtttctgggtagtagtattgcagatagtggtgctggatgccgtcttctccctggacgccgtgatcacggcggtcgggatggttaaccatctgccggtgatgatggcggcggtggtgatcgcgatgatcttgatgctgctggcctccaagccgttgacgcgctttgtcaaccagcacccgacggtggtcgtgctctgtctgagcttcctgttgatgattggcctgagcctggtggcggaagggtttggcttccatattccgaaagggtatctgtacgcggcgatcggtttctcgatcattatcgagttctttaaccaggtggcgcgccgtaactttgttcgccaccagtcgacgctgccgctgcgcgctcggaccgcggatgccatcctgcgcctgatgggcggccgcaaacaggcctccgtcagccatgacgcagacagtccagccgcggtgcccgttcctgagggcgcctttgcggaagaagagcgctacatgattaacggcgtgctgaccctggcccagcgctccctgcgcagcatcatgaccccgcgcggagaaatcagctgggtcgacgctgagcagagtgaagatgaaattcgtcgtcaactgctgtcgtcgccgcacagcctcttcccggtctgccgcggagagctggatgaaatcattggtatcgtgcgggcgaaagagatgctggtggccctggagtcgggggaaaacgtcgcggcgctggcttctgcctccccggcaattgtcgttccggaaacgctggacccgatcaatctgctcggggtcctgcgtcgggcgcgcggcagcttcgtcatcgtaactaatgaatttggcgtggtgcaggggctggtcacgccgctggacgtccttgaagccatcgccggtgaattcccggacgctgatgagacgccagagattgtcatcgatggcgatggctggcttattaaggggtcgaccgacctgcatgcgctgcagcaggcgctggggctggatccactgatcaatgacgatgaggatattgccaccgttgccgggctggtgatctccgccaatggtcatatcccgcgcattggcgacgtcgtgtcgcttccgccgctgcattttaccgtagtggaagcgaatgattaccgggtcgatctggtgcgcgcggtggtcactcgtccgccgagcgacgaagaagagtaa

SEQ ID NO: 224161 - DNA, 972 bp, Klebsiella pneumoniae
gtgacgattgctattgtaataggcacacatggttgggctgcagaacagctgctgaaaacagcagaaatgctgttgggcgagcaggaaaacgttggctggatcgatttcgttccgggtgaaaatgccgaaacgttgatcgagaaatacaacgcccagttggcaaaactggataccagtaaaggcgtgctgtttctcgtcgatacatggggaggcagccctttcaacgctgcgagccgcattgtcgtcgataaagagcattacgaagttatcgccggcgtcaatatcccgatgctggtggaaaccttcatggcccgcgacgacgatccttcctttgatgaactggtcgccttagcggttgaaaccggcagcgaaggcgtgaaagcgcttaaagccaaaccggtggaaaaagcggcccctgcgcccgcgcctgccgcagcgccaaaagccgccgcaccggccaaacccatgggcccgaacgactacatggtaattggccttgcgcgtatagacgaccgtctgatccatggtcaggtcgccacccgctggaccaaagagaccaacgttacccgcatcatcgttgtcagtgatgaagtggccgcggataccgtgcgtaaaactctgctgacccaggttgcgccgccgggcgtcaccgctcacgtggtggatgtggccaaaatgatccgcgtctacaacaaccccaagtatgccggacagcgcgttatgctgctgtttactaacccgaccgacgttgaacgtatcgtcgagggcggcgtgaaaatcaccagcgtcaacatcggcggtatggcgttccgccagggtaaaacccaggttaacaacgcgatttcagtcgatgccaaagatattgaggcgtttaaaaagctgaacgcccgcggtatcgagctggaggcacgtaaagtgtccaccgacccgaaactgaaaatgatggatctgatcgctaaggttgataaataa

SEQ ID NO: 224162 - DNA, 801 bp, Klebsiella pneumoniae
atggagattacccttcttcagattgtgctggtgttcatcgtcgcgtgtattgcgggtatggagtcggtacttgatgaatttcagttccaccgtcccctgatcgcctgtacgctgatcggcgccgttctcggcgatatgaaaaccggtattatcatcggcggtacgctggagatgatagccctgggctggatgaacatcggtgcggcggtagcccctgatgccgcgctggcgtccattatttccaccgtcctggttattgccggccatcagagcatcggcgccggtatcgcgctggctatcccgctggcggcggcaggccaggtgctgaccatcatcgtgcgcaccatcaccgtggccttccagcacgcggcggataaagcggcggagaatggtaacctgaccgccctgtcgtggctgcacgtctcgtccctgttcctgcaggcgatgcgtatcgctatcccggccgttatcgtggcgatttccgtcggcaccagcgaagttcagggcctgctgaatgctatcccggaagtggtcaccagcggtctgaacatcgccggcggtatgatcgtggttgtcggttatgcaatggtcatcaacatgatgcgcgcaggctatctgatgccgttcttctacctcggcttcgtcaccgccgccttcaccaacttcaacctggtggccctgggtgtgattggtgcggtcatggcaatcctctacattcagctgagcccgaaatataaccgcgtcgccggtgcgccggctcaggcggctggtaacaacgatctcgataacgaactggactaa

SEQ ID NO: 224163 - DNA, 852 bp, Klebsiella pneumoniae
atggttgatatgactaaaaataccaccgagaaaaaactcacacagagtgatattcgtggcgtgttcattcgttctaacctgttccagggttcatggaacttcgaacgtatgcaggcgctggggttctgcttctctatggttccggcgattcgtcgtctgtacccggagaacaacgatgcgcgtaagcaggcgattaagcgtcaccttgagtttttcaacacccacccttacgttgccgctccggtactgggcgtaacgctggcgatggaagagcagcgcgccaatggcgcagagattgacgatggcgctatcaacggcatcaaagtcggtctgatgggaccgctggccggcgttggcgacccgatcttctggggtaccgtgcgtccggtgtttgcagccttaggcgccgggatcgcgatgagcggtagcctgctcggtcctctgctgttctttatcctgttcaacgcggtgcgtctgctgacccgttactacggtgtcgcctatggttatcgcaaaggcgtggatatcgttaaagatatgggcggcggcttcctgcagaaactgactgagggggcgtcaatcctcggcctgtttgtcatgggggcgctggttaacaagtggacgcatgtgaacattccgatggtggtgtcaaaaatcaccggctctgacggacaggttcacgtcaccacggtgcagactatccttgatcagctgatgccgggtctggtgccgctgctgttgaccttcgcctgtatgtggctgctgcgtaagaaagttaacccgctgtggatcatcgttggcttcttcgtcatcggtatcgccggctacgcggtcggcctgctgggtctgtaa

SEQ ID NO: 224164 - DNA, 459 bp, Klebsiella pneumoniae
atgaccttcacggacctggtgatcatcctgtttatccttgcgctactggcctacgcgatatatgaccagtttattatgccgaggcgaaacggcccggtactgctggccatccccctgcttcgccgcagtcgcgttgacggcatgatctttgtcggcctcaccgccattctgatctataacaacatcacccagcacggcacggcgatcaccacctggctattatctgctctggcgctgatggggctctatttattctggatccgtacgccgaaaatcatttttaaaccgcgcggctttttcttcgccaacgtgtggatagaatatcagcggattaaagagatgaatttatccgaggacggtgtgctggtgatgcaattagagcaacggcggctgctgatacgcgtacgaaatatcgacgatctggagaagatatacaaacttctcattacaactcaatga

SEQ ID NO: 224165 - DNA, 567 bp, Klebsiella pneumoniae; identical to SEQ ID NO: 211463

SEQ ID NO: 224166 - DNA, 795 bp, Klebsiella pneumoniae
atgtcatacagttgccccctttgtcacgcgccgctcagccgtagcgacaaccactattcctgcccgcagcggcaccagttcgatctggcgaaagaggggtacgtcaatctgctaccggtgcagttcaagcggtcgcgcgatcccggcgatagcgccgaaatgatgcaggcccggcgggcgttcctcgacgccggacattatcagccgctacgggatgctatcgctgagcggctgcgacattacgcccctacggatttactggatatcggctgtggcgaggggtattacacccacgcgtttgccgccatcgccagccgcagctgggggctggacgtgtcgaagccggcgatccgcgcggcggcaaaacgctacccgcaggtgaatttttgcgtggcctccagccagcgcctgccattttccgacgctagcttcgacgcggtggtgcgcatttacgcgccctgcaacgccgaagagctggcgcgggtggtgcgtcccggtggttgggtgatcaccgccacgccgggtccccgtcacttactggagctgaaagggcttatttacgatgaagttcgcctgcatgagctgaagacggaagcgatgccggggttccgcctggaggctcagcagcagctggcttatccgatgatcctgacgggaagtgaagcgcaggccctgctgcagatgacgccgttcgcatggcgggctaaagccgaagtgcacgccgcgctgcgtcagcagccgacctttggttgccagaccgattttatgatccactgctggcagcgcgaagcgtaa

SEQ ID NO: 224167 - DNA, 1746 bp, Klebsiella pneumoniae
gtgctaaagaaaaaaacgaagtccgccgccagtttcaccccgattcgcttcgggttactgtgtgtggccattctcggttgtctggggctgctgctggtccgcgtgggctggctacaaattatctcccccgataacctggtaaaacaagaagatatgcgctccctgcgcgaagaacccgtagcggttgagcgggggatgatcagcgaccgggaaggacggccgctggcggtgagcgtcccggtcagtgctatctggatcgacccgcagaccactatggagaagggcggtgtgggctatgggcctcgctggcaggcgatggccgaagcgctgcacctcaacctcggagagctggcccagcgggtacagaatcatccccacgctcgctttctctatctggcgcgtcagatcaatcccgagcaggcagagtggattgataaactgcatctgccgggcgtctacctgcgcgatgaatcgcgacggttctacccggcgggccacgtggctgccaatctgctgggctttaccaatgttgataatcagggcatcgaaggggtggagaaaagctttaacgcccagttgaccggtaaacccgggcgacgtctggtgcgtaaagataaacatggcaatgtcattgagaacattaccgaagtgccgccggtaccggcgcataatctgcagctgagtattgatgaacgcctgcagacggtgacggaagacgccctcgacaacgccgtccgctggaacaaagcagagtccggggcggcggtattgatcaaaattgataccggcgagatcctggcgatggccagctatccggacttcaatccgaacaatcgcgatagcgcgacgctggatgattttcgcaaccgggccatcagcgacaccttcgagcccgggtcgacggtcaaaccgctggtgatcatgactgcgctacagcaggggattgtccagccagacagcgtggtggatacccatccgttcgtcctcgatggccatcgtattcgcgatgtgggctattatccggagctgagcctgaccgggatcctgcagaaatccagcgataccggcgtgtcccatctctcgctcgccatgccggtgcagcatctgatcgatacctataaagctttcggctttggcgaaccgacggggctggggttgaccggcgaaagcgccgggctgatgccgcatcgccgctactgggggcaactggatcgcgccaccttcgccttcggctatggtttgatggtcaccccgctccagctcgcccacgtctacgccaccatcggcggcttcggcattgcgcgaccactgtcgattacccgcatcgatccgccggtgatgggcacgcgggtgatgccggagagtattgtgcatagcgtggaacatatgatggagagcgtggcgctcccgggcgggggcggtaccaaagcggcggtacgcgactaccgggtggcggtaaaaaccggcacggcgaagaaaattggcccggacggcaaatatatcgataagtatgtggcctataccgccggcgtggcgcccgccagtcgaccacagttcgcgctggtggtggtgatgaacgatccgagcaatggttcctattacggcggcgctgtgtccgcgccggtcttcagccagatcatgggcgatgtcctgcggctggagaacgtcatgccggacggcatgccgcaaggggcggagaatctgatcgtaatgcacgatagccacccacaggggccggcgctgtaa

SEQ ID NO: 224168 - DNA, 210 bp, Klebsiella pneumoniae; identical to SEQ ID NO: 136705

SEQ ID NO: 224169 - DNA, 291 bp, Klebsiella pneumoniae
atgagtgagttactaaatcctgggattttaaatctggcatcgctggcagtgtccgtggcgctgctgcttgtcggtctgttgttatggttcttcgtcaaccgcgccagttcgcgggcgaatgagcagatagagctgctgcaagcgctgctggatcagcaaaagcggcagaatgcgctgttacgtcgcctgtgcgaagctaatgcgccagagaaagaggatgtggctgagccgaccgtcgccggcaaggcgaaaggggaggatgagtttatccgcctggtagctgaacgttaa

SEQ ID NO: 224170 - DNA, 240 bp, Klebsiella pneumoniae; identical to SEQ ID NO: 136707

SEQ ID NO: 224171 - DNA, 792 bp, Klebsiella pneumoniae; identical to SEQ ID NO: 136708

SEQ ID NO: 224172 - DNA, 1371 bp, Klebsiella pneumoniae
atggataaaaattcttctgatggcgtgccgttgccgcaacgctatggcgccattctgaccatcgtgcttgggctgaccatggccgtgctcgacggggctatcgccaacgtcgcgctgccgactatcgccagcgatctcaacgcctcaccggcggcttcaatctggatcgttaacgcctaccaaatcgccattgtcatcgccctgctgccgctatccttcctcggcgacatggtcggctatcggcgtatctataagataggcctggtggtgtttatctttacctcgctggcctgcgcgctgtcgcgtagcctcgaaatgctaaccttcgctcgcgtcgcgcagggattgggcggcgccgcgctgatgagcgtcaacaccgcgctgatccgtctgatttatccgcagcgctttcttggtcgcggcatgggcattaactcctttgtcgttgccgtctcttcggcggccggcccgactatcgccgcagcgatcctctccctcgcctcatggcaatggctgtttttaattaacgtgcctctcggcatcgtcgcctttgttctggccatgcgctttctgccgcccaacagcgcgcgcagcaaaatcatccgcttcgatctgccgagcgccattatgaacgcccttaccttcgggctgctaatcaccgccctgagcggtttcgcccaggggcagtccactcagctggtgctggcggaggtcgccgctatgctggtggtggggttcttcttcgttcgccgccagctcacgatgcccgtccccctgctgccggtcgacctgctgcgtatcccactcttctctctctctatctgcacttccatctgctccttctgcgcgcagatgctggcgatggtctccctgcccttttttctgcagtcgatgatggggcgcagcgaagtggagactggtctgctgctaacgccgtggccgttagcgaccatggtgatggcgccgctggccggctatttgatcgagaaatgtcatgccgggctgctgggggctgtcggcctgctgattatggcctgcggcctgttcggcctggcgctgctgccctcgtcgccctccgatctggatatcatctggcgcatggcgctgtgcggcgccggcttcgggctgtttcagtcgccgaacaaccataccatcgtcgcctcggctccgagccatcgtagcggcggcgccagcggcatgctgggcaccgctcgcctgctcggacagagcaccggcgcggcgctggtggcgctgctattcaatttgctcggtaacaacggcacccacaccgccctgctgctggccggcaccctggctatcgtcgccgcgctaattagcggtctgcgggtcactcagccgcgcgcagcctga

SEQ ID NO: 224173 - DNA, 885 bp, Klebsiella pneumoniae
atgatgcgaatcgcgcttttcctgctgacgaacctggcagtgatggtcgtgttcgggctggtgttaagcctcacggggatccaatccagcagcatgaccggtcttctgattatggccctgctgttcggcttcggtggttctatcgtttcgctgatgatgtcgaagtggatggcgctgaagtcagtgggtggggaagtgatcgagcagccgcgcaacgaaacggaacgctggctgatgaataccgttgcgcagcaggcgcagcaggtaggtattgccatgccgcaggtagctatctatcacgcgcctgacattaacgccttcgccaccggcgcgcgtcgtgacgcctcgctggtcgccgtcagcaccgggctgttgcaaaacatgagccgtgatgaagcggaagcggtcattgcccatgaaatcagccacatcgccaatggcgatatggttaccatgaccctgatccagggggtggtgaacaccttcgttatctttatctcccgcgttatcgcgcagattgcggccggtttcctcggcggcaaccgggaagatgaaggggagagcagcaatggcaacccgctgatctacttcgccgtcgccacggtgcttgagctggtgttcggtattctggccagcataatcaccatgtggttctcgcgttaccgtgagttccatgctgacgccggctcggcgcgtctggtaggccgcgagaagatgattgcagccctgcagcgtctgaaaaccagctatgagccgcaggaagccagcagcatgatggcgttctgcattaacggtaaagcgaaatccatgagcgaactgtttatgactcacccgccgctggataagcgtattgaagccctgcgtagcggtgaatatctgaaataa

SEQ ID NO: 224174 - DNA, 2049 bp, Klebsiella pneumoniae
atgaacacattttttaaaatcaccgcgcttgcgggcctgctggcaatagcaggccatgcattcgctgttgatgacataacccgcgcagatcaaatccccgtgctgaaagaagagccgcagcacgcgacggtaagcgagcgcgtgacgtcgcgctttacccgctctcattaccgtcagtttgatctcgacaacgccttctcggcaaagatttttgaccgttacctgaacctgctggactacagccacaatgtgctgctggccagcgatgtggcgaagtttgcggctaaaaaagaccaaattggcgatgagctgcgcagcgggaaactggacgttttttacgacctctacaacctggggcagcagcgccgcttcgagcgctatcagtatgcgctgaaggtgcttgaacgtccgatggactttaccggcaatgataatttcaaccttgaccgctccaaagcgccgtggccaaaagacgaggccgagctgaacaagctgtgggacgctaaggttaagtttgaccagttaagcctgaagctggcgggtaaagacgataaagagatccgcgacaccttaacccgtcgctataagtttgctatccgtcgcctggcgcaaaccaacagcgaagatgtcttctcgctggcgatgaccgccttcgctcgcgaaatcgatccgcacacaaattatctgtcgccgcgtaataccgagcagttcaacaccgaaatgagcctctcactcgaggggatcggcgccgtgctgcagatggatgatgactataccgtcattaattcgctggtggcgggcggtccagccgcgaaaagcaaagcgatcagcgtcggcgatcgcatcgttggcgttggccagaccgggaagtcgatggttgatgtcatcggctggcgtctggatgacgtcgtggcgctgattaaagggccgaagggcagcaaggttcgtcttgaaatcctgccggccggtaaaggagccaagacgcgtattgtaacgctgacccgcgagcgcattcgtctggaagaccgtgcggtgaagatgtcggtgaaaaccgtcgggaaagaaaaagtcggcgtgctggatattccaggcttttacgttggcctgaccgatgacgtgaaagtgcagctgcagaagctggaaaaacagaacgtcagcagcatcatcattgacctgcgcagcaacggcggcggagcgctgacagaggcggtatcgctctcgggtctgtttattccgtccggtccggtggtgcaggtgcgggataataatggcaaagtgcgcgaagacagcgacaacgatggcgtggtttattacaaagggccgctggtggtgctggttgaccgctttagcgcctcggcgtctgagatcttcgccgcagcgatgcaggactatggccgcgcgctgatcgttggcgaaccgaccttcggtaaagggacggtacagcagtatcgctcgttgaatcgtatttacgatcaaatgctgcgtccggagtggccggcgttgggttccgtccagtacaccatccagaagttctatcgtattaacggcggcagtacgcagcgcaaaggcgtgacgccggatatcatgatgccaaccggcaatgaagatcgcgaaaccggcgagcagtatgaagacaacgcgctgccgtgggatagcatcaacgcggccacctatgtgaagtccggggatctgaccccgtttggaccggagctgctcaagcgccacgacgagcgtattgcgcaggatcctgaattccagtacatcatgaaggatattgcccgttataacgcgatgaaggacaaacgtaacatcgtctctctgaactacgcccagcgtgagaaagagaacgaagaagatgatgcgattcgtctggcgcggattaacgatcgcctgaaacgcgaaggcaagccgccgctgaaaaaactggacgatctgccgaaggattaccaggagccggatccgtatcttgatgaaacggtccatatcgcggtagacctggcgcatctggaaaaagcgcgcccggcggtggaaccgccggccagcaaataa

SEQ ID NO: 224175 - DNA, 678 bp, Klebsiella pneumoniae; identical to SEQ ID NO: 211473

SEQ ID NO: 224176 - DNA, 555 bp, Klebsiella pneumoniae
atgcttattttagtaggctgtacgtatcaggcagtaagacaacaaagtgaagatataatgagcaaaacagaattttacgcggatctgaaccgcgatttccaggcattaatggcaggtgaaaccagttttctggcgatgatcgccaataccagcgcgctgctgttcgagcggctgagcgaggtcaactgggccggtttctaccttctggaaggcgataccctggtgttgggaccgttccagggcaaactggcctgcgtgcggatcccggtcgggcgaggcgtatgcggcgcggcggtggcgcaggctcaggtccagcgcgtcgaggacgtccacgcctttgacggccacattgcctgtgatgccgccagtaattcggaaattgtcttccctctgtgcgtgaatggccagattatcggcgtgctggatatcgatagtccggcttacgggcgcttcaccgctgaagatgagcaggggttgcgcacgctggtcgagcatctggaaaaactcattgcggccacggattatcaaaaaatctttacccgtgtcgtgggataa

SEQ ID NO: 224177 - DNA, 1284 bp, Klebsiella pneumoniae
atgccgataaaaacacccaccctcaaacctgcgaaaaagatggtcgtgcataccgtcagcacgccgcttccctatgcgcattatcagcgctgtacgcagtgtgacatgctcttccgcttaccggtgctcaaacgcaaccaaagcgcctggtgtccgcgctgtaacgcgaaggtgcgcgatggtcgcgactggtcgctgacccgcctgggcagcatggccctcgcgatgctattgctcatgcctttcgcctggtctgagcctttgctgcgcctgcatctgttgggcgtacgcatcgacgccaacgtcctgcaggggatctggcagatgaccgcgcagggcgatccgattaccgccgccatggtgctgttttgcgcggtagtcgccccggtgctgctggtggtctccatcagctatctctggctgggcaatgtgctggggatgaacctgcggccggtgctgctgatgctcggcaagcttaaagagtgggtgatgctggatatctatctggtgggcatcggcgtcgcctccatcaaggtgcaggattacgccttcctgcagccgggcatcggtctggtggcgtttatctccctgacgttgttgagcatcctgacgcttattcatatgaacgtcgaagagctatgggagcgtttctatcccgagcgtccggcgacccgcgccgataataatctgcaggtgtgcaccggctgccattacaccggctatcgcgacgcgcgcggccgctgccgacgctgccacacgccgctgcatcatcgccgaccgcagagcctgcagcgcagctgggcggcgctgattgcctcgctggttttcctctttccggccaacctgttgccaatctccatcatctacgtcaacggcgcgcgccaggacgacacgatcctctcggggatcatctccctggccagcagcaatatcgccattgccggggtcgtgtttatcgccagtattttggtgccattcaccaaagttatagtgttatttaccctgctgctcagcatacaattcaagtgcgagcagggattgcgcacccgcatcctgctgctgcggctaatcacctggattggccgttggtcgatgctggatctgtttgttatctcactcaccatgtcgctaataaatcgcgatcagctcctcgccttcaccatggggccggctgcggtttactttggcggcgcggtaattttaactattcttgcagttgaatggctggacagccgcttactttgggacgcacatgagtcaggaaacgcccgcttcgcagactga

SEQ ID NO: 224178 - DNA, 2634 bp, Klebsiella pneumoniae
atgagtcaggaaacgcccgcttcgcagactgaagccagaataaaaaccaaacgccgtatttcgccattctggctgctgccggtcatcgcgttgctgattgccgcctggctaatctggaccagctttgacgatcgcggatcgacgattacgattgatttccagtccgcgaacggcatcgtgccgggacggacgccgatccgctatcagggggttgaagtcggcaccgtccaggatattagcctcagtaaagatctgagtaagattgaggtttcggccagcatcaaacgcgatatgaaagatgcgctgcgcaaagagacccagttctggctggtcacgccgaaagcctctctggccggcgtatcgggcctcgatgcgctggtgggcgggaactacatcggcatgatgccgggcaagggtgaacccgaagatcactttgtcgccctcgacacccaacctaaataccgcatcaacaacggcgagctaatgatccacctgcaggcgccggatcttggctctctgaacagcggctcgctggtctacttccgaaaaatcccggtcgggcgggtgtatgactattccctgaatgccaataatcagggggtgaccatcgatgtgctaatcgagcgccggtttaccaatctggtgaaaaaaggcagccgcttctggaacgtctcaggcgtcaaggccgacgtcggcctgagcggggccaaagtgcaactggagaacctgtccgcgctggtgaacggcgccatcgcctttgactcccccgccgattcgcatgtcgcctcgcaaaacgatgaatatcacctgtatgaagatctggcgcatagccagcgcggcgtggtggtgaccctcgatctgcctgatggcgatggactgaaagcgggctcgacgccgctcatgtatcaggggctggaggtgggccagttaagcaaactgaatctaaaccccggcggcaaagttactggcgagatgaccgtcgacccgagcgtggtgacgctgctgcgggagaaaacgctgattcagatgaagaagccgaagctctccctcgataaccccagcattagcaccctgctcaccggcaatacctttgagctggtgcccggcgaaggcgagccacgcaatcacttctcggtaatgccggcggataaagcgctgctggatgagcccaacgtcgccaccgttactctctcggcgccggagagctacggcatcgacggcggtcagccgctggtgctgcacggagtaaaagtcggccaggtgctggagcgtaaactgacggccaaaggggtaacctttcaggttgccattgaccctgaataccgcgatctaattcacggcgacagcaaatttgtggttaacagtcgtctggacgtcaaagtggggctcgacggcgtgcaggtgctgggcgccagcgccagcgaatgggtgaacggcgggatcagggtgatccccggcgaaaaaggcaaaatgcaaagcagctatccgctgtacgctaaccttgaaaaggcgcaggaaaatagcctgagcgaagtaccgaccactaccctgagcctgtctgctgagacgctgcctgacgttcaggccggctcggtggtgctgtatcgtaaattcgccgtcggcgagatcatcgccgtcaaaccgcgcaaggatgcattcgatatcgatctgcatatcaagccggagtaccgctacctgctgaccaacaacagcgtcttctgggcagaaggcggtgcgaaggtcaagcttgacggtaacggactcaccgtgcaggcctcgccgctggcgcgcgcgatcaaaggggcgatcagtttcgataacctcaatggcagcagcgccggagcacggctgaataacaaacgtatcctttatgcatctgaaacggcggcgcgcgccgtgggcggccaaatcaccctgcacgcgtacgacgccgggaagatggcggccgggatgccgattcgttatctcggcatcgacatcggtcaaatccagtcgctggagctaatcaccgccaaaaacgaagtgcaggcgaaagcggtgctctatccggaatacgtcggcaccttcgcccgcgccgggacccgcttctcggtgatcactccgcaaatctccgccgcgggcgtggaacatctcgacaccctgttccaggcctacatcaacgttgagcccggccgcggcccggcacgacgcgattttgagatccaggatacgacgatcagcgattcgcgttatatcgacggcctgaacatcgtggtggaagcgccggaggcggggtcgcttggcatcggtacgccggtcctgttccgcggactggaagtcgggacggttaccggactgtcgctggggtcgatgtctgaccgggtgatggttaagctgcgcatcagtaagcgctaccagtacctggtacgtaataactcggtgttctggctggcctcgggttacagcctcgacttcggcctgattggcggggtggtgaaaaccggtaccttcaatcagtttatccgcggcgggatcgcctttgccacgccgccgggcacgccgctggcgccgaaggcccaggatggcaagcacttcctgctgcaggagagcgagccgaaagagtggcgggagtggggcaccgctctgccgcagtaa

SEQ ID NO: 224179 - DNA, 1389 bp, Klebsiella pneumoniae
atgcgcgcggcgatgccagcgcatctctctttcgacgactttatcgccgcctgtcagcgcccgctacgccgcagtattcgcgtcaatacgctgaagattagcgtcgatgatttcctctctctggttgccccctacggctggcagctcgcgccggtgccctggtgcgcagagggattctggatcgagcgagaggatgacgacgcgctgccgctgggcagtaccgccgaacatctcagcgggctgttctatattcaggaagccagttcgatgctgccggtcgccgccctgttcgccgataaccggcagcccgaacgggtgatggacgttgccgccgccccgggatcgaaaaccacccaaattgcagcccgaatgggcaacgcgggcggcattctcgccaatgaattctccgccagccgggtgaaggtgctgcatgccaacatcagccgctgcggcatcagcaacgtcgctctgacccacttcgacggccgggtttttggcgcggccttgcccgaaaccttcgatgccatcctgcttgacgccccctgctccggcgaaggggttgtacgtaaagacgccgacgcgctgaaaaactggtcgccggagagcaacctcgacatcgccgccactcagcgcgagcttatcgacagcgccttccatgctctgcgccctggcgggacgctggtgtattccacctgcaccctgaatcgtgaagaaaatcaatcggtcattgagtggctgctgtcccgctatccgcaggcggtggagatcctgccgctgggagagttgtttcccggcgcagccgacgccttaaccgcggaaggttttctgcacgtttttccgcaaatttacgattgcgaaggcttctttgtcgcaaggttgcgcaaaactgcggcgatcgatccgctcccggcgccaggctataaggtcggtaaattcccgtttacgccgctgaaggaccgggaggccgccgcggtaactgccgccgccagggctgttggcctggagtgggacgcaggccatacgctgtggcagcgggataaagagctgtggctgtttccgctggctttggagcccctgttcggcaaggtgcgcttttctcgcatcggcgtgcgcctggcggagctgcacaataaggggtaccgctggcagcatgaggcggttatcgcctttgccgcgccgcagcgcgccttcgagctgtcgcaggaggaagcggaggaatggtatcgcgggcgcgacgtctatccgcaaaccgcgcctgggcaggatgaaaccattgtgaccttccagggcgtcccgctgggcctggcgaagcgcgtcggctcccgactgaagaacagctatccgcgcgaactggtgcgcgatggaaaactttttgccggcaaggtgtga

SEQ ID NO: 224180 - DNA, 240 bp, Klebsiella pneumoniae
atgagtaaaaccaatgtccgcatcggcgcgttcgaaatagacgatgccgaactgcacggtgagcatcagggtgagcgaacgttaagcataccctgcaaatccgatccagacttatgtatgcagcttgatgcctgggatgccgacaccagcgtgcccgcgattctcaatggcgaacattccgttctctaccgtaaacattacgaccgccagtccgatgcctgggtcatgcgccttgcctga

SEQ ID NO: 224181 - DNA, 192 bp, Klebsiella pneumoniae; identical to SEQ ID NO: 136719

SEQ ID NO: 224182 - DNA, 654 bp, Klebsiella pneumoniae
atgtatcaacgtattaacggcagcgactggcgtaatatctggctgatgggcgatctgcatggctgctttgcgctgctgatgaatcgcctgcgtcagctgcgttttgatccctgggccgatctgctgatctcggtgggcgatctgatcgatcgcgggccgcagagcgccgattgtcttggcctgttgcgctgtcgctggttcagggccgttcgggggaatcatgagcagatggcgctggaggcgctggagagcggagatatgcggctctggcagatgaacggtggcgactggtacgtcaagggtgatgcgcggcagcgggccgacgtcgatcggctgctggcgcactgtcggcggctaccgttgattattgaagtggaatgcgggaaagcgcggcatgtgatcgcccacgccgattacccggcgccggtctatcgctggcagcagccggtggatccccaacgggtactatggagccgccatcgtctgagtgaacacctggcggggcgccatggcgctattgccggcgcagaccatttctggtttggccatacgccgcttcaggcgcgttatgaccacgataatcaacactatattgatacgggcgctgtgtttggtgggacgctgacgctggtggcgctgcagtcggcaggctaa

SEQ ID NO: 224183 - DNA, 1011 bp, Klebsiella pneumoniae; identical to SEQ ID NO: 136721

SEQ ID NO: 224184 - DNA, 192 bp, Klebsiella pneumoniae; identical to SEQ ID NO: 211482

SEQ ID NO: 224185 - DNA, 339 bp, Klebsiella pneumoniae; identical to SEQ ID NO: 211483

SEQ ID NO: 224186 - DNA, 870 bp, Klebsiella pneumoniae
atgctgaccgggctctatattaccctgcgctttgggcactttatctccctgatgctggcttttggctgcgtgctgtatggcgcctggtgggcgccggtaccgctgagacgcgtgctgatgctgcgcttttatccactactgcgcccgctgctgctgatcggcgcgatctctacgctggcgctgtatctcctgcagggaggaatgatgggcgaaggctggacggatgtctggcgacccgccgtctggcaggcggtggccgggacccgctttggtggagtgtggatctggcagatcctactggcgtggatcgcgcttgcggtagtgtggatccgtccccgtcacggcgcccgccagctggtggccctgctggcggcacagctgctgctttccgccggggtagggcacgccgctatgcacgatggtctcaccggcgtgctgcagcggacaaaccacgctgtgcatctcttctgcgtcgccagctggtttggcggtctgttgccctttatctattgcctgcgcctggcgcaggggcgctggcggccggccgcggtctataccatggcgcgcttttcacgttacgggcatctggccgtcgccggcacgattgccagcggagcgctcaatgcgctgttgatccagggaggattgattggcgcatcgccgtggggacgcatgttgttgatcaaatgtgcgctggtcgccgggatggtggtaattgcgttagtgaacaggtatgttctggtaccgcgcatgtcggcaagcggttcgcaggcggaaagcctgatcctgcgaaccacgcaggctgaaatagggctgggcgcgctggcgctgctggccgtcagtctgtttgccacctgggaaccttattga

SEQ ID NO: 224187 - DNA, 375 bp, Klebsiella pneumoniae
atgcgacttcttgctggacgcgcgttgcgcctctccgttgcgcttgccgggatgttaaccgcggcgggcgccttcgcccacgctcacctgcagcagcagatcccgaccgccggggcgcagctttcagcttccccacagacgctgacgctcagtttttccgaaggtattgaacccgcattcagcggcgtgaccgtcaccggtccgcagcagcatgcggtggctaccggaaaactgacccgcagcgccgataatccggccgaggttacgttacctttggcggaagccttgccgccgggagagtacaccgtggcatggcatgtggtctcggtggatggtcataaaaccaaagggcaatatacctttagcgtgaagtaa

SEQ ID NO: 224188 - DNA, 231 bp, Klebsiella pneumoniae
atggaaagaaatctggccaaaatttcgcaagatgagatggataaagtcaatgtcgatctcgccgccgccggcgttgcttttaaggagcggtacaatatgccggtggtcgctgatttagtcgagcgtgaacagcctgcacatctgcgcgactggttccgtgaacgactgatcgcccatcggctggcctccgtctccctttcgcgactaccgtgggagccgaaacagaaataa

SEQ ID NO: 224189 - DNA, 660 bp, Klebsiella pneumoniae; identical to SEQ ID NO: 139090

SEQ ID NO: 224190 - DNA, 2028 bp, Klebsiella pneumoniae
atgaccttgcatggcgatacacgcatcgataattattactggctgcgcgacgatgagcgcgcgcgacctgacgtgctggagtatctgcacgcggagaacgcttacggcaagcaagtgatggattcgcagctcagcctgcaggagcgtctgctgaaggagattatcgaccgcattccgcagcgggaagtctctgccccctacagtaaaaacggctttcgctaccgtcaggtgtatgagccgggctgcgaatacgctatctaccagcggcagtcggtgctgaaagaagagtgggatgagtgggagatcctgctcgatgccaaccagcgggcggcgaagagcgagttctacaccctgggcggactgggcattgcgcccaacaaccagctaatggcggtggcggaagattacctttcccgccgccagtacggcctgcgcttttgcgacctcagcaacggcgagtggtacccggaaatcctcgaaaatgtcacctccggctttgcctggagtaacgattcacgctttgtttggtatgtgcgtaaacatcccaccacgctgctcccttatcaggtctggcgccacaccgtcgggacaccggcgcagagcgacgcgctggtctacgaggaaaaagatgagaccttctacgtcagcgtgcataaaaccacctcccagcagttcgtggtaatttatctctccagcgccaccaccagcgaagtgctgctgctcaacgccgaactgccagacgccgagccggtctgctttctgccacggcgtaaagatcatgaatacagtcttgatcactatcagcacgctttctatcttcgttccaaccgggaggggaagaatttcggcctctaccgtaccgtgctgcgtgatgaagaacagtggaccacgctgatccccccgcgtcacgacgtgatgctcgaaggatttaccctgtttaccgactggttggttgtggaggagcgccagcgtggcctgaccagtctgcggcaaattaaccgcaagacccgggaggtggtggggatcgcttttgacgatccggcctatgtcacctggcttgcctataatccggagcccgaaacgtcgcgactgcgctacggctattcctccatgactacgccggatacgctgtttgaactggatatggataccggcgaacgaagagtgatcaaacagcaggaggtaaaggggctggatacgagctgctaccagagcgaacacctgtgggtgaccgcccgcgatggcgtcgaagtcccggtctctctggtctaccatcgcgaacattttcgcaaagggagcaacccgctgctggtctatggctatggctcatatggcgagagtatcgatgccgatttcagcgccagccggctgagcctgctcaaccgcggctttgtctacgccatcgcccacgtccgcggcggcggcgagctgggtcagcaatggtatgaagacggtaaattcctgtgtaagaaaaataccttcaacgactatctggacgtctgtgacgcgctgcttgcccaggggtacggcgatccgcggctttgctacggcatggggggcagcgccggcggaatgctgatgggcgtggccgtgaatgaacggccagagctgttccatggcgtgatagcccaggtgccgttcgtcgatgtggtgaccaccatgctggatgaaactattccgctgaccaccggtgaatttgaagagtggggaaatccgcaggatgaaacctattatcactatatgaaaagctacagtccctatgacggcgtgagggcgcaggcctatccccacatgctggtgactaccggtctgcatgattcccaggtgcaatactgggagccggctaaatgggtggcgaaactgcgggaactgaaaaccgacgataacctgctgctgctctgcaccgatatggattccggacatggcggaaaatccgggcgctttaaaagctatgaaggggtggcgctggagtacgcctttttcatcgccctggcgcaggggacactgccgggaaaagcggcagtgtag

SEQ ID NO: 224191 - DNA, 660 bp, Klebsiella pneumoniae
atggctaactggctacatcaactgcagtcgctgctcgggcagcagggtgcgtcaccgtccggcgagtcgtcaaaagggagcggcctgctgcccggcgccatcggtgggctggccggattgctggtggccagcaaatcgtcacgcaaattattggcgaaatatggcactagcgcgctgctggcaggcggcggggcggtggcgggcacggtgttatggaacaagtatcagcagaaaatgcgcgcgcagaatacgtccgcccaggcgcctgagacggcagcggcgccgacggatgtcgatccgcgtagcgtgcggctgatcacggccctggtatttgccgcgaaaagcgacggtcatattgatgaccacgagcgggcgaatattgaaactcagctgcgggcggccaatattgacgttcaggcccgggtgctaattgaccaggcgctggcccagccgctggatccgcagcgtctcgccgagggcatcatcgacccgcaggaggcgctggagatctactacgtcagctgcgcggtgattgatatcgaccattttatggagcgtagctaccttaatgcgctgggagacgccctggcgctgccgaaagatgtccgggccgatatagaacaggatatccagtcacaaaaacaagcgctaagcgtctaa

SEQ ID NO: 224192 - DNA, 348 bp, Klebsiella pneumoniae
atggcggttgaaattaaatatgtggtgatccgcgaaggtgaggaaaaaatgtcttttgccagcaaaaaagaggccgacgcttacgacaaaatgctcgatctggcagaggtgctgaatgactggctggtggcatcgccgctggagatggatgacgtccagcgcgataccatggcgatgtggctggctgagcgtaaagaagcgctgcagcatatcctgcgagttggccgactgccggagcaagagacgcccgcacaggacgcctccgcgccgtcggctaccgccgagacttctccggcgggtgatgacgccgtgccggcggccaaagcgcgcaaagccaaggcagcctga

SEQ ID NO: 224193 - DNA, 1179 bp, Klebsiella pneumoniae
atgactgtattaggcaccgcgctgcgcccggcagccaccaaagttatgctgttaggttccggcgagttgggtaaagaagtcgctattgaatgtcagcgtctgggcattgaaaccatcgccgtagaccgctaccccgatgccccggcgatgcaggttgcccaccgcgcccacgtcatcaatatgctgcacggcgagagcctgcgcgccctgattgaacaggaaaaacccgattacatcgtgccggagatcgaagctatcgctaccgacaccctggtcgaactggaacaggccgggcagaaagtggtccccacggcgcgggcggcaaagctcaccatgaaccgcgaaggcattcgccgcctggcggcggaagagctgcagcttcccacctcccgctatcgttttgccgacagcgaagaaggcttccgcgcggcggttaccgagatcggtttgccatgcatcgttaaaccggtgatgagctcctccggcaaaggccagagctttatccgctcggctgaccagctcagcgaagcctggcgctatgcgcagcagggcggccgcgctggcgccggacgggtgatcgtcgagggggtggtgaacttcgatttcgaaatcactttgctcaccgtcagcgctgtcgatggcgtgcatttctgcgctccggttggtcatcgtcaggaagacggcgactaccgcgagtcctggcagccgcagcagatgagcgacctggccctcgagcgtgcccagaccatcgcccgcaaggtggtgctggcgctgggaggttatggtttgtttggcgtggagctgttcgtatgcggcgacgaggtgatcttcagcgaagtctccccgcgaccacacgacaccgggatggtgacgcttatctcccaggatctctcggaattcgccctgcacgttcgcgccttcctcgggctacctgtcggcgctatccgccagtatggcccggccgcctccgcggtgatccttccgcagttgtccagccagaacgtcagctttggccagctgcagtcggccgtcggggctggcctgcagctgcgtctgttcggcaagccggagattgacggtacccgccgcctgggggtaaccctcgccgtcgccgattcagtcgaagaggccgtggcgcgggctaaagccgcagccgcggcggtcatcgtcgaagggtaa

SEQ ID NO: 224194 - DNA, 642 bp, Klebsiella pneumoniae; identical to SEQ ID NO: 211492

SEQ ID NO: 224195 - DNA, 1812 bp, Klebsiella pneumoniae
atgaattcgacaatgttacgggtaacaaatcgcattatcgaacggtcgcgtgacacccgcgcggcttacctcgcaaggattaaccaggccaaaaccgacaccgtgcatcgtgcgcaactggcctgcggcaatctggctcacggattcgcggcctgccaggctgacgacaaagcctccctgaagagcatgttgcgcaacaacattgccatcatcacctcctacaacgacatgttgtccgctcaccagccctatgaacactacccggagatcatccgcaaagcgctgcacagcgccaatgcggtcggccaggtcgccggcggcgtgccggcgatgtgcgacggcgtaacgcaggggcaggacgggatggagctttcactcctgagccgcgaggtgatcgctatgtccgccgccatcggcctgtcgcataacatgttcgacggggccctgtatctcggggtctgcgataaaattgttcccggtctgaccatggcggcgctctcatttggccatctgccgtcggtctttattccctccggtccgatggccagcggcctgccgaataaagagaaggttcgcattcgccagctgtatgcagaagggaaagttgaccgtatggcgctcctggagtccgaagccgcctcttatcacgcgccggggacctgtactttctacggaacggcgaacaccaaccagatggtggtcgaatttatgggcatgcagctgccgggctcgtcctttgtccatccggatgctccgctgcgggaagcactgaccgccgccgccgcgcgccaggtcacccgcatgaccggcaacggcaatgagtggatgccgctgggcaaaatgtttgacgaaaaagtggtagtcaacggcatcgtggcgctgctggcgaccggtggctccaccaaccacactatgcacctggtggcgatggcccgcgcggcgggaattatcattaactgggacgatttctccgacctgtcagacgtggtgccgctgctggcgcgcctctatcccaacggcccggcggatatcaaccacttccaggcggcaggcggcgttccggtactggtgcgcgagctgctgaaaggcggcctgctgcatgaggatgttcacaccgtggccggctttggcctgtcgcgctacaccctggagccatggctgaataacggcgagctggactggcgcgaaggggcgacagcgccattggacgaccaggtcatcgcgacctttgaaaaaccattctcccgccacggcggcaccaaggtgctgagcggcaacctgggacgcgcggtgatgaaaacttcggcggtcccggtggagaaccaggtgattgaagcgccggcggtggtatttgagagccagcacgacgtgttgccggcctttgaagcggggctgctggacaaagactgcgtggtggtggtccgtcatcaggggccaaaagcgaacgggatgccagaattacataaacttatgccgccacttggtgtattattggaccgccgtttcaaaatagcgctggtgaccgatggccgactctctggcgcctccggtaaagttccgtcagccattcacgtcacgcctgaagcgtatgatggcggcttgctggcgaaagtgcgcgatggcgatcttattcgcgtgaacggacagacgggggaactgacgctgctggtggatgaggccgaactggcggcgcgtcagccgcatatccctgacctcagcgcgtcgcgcgtgggaaccggtcgggagatgtttggggcgctgcgtgagaagctctctggcgcggagcagggcgcaacctgcatcactttttaa

SEQ ID NO: 224196 - DNA, 1476 bp, Klebsiella pneumoniae; identical to SEQ ID NO: 211494

SEQ ID NO: 224197 - DNA, 888 bp, Klebsiella pneumoniae
atgagcgccctgttactaatgaacatgctggaaaaaatccagtcccgactggaacaccttagcaaatctgaacgcaaagtggcggaagtgatcctcgccacccccgagcaggccattcattcgagcatcgccgccctcgcccttgaggccggcgttagcgaaccgaccgtcaatcgcttctgccgtagtctcgaaacccgcggattccctgacttcaaactgcatctggcccagagccttgcgcacggcacgctctatgttaaccggaatgtcgatgaagacgacagcgttgagtcatacacgggaaaaatattcgaatcggccatggcgagtttagatcaggtgcaccattctctcgacatgtcggcggtaaatcgcgcggtggatctgctgactcaggccaaaaaaatcgcctttttcggcctcggctcctcagcggcggtcgctcacgacgcgatgaacaaatttttccgctttaacgtgccggtcatctattccgacgacattgtcctgcaacgcatgagctgtatgaattgcgatgacgatgatgtggtggtgattatctcgcataccggaagaaccaagagcctggtggagctggcgcagctggctcgtgaaaacgatgccatggtgatcgctctcacctccgccggtacgccgctagccagggaagccacgctcgccattacccttgatgtgccggaagataccgacatctatatgccgatggtctcccgtttggcccagttgaccgtcattgacgtgttggcgactggctttaccttgcgtcggggggcaaaattcagagataacttgaagagggtcaaggaagcgctgaaggaatcgcgttttgataaagaaccattcgtacccagtgataatcaataa

SEQ ID NO: 224198 - DNA, 1443 bp, Klebsiella pneumoniae
atgtccagaaggcttcgcagaaccaaaatcgttactaccttaggcccggcaactgaccgcgataacaacctggaaaaggttatcgccgcgggcgcaaacgtagtacgtatgaacttctctcacggcaccccggaagatcatcagctccgtgccgacaaagtgcgtgagattgcggcaaaactgggccgtcatgtggccatcctcggcgacctccagggaccaaaaattcgcgtatcgaccttcaaagaaggcaaaattttcctcaacgtcggcgataaattcctgctcgacgcaaaccttggcaaaggcgaaggcgacaaagagaaagtcgggatcgactataaaggcctgccggcggacgtcgtgccgggcgatatcttattgctcgacgatggtcgcgtgcagctgaaagtcctcgaagttcaggggatgaaagtgttcactgaagtgaccgtcggcggcccgttgtccaacaacaaagggatcaacaagctgggcggcggcctgtctgccgaagcgctgaccgacaaagataaagctgatatcgtcaccgccgctaaaatcggcgtcgactacctggccgtctctttcccgcgctgcggcgaagacctgaactacgcccgtcgcctggcgcgcgatgccggctgcgatgcgaaaatcgtcgccaaagttgagcgtgccgaagcggtttgcgatcaggatgcgatggacgacgtgatcctcgcctccgatgtggtaatggttgcccgtggcgacctcggcgtcgagatcggcgatcctgagctggtgggcatccagaaagcgctgatccgtcgtgcccgtcagctgaaccgttccgtcattaccgccacccagatgatggagtcgatgatcaccaacccgatgccgactcgcgcggaagtgatggacgtggccaacgccgtgctggatggtaccgatgcggtgatgctctccgcggagaccgccgccggtcagtatccttcggaaaccgtggccgcgatggcgcgcgtgtgtctgggcgcggaaaaaatccctagcctcaacgtctccaaacaccgtctggacgtccagttcgacaacgtggaagaagcgattgccatgtcggcgatgtatgccgccaaccacctgaaaggcatcaccgccatcatcaccatgaccgaatcgggccgtaccgcgctgatgacttcgcgcattagctccggtctgccgattttcgccctctcccgccacgagcgcaccctgaacctgaccgccctctaccgcggggtgacgccggtgttcttcgacagccagaatgacggggtggccgccgcgcacgacgccgtcaatctgctgcgggacaaaggctatctggtctccggcgacctcgtggtcgttacccagggtgacgtgatgagcaccatcggcagcaccaacaccacccgtatcctcaccgtcgagtaa

SEQ ID NO: 224199 - DNA, 975 bp, Klebsiella pneumoniae
atggaaacgaaaaaaaataatattgagtttatccctaagtttgaaaaatcctttttactgccgcgctactggggcgcctggctgggggtctttgccttcgccggtattgcgctgacgccgccatcctttcgcgatccgctcctcggcaaactcggtcgtctggtagggcgtctggcgaaaagctcgcgccgccgggcgcagattaatttgctgtactgcttcccggaaaaaagcgagtacgagcgggaagcgatcatcgacgccatgtatgcctcggcgccgcaggcgatggtgatgatggccgagctgggcctgcgcgatccgcagaaaatccttgcccgcgttgactggcaggggaaagcgatcatcgacgagatgcagcgcaataatgagaaggtgatttttctcgttccgcatgcatggggtgtggatatcccggcgatgctgatggcctccggcgggcagaagatggcggcgatgttccataaccagggtaacccggtgttcgattacgtgtggaataccgtgcgtcgtcgttttggcgggcgtatgcacgcgcgcaacgatgggatcaaaccgtttattcagtcggtgcgccagggctactggggctactatctgcccgatcaggatcacggcgccgaacacagcgagtttgtggatttctttgctacctacaaggccacgctgccggcgattggccgcttaatgaaagtatgccgcgcccgcgtcgtaccgctgttcccggtctacgatggcaagacgcaccgcctgacggtgctggtgcgcccgcctatggacgatctgctggacgctgacgatacgaccatcgcccggcggatgaacgaagaagtggaagtgtttgttaagccgcacaccgagcagtatacctggatcctgaagctgctgaaaacgcgcaagccgggtgaaatcgagccctacaaacgcaaagagctgttcccgaaaaagaaataa

SEQ ID NO: 224200 - DNA, 1320 bp, Klebsiella pneumoniae
gtgcaacagatagcccgcgctgtcactcaggcattcaacaatctgccacgacctcatcgcgtcatgctggggtcgcttagcgttcttaccttagcggtcgccgtctggcgaccctacatttaccacccggaatccgcccccatcgtcagaaccattgaactggaaaaaagcgagatccgttccctgctgccggaagcctccgagccgatcgaccaggccccgcaggaagaagaagccattcctcaggatgagctcgacgaaaaagccgatagcgatgccggcgggcacgaatacgtggtgtcgaccggcgatacgctcagcagtattctgaaccagtacggtatcgatatgggcgatatcgcccagctttcctccgccgataaagagctgcgcaacctgaagattggccagcagctctcctggaccctgaccgccgacggcgatctgcagagcctgacctgggagatgtcccgccgcgagacccgcacctatacccgtgtggataacggttttaaaatgagcagcgagctgcagaaaggcgattgggtcaacagcgtgctgaagggcaccgtcggcgccagctttgtctccagcgcgcgtgatgccgggctgaccagcacggaaatcagcgcggtgatcaaggccatgcagtggcagatggatttccgtaagctgaagaaaggcgacgaattctcggtattgatgtcgcgcgaaatgctcgacggcaaacgtgagcaaagccagttactcggcgtgcgtcttcgctctgacggtaaggattactatgccatccgcgccgaagacggcaaattctacgaccgcaacgggacgggtctggcgaagggctttatgcgcttcccaacggcgcgtcagttccgcgtctcctctaactttaatccgcgtcgtctgaacccggtcaccggccgcgtcgcgccgcaccgtggcgtcgatttcgcgatgccgcagggaacgccagtgctggcggtgggcgatggtgaagtagtcgtggccaaacgcagcggcgctgccgggtattacgtcgcgatccgccacggccgcacctataccactcgctacatgcacctgcgtaagctgttagtgaagccggggcagaaagtgaagcgcggggatcgcattgcgctgtcggggaataccggacgctctacggggccacacctgcactacgaagtgtggatcaaccagcaggcggtcaacccgctgacggctaagctgccgcgtaccgaagggctgagcggttccgaccggaccgactatctggcgcaggtcaaagaggtcgttccgcagctgcggtttgactaa

SEQ ID NO: 224201 - DNA, 960 bp, Klebsiella pneumoniae
atgactagacgcattatgttacataaaaatacgcttctttgcgctggacttggcgctgtttttttgttcgcgcaggtaccgctggccagcgccgccgtggtgacttctatgaaaccgctgggctttattgcggcggccatcgccgatggggtgaccgagacccaggtgctgctgcccgatggcgcctccgagcatgattattccctccgtccttctgatgtaaaacgcttacagaacgcagacttagtggtgtggattggtccggaaatggaagcctttatggataagtcgacgcaaagcattgcggcgaataaaaaggtgacgattgccgagctggatggggtcaaaccgctgctcatcaccggggcggacgacgatgacgatcaccatggtcatgaccatggcgcagcagaaaaaggtgacggcgatcaccatcacggtatttacaatatgcatctgtggttatccccagagatagcgcggctttcggcggttgcaatccacgataaattattggaacttatgccgcagagtcgagccaaactcgacagcaacctgcagcagttcgagaccgcgctggcggcgaccgacaagcaggtgagcaatgagctggcaccgctgaaagggaagggctatttcgtttttcatgacgcctacggttactttgaaaaacactacggtttgacctcgctggggcactttaccgtcaaccctgaaatacagcccggtgcgcagcgtttacacgaaatcagaacacaactggttgagcagaaagccacttgcgtttttgctgagccacagttcaggccagcggttatcgaagctgttgcccggggcacgtctgtgcgcatggggaccctggatccactggggacaggaattacgctgggtaaaacgagttacccgcaattcctcacccaactggcgaatcagtattcgagctgcctgaaaggagattaa

SEQ ID NO: 224202 - DNA, 753 bp, Klebsiella pneumoniae
atgacaaaccttgtaacgctggaaaatgtctcggtggcctttggccaacgccgcgtgttgtctgacatctcgctggctctcacgccaggcaaaatcttaaccctgctgggccccaacggcgccggcaaatcgacccttgtgcgggtggttctcgggctggtagcaccgacagagggtgttatcaagcgtgacgcacgcctgcgcatcggctatgtgccgcagaaactgcatctggacgccacgctgccgctgaccgtcagtcgcttcctgcgtttgcgcccgggcacccgtaaagacgacatcctgccggcgctgaagcgcgtgcaggcggggcatctgatcgatgcgccgatgcaaaagctctccggcggcgaaacgcagcgcgtactgctggcccgcgccctgctcaaccgtccgcagctgctggtgctggatgaaccgacccagggtgttgacgtcaacggccaggtggcgctctacgatcttatcaaccagctgcgccatgaactggactgcgcggtgctaatggtatcccacgatctgcatctggtgatggccaaaaccgacgaagttctgtgcctgaaccagcatatctgctgctctggcgcaccggaggtggtctccatgcacccggagtttatctccatgttcggcccgcgcggcgcggaacagctggggatataccgccaccaccataatcaccgccacgaccttcaggggcgaattgtactgcgtcggggaaacagccgctaa

SEQ ID NO: 224203 - DNA, 786 bp, Klebsiella pneumoniae
atgattgaacttctgttacctggctggcttgccgggatgatgctggcctgcgccgctggtccgctgggctcctttgtggtctggcgccgcatgtcttatttcggcgacacgctggcgcatgcgtctctgctcggcgtcgctttcggtttattgcttaacgtcaatccgttctatgcagtgatcgccgtgaccctgctgctggccggcgggctggtgtggctggaaaaacgaccgcatctggcgatcgataccctgctgggcatcatggcgcacagcgcgctgtccctggggctggtggtggtcagtctgatgtctaacgtccgcgtcgatctgatggcgtacctgttcggcgatctgctggcggttacgccgcaggacctgatcgccattgccattggcgtggtgattgtgattggcattctgctctggcagtggcggaatctgctggcgatgaccatcagtccggacctggcgtttgtcgacggcgtgaagctgcagcgggtcaagctgctgttgatgctggtcaccgccctgactatcggcgtggcgatgaagttcgtcggggcgctgatcattacttccctgctgattatcccggccgccaccgcccgccgttttgcccgtacgccggagcagatggccgccgtggcggtgggcgtgggcatgctggccgttaccggcgggttaaccttctcggctttctacgataccccggccgggccgtcggtggtgctctgcgccgcggtgctgtttattctcagcatgacgaaaaaagccgccagctga

SEQ ID NO: 224204 - DNA, 1011 bp, Klebsiella pneumoniae; identical to SEQ ID NO: 211502

SEQ ID NO: 224205 - DNA, 612 bp, Klebsiella pneumoniae; identical to SEQ ID NO: 211503

SEQ ID NO: 224206 - DNA, 522 bp, Klebsiella pneumoniae
atggctattattctcggcattgacccggggtcgcgcgttaccggttatggcgtgatccgccaggttgggcggcagctgagctacctgggcagcggatgcatccgcaccaaagtggacgatctgccgtcgcggctgaagctgatctacgccggggtgacggagatcatcacccagttccagcccgactatttcgccattgagcaggtctttatggccaagaatgccgactcggcgttaaagctcgggcaggcgcgcggggtggcgatcgtcgcagcgaccaatcaggcgctgccggtgtttgaatacgccgcccgtcaggtcaagcagaccgtggtcgggattggcagcgccgaaaagagccaggtccagcatatggtgcgcaccttgctcaagctgcccgccaatccgcaggcggatgcggcggatgcgctggcgattgccatcacccattgccatgtcagccagaatgccgctcagatcagcgagacccggctcaatctggcgcgggggcgcttacgataa

SEQ ID NO: 224207 - DNA, 741 bp, Klebsiella pneumoniae
atggcaggtcatagtaaatgggccaacaccaaacaccgcaaagcggcacaggatgccaaacgcggtaaaatctttacgaaaatcattcgcgagctggtcaccgccgcgcgtctgggcggcggcgatccggcttccaacccgcgtctgcgtgcggccgttgataaagcgctgtctaacaacatgactcgcgacaccctgaaccgcgccatcgcgcgcggcgtcggcggcgatgaagacgcgaacatggaaaccatcatttatgaaggctacggtcctggcggcaccgcggtgatggtggaatgtctgtccgacaaccgtaaccgtaccgttgcggaagtgcgtcacgccttcaccaaaaccgggggtaacctcggcaccgatggttccgtctcctacctgttcagcaagaaaggcgttatctccttcgagaaaggcgatgaagacactatcatggaagcggcgctggaagcaggcgcagaagacgtggtgacctatgacgacggcgccatcgacgtctacaccgcctgggaagagatgggcgctgtgcgcgacgcgctggaagccgccggcctgaaagccgacgctgccgaagtctcaatgattccgtccaccaaagcggatatggatgccgagacggcgccgaagctgctgcgtctgatcgatatgctcgaagactgcgacgacgtgcaggaagtgtaccataacggcgagatctccgacgaggtcgcagccaccctgtga

SEQ ID NO: 224208 - DNA, 444 bp, Klebsiella pneumoniae; identical to SEQ ID NO: 138284

SEQ ID NO: 224209 - DNA, 1788 bp, Klebsiella pneumoniae
atgcgtacagaatattgcggacagcttcgacagtcccacgttgggcagcaggtgactctgtgtggttgggtcaaccgccgtcgcgatctcggtagcctcatttttatcgatatgcgcgaccgcgaaggcatcgttcaggtgtttttcgatccggatcgtgcggatgcgttgaagttagcctctgaactgcgtaatgagttctgcattcaggtcactggcaccgttcgcgcgcgtgaagagaaaaacatcaacgcggacatggccaccggcgctatcgaagtgctggcttccgatctgacgatcattaaccgctcagaatcgctgccgctggactccaatcacgtcaacaccgaagaagcgcgtctgaaataccgctacctcgacctgcgtcgtccggagatggcgcagcgcctgaaaacccgcgcgaaaattaccagctttgtgcgccgctttatggacgaccatggcttcctcgacatcgaaaccccgatgctgactaaagccaccccggaaggcgcccgcgattacctcgtgccttcccgcgtgcacaaaggcaaattctacgcgctgccgcagtcgccgcagctgttcaaacagctgctgatgatgtccggcttcgatcgctattatcagatcgttaaatgtttccgcgatgaagacctgcgtgccgaccgtcagcctgaattcacccagatcgacgtggaaacctcctttatgaccgcgccgcaggtgcgtgagatcatggaggcgatggtgcgtcagctgtggctggaagtgaaaggcgtcgacctgggcgagttcccgatcatgaccttcgccgaagccgaacgtcgctatggctccgataaaccggatctgcgtaacccgatggagctggtggacgtcgccgacctgctgaagtctgtggaattcgcggtctttgccggcccggccaacgatccgaaagggcgcgtggcggccctgcgcgtcccgggcggggcctctctgacccgcaagctgattgacgaatacggcaactttgtgaagatctacggcgcgaaagggctggcctatattaaagtgaccgagcgtgccaaaggcatggacgggatcaacagcccggtggccaaattcctgaccgctgaaatcgtggaagcgatccttgaccgcaccggcgcgcaggatggagacatgatcttcttcggcgccgacaacaagaaagtagtggccgacgcgctgggcgcgctgcgtctgaagctgggtaaagacctgagtctgactgacgagagcaaatgggcgccgctgtgggtgatcgacttcccgatgttcgaagacgacggcgaaggcggcctgacggcgatgcaccatccgttcacctcgccgaaagatatgaccgcggatgagctgaaagccgcgccggaagaggctgtagccaacgcctacgatatggtcattaacggttatgaagtcggcggcggttcggtgcgtatccaccgcggcgagatgcagcagaccgtatttggtattctgggcattaacgaacaggaacagcgtgagaaattcggcttcctgctggatgcgctgaagtacggtacgccgccgcatgcgggtctggccttcggtcttgaccgtctgaccatgctgctgaccggtaccgataacatccgcgacgttatcgctttcccgaaaaccaccgcggccgcctgcctgatgaccgaagcgccaagcttcgccaatccggcggcgctcggtgaactgggtattcaggttgtggagaaagaggcaaaagcgtctctggagaacaagtaa

SEQ ID NO: 224210 - DNA, 567 bp, Klebsiella pneumoniae
atgttagaactcaatgcaaaaaacacggcgctggtggtaatcgatctgcaggaaggcattctgcctttcgccggcggcccgcatcgggctgacgaggtggtggcgcgcgccgctcgcctggcagacaagtgccggcaacagggttcgccggtcatcatggtccgcgtgggctggtcggccgatttcgccgaagcgctgaaacagcctgtcgacgctcaggccggggcgcatacgctgcccgaaaactggtggacctacccggccacgctgggtaagcaggagagcgatatcgaagtgaccaaacgccagtggggcgcgttctatggcaccgaccttgagcttcagctgcgccgccgcgggatcgacaccattattctctgcggcatctccaccaacatcggcgtcgaatccaccgcccgcaacgcctgggagctgggttttaacctggtcatcgccgaagatgcctgcagcgccgcctccgccgagcagcatcagggcagtatgacgcatattttcccgcgcatcggccgggtgcgcagtaccgaggagatcctcacggcgctatga

SEQ ID NO: 224211 - DNA, 819 bp, Klebsiella pneumoniae
atgatttatattgggcttccccagtggtcgcacccgaaatgggtgcgccttggcatcaccagccttgaagagtacgcccgccactttaactgcgtggagggcaacaccaccctgtatgcgctaccaaagccggagattgtcgcccgctggtacgaacagacccacgatgacttccgcttctgcttcaaattcccggccaccatctcgcaccaggccgccctgcgccattgcgacgagttaagcagcgaattttttgcccgcctggcgccgctggcctcgcgcatcggccagtactggctgcagctgccggcgacgttcggtcctcgcgatctccccgcgctatggcattttctcgacggactgccgaaggatttcacctacggcgtcgaagttcgtcatcccgagtttttcgccaaaggggaagcggaacagcagctcaaccgcggactgcacgagcgtaacgtcaaccgcgtgatcctcgacagccgcccggtccatagcgctgcggccaccagtccggcgatgatcgatgcccaacaaaagaaaccgaaggtgccggtacatgcggtgatgaccgcccgacagccaatggtgcggtttatcggcggtgacgatatggcccataaccgggaactgtttcgcgtctggcttcagaccctggcgaagtggcatcagtcggggaccccgtggttgttcctgcataccccggacattgctttcgccccggcgctggtggataccctgtggggtgacctgcgcgctgccctgccgacggcaggaaatgcgccgtcgattccgcagcaatcttctcttttctga

SEQ ID NO: 224212 - DNA, 396 bp, Klebsiella pneumoniae; identical to SEQ ID NO: 211510

SEQ ID NO: 224213 - DNA, 744 bp, Klebsiella pneumoniae
atgtctcaccgcgatacgcttttttccgcgccgattgccagcctcggcgactggacctttgatgaacgggttgctgaagtcttccccgatatgatccagcgttctgtgcccggctactccaatatcatctcgatgatcggcatgctggccgagcgcttcgttcagcccaacactcaggtttacgatcttggctgttcgctgggcgccgccaccctctccgtgcgccgcaatattagccatccgggctgtcgcattatcgctatcgataactctcccgcgatggtggagcgctgccgtcgccatattgacgcttataaagcgccgacgccggtcgaagtgattgaaggggatatccgcgacgtgaccattgaaaacgcctcgctggtgatcctgaactttactattcagttccttgagccgggcgatcgccaggcgatcctcaataaagtctatcaggggctgaatccgggcggcgcgctggtgctctcggaaaaattcagcttcgaagacgcccacgttggcgaactgttgttcaatatgcatcatgactttaagcgcgccaacggctacagcgaactggagatcagccagaaacgcagcatgctggaaaatgtgatgctgacggactctgtcgaaacccataaagcccgcctgcgtcaggctgggtttgaacatgccgaactgtggttccagtgctttaactttggctcgctggtggccgtgaaagccggggagcaggcatga

SEQ ID NO: 224214 - DNA, 1005 bp, Klebsiella pneumoniae
atgatcgacttcagtaacttctatcagctgatcgccaaaagcccgctgtctcactggctggagacgctgcctgcccaggtagccgcctggcagcgcgatgccctgcacggcaagtttcgtgaatgggagcgcgccgtagaatttctgccggagctaacgccctggcgtctggatcttctgcacagcgtcaccgccgagagcgaaacgccgctcagcgaaggccatcagcggcggatcgaaaatctgcttaaaaacctgatgccgtggcgcaaaggcccttattcgctgtacggcatcaatatcgataccgaatggcgatccgactggaaatgggagcgcgttctgccgcacctgtccgatctcactggccggactatcctcgacgtgggctgcggcagcggctatcacatgtggcggatgatcggcgccggcgcaaatctggcagtcggtatcgatcccacccagctgttcctgtgccagtttgaagcggtgcgtaagctgctcggtaacgaccagcgggcgcatttgctgccgctgggcattgagcagctgccggcgctggaggccttcgacaccgtgttctcgatgggcgtgctctaccaccgccgctcgccgctggaccatctgtggcagctgaaagatcagctggcgccagggggcgagctggtgctggagacgctggtggttgaaggagatgaaaatacggtgctggttccgggcgaccgctatgcgcaaatgcgcaacgtctattttatcccctcagcggcggccctgaaaatgtggctggagaagtgcgggtttattgacgtgcgtatcgtcgacgcctgcgtcacctcgacagaggagcagcgacgcaccgaatggatgacgaccgaatcgctggccgatttcctcgacccacaggatcagcgcaaaacggtggaaggctatccggcgccattacgagctgtgatcattgccaccaaaccggaaacccagcagtcgctggcgaaaaaagcgagataa

SEQ ID NO: 224215 - DNA, 744 bp, Klebsiella pneumoniae
atggcggtactggaagtgtgttgctacagcatggcgtgcgcccgggaggctgagcgctgcggcgccgatcgtattgagctctgcgccgcgccgcaggaagggggattaaccccctcttatggggtgctggtctcggcccgcgaggcgattactctcccggtgcatccgatcgttcgcccgcgcggcggcgatttctgctacaccgaggaagagttcgccgcgatgcttaacgatattcgcatggtgcgggatctgggctttcccgggctggtgaccggcgtgctggatgctgatggccaggtcgatatcccgcggatgaaaaaaataatggccgcggcggggccgctggcggtgacctttcatcgcgcgttcgatctgtgcgctgacccgcgtcaggcctggaaaacgctgggtgagctgggggtcaaacgtatcctgacttccggtcagcaatcctcggcggagaaaggtatttcattaattacggaacttattgccgcaggggatactccaatcattatggccggtgcgggagtccgcgccgcgaacctgccgctgtttctgcaggcgggggtgaaagaggtccatagctctgctggccactggttgccgtcggaaatgcgctttcgtcatccgggcgtttcgatgtcagccgatcccgatgccgatgaatacagacgctacgccgtgaatggcgcagcggtggcggagatgaaaaggattatctccgcctggagaagttaa

SEQ ID NO: 224216 - DNA, 570 bp, Klebsiella pneumoniae
atggcaaactggcagcaaaatgaacaactggccgatattacggcggatctcccgcgattttccgatgcgcttcagcgcttcactgcgcgactgggactggagatcgccgggctcgacgccgaccatatctccctgcgctgtcatcagaataccactgcggaacgctggcgccgcggtctggagcagtgcggcaccctgctgtcggagaatatgatcaacggccggcccatttgcctgttcaaactggcggagccggtctgcgtggcgcactggcgcttccatatcgttgagctgccgtggccgggtgaaaagcgttatccccatgaaggctgggagcatatcgaaatcgtcctgcccggcgatccggcaaccttaaatgcccgcgcgctggcgctgctggccgatgacggactcagccagccggggatcgtggtcaaaaccagctcgccgaaaggggagcatgagcgcctgccgaaccccaccctggcggtgaccgacggcagcgtgacggtcaaatttcatccgtggtctattgaacaaatcgtcgccagcgagcaagccgatacgtaa

SEQ ID NO: 224217 - DNA, 1734 bp, Klebsiella pneumoniae; identical to SEQ ID NO: 211515

SEQ ID NO: 224218 - DNA, 1140 bp, Klebsiella pneumoniae
atgaaagtttggccggtcaaacatagcccattactgcgtcagcctgagcattttatcgcccgtagcgaactgcaggcgctgatccgcaacgtgacgcaaaacctggtgaatattaaggatgagagcgggcaatttttactacgcctggatgacgggcgcgtgatcgataccaaaggctgggccggctgggagtggacccacggcgttgggctgtacggcatctatcagtattaccagcaaaccggcgatatcgagatgcgtgatatcatcgatcgctggtttgccgaccgcttcgccgagggaacaacgaccaaaaacgtcaatactatggccccgtttctgaccctggcttaccgctttgaagagaccggccgtatggcgtatctgccgtggctggagagctgggcggagtgggcgatgcacgagatgccgcgcaccgagcagggcggtatgcagcacatgactctggcggaggagaaccatcagcaaatgtgggatgacacgctgatgatgaccgtgttgccgttagccaaaattggcaagctgcttaaccgcccccagtatgtggaggaggcaacctaccagttcctgctccatgtgcagaacctgatggaccgggagaccgggctgtggtttcacggctggaactatgaggggcggcataactttgcccgggcgcgttgggcgcggggcaacagctggctcaccatggtgatcccggattttctggaaatggtggatctccccgaggggaatgcggtacggcgctatctgattacagtcctcgacgcacagattgccgccttagcagaatgccaggacgacagcggcctgtggcataccttgctggacgacccgcactcttatcttgaggcctcggcgaccgccggctttgcctacggcattctcaaagcggtgcgcaagcgttacgtcgggcagcactacgccggggtggctgaaaaagcgattcgcgggattgtgcagaatatttcgccgcagggggagctgctgcagacctcatttggcaccgggatggggtcagacctcgacttttatcgccagatcccgcttacctcgatgccctacggtcaggcgatggcgatcctttgtctgacggagtatctacgcaagtacttctga

SEQ ID NO: 224219 - DNA, 1584 bp, Klebsiella pneumoniae
atgaaaacacgaaaaattggactggctaactatctggcctacggcgcgggcgattttctcggcgccggcacgacggcgctaaccgccgcatggctgctctacttttacacgaccttttgcggactgaccccgattgaggccacgcttatttttgctgccgcccgcgtgctggacgcggtggtaagcccgctgatgggctttctcaccgataactttggcaccacctggcttggtaagcgcttcggccgcagaaaattctttattctgctcggcatcccctgcgtattcagctattcagcgatgtgggtcggcgagatgggcttctggtactacctggcgacctatctgctgtttgatatggtctataccatgattctggtgccctatgagacgctggtgccggagatgaccgatgactttaaacagaaaaccaaattctccggcgcgcgcatttcgatggcgcagatgtcggcgattttagcctccttcctgccggggatccttctctcctggctcggcaaagataatgccagctcgttcttctatgccagtctggtgttctcggtgctgtgcgcggtgatgctgactctggtctggtgtttcacctgggaacgaccgcgggaggcgtggtcggaagcggccctgcgggcggaagcggaaaaacaaaacttaacccttgctcagagcctcaatcgcctggtgattgagctgagttctacgctgcggataaaaattttccgccagcacctcggcatgtatctggggggctatatcgcccaggacgtcttcaatgccgtgtttacctattacgtggtctttgttctgatgcaggaagccgccgtcgcctcgaacctgctggggacgatggccatcttccagtttattgcagtaatcgccatgatcccgctgtgcattcgttttggccccgcgccgtcgtaccgcatggtggtggtcctgtttggcctgagctcactctcctacgcgctgctctattacgccggactgagcgacgtctattccttattgctgctcatctctgctgtcgccggactgggacgcggcgggataaattacgtaccgtggaatacctacacctatattgccgacgtcgacgaagcgatcaccggccagcgccgggaggggatttttgccggcatcatgactctgacccgcaaagcctcgcaggcgggggcggtgatgctggtggggatcattatgcagttgtcggggttcgtttccgggcaaaaaatacagcctgaaggggtcagccataccattctgctgatcctcagcgtcggcactctggtggtgttagcctgcggcttcctcgtctcgctgcgcttcaagctcaacctgcacacccacagcgtcctgcgcagcgagaccctcagaatgcgcgagctcggctacgctcagtcggaacagaccagtgcggaacaccgcgcggtggtcgagctgctggcggggatgccttacgactgtctgtggggcaataacaatattggctatctgaatcgtcataaacctgctgccccggcgctcattaagggcggcgctttgaattcgacatatacccgaggttaa

SEQ ID NO: 224220 - DNA, 429 bp, Klebsiella pneumoniae
atgccttatacccatctgctggttgccgtcgcgccaacgccggagagtcaggtgttaattaaaaaagcggtgtcgatagcccgccccgttaacgcgaaagtgagcttaatcactctcgctacggatccggagctgtataaccagttcgccgcaccgatgatggaaaatctgcgcgaagtgatgcaggaagagacgcgggagtttctcaatgagctggctcgccacgcggactacccaatagaaagaatgaccatcgcctgcggcgagctaggccatcatattaaggacttctgccggtcacaccgtgttgatctggtgatctgcggcaatcacaaccattccctcttctcacgcgccacctgctcggcgaaaaatatcgtcggcagctgcggcgttgatgtcctgttggtttcccttgaaaagggctaa

SEQ ID NO: 224221 - DNA, 1425 bp, Klebsiella pneumoniae
atgagtcgtttagtcgtagtctctaaccgtatcgccttaccggacgataaaaaatcgagcgctggcggtctggccgtcggcatcctgggggcactgagagcggcggggggtctgtggtttggctggagcggcgagattggcgatgaccagcagccgctcaagcaggtctcccgcgggaatatttcatgggcgtcgttcaaccttaatgaacgggaccatgatgaatactacaaccagttctctaacgccgtgctgtggccggctttccactatcgccttgatctggtcagctttcagcgcgaagcctgggagggatatctgcgggttaacgccatgctggcggacaagcttctgccgctgattgagccagacgatacgctgtggatccatgattaccatcttctgcccttcgccagcgagctgcgcaagcgcggggtgaacaatcgcatcgggtttttcttacatattccgttcccgacgccggagatttttaacgctctgccgccgcacgctgagctgctggagcaactgtgcgattacgatctgctgggcttccagaccgaaagcgacagaaccgcttttctcgacagcattgctatgcagactcgcctatccgacctcggcgataaacgctatcaggcatggggtaaggcgttcagtaccgaggtttatccgatagggatcgatccggacgaaattacgcgcaacgctaaaggtccgctgccgccgaagctggcccagctgaagaacgagctgaaaaatgtgaagaatatcttctccgtggagcgtcttgactattcgaaagggttgccggagcgattcctcgcctacgagacgctgctcgagaagtaccctcagcaccacggcaaaatccgttatacccagatcgcgccgacctcccgcggcgatgtgcaggcctatcaggatatccgccaccagctggaaaccgcagccggacgcatcaacggacagtttggtcagcttggctggacaccgctctactatctgaatcagcattttgatcgtaagctgctgatgaaggtcttccgctactctgacgtcgggctggtgacgccgctacgcgatggtatgaatctggtggcgaaggagtacgtcgcggcgcaggatccggataaccctggcgtactggtcctgtcgcagtttgccggggcggcgcaggagctgaccagcgccctgatcgtcaatccttacgatcgcgacgaggttgccgccgcgctggatcgcgcgctcagcatgccgctggcggaacgtatcgcccgtcattcagcgatgctggacgtgatcagagaaaatgatattcataactggcaggcgcgctttgtcgaggatctgcagcatatttcaccgcgcagcgaggagagccgtctgcgggggaagatagccaccttccctaaactggcctag

SEQ ID NO: 224222 - DNA, 789 bp, Klebsiella pneumoniae
gtggataaccagatatctgtaccgcctgcgctaaccggaaactacgcttttttctttgacctcgacggtactcttgccgatatccaaccgcaccccgatcaggtggtgatacccgacagcacgctgcaggcgctcaatgcgctggcccagcagcaggggggcgcggtggcattgatttcagggcgctcaatggctgaacttgacgcgctaacccatccctggcggctaccgctggccggcgttcacggggccgagcgccgtgatatcaatggtaaaacctacatcgtctctctgccgacagcgctgcgcgatgagatcgcggctgagctgacgtcggcgctggaagcgctcccgggatgtgagctggagagtaaagagatggctttcgcgctccactaccgccaggccccgcagcagcagagcgccgtgctggagctggcgcagcggattgttcagcgctatccgctgctggcgttacagcttggcaagtgcgtggtggagattaaaccccgcggcgtcaacaaaggggaggcgattaccgcgttcatgcaggaggcgccattcgccggccgcgaaccggtttttgtcggcgatgatttgaccgacgaagcgggattcagcgtcgttaatcaactgcagggaatgtcggtaaaagttggcgccggggaaactcaggcgcattggcggttggcggatgccgccgctgtaaggacgtggttgcaacatctggcgtatgacgcgcaaaccgaaaggagggatgaccatgagtcgtttagtcgtagtctctaa

SEQ ID NO: 224223 - DNA, 981 bp, Klebsiella pneumoniae
atgtcatcagtgactacgtccggggctacccgctcaacctttagctttgcccgcatctgggatcagtttggcatgctggtggtgtttgcggtgctgtttatcggctgtgtgatttttgtgcccaactttgcttcattcgtcaatatgaaagggctggggctggcgatctcgatgtccgggatggtggcctgcggcatgctgttttgcctggcctccggcgattttgacctgtcggtggcgtcggttatcgcctgcgccggggtcaccaccgcggtggtgattaatctcagcgaaagcctgtggctggggatcgccgcaggcctgttgctgggggcgcttagtggcctggttaacggctttgtcattgcgcgccttaagataaacgcgctgatcaccacgctggccaccatgcagattgtccgcggcctggcctatattatctccgacggcaaagcggtggggatcgaagatgaacgtttcttcaccctcggctatgccaactggtttggtttgccggcgccgatctggctgaccgtcgcctgcctggtggttttcggattattactaaacaaaaccacctttggccgtaatacgctggctattggcggcaatgaagaggcggcgcgcctggccggcgtcccggtggtgcgcaccaagattattatctttgtgctctccggtctggtatcggccgcagcggggatcattctggcgtcgcgcatgaccagcggccagccgatgacctcgattggctatgagctgattgttatttcggcctgcgtgctgggcggggtgtcgctgaagggcgggatcggcaagatctcctacgtggtggccgggatcctgatcctcggaaccgtggaaaatgcgatgaacctgctgaatatctcgccattctcacaatacgtcgtgcgcggggtgatcctgctggcggcggtgatcttcgaccgctacaaacaaaaagccaaacgtgcggcctga

SEQ ID NO: 224224 - DNA, 1515 bp, Klebsiella pneumoniae
atgcaacagtctaccccttatctctcatttcgcggcatcaccatgacgttccctggcgtaaaggccttgtccgatatcagttttgactgctacccgggacagatccacgcgctgatgggcgaaaatggcgcaggcaaatcgacgctgttgaaaattctcagcggcaactatatcccgaccgcgggccatttgcagatcggcggccagcagatggcattcgccaataccatggaggcgctgaacgccggcgtggcaattatctaccaggagctgcatctgatcccggagatgaccgtcgccgaaaatatctatctcggtcagctgccgcacagaggcggcatcgtcaatcgctcgctgctcaactatgaggcccgcctgcagctggagcatctgggtctggatatcgacccggagacgccgctgaaatatctctccattggtcaatggcagatggtggagattgccaaagcgctggcgcgtaacgccaagattatcgcgttcgatgagccgaccagctcgctctccgccagagagatcgacaacctgtttcgcgtcatccgcgagttgcgggaggagggaagggtcatcatctatgtttcacaccggatggaagagatttttgccctcagcgatgccatcaccgtctttaaagatggccgctacgtttgcacctttgacgatatgccgagcgtcagccacgacgccctggtccaggcaatggtaggccgcaatctgggcgatatttatggctggaagcctcgcccctatggcgaggagcggctgcgcctggaggaggtcaaagcgccgggcgtgcgcacgccggttagtctctcggtgcgcagcggtgaaattgtcggtttgttcggactggtgggtgccgggcgcagcgaactaatgaaaggcctgtttggcggcacgcagataaccggcggtcaggtgtatatcgatggccagcccgtctccattcgcaaaccggcccaggccatccaggccgggatgatgctgtgcccggaggatcgtaaagcggaggggattattccggtgcattccgtgcgcgataacatcaatatcagcgcccggcgcaagcatattcacgctggctgcctgatcaacaacgcctgggaggcggacaacgccgatcaacatatccagtcgctgaatattaaaacgccgggcccggaacagctgattatgaacctgtcgggcggcaaccagcagaaagcgatccttggccgctggctgtcggaagagatgaaggtgatcctgcttgatgagccaacccgcggcatcgacgtcggcgccaaacatgaaatttacaatgtgatctatggcctcgccgcctccggtgtcgccgtggtgtttgcctccagcgacctgccggaagtgctgggcgtcgctgaccgcatcgtggtgatgcgcgaaggacaaatcgccggcgaactgctgcatgaagaagccaatgaacagcaggcgttaagccttgcgatgccaacagtgagccaggctgtcgcctga

SEQ ID NO: 224225 - DNA, 981 bp, Klebsiella pneumoniae
atgcacaaatttactaaagcgctggcggccattggtctcgctgcggttatgtcacaatcagctatggcggaaaatcttaaactgggttttctggtgaaacagccggaagagccatggtttcagactgagtggaaatttgctgataaagcaggaaaagatttaggctttgacgttattaaaattgcggtcccggatggggagaaaaccctgaatgccattgacagcctggcggccagcggcgcgaagggctttgtcatctgtacccccgatcccaagctcgggtcggcgattgtcgccaaagcgcgtggctatgacatgaaggtgattaccgtcgatgaccagttcgtcaatgcgaagggcaaaccgatggagagcgtaccgctggtgatgatggcggcgagcgaaattggcgcccgtcaggggcaggaactctataaagagatgcaaaagcgcggctgggatgtcaaagacaccgccgtaatggcgatcaccgccgatgagctggataccgcgcgccgtcgcaccaccggctccatcgatgccctgaaggcggccggtttcccggacgcgcaaatctaccgcgtgccgacaaaatccaacgatatcccgggagcgttcgacgccggtaactcgatgctggtccagcatccgcaggttaaacactggctgatcgtcgggatgaacgacaacaccgtcctcggcggcgtgcgcgcgaccgaaggtcagggctttaaagctcccgatgtgattggcatcggcatcaacggcgtggatgccgtcaacgaactgtcgaaggcgcagccgaccggcttctatggctctctgctgccaagcccggatatccacggctacaaaaccagcgaaatgctctacaactgggtcaccaagggcgtcgagccgccgaagttcacggcggtgaccgatgtggtgctgattacccgcgataacttcaaagaagagctggtgaaaaaagggctgtaa

SEQ ID NO: 224226 - DNA, 510 bp, Klebsiella pneumoniae
atggcagttccaggaatggcacaaaagctaaacacccaaatgaatcttgagtttcacgcctctaacgtttacctgaacttaagtgagtggtgcgcccgacatcgcttcgacggcgccgcgacgtttctgcgcacccgcgcgcaaagcagcatcaccctcactatgcgcgtatttgactacctgaaaaaagccggcagctggccgatcgtcaatcccgaccacgcctgtaaccctgagtgcacctcgctggaagatctgtttacccaaaccctgagcgattaccaacagcgcaatcgtctgctgagcggtctcgctcaggaagccaaagcgcaaagcgatgacagcacctggcggtttctcacgctgttggcggaagagcagcagcaggatggcctgctattgcaaagcgtgcttgaggaaattcgtaatgccgataaagccggtctcgggatggagcagaccgatcggcgtctgatggctatcgttggagaagcgcagaaagcgcattaa

SEQ ID NO: 224227 - DNA, 1563 bp, Klebsiella pneumoniae
atggctagatacacggcttcagcctctgaagggctgcagggaagaccgatcttgttacgccatcagttagcctacggcggcggaaatctgttagggagcggcgcactggcgataagcggcgcatggctactctatttttatacgaccttttgcggcctgacgctgatcgaggcctcatttatcttctccgtcgccagcatcattgacgctatcagcaacccgctgatgggctatctgacggataattttggcaaaacgcgcttgggcaagcgcttcggccgccggcgtttctttctgctaatcggtattccgctgatgatgttctacccgctgctgtgggtggaaggcctgagtttctggtactaccttagcacctatgtggtgtttgagatcatctacacctctatcatggtgccttatgaaacgctggcgacagagatgaccgatgatttctcactgcgttcaaaactgaccggctataaagctatctttggtaagctggccaacttcctcgcggcgtttattcccggccagttcattttgctgtatggcaaagattctgccacccctttcttcctcaccggtctgacctatggcgcgatcctgatcgtcgctatttcctgcctgtggttgtgcagctgggagcgtgagcgcggggaagaggtggaaaccagcgcgaaaaaaggactgctgagcaccctgctgtcgctggcgaaagatatgcgttcgactttttatctacgcgtattccgcaaacatcttggtatgtacctgtgcggctttggcgcggaatggctgtttgcctccatcttcacctatttcgtgatcttcgttctacaacacgatccagcgatggtggccgggctgaacagcctgaactcgattctgcagctgatctctacggcgctgtttatcggcctgtgcgtgaaaaagggcttcagcaaaccctatatcctggcgctggggatcgtgattttcgcggttctgctgtatacctcgctgtggtttttccatctaccgtccggcctggcgacagtgctgatgttcggcattaccgtgctgttcggcctgggtaccggcggggtttactatataccctggaccgtttacaccttcctggccgatgtcgatgagatctacaccggacgccggcgggaagggatctatgccggcgccatgaccttctcaggaaaaattctgcgctcgattgtggtgttctcgatgggggcgatcctgagcttctacggtttccagtcaaaagcgcacagccaaccggaaagcgcggtgaccgctatcgcagtggtattctgcgtcggggtgatcgcattagccctggccgccatcgtcttcagcaagcagatgaagctggaccggaaggcccatctggtggtgctgcaggaagtcgcgcggataaaagcgggcggcaaaattagcgatattgcgccggacgtgcgggttatcgtggaggatctggtcggccatcgctacgaagagtgctggggcaacagcaaattgttcaaagatgctgcccctgcgcctgcgcagaccgtcgtttcccattaa

SEQ ID NO: 224228 - DNA, 252 bp, Klebsiella pneumoniae; identical to SEQ ID NO: 137321

SEQ ID NO: 224229 - DNA, 1422 bp, Klebsiella pneumoniae
atgaataccgcgatctcttcccgcgatgaacgtgctttttcagcgccggcgctgctggtggccggtgccttttttatggagtttctcgacgggacggtgatcgccaccgccctgcccgatatggcgagggattttggcgtcaccgcggtcgaactgaatatcggcatcagcgcctatctgattacccttgcggtcctgatcccggccagcggctggatcgccgatcgcttcggcgcccgggctatttttactctcgccctggcgatctttacccttgcctcggtcttctgcggcctctccaccgaggtgcatatctttgtcgccatgcgtatccttcagggagtcggcggcgcgctgatggtccccgttggtcgccttgcggtgctacgcaccacgccgaaacaccagctgatcaaggccatcgccaccctgacctggccggcgctggtggcccccattatcggcccgcctttgggcggttttataacccgctacgccagctggcactggatcttctttatcaatgtcccgctgggccttgccgccatcatcctttcgctgcgcattatccctgatattcgcgaaacggaacggcgctccttcgatctcagcggatttatcactacctcggtcgcgatggtcagtctggtgaccgcgatggagcggctcggcgatcgccagccgcagatctggccgacgctggctctcgccgcgcttggcttcggctgtctgttatattccattcgtcatttccgccgggcggcggcgcctatggttcgtctcgacgccctgcaggtgccgacgttccgggtgacaatgtacggcggctcgttgttccgggcctccatcagcgcggtgccttttctgctccccctgctgttccaggtgggattcggtatggatccttttcattccggcctgctggtgctggcggtgtttgtcggtaatttaaccattaaacccgccaccacaccgctcattcgctggctgggctttcgtcggctactgctgatcaatggcgcgttgaacgtctgttcgctgctggcttgcgcgctgcttacgccgcagacgccggtctgggccatcatgctgatcctttatctcggcggggtgtttcgctcaatccagtttaccggtgtaagcacgctggcctttgccgatgtccccgccgcgcagatgagtgatgccaatacgctgttcagtaccgcgtcgcagctggcggtagggctggggatcacgctcggggcgattggcattcgcctgggcgagcaggtctgcgactggctgcatcttactgaactaccggggatcagcttccgcctgtcgtttgtgtttatcgccttgatctgtctggtagggatgatcgacagcctgcatctggccaaaacggccggcagcagcgtgtcggagaagaagaaatag

SEQ ID NO: 224230 - DNA, 639 bp, Klebsiella pneumoniae
atgaagattgcactgatgatggagaacagccaggcgaacaaaaacgccatcatcctcaaggagcttaacgcggttaccgacgaaaaaggattcccggtctataacgtcggcatgagcgatgagaacgatcatcatctgacctacatccatcttgggatcatggccagtattctgctgaattcgaaagcagttgacttcgtggtcaccggctgcggtaccggtcagggggcgctgatgtcgctgaacatccatccgggcgtggtctgcggctactgtatcgatccggcggatgcgttcctgtttgcccagatcaacaacggtaatgcgctgtcgctgccgtttgccaaaggcttcggctggggcgccgaactgaatgtgcggtttatctttgaaaaagcctttaccggccgcaacggcgaaggctatccgccggagcgcaaagaaccgcaggtgcgcaatgccgggatcctcaaccaggtcaaagcagcagtagtaaaagagaactacctcgataccctgcgcgccatcgatccgcagctggtgaaaaccgcagtctccggcccacgcttccagcagtgcttcttcgaaaactgccaggataaagcaatcgaagactttgttcgccagatcgtcgcttaa

SEQ ID NO: 224231 - DNA, 498 bp, Klebsiella pneumoniae
atgctgaaaacggacatgattgacaaactcaatgaacagatgaatcttgaactctattcttctcttctttatcagcagatgagcgcctggtgcagttaccacagttttgaaggcgccgcggccttcctgcgtcgccatgctcaggaagagatgacccatatgcagcgcctgttcgactatctaaccgacaccggcagcctgccgcggatcaatgctatcgcctccccgtttgccgaatatgcctcactcgacgagctgttccgccagacctacgagcatgagcagctgatcacgcaaaaaataaatgaactggcgcacgcggccatgaccagccaggattacccgacctttaatttcctgcagtggtatgttgctgaacagcatgaagaagagaaattatttaaatcggtgatcgataaactgaccctcgctggaaaaagcggcgaaggtctgtactttatcgataaagagctggctaccctcgacgcgcagaattaa

SEQ ID NO: 224232 - DNA, 240 bp, Klebsiella pneumoniae
atgtcttctattcatggtcatgaagttttacagatgatgctcgcctcgggtgagtcctggacggtcgcctcgctggaggccgccattcgccgccgctttggcgaagaggcgcggtttcacacctgttcagcagagaatctaagcgccgcacagctggtggcgtttttagagaaaaaaggcaaatttattgccagagaggaaggttttactaccgcagaaaataagatctgccgacattaa

SEQ ID NO: 224233 - DNA, 669 bp, Klebsiella pneumoniae
atgaataccggacctttgaacgaaaacgaactggaatggctggatgacactctggcgaaatacgccgccgaaggcgccattctggatgtctctgaactggatggcctgctgacggcgatcctctctgcgccgaccgacatcgaacccgctcagtggctgctggcgatttggggcggggcggataatgtcccgcgctgggccaacgatcgcgagcgcgatcgctttgtcaatctgacgctgcagcatatgagcgatatcgccgaacggctggagtcttatcccgatcagttcgaaccactgttcggcacccgcgaagcggaaggtcaggagctgaccatagttgaggagtggtgctttggctatctgcgcggcgtggcgctgagcgactggtcgacgttgcccgctgaactccagccggagctggacgctatcgcgctccacggcagcgaagaacagtttagcgcgctggataatctgacggcggatgaatttatcgccagcatcgagcgtatcacgccggcggcgctggcgctttaccagtactggatagcgaatccgcagccggtggaggccccgcagccaataagaaatgaagcgaaagtcggacgcaacgatccctgcccatgcggcagcggtaaaaagtataagcagtgttgcttagcgaaatga

SEQ ID NO: 224234 - DNA, 882 bp, Klebsiella pneumoniae
atgttcagtggactttgcgcatttcctttgacacctttgcatcagcaagattttgatgaaaaagcgtttattcgtattctcgcccgtcttaccgatgccggagtcgactctctgggcatcttaggttcaaccggtagctacgcttatctcagccgtgagcagcgcagacgagtggtgcaggtggcgaaggcgcatgcggggtcgatcccgatgatggtcggcgtcggcgccattgcgactaacgaggtgctacgcctggtggaggatgctgaggaggcaggggcggatgcgttattactgccgatgatgtcctatcagccgctttccgcggaggagatctttgccttttacgaagaagtctgtcggcatgtctcggtgccggtttgcctgtatgacaatccccgcactacccacgtaatgctggcggatgagctgcaggggcgcatcgccgccttgccggccattgcctcgattaaaattcccggcctgcccgcgccacaggcgagcgaacgtgtagcggccctgcgtcagcatcttccctctcgcgttacgcttggcgttagcggcgatgcgtgggccactgccgggttgcaggccggctgcgaagcctggtattcggtctgcggcggactctttccccgctgctcactggcgctggtaagagcgatacgtagcggcgatgtggcgcagactgcggcactgaatgagcagctggcccccctatggcgatgctttgatcgctatggtggtagcctgcgagtgatagccagcgccgcagcgatgctcggactctgcgatccagactcgcttccccgtcctttgctttcgttaggggaggaggcctgtcgtgaggtggcgtcggcgctgcgcggcctggcctga

SEQ ID NO: 224235 - DNA, 549 bp, Klebsiella pneumoniae; identical to SEQ ID NO: 216020

SEQ ID NO: 224236 - DNA, 1833 bp, Klebsiella pneumoniae
gtgagtgatgtttttgacgcaaaagctttcctgaaaacggtgaccagccagcccggtgtgtatcggatgtatgatgctggcggaaccgtcatctatgttggcaaagccaaagatctgaaaaagcggctcagtagctacttccgcagcaaccttgcgtcgcgtaaaacggaagcgctggtagcgctgatcgcgcaaatcgacgtgaccgtcacccacaccgagacggaagcgctgctgcttgagcacaactatattaagctgtaccagccacgttacaacgtgctgttacgcgacgataaatcgtatccttttatttttctcagcggcgatactcatccgcgtctggcgatgcatcgcggcgccaaacatgcgaagggcgaatattttggtccttttcccaacggctatgccgtgcgcgagactctggcgctgctgcagaaaatctttcccatccgtcagtgtgaaaacagcgtctaccgcaatcgctcccgcccctgtctgcagtatcagattggtcgctgcctggggccgtgcgtggccgggctggtcagcgaagaagagtatgctcagcaggtagagtatgtgcggctgtttctcgccggcaaggatgaccaggtgctgacccagctcatcgcgcggatggagaaggcgagccagaacctggagttcgaagaggccgcgcgcatccgcgaccagattcaggccgtccgccgcgtgacggagaaacagtttgtctccaacaccggtgacgacctcgacgtgatcggcgtcgccttcgatgccggcatggcctgcgtgcatgtgctgtttatccgtcagggcaaagtgctgggcagccgaagctacttcccgaaagtgccgggcggcaccgagctgggagaggtcgtggagacctttgtcggccagttctacctgcagggcagccaaatgcgcacgctgccgggggagattttgctcgactttaaccttggggataagacgctgctggccgactcgctgtcggagctggcgggtcgtcgaatcaatgtgcagactaagccgcgcggcgacagagcgcgttatcttaagctggcgcggaccaacgccgcgacagcgttaacgaccaaattgtctcagcaatcgaccattcatcagcgtttgcaggcgctggccagcgtactggagctgccggccgtcaagcgaatggagtgttttgacatcagccacaccatgggcgaacagaccgtagcatcctgtgtggtgtttgacagcaatggcccactgcgcgcggagtatcggcgctacaacatcaccggcattacccctggcgatgactatgcggcgatgaatcaggtcctgcgccgtcgctatggtaaagcgattgatgacaacaagatcccggatgtgatcctgatagacggcggcaagggacagctggcccaggcgaaagccgtgtttgctgaactggacgtcccctgggataaacatcatccgctgctgctgggcgtggcgaaaggtagcgatcgaaaagcgggtctggaaacgttattctttgagccggaaggggaagggtttagcctgccgccggattcgccggccctgcatgtgatccagcatattcgcgatgaatcgcacgatcatgcgatctccgggcatcgcaaaaaacgggcgaaagtgaagagcaccagctcgcttgagactatcgagggggtggggccgaagcgtcgtcagatgctgctgaagtatatgggtgggctgcaggggctacagcaggccagcgtcgaagaaattgctaaagtaccgggcatctctcacgctctggcagaaaagatcttctactcgttgaaacattag

SEQ ID NO: 224237 - DNA, 657 bp, Klebsiella pneumoniae; identical to SEQ ID NO: 136368

SEQ ID NO: 224238 - DNA, 225 bp, Klebsiella pneumoniae; identical to SEQ ID NO: 136369

SEQ ID NO: 224239 - DNA, 723 bp, Klebsiella pneumoniae
atgagggacaatgattttttcagctggcggcgggatatgctgcaccaatttcagtccatggccgccggcgaggaggtttataatctcctgcaacgtgaaaccgaagcgctggaatatgattactacacgctttgtgtgcgccacccggtgcctttcacccgcccccgcgttacgttccagtcgacttacccccgcgcatggatgtcgcactatcaggcagaaaattatttcgcgatagatcctgtgttacggccggagaattttatgcgtggccatctgccatggaacgacagcctgtttcgtgatgcgccggcactgtgggacggggcgcgtgaccatggtctgcaaaagggggtgacgcagtgcctgacgttgccaaaccatgctcagggatttctctctgtctccgcgaacaatcgtctgccgggcggttaccctgaagatgagcttgagctgcgtctgcgaacgctgactgaactaagcttgctgacgctgctgcgtctggaagatgagatggtgatgccgccggagatgaagttcagccgccgcgaactggaaatcctcaaatggacggcggaaggaaagacttcggcggaggtggcgatgattctctcgatttcggaaaatacggtgaatttccatcagaagaatatgcagcggaaatttaatgcgccgaataaaacgcaaattgcctgctacgccgtggcgactgggctaatctga

SEQ ID NO: 224240 - DNA, 753 bp, Klebsiella pneumoniae
atgagtgcgatagaagtgaaaagcctggtaaaaaaattccatggccagacggtgctccatggtatcgacctggaggtacagaaaggggaagtggtggcgatcatcggccccagcggctcgggcaaaaccaccctgctgcgtagcatcaacctgctggagcaaccggagagcggcactatccgcgtcggcgatgtgacgatcgacgccggtcgcagcctcgggccgcagaaagggctcattcgccagctgcgccagcacgtcggctttgtcttccagaactttaatctgtttccccaccgtacggtgctggagaacattattgaagggccggtcatcgtaaaaggtgaagataagcaggagtccatggcgcgggcgcgcgaactgctggcgaaggtggggctcagcggaaaagagaatagctatccgcgccgtctctccggcgggcagcagcagcgagtggctattgcccgcgcgctggctatgcgtccggacgtgatcctgtttgatgaacccacctcggccctcgatcctgagctggtgggggaggtgctcaacaccatccgtcagctggcgcaggaaaaacgcaccatggtgatcgtgacccatgaaatgagtttcgcccgcgacgtagccgatcgggcgatatttatggatcagggacgcattgtcgaacaaggcgaggcaaaagcgttgttcgcttcgccccagcagccgcgtacccgtcagttccttgaaaaattcctgatgcagtaa

SEQ ID NO: 224241 - DNA, 669 bp, Klebsiella pneumoniae
atgcaagaaagtatccaactggtcattgattccgccccttttctgctgaaaggggccgtctttacgctgcagctgagcattggcgggatgtttttcggcctggtgctgggctttatcctggcgctgatgcgcatgtcgccagtctggccggtaaaatggctggcgcgcatgtatatctccattttccgcggcacgccgcttatcgcccagctgtttatgatctactacggcttgccgcagttcggcattgagcttgacccgatcccggcggcgatgatcggcctgtcgttgaatactgcggcctatgcggcggaaacgctgcgcgcggccatcgcctcgattgataaagggcaatgggaagcggcggccagtatcggtatgacgccctggcagacgatgcgtcgggccattttaccccaggcggcgcgggtcgctttgccgccgctgtcgaacagttttatcagcctggtaaaagatacctcgctggcggcaacgatccaggtgccggagctgttccgtcaggcgcagctaatcacctcgcgaaccctggaggtcttcactatgtatctggcggcttccctgatctactgggtaatggcgacagtgctctcctcgctgcagaattattttgaaaaccagctgaaccgccaggagcgtgatccgaaatga

SEQ ID NO: 224242 - DNA, 987 bp, Klebsiella pneumoniae
atgtcactgcaaaacttaacccgctttccgcgcctggaattgatcggcgcgccgacgccgctggagtatctcccgcgtctgtccgatcaccttgggcgcgaaatttttattaaacgtgatgatacgacgccgctggcgatggggggcaacaaactgcgtaagctggagtttctcgccgccgatgcgctgcgcgagggcgcggataccttaatcaccgccggcgcgatccagtctaaccatgtgcgtcagacggcggcagtcgctgcgaaactgggactgcattgcgtggcgctactggaaaatcccatcggcacccgggcggagaactatctgagcaatggcaaccgtctgctgctggatctctttaacacccaggttgagatgtgtgatgccctgaccgatcccgccgcgcagctcgatgagctggcgacccgcattgaggcgcaggggtatcgtccgtatgttattccggtcggcggctccaatgccctcggcgcgttaggctatgtggaaagcgcactggaaatcagccagcagtgcgaagacgcggtggcgatctcgtcagtcgtggtcgcctccggcagcgccggcacccatgccggattggcggtcggccttgaacagctgatgccgcaggcggaactgattggggtgaccgtgtcgcgctcggtcgctgaccagttgccgaaagtggaggcgctgcagcaggccgtggccaacagtctcgagctacaggcgaaggctgaaattatactgtgggatgactactttgccccaggatacggtacgccaaacgaagatgggatggccgccgtgaagctgctggcgcagctggaaggtattttgctcgacccggtctataccggcaaagcgatggccgggcttatcgacggcatcacgcagaagcgctttaaggatgaagggccgatactgttcgtccacaccggcggagcgccggcgctgtttgcctatcatcctcacctctaa

SEQ ID NO: 224243 - DNA, 768 bp, Klebsiella pneumoniae
atgggcgcggtggccgttgttttgatggctggcgttagcgtgaaaacttttgcggcggaaaacctgctcaatcagattaaagagcgcggcaccctacgcgtgggcctcgaaggcacctaccctccctttagtttccagggggatgacggcaagctgaccgggtttgaagtggaattcgctaacgaactggcgaaacatcttggcgtgaaggccgatctcaaaccgaccaaatgggacggtatgctggcctcgctggactccaagcgtatcgacgtggtgattaaccaggtcactatctctgacgaacgtaagaagaaatacgatttctccaccccatataccgtctccggcgtgcaggcgctggtgaagaagggtaacgaaggcgcgattaaaaccgcggcggatctgaaaggcaagaaagtgggcgtcggactgggcactaactatgaagagtggctgcgtcagaatgtccagggcgtggacgtccgtacctatgatgacgatcccaccaaataccaggatctgcgtgtaggccgtattgacgccattctggtagaccgtctggcggcgttggatctggtgaagaaaaccaacaatacgctggcggtaaccggcgaagccttctctcgtcaggaagctggcgttgcgctgcgtaaaggcaacgacgacctgctgaaagcggtagatggcgcgattgcagacatgcagaaagatggcagcctgaaggcgctgtccgagaaatggtttggcgctgacgtgacgaaataa

SEQ ID NO: 224244 - DNA, 1488 bp, Klebsiella pneumoniae
atgaaaaaccccaccttattgcaatgttttcactggtactaccccaccggcggcgagctgtggcctgaggtcgaagcgctggcgcccagcctgaatgaaatcggcatcaatatggtctggttgccacccgcctacaaaggcgcctcgggcggttactccgtcggctatgatacctacgatctctttgacctcggcgagtttgatcaaaaagggtctgtcgccaccaaatatggcgacaaagcgcagttgctggcggcgatcaacgccctgaaggagcacaatatcgccgtgctgctggatgtggtggtcaaccataaaatgggcgctgatgaaaaagaggctctgcacgttcagcgcgtcgatgagcaggatcgtacgcaaattgacgaggagatcattgagtgcgaggcatggacgcgctacaccttcccggtgcgcgccggacagtattcgcagtttgtctgggactacaaatgttttagcggcattgaccacatcgagaacccgacggaagacggtgtgtttaaaatcgtcaacgattacaccggcgaaggctggaatgaacaggtcgatgatgagctcggcaactttgactatctgatgggcgccaatatcgatttccgcaatcatgcagtgaccgaggagatcaaatactgggcgcgctgggtaatggagcagaccggctgcgacggttttcgtcttgacgcggtcaagcatatccccgcctggttttataaagcgtggatcgagcatgttcaggaggtggccccgcagccgctgtttattgtagcggaatactggtcccatgaagtggagaagctccagcagtatatcgacctggtcgagggcaaaacgatgctgtttgatgccccactgcagatgaaatttcatgaagcgtcgcgccagggccgcgattatgacatgagccagattttcagcgggacgctggtggaagccgaccctttccatgccgtcactctggtcaccaatcatgatacgcagccgctgcaggccctcgaggcgccggttgaaccctggttcaagcccctcgcctatgcgctgatcctgctgcgggagaatggcgtgccctcggtcttttatgccgatctcttcggcgcttcctatgaggataccggcggcgacggagagacctatgccattgagatgcccgttatcgaacaactccacgagctgatcgacgcccgtcagcgttttgcccatggcgtgcaaaccctttggttcgatcatcctaactgcatcgcctttagtcgtagcggtactgacgacgatccaggctgcgtggtgatcatgtccaatggcgatgagggcgaaaagacgctgacgctgggcgaaaactatggcaacaaacgctggcgggattttctcggtaaccgggaagagattgtcgaaaccgatggcgaaggctgcgcgacctttacatgtaacggggggagcgtgagcgtgtgggtgttagaggaggtattatag

SEQ ID NO: 224245 - DNA, 432 bp, Klebsiella pneumoniae
atgaaaaagttattttttgctggcatggtggtggcgctggccggttgcgtacaggttgatcgttatgaggacgtcgttatagcgccggcgccggctggccttgcaggtttctggcaaacgaaagggccgcagagcgcgatgatgagtcctgacgccattgccagcctgtttgtcaccaaagaaggggacaccttcgactgccgccagtggcagcgcgtgattgcgcagccggggaaactgatgaatcgtgacagtgagatctacaacgtgaccgcttccctggacatctatcctgtcgagcgcgagggcaacacgatctcctacgatcggatgacgttgtcccgtgttgaacgtctcactccggagtgcgagaaggcgtgggccaaagcgcgagcgacggggcccgtcagcgcgccggcctccacgcgctga

SEQ ID NO: 224246 - DNA, 624 bp, Klebsiella pneumoniae
atgtcaacgatgattatggatttgtgcagctatacccggttgggattgacgggatatctgaccagtcggggaattaaaaaacaggaaatcattgaggtcaacagtgctgcggatctgcagaaacactgtacgtcgtgttgcccggcggtggtgtttctgaatgaagactgtttcgtgcatgatgatgaaagtaatggcattattcgccagatcattacgcaaaacccggcgacgctgtttgttatctttatgtcgctggcgaacatccattttgaccgctatttgcgggtacggaagaatctgctaatcagttcaaaatcgataaccccaaaagaccttgatgttattctggttaattatcttaaatacaaaaacaccagtgtagggcagttaactttaccgacattgtcactgagtaaaacagaatcaaatatgctgcaaatgtggatggccgggcatggtacttcgcaaatctcaacgcaaatgaacatcaaagcgaagacggtatcgtcgcataaaggcaatattaaaaagaaaatacaaacgcataataagcaggtgatttatcatatcgttcggctgaccgaaaacatcacctccggtattcaggtaaatatgcgctga

SEQ ID NO: 224247 - DNA, 192 bp, Klebsiella pneumoniae; identical to SEQ ID NO: 211546

SEQ ID NO: 224248 - DNA, 225 bp, Klebsiella pneumoniae
atgatgaagcaccaattaacaggccagaccggggacgaccttgacgtcaacgtagatgccctgctggcggcaattaatgagatcagcgaaagcgaagtccatcgcacgctggacgacccgcagcgcgccagcattgatggccgcgggtcacatacctggcgtgagctggcggaggcattcgaactcgatattcacgatttcagcgccagtgaagtcaaccgttag

SEQ ID NO: 224249 - DNA, 1680 bp, Klebsiella pneumoniae
atggataagccactgcggttgaagttaaaaaagtgctaccacctggctcgcccggcgcatgtggttaacgcttgttttatcgcagtgctgtttttctccacgctgctgatctggcgtgaaatcaatgtcctggaagaggcctacgtggccaaccagcgtaacaatctggctaacgtcgctcatgaaatggatggactgttgcagttcaacatcgacagaatgatgttttttcgccatgggatgcaggcggcgctcgaacagccgcttgatatcgatgtattgcgtaaggccagccaacgctatctgagccagcgccatcagcaggcctggcgggtggcgctaccgaatcggcgtacgctgccggtgtttggcatctcaggcagcgtcgctggccacaaccctatcctgctggtggacgatccgctggcggctgatgaactaatggcgacgctcgagctgggttatctgctaaatctgacgcagcacgatcgcgatttcgccgagcggatgcagtatatctctcgtagcggcttttttacctcgaccctgccgctgcgggatgagtcgcaggtgataacgcactattcccaagccctcggcgctccgtggtttacccgccagacccaacgaaataatccggggcgaggcgttatctggcaaacctttcctgacgatgacccgcagctggaagagcaggtggtcaccgcttcgataccgttggattttgccggttactggcgcggcgtgctggcgatggatttctcagtcagtgaaatcaaagcgtttttggttagcgccatgcaggggggacaagagggagagtaccaactttatgatagccatttgaacctgctggcttcttccgcgccggggaatgtcctgaccctgctgtcgccgcgcgagcaggagctgctgagccgcgcgtttgtccatgataaccagggagggctgcgtctgctgacgcgctatatcagctgggccaaactgcgcaattttgacggcgtgctgctgcggatccacactctgcgggaaggcgtccgcgggaactttggcaccatcaccatcgccctgaccctgatgtgggtcctcttcaccttgatgctgttgctcttctggctggtgatccgccgcatggtccgcaacatgagcgttctgcaaacctctctggagtggcaggcatggcacgatgccttgactcgcctgctcaatcgcggggcgctgtttgaacaggcgatggcggtagccagcgactgccagcgcagcggacggccgctggcggtgatccagctcgatctggatcattttaagcacatcaacgatcgctatggtcatcaggcgggggacagggtgctgtcgatggtggccggtacgctgtccagcgcggttcggcagggcgatctgctgggcagagtgggcggagaagagttttgtatcgtgatgccgaataccaccctgcaggaagcagcggcggtggcggagcgattgcgccagcgtatccagggacgggaagtctttttgcataacaacgtgacgctgcgggttagcgcctcgttaggggtgagcgccagcgaagagcggggggagtatcagtttgaagcgctgcagtcggtggccgatgggcgactctatctggccaagcaaaatgggcgtaaccaggtctgttttcgcagcgcagcgtga

SEQ ID NO: 224250 - DNA, 912 bp, Klebsiella pneumoniae
ttggcaggaagtagtcttttaacattacttgatgatatcgccacgctgctggacgatatttccgtgatgggcaaggtagcggcgaaaaaaacggcgggggtgctgggcgacgatttgtctctcaatgcccaacaggttaccggcgtgcgggcgaatcgcgagttgcccgtggtctggggagtggcgaaagggtcgttcgttaacaaagtgatcctcgtgccactggctttgttgatcagcgccttcatcccctgggcgattacgccattgttgatgctgggcggcgcgtttctctgtttcgaaggggtggagaaggtactgcacagtctggaagcgcggaaacacaaagaggatcctgaacggcggcagcagcgtctcgccgcgctggcggagcgcgatccgctggcctttgagcgtgacaaagtaaaaggcgcgattcgcaccgattttattttgtccgcggaaattgtcgccattaccctcggcatcgtggcggaagctccgctgcttaaccagatccttattctctcggggattgcgattctggtcactatcggggtgtatggcctggtgggggtgatcgtcaagctggacgacatgggttactggctggcggaaaaacgtagtgcgctggcgcagtggctgggtaaagggctcctggccgtcgctccccgcctgatgaaggtgttgtctatcgtcgggacgctggccatgttcctcgtcggcggggggattgtcgttcacggtattgcgccgctgcatcatgccatcgagcactggagcgcggggttgggtggggtgatggcctccacgctgccggtcgtcgccaacctggtgctgggttttatcatcggcgcggtggtgctggcgggcgttaaggcggtgagcagcctgcgtggcgctggaaagtag

SEQ ID NO: 224251 - DNA, 912 bp, Klebsiella pneumoniae
atgtctacccgtcagcttttaccgctcatcggggcgctgtttgcgctgtatatcatctggggctctacctatttcgctatcgccgtcggggtcgccagctggccgccgctaatgatggccggcattcgttttctcgctgccggcgtgctgttgctggggtggctactggccaccggccataagctaccggcgcgtcgtccgctgcttaacgctgcgctgatcggcgtgttgctgcttgcggttggcaacggcttcgtgacgctggctgaacatcagcacgtcccctccggcatcgcggcggtgatggtcgccaccgtaccgctgttcaccttatgcttcagccgctttttcggcatcgccacccgtaaactggagtggctgggcattgccattggccttgcgggtatcgtgatgctcaacagcggaggcaacctgaacggcaacccctggggcgcactgctgatcctgattggttccctaagctgggccttcggctcggtttacggttcgcgaatcgtactgccgaccggcatgatggcgggggcaatcgagatgctcgccgccgggatcgtcctgctggcggcctcatggctgagcggtgaaaccttaacccgcgtcccttcctggtccgggatcgccgccctggcctatctggccatctttggctcgctgatcgccattaacgcctacatgtttttaatccgcaatgtcacccctgcggtcgccaccagctacgcctatgttaatccggtggtcgcggtgctcctcggtactgggttcggcggcgagagcctgtcgctcattgagtggctggcgctggcggtgattattttcgccgtagtgctggtaacgctggggaaatatctcttccccgtccgcagcgaggctactccttgtaaggcgtcgaagtag

SEQ ID NO: 224252 - DNA, 498 bp, Klebsiella pneumoniae
atgatggcggatgttcacgataaagcgacgcgcagtaaaaatatgcgggcgatcgccacgcgcgatacggcgatcgaaaagcggatagcggcgctgctgaccggggcgggattcacctttgttgcccaggatcgcgcgctgccgggacgtcccgatttcactttacccgactaccgttgcgttatctttactcacggctgtttctggcatcaccatgactgctatctgtttaaggtgccggccacccgcacggcattctggctggacaaaatcgccggtaacgtggcgcgcgacgcccgcgaccggcaaaagctggccgaagagggctggcgggtattaatcatctgggaatgcgccctgcgcgggcgccttaggctgagtgatgcggcgctcaccgaacgtctggaagagtggatctgcggcgccggacacgacgcgcagatcgatacgcaggggatccgcgaactgacgactacttcgacgccttacaaggagtag

SEQ ID NO: 224253 - DNA, 1401 bp, Klebsiella pneumoniae
ttgtcgttggctgaacaggccggggaagacgctgaggcgctgctgcgtcagctgatgacgatctacgatgtaaaaacgctggttgccgaactggtgagcgtcggcgaacagcactggagcgcggcgatcctcaagcgcgtggcggcgcttggccgcgcggcggagcgtttgcgcccgcaggaagttgctcatctggcgacgctcctgccttcgccgccggcccatcatccgcactatgggttccgttttatcgatctgtttgccggtattggcgggatccgcagtggttttgaagccatcggcgggcagtgcgttttcaccagcgagtggaacaagcacgcggtacgcacctataaggccaactggtactgtgatccgcagcagcaccgttttaatgaagatatccgcgatattaccctcagccaacgctctgacgttagcgacgaggaggcggcgcggcatattcgcgaatctatccctcagcatgatgtgctgctggctggcttcccctgccagcctttctcgcttgccggcgtctctaagaaaaatgcgatgggccgtgcgcatggctttgcctgcgaaacccagggaacgctgttttttgacgtggtgagaattatcgcggctcgtcagccagcgatttttgtgctggagaatgtcaaaaacctcaaaagccacgatcaggggcgcaccttccgtatcatcatgcagacgctggatgagctgggatatgaagtagctgacgcggggcataccgggccggatgacccgaaggtgattgacgggcgccatttcttgcctcagcaccgggagcgcatcgtgctggtgggtttccgtcgcgatctgcagctgcatgctggatttacgctgcgcgacatcgcggcgcagtacccggcggtgcggccaacatttggcgagctgctggagccgacggtcgatgcgaaatttattcttacgccggtgctgtggaaatatctttatcgttatgcccgcaagcatcaggcgcggggcaatggctttggttatggcctggttgaccccgccaatccccacagcgtggcccggacgctttctgcccgctactataaagatggtgccgaaattctcgtcgatcgcggctgggaccggccgctcggtgagaagcattttgacgatccgctgaatcaacagcggcggcctcgccggttgacgccgcgcgaatgcgcccggctgatgggctttgaatccccgcagggggcgcgttttcgcatcccggtatcggatacgcaggcctatcgtcagtttggcaactcggtggtggttccggtcttcgccgcggtggcgaaactcctggcgccgcgcatcgctcaggcggtggcgcgccgtgaagcggatgataatgatggcggatgttcacgataa

SEQ ID NO: 224254 - DNA, 708 bp, Klebsiella pneumoniae
atggacctggttgactggcagcaacgatttgagcgctggatactgacgcaccatgcgcaggatgacgccgcacacgatctgtcccattttcgtcgcgtctgggcgaccgccactcagctggccgcgggggaggaagtcgaccggctggtactcctcacggcctgctattttcatgacatcgtcagcttgccaaaaaatcatccggagcgaagtcgatcctcgatgatggccgccgagaaaaccctcgccattctgcagtcggcctttgctgattttcctgcggatcgttacccggcggtcagccatgccatcgaggcgcacagcttcagcgcggcgatcccaccgcgcacgctggaggcgaaaatagttcaggatgccgatcgactcgagtcgctgggagccattggtctggcgagggtcttcgctgtcgccggcgccctgaataccatcttgtttgatgccgaagatccttttgttgatcggcgggcgctggatgaccgcaaatatgccctcgaccatttccagtgcaaacttctgcgcctgccggaaaccatgcaaactgataaggggaaagcgatggcgcagcataatgcccgttttctcgtcgaatttatggctaagctcagcgcggagctgcagggggagccgctggcgctggatgaagcggttttgcgccgctttgcaccgcaggcgtcaaccgaccggtga

SEQ ID NO: 224255 - DNA, 282 bp, Klebsiella pneumoniae; identical to SEQ ID NO: 136386

SEQ ID NO: 224256 - DNA, 1146 bp, Klebsiella pneumoniae
atgaaaagaaaagtactggcacttatggttccggcattattaatggctagcgccgctaatgccgccgaaatctataacaaaaacggtaataaactggacctctacgggaaagttgacggcctgcattacttctctgacgacgcttcagaggacggcgaccagacctatgttcgctttggtctgaaaggcgaaacgcagattacttccgagttaaccggctacggtcagtgggaatacaacattcaggcgaacactagcgaaaaagaaggtgcgaattcctggacccgtctcggctttgccggcctgaagtttgccgactgcgggtcgctggactatggccgtaactacggcgtggtctacgacattgaatcctggaccgatatgctgccggaattcggcggcgatacctacacccagaccgacgtttacatgaccggccgtactaacggcgtggccacctaccgtaacagcgatttcttcggcctcgtcgacggcctgcatttcgccctgcagtatcagggtaataatgaaaacgccggttctggcgaaggcactaataacggtgggaaacgtaagctggcgcgggaaaatggcgacggttttggtatctccagctactacgatctcgatatgggcatcagcttcggggcagcgtattcgtcttctgaccgtacccataaccagctggcggccgcgcgtagcagccagcgttatgccaacggcgataaagccgatgcctggaccgtcggcgcgaaatatgacgccaataacatctatctggccgccatgtatgctgagacccgcaacatgaccttctatggcaacgatagttttggcggaattgccaacaaaacgcagaacttcgaagtggtcgcgcagtatcagttcgacgactttaatttaccgctgcgtccgtccgtggcctatctgcagtcgaagggtaaagatctctacgcctattctcgctacggcgacaaggatctggtcaagtatgtcgacgtgggcatgacctactacttcaacaaaaatatgtccacctatgtggattataaaatcaacctgctggatgaagacgaccgcttctacaaaaacagcggtatcgcgaccgatgatatcgtcgccctcggcctggtctatcagttctga

SEQ ID NO: 224257 - DNA, 798 bp, Klebsiella pneumoniae
atgtttaaatggccctggaaagcagatgatgagtccggcaacgcagagatgccctgggagcaagcgcttgccattccggttttagcccatctttcgtccactgagcagcacaagctcacgcagatggctgcccgttttttacagcaaaagcggctggtggcattgcaggggctggagctgaccccgctgcatcaggcgcgcattgctatgctcttttgtctgccggtgcttgagctgggcattgagtggctggatggcttccatgaagtgctgatctaccctgcccctttcatcgtcgatgatgaatgggaggatgatattggtctggtccacaaccagcgggtggtacagtcgggacaaagctggcaacagggtcctgtagtgctgaactggctggatattcaagactcttttgatgcgtcaggctttaaccttgtggtgcatgaagtggcgcataagcttgatacgcggaacggcgaccgggccagcggcgtgccgcttatcccgttgcgtgaagttgccggctgggagcatgatctccacgccgcgatgaacaacattcaggatgagatcgatctggtaggcgaaagcgccgccagtattgacgcctatgccgccaccgatcccgcagaatgctttgctgtcctctcggaatattttttcagtgcgcctgaactgttcgcgcctcgcttcccggccctgtggcagcgtttttgccacttttaccgccaggatccgctggcgcgtagacgtgagaatggcctgcaggacgaaggcgatcggcgcattgttcactaa

SEQ ID NO: 224258 - DNA, 696 bp, Klebsiella pneumoniae
atggaggatgctgaaaacagcctgtccagtgcggcgatgacgcccaggggacggctacgggtggatgtaccgagtccgctggcccgccttattctggtgccggcgctaccggctttccacgcccgctaccctgatatccagatcgacatgggtgtgagcgaccggggagtggatctgatcggcgacaacatggattgcgttctgcgcggtggtcaaatcaccgaccagtccctaatcgcacgccatgtcggcgatttgcaaatcggcgtctacgtcgcccccagctatgtggaacgccttggcgctcccgcacacccgcgcgagctgcaaaatactgaccattgcatagtgggattcttgtcctcacgcaccagtaagattgatcctttggtactgtgcagtgagaatgaacgtattgaaatcacgggcaactacgtacttgccgtggatgatggcaatgcttacctcgaagctgggttagttggcttaggcgtgattgcgctgcccaactatatggcggcagcgcatcaggccgttggcgctttgattccattatttacacaatggcggattagcccaatgcctctgtacctggcgtttccaccgaaccgccatgtcaacgccaagctgcgcgtttttattgactggatcgttgaattgatggagcagcatgtccccattgccaacaatcagtga

SEQ ID NO: 224259 - DNA, 942 bp, Klebsiella pneumoniae
atgacgatgcggcgtgtgaaattactctgtacggcgctgatgctgcttgccagccacggcgcgctggccgtcagctatccgctgccgccggaggggagccgtttggtgggcagcgcatttaccattgccgttccggagaataacacccagccgctggaaagttttgccgcccagtacggccaggggttaagcaatatgctggaagccaaccccggggtcgatgtctatttaccacgctccggttcgacgctgactattccgcaacagctgatcctgcccgacaccgtgcgcgaagggatcgtgatcaacgtcgccgaaatgcgtctctattattacccgccgctgggcaacagcgtggaagtcctgccaatcggcattggccaggccggacgcgaaacgccgcgtaactgggtgacggcagtagagcgtaagcaggaaggccccacctgggtgccaaccgccaatacccgccgcgagtatgcgaaagagggcaaaaccctgccggcgctggtgccccccgggcccgataatccgatggggctgtatgcgatctacatcggcaggctctacgccatccacggcaccaatgccaactttggtatcgggctgcgcgtcagccagggatgcatccgcctgcgcaatgacgatattaaattcctgtttgataacgtgccggttgggacgcgggttcagctgatcgatcagccggtgaagtacagcgtggagccggacggcagtcactggctggaggtgcacgagccgctgtcgcgcaaccgcgcggagtttgaatccgacagaaaagtccccttgccgatgacctcggcgctgcgcgagtttacccaggggccgggagtgagtccttcgcaggccgagcaaaccctgcagcgccgctccggcatgccggtgaatatcagcgccacagcggcgcagggaagtttgtag

SEQ ID NO: 224260 - DNA, 951 bp, Klebsiella pneumoniae
gtgaacttccagcagctgaaaattatccgtgaggcggcccgtcaggattacaacctgacggaagtcgcgaatatgctctatacctcgcagtcaggcgtcagtcgccatatccgggaactggaagaggagctggggattgagatctttatccgccgcggcaaacgcctgttaggcatgaccgagccgggtaaagcgctgttatcgattgccgagcggatcctcaatgaagccagtaacgttcggcggctggcggatctcttcactaacgatgcgtcaggcgtcttaactatcgccaccacccatactcaggcgcgctacagcctgccgccggtcattaaagctttccgcgagctgttctcagatgttcgcgtcgagctggtgcagggtaccccgcaggaaatcgaagcgctgctgcataacggcggagcggatatcggcatcgccagcgagcgcctgagcaacgatccgacgctggcggctttcccctggttccgctggcatcacagcctgctggtgccgaaggagcatcctttgacgcaggtttctcccctgacgctggaggcgatcgcccgttggccgttaatcacctaccgccaggggatcactggccgttcgcgcattgatgaggcgttcaaccgcaaggggttgatgccggatatcgtgctgagcgcgcaggattccgatgtgatcaagacctacgtggagctggggctgggcgtcgggctggtcgccgagcagtccggtgatgcccgggaagcggacacctttacgcgtcttgatacccgccatctgttcgatgccaataccgtgtggttgggactgaagcggggccagctgcagcggaattacgtttggcgctttatcgaattgtgcaatgccggactgtcgctggatgagattaagcgtcaggcgatggagccggaagaggtcgcaatcgactatcagatttaa

SEQ ID NO: 224261 - DNA, 918 bp, Klebsiella pneumoniae
atgaacttaagacgactgaaatattttgtgaaaatcgtcgatatcggcagtctgacccaggccgctgaagtcttgcatatcgcccaaccggccctcagccaacaggtcgcgaccctggaaggtgaaatggaccagcagttgctgatacgcaccaagcgaggggtcacgccaacggaagccggtaaaattctctacacccatgcgcgcactatcctgcgccagtgcgagcaggcgcagctggcggtcaataacgtcggccagacgctgcgaggccaggtgtcgatcggcctggcgccgggcaccgcggcctccgccattaccatgccgttgctgcaaacggtgcgcaatgagttgcctgaggtgatggtctatctgcaggagagcagcggcacagcgctgaatgacaagctgctggcgggccagctggatatggcggtgctctatgagcgttcgccggtggcaggcatcgtcagccagccgctgctgaaagaagacctttacctggtcggcacccgcgactgcccggggcagagcgtggatctcacggcggtggcggagatgaacctgttcctgccgcgcgattacagcgcagtgcgggcgcgggtcactgaggcattcaccctgcgtcgtctatcggcgaaaattatcggcgagatcgaatccattaccaccctgaccgcggccatcgccagcggcatgggggcgacggtgttaccggaatccgctgcccgttccctgtgcggggcggcgaacggctggatggcgcggatcagcacgccttcaatgagcctgtcgctgtcgctgaacatgtcggctcgcggcagtctgtcgccgcaggcgcaggcggtgaaagagatcctgctgtctctggtgagccgcccatcgctggaaaaccgtgaactgcagctggttagttag

SEQ ID NO: 224262 - DNA, 705 bp, Klebsiella pneumoniae
atgaatcccaatacctccaccgtcctgaagccccgccgcggccgtccacccaaggtcgatcgccagtttgacgatacgcgtcaggcgctgattcgctcaggccttgaagtgctgaccgaaacgggctatctcgcggcgggtattgatgcggtgatcaagaatatcgccgtgccaaaggggtcgttttatcattgctttaaaagcaaagaggcctttggcctcgccgtgcttgccgcctatggcgacttctttgcgcataaattagataaattcctgctgaacgacgccgtgccgccgctggaacggatggcggcctttgtgcgtcatgccggtcagggaatggagaaattccagtttcgccgcggctgcctggtgggcaacctgctgcaggaagccccgttgttacccgagacgtttccccaacggttgatggctatcctgtcggcatgggagtcgcgcgtggcgcgctgcctgcgcgaagcgcaggcagccggggccatcgccagcgacgcctcaccgcaggcgctggcccaggtgttctggatcggctgggaaggcgcggtgatgcgcgccaggctggtccagtctgccgcaccgcttaaccagtactgggatttttttgcgcacagtatgacaacaaaaacacctgcacaggacggcgctagcgccgataacccccttccgacgaggaatactctgtcatga

SEQ ID NO: 224263 - DNA, 978 bp, Klebsiella pneumoniae
atgaaagcattagttctggaccagatcgacaaccgcaccgtcgccaccgtcaaagatatcgacctgcccgctcttgccgaaggcgacgtccgggtcgccatcgactggtcgagtctcaattataaagacgccctggcgatcaccggcaaaggcaaaattatccgtcagtttccgatggtgccgggcattgattttgccggtcaggtgaaagaaagccgcgatccgcgctttgttcccggccaggccgtgatcctcaccggctggggcgtgggcgaaaaccactggggtggcctggccaccgaagcctgcgttaaaggcgactggctggttgctctgccggagacgctcagcgcgcgccaggcaatgatcatcggcaccgccggctttaccgcgatgctatgcgttgatgctctcgtcagtgcgggtgtcacccctgatagcggggatatcctggtcaccggcgccagcggcggggtcggcagcaccgccgtggtgttgctcaaagcccttggctaccgggtgacggccgtatcgggccgggaatcgacacacgattaccttcgccagctgggcgccgatacgatcctgccgcgcagcgacttcgcggagacccgtccgctggagaaacagctgtgggcgggcgcggtggataccgttggcggcccggtgttggccaaagtgctggcgcaaacgcaatatcgcggctgcgtcgccgcctgcggtctggccgggggcttcgatctgccgaccaccgtgatgccgtttattctgcgcaatgtgcgtctgcagggggtggattcggtgatggtgccgaccgctgaacgcgacgctgtctggcagcgtctggcccagcttctgccggagagctactaccagcaggcggccacagaaatcacgctggagcaggcgccagcgtatgccgcagatttcctcagcaataatattcatggtcggacgctggtcaatatcggccagtaa

SEQ ID NO: 224264 - DNA, 1455 bp, Klebsiella pneumoniae; identical to SEQ ID NO: 223125

SEQ ID NO: 224265 - DNA, 1437 bp, Klebsiella pneumoniae
ttgaacgtcacctccgccgtacgccaggctgtcgaacggacatcctggtttaaaaaacgtcagcgttatcgtgtgctgtactggcgcgaaatcagccctctcgctgtgcccattctgctggaaaatgcctgtgtgctgctgatgggggtgttgagcaccttccttgtcagctggctgggaaaagaggccatggccggtgtggggctggccgatagctttaacatggtcatcatgtccttctttgccgccatcgatctgggtaccacggtggtggtggcctttagcctcggcaagcgcgatcggcggcgggcgagggcggccgcgcgccagtcgctggccattatgaccctgttttccattttgctggcgggggtgatccatgcctttggccaggagattattgattttgtcgccggcgatgccaccgcccaggtcaaggacctggcgctgacctatctggaactgacggcgctgagctacccggcggcggcgattgcgctgatcggcagcggggcgctgcgcggcgccggcaccaccaaaatcccgctgctgatcaacggcgggatgaatatcctcaatatcttaatcagcagcgtgctcatctacggcatcttctcctggccggggctggggtttgtcggcgccgggcttgggctgaccattgcccgctatattggcgcgatagccacgatctgggtgctgatggtgggcctcaatccggcgctgcggctgtcgctgaagggttacttcaaaccctttaacttcgccattatctgggaggtgatggggatcggcatcccggccagtatcgaatctgtcctcttcaatggcggcaagctgctgacccagatgtttgtcgccgggatgggcaccaacgttatcgccggcaactttatcgccttttcggtggcctcgctaattaacctgccgggcaacgccctcggctccgcctcgacgatcattaccggcaagcggctgggaaaagggcagattggtcaggctgaattccaggcctggcacgtattttggctgtcgacgattattctgacgctgatcgcctggggcagcgcccccttcgccggctttatcgcctcgttctacacccatgaagaagatgtaaaagaagtggttaaacagctgctgtggctcaacgccctgtttatgccgatctggtcgctgtcgtggactttaccctgcgcttttaaaggcgcccgtgacgtacgctacaccatgtgggtgtcgatgctcggcatgtggggctgccgggtggtggcgggctataccctgggcatcgtgctggggatgggggtgattggcgtctggttagggatggtgctcgactgggcggtgcgcggcgtgctgttttatttccgcatggtgagcggccgctggctgtggaaatatccgcgcgtgaaggcttcatcggaggaaagctga

SEQ ID NO: 224266 - DNA, 996 bp, Klebsiella pneumoniae
atgagtaagaatcaagacatatacttttatccatacaggactgatataaattcttatccactaaggattcaatatatattatcggattctttttttataaaaaacttgtcttttaaacaggaggcaattaaagttttatcctttaggttttttagaaaagatattgcgataattaactggttagaaaatggatttgtgaataaaaacggagggatcagttatgttggtattatacgtgtatttataatattactcttactgaagatacgttttaaaaagttattatatgtaaagcataaccattatccacacaatattaagactaaacatatcaaaatggttattagtatgatgaaaattatggcgagtttttttgatttcgctgtagttcattcacctactgaggttaatcttacttacttaccacatccattatataaatacccattagaattatcccaaaacaaatcgaatcctgatattgataaatatattatattcggtcgaataacgcgttacaagaaaattgaagatgttatattggcatttccggataataaaaaactgatcattgcaggaggatgtgaagatagagaatatttatcttttcttgaagagttaattaaaattaaaaccaacataattataaaaggatattttctatctgataaagatgctgaaaatctaattaagggttgtaatgggttaattttgagtcattctaatgaagaaatgatagtttcaggtagttttttttattctcttacaatgggtgttaaagtttatgcgattgaaacaccttttttatcatgggttgaagagaatgttggtgagaatgttatccaaaatttcaaaaacttacatgatatgatggagactataatgaatgaacagcatttaaattattgctatggggaagaaaatattaataaaattaatgagctattcagtgataagctcattcgagaaactttcgaaagccttttatataaataa

SEQ ID NO: 224267 - DNA, 1431 bp, Klebsiella pneumoniae
atgagtcgtctggctagaaatttttggtccagtattgcactggcgttgtctgattttgttggatttacaatagcgatgtatatcgctatcgccgctgtaaaagtatttttaactaacggcaaagttttagttattgatggccacatcgatgactggatggcttttcatatatgtctggggctttgctgcgtagcatggtattcagtaaggcttcgtcattatttttataggaaaactttttggtttgagttaaaagaaatattgagaacattagttatatttgctgttattgaaatagcagtaatgtccttcgcaaattggtatttctctcgttatatatggtgttttacctggttctttgtactttgcttagtgccatcatttcggatgttaacaaaaaaagtattagatttctttggattatggcgccgtgaaactgtaattattggatcagggactaatgctattgaggcatggaaggctatcgatagtgaaaaaaacttaggttttggggttataagttttatatctcatgctaatggggattctcctaccaatgatataaatggcatacctgtcatagagttgtctccaaaaaaactaattaatctgtacgataagcgtactcagtttatcgttgcgcttgaatcacacgaaagctctttaagaaatgactggctaagattgtttatgattaacggatatcgctatgtttctgttattcctactttacgaggtatgccgcttgatagcaccgatatgtcttttattttcagccatgaagtaatgattttccgcgtacatcaaaatttggcaaaaatttcttcccgtataattaaaagagttttcgatattatcggttcactctcaattattttaattagttctcctctattattatatattgcttttaaagttaaaaaagacaatgggccagctatctatggacacgagcgcataggtaagggcgggcgctcatttaaatgtttaaagtttcgttcaatggttactaattcaaaagaagttttagaagaattattacgttctaacccggaggctagaaaagagtggaacgaaacatttaaattaaaagaagatcctcggattacaaatataggcaagtttttacgtaaaaccagcttagatgaacttcctcaactttttaatgttctaaaaggtgaaatgagccttgttgggccaagaccaataattaccgccgaacttgaaaggtattcggatgaggttgattattatcttttaagcaaacctggaatgactggattatggcaagttagtggacgtagcgatgttgattatgagacgcgtgtttatcttgatgcatggtatgttaaaaattggtcaatgtggaatgatatagcaatcctttttaaaacaataggagttgttctaaagaaagatggagcttactaa

SEQ ID NO: 224268 - DNA, 669 bp, Klebsiella pneumoniae
atgaatttattaaaatactatcaacaatatcgcgacaagtggtgggctttaccgctcgttctgcctgcgctgttattaccggtcgccagatgggcgaatacctacaccatgctcaatggtcatatggtatttttgtattatcttcccctggcgctggtgctcagcctgatgatgttttttggttgggcggcgatccctggcattattattggcctgctgttaactctggcccacggcatgatgtttgagcagtccatcggtgtactgttccatttccttatcccctgcgtgctctgctggggcggctaccgcatttttgtcccccagcgtcagcaggtctcacacggcaacgtccgactgatgccgcatcgtctgttctggcaaatgctgctcccctcggtcatttttctgattttgtcacagattgccgaatatcttggactccatccgcgcacaacggaaatgaccggcgttacgccatttagtttacgttcattaatcacctttcaggcgctaatggtagggtgcctgaccggcatgccgctgtgttattttgtgttacgggtcattcgtaatccttttcatttacgcggctttatttctcaggttcgcttacaaattgatccaaaaataaaaaaattgaaattatttgctgggcgacggtattaa

SEQ ID NO: 224269 - DNA, 399 bp, Klebsiella pneumoniae
atggcaacgctggagttactgcaaaaacatattcgacaacgcgatctggcgcagctcctcgacaagctgagcgaattattattgactggactggcgacggaatcgcaggtacaagccctgatgcactatctggtacaggcaggcaacacgcgcgagccgattaaattcattcgcgagctggcgttacgtacgccgcagcataaggagacgttgatgacgattgcggaatatctggaacaacaggggctggagcggggcctggcgcaaggccgtcaggaaggacggaaagaagaggcgcagcgcatcgctgtcgctatgctgcacagcggccttccgcgcgacctggtcgcccggttgaccgggctgacggagcaggagctgactcccctggcggactaa

SEQ ID NO: 224270 - DNA, 444 bp, Klebsiella pneumoniae
atgtcagacgacatcaaaaaaaaattcgtcggtttcaaggataaatttaaacttccgacaataaaaaaaggttctgacgagccagatagcgttgttagtgaagttgctaatgaaacgcctgacggcacatcagtttcaaccaaagagaaataccagctgttgttgaacaatatcgtcattaatggattgctcaacatagcggaagataaattaaacgatgatgtgtttattgaatctgtattcaataaagcatatgagctattacccactcctgtaaggctcgttatgaaaagagagtggtgtttaaattatcttcaaactcagaaggctccattactggagaaattgaaggtttaccgtgtaaacccagcatcggagccactgactctacaagttgaagccttaccaaatccaggtgaagaaaaaaacataaaccagcaatga

SEQ ID NO: 224271 - DNA, 213 bp, Klebsiella pneumoniae
atgcaattgaagattctgggcgttggaaactcgccgctgctgtcgatcaaggttaagacgttggacgatgccaacttgctgctgaacgtgtcagcgctcgccagaaagttgggtgtacaccgcagcacctttttatcacgcgtggcgacgcatggccttgaagccgcgattttgtactacgcgacgcagcaaaaactgaaagatgtaatctaa

SEQ ID NO: 224272 - DNA, 393 bp, Klebsiella pneumoniae
atgaaaacaacattgcaaaaagtcagagacagcattgccgccgcgcttctggggaaaactccagagcaactggaggaagaacagcggctggacgctgtaaaaagtgcgattgatgactatctgatccgccatccagactggaaaccaacaacagcgcccgccgttgcgccagtaaccagcaaaaaacaaaaagccaaacgtatcatgaagacgctgggcgctggggcaggtgtctttactccccctgttgtggacgaagcggcgttagctcgtgctcgctccaaatgccgggagatcgttgccgccgatccggctgcgtactcctacgtgatcccgtcagagccactgcctgaccaagataaaccgggcggggcgggtataatacagagctaa

SEQ ID NO: 224273 - DNA, 897 bp, Klebsiella pneumoniae
gtgaccacagagacagaaaaatacatcacggtttttaaacgcctccagtatgcaacacacgttgtgcgccgtgataccggggaggagataaaaaaccgcatcgaagtcgccagcttctacggctacatgcgcgatcagtacacgagctactccgcaaaggacttggagttcttcgagtcgatggagagcatgggactgaaatttcagaatactgatcgccggacagttaaaaaatggctggatgtgttaaacgctatcgggctggttatttcagacaagagggggaaggatgagcgcggctatgatcgctattaccacacagtgattcccctggaggagatcgcggacaacctacttttctacggttcagcatcaatcagcggtgggctactggctgagggaatgttgatccgctcgttggagaagaagaagccacgcgggaaaccgaaacaaaaatccgaggataaacaggtggatggaagtggtcatgaagagtgcgcaacgcaggcagagcaggcagcaaccgctgacccgagtattaacctggcccctgagcctgcccgggatgattctgaacagcgatctggcatggaatctgacactgagcgcggtagcgatgctggcaccgatggtaatcatgcaatgagccaggaagcgcaggacgatgagccaacgtttccacccgagaaaccagagctacaggaaaccgcaggccgggttatagccccactcgatgatcttcgctactggtcagatattggctacgaaggcatggacgactacggcgtaatgtggggtgtatcaggcgatgaccttgataatctgattcgtgaacacctcaaaataagagaagcggaagcagaaaaaactttaaatcgcagagggcacattgattga

SEQ ID NO: 224274 - DNA, 588 bp, Klebsiella pneumoniae
atgggtaacgcaatggtcgcgttgaaaaccgccgacgaagtgaaagcagtcagcgcggagttagcaaagaacaaaaagacgaacctgtttcgctgcctctgggcgatgcaatttgaaagcgctcttcggttcggtgacgccgtcaaattgacgtgggatcagttcgcggagggtaagacgcatctttctataaagcaggagaagacggggaaaattcataaggtcgccattaccccggctatgcgctccatagtccaagctcgccgggaagaagcagcagaccgcccaaaattcggtgactacatattcagcctttctgatctgagatcgaagggtaagccagtttcacacaacgcagtgctgacggagtacggcaagtgcggacgccgtgcaggtttccaggatgtgggaagtcatacaccacgcaagagcaaagggcgcattctctttgagaacggcgcaccgctggagcacatcacaaagttgttgggccaggccaacccggcttcgaccctgttttacatcgggttcacgcaggagacagctgacacattagcgggagaatattctctcggggaggaatggtaa

SEQ ID NO: 224275 - DNA, 222 bp, Klebsiella pneumoniae
atgatgaaaaaatgcacaacatcagtgttaacagttttggccctgctggcatgtcagccagcacacgccggacggatcacgatgcaactcactgaacaagaggagacagccaacggcaagacgctttgccgttatgaaaattctatctattcatttagttacgtgacgctgagcaggcattgcgcgtcagtcaaaaccttcgacaccgaggattcaaattaa

SEQ ID NO: 224276 - DNA, 132 bp, Klebsiella pneumoniae
atgaagaacagcaacattatggcgttagcgctcgcgcttcgcaacatcgaagccggtcaggcggttaaaatcccggcgatgaccgggcaacagttgcgccagttgctggcgtggcttgaggcgctgcggtag

SEQ ID NO: 224277 - DNA, 789 bp, Klebsiella pneumoniae
atgtctacagagaattttgttacctactggctagccagagctgatcttccatactttcttgaacctcatgaattttacgtttctgaggcaaggcggcggcttctctctcagttcggagatcttgatcaagaagcagaacagcgagaagagcaatttctgaaagcatcagcgcaatactttaaccccgactacgacgacccctcagaagcctacgagcaggcttatcatgaaggagtaagttatgcgtggtcactgatggagatgcaaaatagtgtgcttttggcggtaacagcagggatgtaccaccagtttgataaaatattgcgaaaacatactattaagcagctaagtaactggtgcaaagaagaaattatcattccaatgatctggaatttcaccttcaatcaactgattgattttcttgaatggattggactcaaaatcaatggaactgtatacggggaaaagctcaaagcctgcaacctggtcgtgaacgtttacaagcatggtgatggagattctcatcaaaccttatcgttaacccatcctgagtattatcctcatcctaccggtgttaaagattggcaaactatccctgttcatgatgatttgcaggtcacggaagagcagtttgttgaatttgctgatgcaataactgcattctggaaagctgttccagagtattgctactatgcagatctcgaagatgagcctaaatggatagaaaaagttttagcaaacatggagcgaaagaagaaaaaaagtaatagcaaccataaagcgtcgtga

SEQ ID NO: 224278 - DNA, 255 bp, Klebsiella pneumoniae
gtgattaaaaccattgtgttaatcttatttttaagcccattcgccacgcttgccgctgatggcggtgtgccagtggaagaggccgataaggttcagagcgaaatccgtcatgcgggttacgagtgcgagcgggtagaaagtgtcgaaacgcgatggttctttggaacaacggcgaatgtcatttgcgacagggtattccgattcgttttggagtatgagcggggaggggtgagcgttagagtagtgaatctttaa

SEQ ID NO: 224279 - DNA, 1362 bp, Klebsiella pneumoniae
atgggacacaaaaccattcgtcataccactagacgtaacgggatctactacgttcgctttcgtctgtccggcaaaaaatatttccgtaagtcgctggaaacagacagctacgcccaagcgcactcggtaatgtcttttgcctctcctgtcattcacttagtgcaatgcggggctatcaagcccgatcaattttccgctcgcctttctgcgatcaccagtcgcttgaaacaacaggctgaccactggttagcacaacaattccttaatgatgagcggcgtgaagtccaaactcagccgataacagcgcatgaatatcgagatgctgtcgctcctgctgtagttgcggaccaaaaagagctaaccaagccagaaaacgctttaactctggctggtgcatggaacatgtaccgaagcgagaaggggcgaagctggactaaagcaatcgcccaggccaatgagcgttttatggaagtactgctcgtagttttgggtgcatcaacggacgtaaaggcagtcaccaggcaagatattaagcaggtgatggaagttgtagaaaacctacctaagcgtgttgttcagccgtatcgctcaatgactattcagcaactgatcgaatgtgatgatgttccaccagatgatttggtgggggccgaggcaattcataaacatctcaaaatttataaatcgctgttcaagacctttcttactgatagcaaagagattctggataaatctccgactgatggcgtagtggcggcaccatcgaaagcacggtttggtgcgtacagcgcgacggagatgagaaaatttgtgggttgggcgctcaagcagcctgacggctggcagaaatggattacgttattattggcttacactggagccaggagaggtgagatagccaagctggaaaaatcgcaaatcaaatatgatgaagacagccagcgtcattaccttctgattgccgaaggtggacagggcaaaactgaaaacgctacacgccaagtagcaattcatcctgacttgatcgagtggggcttcatcgattttgtgaatcgtcagtggaaagagaaaatattttctccagtggcgggtaagaatatgccgaagattggcaaggttttagctgatatccgcgatcagcttggtatcccgtaccttgatgattatggacaacggcggctggtgcatagtttccggcacacaatgatctcgacctgtctggctggatgggttggaaacttggcgcacttgcaacaggttgtcggtcatgagaaaagcgggacggggatcaccagacgctatttgcatacgtttccgctatctgcggtttgctatgtgatcgacggattatgctggtattaa

SEQ ID NO: 224280 - DNA, 1467 bp, Klebsiella pneumoniae
atgacaacaattgcaaccgctacgctaccgaagaacgtgcaataccctcaatacgatcgcagccagctccgctcgcgtattgtccatttcggctttggcgcgtttcaccgcgcgcaccaggcgctgctcaccgatcgcgtgctgaataacgtcggcggcgactgggggatctgtgaaatcagtctgttcagcggcgacacgctgatgagccaacttcgcgaacaggaccatctgtttaccgtgctggaaaaaggcgccgacggcaaccagcccattgtgatcggcgcggtgcacgaatgtctgaacgccaggctcgattcgctggcggcgattatcgaaaaattttgcgagccgcaggtagcgattgtctcgctgaccattacggaaaaaggctactgcatcgatccggcgaccgggaaactggatccgacgcatccgcgcattattcacgatctggagaatccgacgctgccgcagtcggctcccggtattttagttgaagcgctggcccgccgccgggaacgaggccttccgccctttaccgtgctctcctgcgataatatccccgacaacggtcacgtggtaaaaaatgccgtcctcggcatggcggaaaaacgcagcccggcgctggcggactggatcgccgacaacgtcagcttcccgggcaccatggtggatcgcattgttcccgcggccacaccggagtcgctggcggaaatcgccgccgtgctgggggtcgacgatccctgcgccatcagttgcgaacccttcattcagtgggtggtcgaagatcactttgtcgccgggcgacccgcctgggagacggcgggcgtgcagatgaccgatgacgtgttgccctgggagcaaatgaagctgcggatgctcaacggcagccactctttcctcgcctggcttggctatctggcagggcatgcgcacattagcgactgcatgcgggatgacgtcttccgccgcgccgcccgccagctgatgcttgacgaacaggctccgacgctgaccattaccggcgttgatctgctggcctatgccgacagtctcatcgcccgcttcagcaatccggcgctcaaacaccgcacctggcaaatcgccatggacggtagccagaagctgccccagcgcatgctcgatggcatccgcgtacatctggcgcgcgacagccgttggccgctgctggctctcggcgtggccggctggatgcgctacgtcagcggcacggacgacgccggtcagacgatcgacgtgcgcgatccgctggtcgacaagatccggcagcgggtggcccagagcgatgagcagcagcgcgtcgacgccctgctggggctggaggaaatatttggccgcgacctgccgcacaacgcccagtttgtcgccgggatccgcgccgcctggcaacagctggcgacgcacggcgcccgcgaggccgtcgcccgcgcgctgaattcttaa

SEQ ID NO: 224281 - DNA, 669 bp, Klebsiella pneumoniae
atgcgctggcgccatccggtggttggtgaaattccgcccgacgtttttattaacctggccgaaacccagcagatgatcgtgccgctaacccatcacctgctcgcgctgatcgccagcgacgctgcggtgttgaagcgtattctgccgcgcggcgtgaagctggggttgaatatttcccctgcccatctgcaggccgacagcttccgtgacgatatgctgcgcttcgccgccgcgctgcccgccgaccactttcacgtggtgctggaggtaaccgagcgggcgatgattgataaagaaaaatcgatggctaacttcgcctggctccaccgccagggattcgaaatcgcgattgatgatttcggcaccgggcatagcgcgctgatctatctcgaacggtataacttcgattatctgaagatcgatcgcggttttgtgcaggcgattggtactgaaacagtaacctcgccggtgctggatgcggtactgaccctcagccgccggctgaaattaatgaccgtcgccgaaggggtggagacccaggaacaggcggagtggcttcgcggccagggcgttcatttcctgcaggggtactggatcagccgaccgctgtcgctggccgggctggtggctgcgcacgatgaacccgcgaactatttcacaacgcgctaa

SEQ ID NO: 224282 - DNA, 1095 bp, Klebsiella pneumoniae
atgggcagctacctgatccgccgtttgctgttagtcatccccaccctgtgggccatcatcaccattaacttttttattgtccagatcgcgcctggcggcccggtcgatcaggccatcgccgccatcgagtttaatcagcgcggcgggatgccgggggctggcgacggcggaatgggcgccagccatgcccgcaccggcgcaggcaatatcagcgagggtcactatcgcggcgggcgcggcctcgacccggaagtcatcgccgagatcacccaccgctacggcttcgataaaccgctgcacgaacgctatctgaagatgctgagcgattatctgcgctttgatttcggcgacagcctgtttcgcagcgcgtccgtgctgcagctgattaaagacagcctgccggtctcggtgagcctcgggctgtggagcacgctgattatctatctggtctccattccgctgggcatccgcaaagcggtcagcaacggcagccgctttgatatctggagcagtacgctgattatcattggctatgcgatccctgcctttctgttcgccatcctgctgatcgtgatttttgccggcggcagctatttcgacctcttcccgctgcgcggtctggtctcgccaaatttcgacaccctcccctggtatcagaagatcctcgactacctgtggcacatcaccctgccggtgctggcgacggtaattggcggctttgccgcgctgactatgctgaccaaaaacagcttcctcgacgagatccgcaaacagtatgtggtcaccgcccgcgccaaaggcgttggtgagaaacagatcctctggggacacgtgttccgtaacgccatgctgctggtgattgccggcttcccggccacctttatcagtatgttctttaccggctcgttgctgatcgaagtgatgttctcgctaaacggcctgggtctgctgggctatgaagcgacggtctcccgcgactatccggtgatgttcggcacgctctatattttcactctgattggcctgctgctgaatatcgtcagcgatatcagctatacgctggtcgacccgcgcattgattttgagggccgctaa

SEQ ID NO: 224283 - DNA, 1590 bp, Klebsiella pneumoniae
atgacccacccgctgttagctatcgacaatctctctattgcctttcgccagcagggcgagacgcagaccgtggtgcataatctgtcgctcgaggtggcggtcggcgaaacgctggccctggtgggcgaatccggctcaggtaaaagcatctccgccctgtcggtgctgcggctgctccctaccccgccggccagctaccccagcggtgacatccgttttcatggccagtcgctgctgcatgcggatgaggcgaccctgcgcggcgtgcgcggcaaccggatcgcgatgatctttcaggagccgatggtatcgctcaatcccctgcacaccctggaaaaacagctctacgaggtgctgtcgttacaccggggaatgcgcaaacaggcggcgcgcggggagatcctcgactgcctggagcgcgtcgggatccgtcaggcgccgcggcggctggcggactatccgcatcagctctccggcggcgagcgccagcgggtgatgatcgccatggcgctgctgacgcgcccggagctgctgatcgccgacgagccgactaccgccctggacgtatcggtgcaggcgcaaattctgcaactgctgcgcgagctgaagcaggagctgaacatggggctgctgtttatcactcataacctgagcatcgtccgccagctggctgaccgggtggcggtaatgcagaacggccgctgcgtggaacacaatgactgtcgggcgctgttcagcgcgccagcgcatccctacacccaacgcctgctggatagcgagccggacggagagccggtgccgctggccgccgatgccccggtgctgctgcaggcggacgatttaaaggtggcgtttcccgttcgcaaagggatcctgcgtcgggtggtcgatcatcatcgggtggtcaacagcctcagctttcagctgcgcgccggcgagacgctgggcctggtgggggaatcgggttccggtaaaagcaccaccggcctggccctgctgcgcctgatcccgtccgggggcaagataaccttcgccggccagccgattcaggggcgtaaccgccgacagctgctaccgctgcgccgacagatgcaggtggtttttcaggatccgaactcgtcgctcaatccgcgcctcacggcgcagcagatcattgaggaaggcttgcgcgtccaccagccgacgctgacggcggccgaacgcgaacaggcggtgatccttgccatgcaggaggtcggcctcgacccggccagccgccagcgctatccggcggcgttctccggtggccagcgacagcgtatcgccatcgccagagcgttgatcgtcaaaccgcagctgatcgtcctcgatgaaccgacctcatcgctggacaaaaccgttcaggcgcagattctgaacctgctgaaagccttacagcgaaagcatcagctggcctatatttttatcagccatgatttaggcgtggtgcgggcgctgtgtcaccaggtgatggtgctgcgtcagggagaggtggtcgaacagggcgagtgcaagtccgtcttcagcgcaccccggcatgagtatacccgccagctgctgacgctaagctga

SEQ ID NO: 224284 - DNA, 858 bp, Klebsiella pneumoniae
atggcagtgcaggtgcagggtgacgtcatagcgcttcttgatttcactgaccagctcaaaggcggcatgcggggtgaggatgccggacatgtccttgatggcgacggagtcaacgccggtctccagcagctgttcggtgaggtcgagccaggtctgcagggtgtgcgccgggctggtggtgtacgaaagcgtaccctgggcgtgggcgccgtgccggcggaccgcctgcagggcggcctgcatgttgcgcgggtcgttcatggcgtcgaagacgcggaagacgtccatgccgtttttgacggcgcgctccacgaagcgctccaccacgtcgtcggcgtagtggcggtagccgagcaggttctggccgcggagcagcatctgcagcggggtcttcggcatcgcctttttcagctcgcgcaggcggacccacgggtcctcgccgagaaagcggatgcaggcgtcaaaggtggcgccgccccagcactccagcgagcggtagccgacgtcgtccagctgagcggcaacgggcagcatatcgtcgagacgcagacgggtggcgaacagggactggtgggcgtcgcgcaggacgacatcggtaatggcaacggtcatgaattcctccgtgaattaagggtgaagacggcgatggtggtgaatggcggcgacaatcgccggcttcaggcgggcgaaatcgtcggcgggcgcgacggcggccggcgccggtttgggggcggcaggcggctcaggaaacaggcggttgacggcgagggacattccccggatggcgaaaatgagcagcagcaggaacaccagcacaaagcccatgccgagaaacatcagggtgaagccttcgcctaa

SEQ ID NO: 224285 - DNA, 1185 bp, Klebsiella pneumoniae
atgaataaatttatcaaaatattatcagtcgcatttgtaattattgggttggtggtttttgtgttgtttttatgtaagtcttcaatcgatggctactcaatatttaccagttctaaaaccgattatactgtcactggacagtttggagattttgttggtggagtgattggcactatttttgctctagctggtacatttttaattttcttaacctttcaagagcaagctaaagtgaataaaagaactgcatttgagtctgttttcttcgaaatgattaggttacataaagaaaatgtaacagagttaagatgtagtagatatgtacctggtgagaaaatgactgagaagtatgaaaacaggcaagttatgcgaatcatctttgatgatgttgtaaattgttatagagaagtcagtaaattttctaattccaaggagccaatcgactatattaattcaaactatctagtgcagcttaatgacataattacgaaaaacaaaataacggcaagcccgatagatttggctagaatagatatagcttactgtatggtcttttttggagtgggggttgaaggcgaaacaatattaagggagttgttcaagaaaaaatataatccagaatattattttaagttaatttatttcataaaaatgaaaccaaagaaaagtaatttagaacgtttttctaaatggaagtatctgagggggcttgagcttgaaaaattacatcaagttattgatgaactatacaaaaataaaagtcatccagagaaaactgataaaatttcaagcctagctgctggatttaaaatgcatgcatcatatgaaaaatattatggaggtcatcaatttcgtttaggtcattattttaggcatttatatcagagctataagtacttagataacgcgacttttttggaaggaaataaacaatattcatatggtaaaatgctccgtgctcaactgtctacatatgaacaagcattattatttatgaatagcatttcaagtatcggaatgaaatgggaatatcttcctgagccaactgataatccaaagaattgttctaaattaattactaaatataatttgataaagaatctttctggaaatcatatttttggaatacattataaaaattattatccagatgtatcatatgaaacggatgaatatacttcgtaa

SEQ ID NO: 224286 - DNA, 834 bp, Klebsiella pneumoniae
atgatgaataatatttcccctgcgctatcattaactcgtagagattattttgctaacgaggccgactttcatcgccagctttttgatgatatcgaaagaattattaaatcaatggaaagttcaagtgacaaatattatggagatgatgaagacaaattaagccataccattgttgcttcacttgggcagcttgggtatggtgctacagaacaaacaaaaaaaaatgggagtgttgatataactgttaccgcgaatacttctcaagataaaaagtttgaatggatagctgaggctaaaatagggtatggacctcaaaaaatattcgagggattgctacaattgttaactcgttatataaagcgtgacaattgtggtggattaataatttattatcaaaaggataaatcgaatattcttttcaatgactggctgaagtatttgtataaaaagaaatggtcagattattgtgaatcgaaaggtaaactgggtaaaatcagtccacttttaggacatttagatattaatgagtataaaaaggttgctgatgattgttatcatgctgacattaaagtggtaaaacctaatggtgctccatttgatcttagatgcttttatgttgatatttaccatgagccagttgataaaagtggtgtagcaaataaaagccttaaagagggtattgcaagaaataagatcagagaaatttatcatctgtgggaatcaggaaattttacacaggcaaatgaaaaagaactatttgatgctttgagagtttatttcgatggtgcaatggatcctgatgaagtagaggatacagatgatgaagatcaataa

SEQ ID NO: 224287 - DNA, 438 bp, Klebsiella pneumoniae
atgacattcttaaaagagcgatataagagaatgttgccagtaattttaaagcaacattctcttgttgatgatctggctaaaaattcggttcttttagagccgaatcagcttaagtattatcataacttactcgattatatgtgtgataatattgagctggatatttacacagttcatacactcaaaaaagccattcaatcatcaagtataaatgatgtatgtgaaatagtgaggtttttcagcggtggaaactctaatctattcaaaattaaatattattatgaagatgagaatagtgaaaaaatttacatcaatcaagatgaatattttaattataccatgacaggtgaaataccagtcgatgagaatggtcttgagatcgaagattttgatccacggtatcttacattctattgtttgttgaattatgatgaataa

SEQ ID NO: 224288 - DNA, 1077 bp, Klebsiella pneumoniae
atgagcatacagcaagcacatggagtcactacccacccgacatcagcatacaatcaggctgaggttgaaaaaattttagatgcgctggaacaaactggggagttggcatacttagcacgtgttgcttcaccgtatggttttcagattactagtcgctgggcttccactaagcagaacattcttacaacgttatcaaatcctgatatcgcgaataagcttgcaaatgaaaaaacgttgaagatgattcttttaagaataataacatctattaatcattattactcaattgattatattaaaggcggtaatgtaaacaacatttcaaagtttgtcgaattctcaaactttgaaaaaatatttagtaatgcattccccttaaagcttgatgaaagtactggtttaccaccatcaccaggtaattttattacggctgttgaggacatgggagacggaattgccgttatattctcctatgttttgttaaaaaaaataaatggtagaagcaaactacgcacaaatcaatatcccgttcagcatttcaatacggtgtttatccctaatgatttgagtcgtgttgaatatagaattgatcgtaagttaggacgtcgcgcatgtgatcgagccttaatagatcttcgaatgaaattcatcgagttcctctctgaaaataaagttaatttgcaagttgaatcagtgaatttctttaaagcgatagacaatatctatcaggacaaatcttttgggcgtcttgttcaagtcgatttcattgagccaacgagtgatgaagatgcatatttacgttgcagaacaaaacccagttacgatgcccgtaatagaaatgttgtagagacaaaagacggtaacctctccactattaaagggttacgagtccgtggagtcgctgttcgattcgattataaaattggagatgagaatttaacaaatgaaatcggttttgatccaaataagaaagattgggctgaaaacgacttctgtgatacattctatttttctaaaatgtcagaaaatatgtcacattttggagtgataaatgacattcttaaaagagcgatataa

SEQ ID NO: 224289 - DNA, 591 bp, Klebsiella pneumoniae
atgagtgttgttgagacgttaagagagttttcagaagtatggaagctttttagtgagattcctgatgacgcgacacttaatgttgagttggcatctctgtatcttggtattagtgtaaaatcacttgctcgatataggcaaaatggcgggggaccagcatatatccagtaccaagtagaaaatagcaaagcgagaaaccagcgagtaaattacttgctaaaagatcttcgagcgtggcgtgataatcacaaggtccaaaatactatgcacgcagctcaaatccgtggattaacatttacgtcattaaccgatttatgtgagccacatccattttggctgtcaaatttttcaggacaaaaaataatatctcatgctttgactacctctgatgatctttttagaaagttattgtcagagcctaatgttgatatagtctggatttctgttgagcaggctattttcaaagagtgggaaaataaaaatgaacgaattatttggcacaatattttcataacaattctaaataatttgagctatgcttcagatgcagcgcaagaaagatatacaatgaatgatgtcttggggagttaa

SEQ ID NO: 224290 - DNA, 1242 bp, Klebsiella pneumoniae
atgtcagcattaccttcccccgaatacagccgcaatatgcggctgattggccatagcgatcagggcggtcgtccggacggcgtgcagctgatggtgcaccgcggattcgcctatatcggccatatggtgtcgcagggtttttccgtggtcgatgttcgcgatccgacccggcccaccaccgtcaactatattgccgcgccgccgggcacctggaacgtgcatctgcaggcgcatgacgatctgctgctggtgatcaacgcccgggatctgtttgctgacgcccgttttgctgatgagaaggtgtactacacccgctcggtgggtgacacggtcagcgatgtgcaggacaagggatggagcgccgggctgcgcatctttgatatttccactcccgcgcagccgcgggaaatcagtttcctgtcgcttaacggcatcggtattcaccgcatctggtacgtcggcgggcgctgggcgtatgtgtctgcgctgatcgacggttttaccgactacatcttcctgaccatcgatctggccgatccgcgtaagcccaaagtggccgggcgctggtggctgccggggatgcaccaggcgggcggtgaaacaccggactggccgcagggcaaacgctatgcgctgcatcacgccattattgccggggataccgcctacggcagctggcgcgacggcggcctgacgctgctggatgtcaaagaccgtacccagccgaggctgattagtcatcgcaactggagcccgccgttcggcggcggaacgcataccgcgctgccgctgccggatcgtgacctgctggtggtgctggatgaagcggtgctcgacaaccaggaggacggcgagaagctgatctggctgtttgatatccgcgagccaaccaacccggtgagcatcgccaccttcccgccgccggatgaagcggattatgtggcgaaaggggcgcatttcggtccgcacaacctgcatgagaaccggccggggagctttgtcagctcaacgctgatttttgccacgtatcagaatgccggcgtgcgggcttacgatatctccaacccgtatcgtccgctggagaccggggcgctggtgccggctgcgcctgagagaatgatggatacccgtcccggccgcccgcgggtgatccagtcctgtgacgtgtttgtcgatgcgcaaggcattatctacagcaccgattacaacggcgggctatcggtgattgagtatctggggtga

SEQ ID NO: 224291 - DNA, 1089 bp, Klebsiella pneumoniae
atgagcaacagcgatatccgcgtcgtgcccggcccggccaactatttctcccatcctggcagccttgagcggctgagcgatttttttaacgccgaccagctctcgcgagcggtgtgggtctatggcgagcgcgctctggccggcgccgaaccttttctgccggcggccttccacctgccggaggcgaaaaagatccgctttaccggccactgcagcgaacgcgacgtggcggggctggtgcaggcctccggtgacgatcgggcggtagtgattggcgtcggcggcggcgcgctgctcgacagcgcgaaagtgctggcccgccgcctgggggtaccgctggtggccatcccgactatcgccgccacctgcgcggcgtggacgccgctgtcggtgtggtatagcgacgccggacaggctctgaattttgagatcttcgatgacgccaacttcctggtgctggtcgaaccgcgcatcattctcaacgccccggcggagtacctgctggcgggcattggcgacaccttagccaaatggtatgaggccgtggtgctggcgccgcagccggaggcgctgccgctcaccgtgcggctggggattaatggcgcgctggcgatccgcgatgtgctgctggccagcagcgaaacggcgctggcggaccagcgccgcggcgatctgacccaggcgtttcgcgatgtggtggaggcgattatcgccggcggcgggatggttggcgggctgggggaacgttacacccgggtcgccgccgcccatgcggtgcacaacggactgacggtgctgcctcagacggataaattcctccacggtaccaaagtggcctacggcattctggtacagagcgccctgcttggtcaggacgatgtgctggcgcagttagtgcaggcgtatcagcactttaacctgccgaccaccctggcggcgctggaagtcgatatcaataaccgcgcagagctggaccgggtcattgcccataccctgcgcccgggcgagtcgattcactatttaccggtgacgttaacccctgaggttctgcgcgcggcgtttgagaaggtggaatacttcagctgttaa

SEQ ID NO: 224292 - DNA, 618 bp, Klebsiella pneumoniae
atgaaagagtatgaagtcaaaataaagctaactgagtatcttttggcaaatattaaaaaaaatattataggttcagagtttagatttgatttcggagccagaagagctgacataataacaatatgtgatggaatagcaacagcatttgaaataaaaacatcaggtgataatgtaactcggctaccgcagcaaatttatggatataaaaaatattttgatttttgctttatcgtttgtgagccaggcaatattgataatgttagaaaggttatttcaaaagagattggtttaattatggtagatgatatgcaagtgactttaataagaaaatctaaacaatttaaggcgcatgataagctaatattagcaagcactttgaatattaaagaaattagaagtcttgttaagattggaaagttatcaaaaatggaactatgtcagaaaatttctgaaacctttaatctaaagaaaatcagatccatttcaagatattctttagagaaaagaatgaaggctccatttgaaaccttcataaatgaaaaaggggatagtataactcgagatgatttaatgactttaaatagaatgccatcacatagattaacctttacttcttaa

SEQ ID NO: 224293 - DNA, 1029 bp, Klebsiella pneumoniae
atgagtaattttacttatttcccgataatgaaaacccgtgacgccgagctcaaagcaatgactcatctaaaagatgatgtttttgataaaatattacctatttatgaactaaccaaatcaagaaaaacaaaaaccactccagatggagacatacatagacgtatgaaagagttaaaagaaattcaaaaaggcagacctttcatactcgacatttgcataaatgaaaattacatgaatgctcaacttgagcaactcctatccccggacaatggctattttgaatggcaatactttatcaacacctataacgaactcaatataatacctatggttcatattgatgataatgattctctccacaatatggaaagtttcatcctatcacaaagtaagaagggtcgttctatagcagcaagatttccaataaatattaacaatatagatgaatacataaaaataataacttcaaccatgactgtcaaccaaaagctcttcatcatattggattcggagcagataactgaatctaatattgatgaagttatagcaaacctccagttaaatatggcgaaaataaaaccaatattgaatgaaaacatcaatgccattattgcaggaacttcatttcctaaaacggtagccgactatggcgacaaagaaggcgatattcctatttttgaggaatatatatatgaaaaattccaagaaccttatgttctatatggggattacgcttctattaatattgaacaaatcgaaataaaaggtggaacatttgttccaagaatagatgtatcgttggaaaacattattttttataaacgatacagaagaaatgcaggcagttatcaaaaatgtgcggaatatattttaaaagataaaagatatgcggcaatggacatttggcctgataaagaaatagcaaaagcaaaaggcaacgagccttctggcattagcccttccttttggatatctgtacgaatgaatcatttcatgaacacaagagtaaaattaagaagtaaaggttaa

SEQ ID NO: 224294 - DNA, 549 bp, Klebsiella pneumoniae; identical to SEQ ID NO: 106448

SEQ ID NO: 224295 - DNA, 675 bp, Klebsiella pneumoniae
atgtcgatacggaatatagatatcagatgtggccacagtaggacttctatagtactctctgttattggtgcgtcgttatttactgtcgcagtatggatatttatttttttccttatatttagaccaagttaccttaaattttttggatttgctccaaaatattttctcactaacccattaaaaaacccagactccgctcaaagtgaacacttattagagttaatttctaacggaacaattcttagcttagataacctttggactatgcaaacagggctttaccaaactataatcactgtcttgatagcgattaatgccattctttgtgcattatcttttgtgctcatcagaaactcaactaattcagtagcccgcgaagaagccagaaaagaaacaattacggaagtttccatacatcttagtagcgccgagtttaacaaaagattaaaaaaaatagttaaagataaaataaaagatgccgattttgatatcggagatataatgcaatcaattgaatatttgagcaactcaattgaagatcttcagaagcaaaatcagttattacaagctcaagtcgatatatctaacaaaaaatcaccttcaaataactccgaaaataaaactataagtgatgatgaacttggtaatgatttgatcattagtgaaggaaaataa

SEQ ID NO: 224296 - DNA, 3018 bp, Klebsiella pneumoniae
atgattattagccttgaagagcttggccttgcctaccgaaaagcaaaagtcgatctgtactattcatcccatgtttcgctggaagcaattgcgtcttacgaagagtccctacatacgaatctgacggttctgcaggaaaaaatacaaggtgacgacgaatcatgggtggaagagaatgagttcactggcaactggtttctggccacaaaatctgtagacatgtcttgctgggaacagcagcgagaaccgcaagctaacggtctcatattttcctcacctgctgaaaagtgggcatatgcttgcaacccaatggctgataaaaacgaacaaaaaaaaatcaaagccgagtttcgagtaatggctcaatgcagtctggattttcatgttctctcgactctttggatgttaaaagtcgggcatctttttgatgccaaattatctacctgtgcttacggtaaccgcctgcgccgtactctagatggaaaagacatcaatgcactttcaattggttcttttcaaccttacctcagaccttttcgtgattggcgtgacaatggcattaacgccatgcggagcgcgctaagtgaaagcaaaaaaatcgtggcactcactgctgatgttagttctttctatcacgaactgaatcccgggtttatgcttgatccaaccttcgtcaaagatattttggagttggaactcactgctgaacaaagcaagcttaatcgattattcattaatgcgttaaaagcatgggcaattgagactccgttgaagaaagggttaccagtaggtctccctgcttcagctgttgttgccaacgtagccctgatcgagctggatcgcgttattgagcagcaagtcgcacctatatattacggacggtatgtagatgacatcattctggtcatggaaaatggtgcgaatttccgttccatggcagagctatggcaatggttgttcgcccgttcttccggcaaactggactgggtaaagggcgaggaaaacaaacagatcagttttcaaccaaactacctgcatgacagccagattcgttttgcaaatgcgaagaataaagtgtttatccttgcgggtgactccggaaaaaccttagtggaagctattgctcatcagatttatgaacgagccagcgagtggcgagccatgcctcggttaccgcattcctcgaacaatgttggaactgatttgcttgctgcaactcaaagtaatggcgaagtcgctgacaatttgcgtaaagcagatgcactgactatgcgtagggctggttttgccatcaaactacgcgactttgaagcctatgagcgtgacctgcaaccgggcacatggaaaggccatcgccaggcattttttcgggcatttattgatcatgttgtggtgctgccacaattctttgatttatcagtctacctaccccgagtgatccgactggccacggcctgtgaggactttgtcgaactgcgcaaacttatcttagcgctcgagaatatttgcgatgaagttcgagaaaattgcctccttaccatcaaggcgtgtcctgatgatcacctcccttttgaagcagagattattggcaaatggagggctcagctttttagcagtgtgcttgaagctatcgttgcggcatttcctccgcgtatttccaaggtgggtaagcaaacctggaatgaccatttaaaaaactggcacgcccggtgtgggctagacattcaatattcgggtcgtgatttttcattaaagggctaccaagaacagcaggcgagattattctctttcgacttagcgcacatgccattccgctttattggtctaccaaaagagatgattgctcaacggggcatacccgctccgaaaacagtagcccactgtgcggaagcagcagaattactgcctgatattgtcgttttgggtaatcaggttgtagcaaaatggtgcaaatttaaaatcattccacatggactgctatttgccacccggcctttcagcctgccggaactctttatcctaaacaatgaggcttatacagcttcagctcagcaagaaatgcgagctattattttcgctgttcgcggttttgtactcggtaataaaacaccttgtgtcgataaacaaggcatattgcaaatccctgacggccaatctgctggaaaatatggggttgccatatctagctggaaaacgtccatgtcaagctggactgcggcggtcatgcgttcagccgatccggatgcaaaccgttacgctcgcttatgtcgcttgcttgatggtgtgatagcccaaccacataacagtcgttacttaattctgccggagctctcactccctgcgcactggtttattagaattgcccgtaagttacaaggtcgcgggatttcacttgtcaccggcattgaatatttacatgccagtaaagcaagagtacgcaatcaggtatgggcttccttgtctcatgatggattgggttttccttcactaatgatttaccgtcaggacaaacaacgcccagcactgcatgaagagcaggaattacaacgaatagcagggctagaaatgaaaccagaaaagaaatggacaacgcctcccatcattcaacacggtgattttcgtttttccttgttgatttgtagtgagctgaccaatattagttatcgcgcagcgctgcgtggcaacgttgacgcgctgtttgtgccagaatggaatcaggatactgaaactttcaatgccttggtcgagtctgctgcgctagatatccatgcttacatcatccaatgcaatgaccgccagtatggcgatagccgcatccgaggccctttcaaagatagctggaagcgtgatgtattgcgagtcaaaggtggtattacagattattgtgtaataggcgaaattgacgtacattctttacgacaatttcaaagtagctatcgttctcctggtaaaccctttaagccggttccggatggatttgagatagagcactctcgaaaaatgttgccagaagcataa

SEQ ID NO: 224297 - DNA, 1101 bp, Klebsiella pneumoniae
atgccggttcatcatgctatctggcgggtaggggagaatcctcaaccgctaaccatcagtaaactcgccagcgagcaactgctggagaagatgattttaaacgatcccaccatcctctccgatcaatggatgattatcgggcatcaggaaaatacgctcgataaagggcgtatcgacctactggcgattgcgccggatgcctcgctgatcctgattgagcttaagcgtgaccgtacaccacgtgaagtggttgctcaggcgctggattacgcctcctgggtggatgacttaaccgccgatcgcctgtcgcagatttatgaaaaattctcgggtggcggaaatctgggggaggcatttaagcagcgctttaatactgagctggaagaagagtcgctcaaccagtcgcatcaaatcattatcgtggcggcggagctggacccgtccaccgagcgtatcgtcgattatctgagcaagaacggcatctcgattaacgttctattctttaaagtattccagcttggtgatgaacagttcttaagccgcgcctggcttatcgacccgagcgaaacgcaaactaatgctgcacaggccaccgctacaagtgccaatgtgaaggaaccctggaacggtgagttttacgtctcgtttggcgacccacacagccgcgtctgggaagaggctcgtcgctacggttttatcagtgctggtggcggaagctggtacagccaaacattaaaacagctccagccgggtgaccgggtctgggtgaaaattccggcaacaggttacgtcggcgtagggattgtgcagagcgcggttgagcctgccagcagcttcactatcaacactgacgacggcgaaaagcgggcgatggatgtgcttaagtacagcgatctctatcaccggaacgcagatgaccccgataagtccgagtattttgtccccgtgaaatggctggaaacccgcagtgaacaagaggcggtgaacgaggtcggattcttcggtaatcaaaatacggtctgcaaacctacaactccaaaatggcgacacactattgaaaaacttaaacgatacttcggaaactggaacgctgaattgtaa

SEQ ID NO: 224298 - DNA, 1719 bp, Klebsiella pneumoniae
atgaccgttgagaagctgatcaccgaccatatcgatatctggtcctctgcgctgcaaactcgctccacggccgggcgtggcagtaacggcaaaatcgacctctatggcattaagaaactgcgcgagctgattctggagctggcggtgcgcggcaaactggtgccgcaggacccgaatgatgaaccggcgtctgagttattgaaacgtattgctgtcgagaaagcggagctggtgaagcagggtaaaattaaaaagcagaagccgctgccggagattagtgaggatgagaagccgtatgaattgccggaggggtgggagtgggtaagactgggtaatgttggtgtgtgctcaactggaaaaacaccaagcacatcagtctccagtcattttaacggaaatattccctttgttggtcctgggcaaataactcaatgtggtgagattactcaagcagataaatttctttctgaagatggaatgttgaatagcacagaggctaataatggggatattttcactgtttgcattggtggttctattggcaaatcagcagtagtcagtgagcgagtagcatttaatcaacaaattaactctataaaaccagtgttagtggatagtaaatatatatatttctctatttcaacaacactttttattagttcaatggtcacagcatctacaggttcagcaacgccaataataaatagaagcaaatgggagagcttgttaataccgtgtgcgccagtcgcagaacaacacagtatcgtcgccaaagttaatgaactaatggctctctgtgatcaacttgaacaacaatctttaattagtttggaggcacaccagcaactggttgaaaccctactggcgacgttggtcgatagccaacatgccgaagatcttactgaaaactgggctcgaatcagccagcatttcgacacgctgtttaccaccgaagcgagtatcgacgcgcttaagcaaaccattctacaactggcagtgatgggaaaactggtaccgcaagatcctaacgacgaaccggcttctgaactgcttaaacgtatagagcaggaaaaagcgctactggtgaaagaaggaaaaattaaaaaacaaaaaccattgccgccaattaatgatgaggaaaaaccgtttgagttaccaaaggggtgggagtggtgtcgcttaggacattgtatccatttaatatctgggcagcatctaaaaccaaatgagtacactgaaaatataatcgaaggagcaattccctatattactggtccggctgaattcggtgatttgaatccaacgtattcaaaattcacaatcgaaaaaagagcagtggctgaacctaaagatatccttgttacctgtaagggcgcgggcttagggaagctcaatgttgtcaacgtagagatagccatcagtagacaacttatggctattagaacagttcgcgcaaattgtgactattttaaattattgttatcaagcatgtatgactattttcaagggaaaggtgtaggtatagctatacctggaatttcaagagaagatgttatcgaacccgttatatcattaccaccgttgaatgagcaggagagaatagtgtcaagggttaatgccctatttggtacttgtgatcatctcaaatcccgcctcaaatctgcccagcaaactcagctccacctggcggatgcccttaccgacgcagcattaaactaa

SEQ ID NO: 224299 - DNA, 1473 bp, Klebsiella pneumoniae
atgtcgattagctcagtcattaaatcccttcaggatattatgcgtaaagacgccggtgtggacggcgatgcccagcgtctgggacagctttcatggctgctgtttttaaagatttttgatacccaggaagaagagctggaactggagcaggatgactaccagttcccgatcccacagcgttatttatggcgtagctgggcggcaaacagcgaaggcattaccggtgatgcgttgctggagtttgtgaacgacgacctgttcccgacgctgaaaaacctcaccgcgccgatcgataagaacccgcgtggctttgtggtcaaacaggcgttcagcgatgcctacaactacatgaaaaacggcacgctgctacgccaggtgattaacaaacttaacgaaatcgacttcagcagcagccaggaacgccatctgtttggcgatatctacgagcagatcctgcgcgatctgcaaagtgccggaaatgcgggcgaattctataccccacgtgccgtgacgcgctttatggttaaccgcatcgacccgaagctgggtgagtcgattatggatccggcgtgcggcaccggcggcttcctcgcttgcgccttcgaccatgtgaaagagcattacgttaacaccaccgaagaccataaaacgctgcaaaagcagatctatggtgtagagaaaaagcagcttccgcatctgctgtgcaccaccaatatgctgctgcacggcattgaagtgccggtgcaaatccgtcacgacaacacgctgaacaagccgcttgcttcctgggatgagcaactggacgtgattatcaccaacccaccgtttggcggtaccgaagaagacggcattgagaaaaacttcccggcagagatgcagacccgcgaaaccgctgacttgttcctgcaactgattatcgaagtactggcagacaaaggccgcgcggcggtagtattgccagacggtacgctgtttggtgaaggtgtaaaaaccaaaatcaaaaagctgctcaccgaagagtgcaacctgcacaccattgtgcggttaccgaacggcgtgtttaacccgtacaccggcatcaaaaccaatattctgttcttcaccaaaggtcagccaaccaaagaggtatggttctatgagcacccgtacccagacggcgtaaagaactacagcaaaaccaaaccgatgaaatttgaagagttccaggcggaaatcgactggtggggtaacgaagctgatggttttgccagccgtgaagagaacaatcaggcgtggaaaatcagcatcgacgacatcatcgcccgcaacttcaaccttgatatcaagaatccgtaccagggtgaaaccatcagccacgatccggatgagctgctggcgcagtaccagaaacagcaggcagaaatcagcgagcttcgtaaccagctacgcgatattctcggtgccgcactggcgggtaacaaggaggcgaactga

SEQ ID NO: 224300 - DNA, 2442 bp, Klebsiella pneumoniae
atggctggcgtgaacaaaacgcacctgactgaaacagacatcattactaaattcatccttcctgcggttaaggatgcgggctgggatgtgatgtcgcagattcggcaggaagtgaaacttcgcgatggcaagattgttgtccgtggcaaactggcgtcacgtatcaaagttaagtctgccgatatcgtgctgtaccacaaacctaacttgccattagcagttatcgaagccaaggctaacaagcacgccatcagtaaagggatgcagcagggactggactacgcaagcctgctcgatgttccctttgtatttgcctccaacggtgatggatttatcttccacgataaaaccaatccgcagcagctcgaatccgaaattgccctcagtgacttcccaacacctgaacaactctggcaaaaatactgtgcctggaaagggttcactcaggagcagttacccgttatcagtcaggactattttgacgacggtagcgggaaagctcctcgttactatcagatgcaggcgattaaccgaacggtggatgccgtatcggcaggtaagaaccgtattctgctggtcatggccacgggtacgggcaaaacgtataccgcgttccagataatctggaggctgtggaaagctaaaaacagaaaacgcattctattcttggcggaccgcaacatcctggtggatcaaactaaacgtaacgactttcagccgttcggtaatgcgatgactaaagttaccgggcgcaccatcgatccggcttatgaggtgcatctggcgctgtaccaggccattaccggaccagaagaacaccagaaagcctataaacaggtggcgcctgatttcttcgacctgattgtcattgacgaatgccaccgtggcagcgcttctgaagattcagcctggcgagagattctggagtatttcggcagcgccactcaggtcggtctgacggcaacgccaaaagaaacggaagacgtctccaatatcgattacttcggtgagccggtttacacctattcgctgaaagagggtattgaagacggtttcctcgcaccttacaaagtcgtgcgcgttgatatcgacgttgatgtccagggctggcggcccgtcaaaggtcaactggataaatacggcgaagagattgaggaccgtatttacaacctgaaagattttgatcgcacgctggtgattgatgagcgcaccatgctggtggcacagaccatcaccgattacctgaaacgtaccaacccgatggataaaaccatcgttttctgcaacgacatcgatcacgccgatcgaatgcgccatgcgctggtggtgctcaaccccgagcaggtgttgaagaacgaaaagtacgtgatgaaaatcaccggcgacgatgatatcggcaaggcgcaactggataactttatcaatcctaaaaaagcctacccggttatcgcgacaacgtcagaattgatgaccactggcgttgatgcgcagacctgcaagctggtggtattagatctaaacattcagtcgatgaccaagtttaaacagatcattgggcgcggcacgcgcatcaacgaaaaacacggcaagctgtggttcactattctcgatttcaaaaaagcgaccgagctgtttgccgacccacgctttgatggcctgccagaaaaggtgctggtggtaaaacccggtgatatttctgacaaagattcagacttcaatgaacaactggatgcggaaaataacgctgatggcggtgataatgacgccagtgaagcgcgagaagacgtcgctgactatcaggtcaatcgtgacaagcaagcgggcaacggtgagttccatgacgatgatgaaaacaaagtccgcaaattctatgtgaatggcgtggatgtaaaagtgctggctaagcgcgttcagtattacgattctgatggcaaactggtgactgaatctttccaggattacacccgcaaaacgatgctcaaagatagcgaatacgcctcactggatagcttcgtgcgcaaatggcaggatgcaccacgcaaacaggtgatcatcgaagaactggagcaactggggattctgtgggacgtgctggccgaagaggtgggtaaagatctcgacccgtttgatttgctctgccatgtggtgtacggtcagccgccgttaacccggcaggaacgcgtggccaatgtgcgtaagcgcaattacttcaccaaatacgccgagccagcacagcaggtacttaacacattgttggacaaatatgccgacgaaggcgttcaggaaattgaggatgtgcaggtgctgaaactgaagccgttcgatacgctgggtcgtccaatagaaatcatcaaaacccgctttggcgacaagaaggcgtatgagcaagccgtcaacgaactggagaacgaaatctaccagttaccgccgcgctcagcctga

SEQ ID NO: 224301 - DNA, 1023 bp, Klebsiella pneumoniae
atggctaagagggtgatttttgccgttgctggctcaggtaaaaccacactactgatagacagactcaaggtaaacagtcgtacactaattctgacgcataccatcaataacgagacgcatctgcgatccaagatcataaatttgtttgggtttatgcctgaaggaatccgtgtaatgacttggtttgaatttcttcacggtttctgttttcgcccctttctccaggaacatttggcttctcgtggcctgagtttttcccagccgccacagaggatcccacgcactaaccgactgcattatcaggataatagcggccgcatatatcatcggcggcttgctcaattattaatggctagaggtatgctgccggatatatgcgatcgtcttgaacgatattacgacgaactattagtcgatgaagtgcaggattttgccggaaacgattttaatttcttattggctctttgcgaggcagaaatatcagtcctttttgccggtgatttttatcagcatacctatgatacgagcagggatggcaatgttaactccacgcttcacgacgatattacccgatatgaagcccgcttcactgctgctggattggtggtggatcgtgagacgcttagtagaacgtggcgttgctcaagcacaatatgtgaatttattactgagagactggatatccgcatcgatgcacatgactttcgtgaaacatctattgacatcgtaaccgatactgagcgtgtggccaccttacattcagacgatagcgtcattaagcttttctatagtgagcaccatcgttatggttgttactctctaaattggggagccagtaaaggactggatcactttcaggacatatgcattgtgatgggagctacgcactggcgtcttctaaatagatcgaatctacagatacttccaccttcgtcgcgtaataaactttatgtagcttgctcccgggctcggggaaacatttatttcgtttctgaagcgaatttcaggaattacaaaaaatga

SEQ ID NO: 224302 - DNA, 1563 bp, Klebsiella pneumoniae
atgcctgtaattactcggttgatgctgcaaaattttaaaaagtttccgcgcctggacctgtttttcaatgctgatcgaaacatattcatcggtgataatgaatcgggtaaaagtagcatcttactggctcttgatttggttttgagtgacagtagacatcgtgttgaaactctgggcgttgaatcccttatttcacaatctgcggtggagaattttctggcgggtgaacgtcgggccgatctgctaccagtacttatcgctgacgtctttcttcatcaaggtaacaatcctgatctcaatggccgacagaatctggctggcatagatgccgatggcctcagaatgcgaattgcaccgatgcttgacgaatatggcgaggacattcgacaagttttgcagcaggatccgacaaatttccccttcgaatactacgcggttaaattcacaactttttctggaagccattttgcgagcttcaggcgctacctgcggcatctgcttcttgaaaacgcacgtatcgatagtgatcatgctgcactggactatactcgcacagtttatggtgtgaatgtgtctgtcgcggaacggtaccgccttgaaaacagttatcgtcaacagaaaaacctcttctgtaaccagcaattgtccgctgttaacagcacgttggaagattatcagtttggtatccgttcgggagctaaatcgggactcgaagctaacctggatattactgaaggtgggatctctatccgtaatagaggtaaaggtcggcaatgctttatcaaaacggagtttgccctacgaaggcatcagcaacagggtgagcttcattcattattgcttgaggagccggaaaaccatcttagtcacgtgagtatgaaaaagctggttaatcagcttgccgctgagcaacagaaacaacttttcatcgcaacacatagcagccatatttcatcccgtcttgatctgcgtaaagcaatcctctttggggaatcccgacccgttttattaaatgagctttcagatgaaacggcagctttctttatgaaggcaccagataataatgttcttgaatttgctctggcaagacgagtattactggtagaaggtgatgccgaatatatcctaatcgagtctttttaccgtcagctcttcaatgccgtccctgaagatgatggtgttcatattatcgctattggcggtactagtttccgccgttatcttgaactggcacttttactggggaatcgagtagctgctttacgagacaacgatggcaactaccaacagaattgctccgaacgttatgctgatattatctgcgatcacatcaatgttttcgccgatcacaacgatgagcgatcaacgtttgaaatctgtctgtatcaggacaatatggcgttatgtgagctgctgtttggggaaggccgacgaacattgacagtgcaagactatatgctggccaataaggcagaagctgcatttaagctgttacaacatgatggagaagagctctgcgttcctgactacattcaggaggctctggcatggctaagagggtga

SEQ ID NO: 224303 - DNA, 576 bp, Klebsiella pneumoniae
atgaaaaaacgcaactggacaccggactggtttttgaaatctgtccttgatatgcatattaacgcgatggttaatcgctattcctgtctgagggtaatacggcaggatcttttctatcaaaaaaatacttttaaatatcaccatccggatcatcagcagatggagtctgatgtccggcatctgatggacgaaatgatgagtatgcccgtagtggtgggttatttttgggtaattgaatggaccgaggatcacctgttccatgcgcatgtggctttctggctggatggtaataagactcagaagccctttttctggatggagaaggccggggcatgctggcgtgaaatcacggaaaatgacggctgttactatcgttgtgagcataagccgaactatgaggcggatatcaatataccggtccgttatagcgattcgggaagcatttctaacatgcgcgacgtactggaatatatgaccaagattgaacagaaaaacgcgctactaatgtacggatgcaacgaagtacccgagcgtccattgacaggacgcccccggagtaacagtaccttaatctga

SEQ ID NO: 224304 - DNA, 534 bp, Klebsiella pneumoniae
atgaacaattcgccattactcaaccattaccaggtctggctggatgattttacccgcgtcagtctattacacggttcatgccagcagcacatcacacagtggcacaggctggcgataaccgcctgcccgatgccggagagtagtgaaacagaagtcgtcattccacattgcctgctgccggtcacccgcaccgaccaactagaatcctgttctgccgcccccggtctgacgaaacacaccgattattcccttctgcccggcgtgctgctcagcgaatgttaccggctggggaaaagccgtctggcggaccagttacagatgttattccggctgcatgtacagccaggcatacgccagacgctgacattgctgtgctggtgtgaactggtaacgggcaaggatatgaaggaatggtatgagctgcatctgtcgcttcctgacactctgaagcaatggctggcaataaaacaacggacataccggggccttaaggctctcactgatgattacatccttgtcacccggccagtgtga

SEQ ID NO: 224305 - DNA, 213 bp, Klebsiella pneumoniae
atggccagtaaaccttccctgtctgaagaccagttcgtcgatatgacttttatcacccgcctgctgggtgtcagtgataaatggatttaccaactcatcaaagatggcatatttccaaaacccatcaaactgggacgaagttcccgctggttgcaaagcgaagtcgaagcctggctgcaggcccgtattgatgcatcccgccctcagcgctaa

SEQ ID NO: 224306 - DNA, 1116 bp, Klebsiella pneumoniae
atgaacaaaaaagagtcagatgaaggaagccatgattgggaaaaagcacgtgttgcgaaagagctgattaggcttgaaaagcaggctgcagaaaaacgtgcgcgattaaaaaataagctaaaatggttaggtaaagagcctcgggcatcctttttttatttttttttcctcgctctttatttcgaaaaactaagaggtcagttggtagtaccgaaagctgaacatgatattaaccctctatcagcaaaggctctcggtacagaaaggattaccatgaagatcagtcatccgcgagatgacaggcctgttattgggggtatgacgaccaacaccgatttagattctcttcaaaaatctgaatcaaagaccacgaaagcagatgaaaaaaacagtttgctgctgtcacattccaacaggcgagaatcccctgagatggacttagatgagcttctaagaaaatttgatatttccactgtaaaaaataaacccgccaacggcgttttttttcctggttttatgtctgattttgctggagtggaagatatccttgaatacattacagagacattattaaaccctaatatagatgaccccgttgctttaatgaaaaaaataaataaagcctggtctgctgtctatgctgattttcctgaagcgttctcgtggatggatgttaaaaatgaagagcaatgtatttgggtatggaatacgctgaagagcaaaggagtttcacccccactaaatcctcttaacaattatcaacgatggtattttatctgtgcgacttttgatttatggaatggttggacgaatgaacaacttgaagagcttaaaagcaaacgtaaaaaagtaaatcagcactttctgaagttaatggagtctcctcaatcaccccaaggccataagaaaatattaatgactgagcttgagaaagcctgggcccagcaggttagaaggatgcagccgaaaaaggctattgaccttgcagcattgccagcaaaatcaaagaaaaaactggctaagttatcgggggagtatggtgagtcagaaatggaaatactagtgagacttattgacaatgaatgtgttagaatcgtaaataaagatttaaaataa

SEQ ID NO: 224307 - DNA, 864 bp, Klebsiella pneumoniae
atgaaatattctgaaggcttccagccaatacataactcactttctgagttaccgcactggatatcggatcgtattctgcagcagataaaacagctaacctgctatgaaccggtgatcggcattatgggtaaaaccggggcgggaaagagtagtctgtgcaatgccctgtttgccggagatatatcaccggtcagtgatgtggtcgcctgtacacgcgaccccttgcgatttagcctgcaagtaggcgagcgcgttatgacccttgttgatctaccaggcgtgggggaaagtagcttacgcgatgctgaatacactgcactgtatcacgaacagcttccccaactggacctggtgctgtggttggttaaagccgatgatcgagcgctggcggtggatgaacatttttaccgggaggtgattggtgaggcataccgacataaggtgctgtttgttattagccagtcggacaaggttgaacccaccagaggtggtgaaaagctgtctacagagcagaaacaaaatatcagccgcaaaatctgtctgttgcatgagctgttccaacctgtaaaccctgtctgtgtggtgtcggtacgtttgcagtgggggctgcgggtgatggctgaacggatgattcgttgcctgccgcgtgaggccagtagcccggtagcggtacagcttagtacgccgcttcgtactgatgccgttaataaaaaagcgcgtgatgattttggtgaaacggtcggctcggtactggacacagtaagttccctgcccctgataccggccccggttcggacaattatccaggctgtacgtgacaccgtggtatcggtcgctcgtgctgtctggtgttttttcttctga

SEQ ID NO: 224308 - DNA, 483 bp, Klebsiella pneumoniae
atgatggaacagtcacttatcccactgactccggcactaccactaaccgcacaacgcacggtaaaacgcgctttaacgctgcttgaccgacacctgcgcgaaacaggcgtggcattcacttccactcaggctgcccgtgactggctgaaactgaaaatggcgggactggagcgcgaagagtttatggtgctgtatctgaaccagcagaaccagttgattgcccatgaaaccctgtttgccggttccattagcagcaccgaggtacatccccgtgaggtggtcaaacgcgccctgtttttcaatgcagcagcagtgatactggcgcataaccacccctccggcgacacctcgcccagcaaggcagataagaccatcacgcagcgtctggtgcaggcgcttcagctcgttgatatccgtgtgcctgaccaccttatcgtcggtggtacgcagatattgtcgttcgctgaacacggtctgctttga

SEQ ID NO: 224309 - DNA, 333 bp, Klebsiella pneumoniae
atgaaaactttacctgcaacaactccgcagacggcgaagctatgtctgacgtccgcggatacctggcaaatgttactgacacgtctgctagaacagcattatggcctgacactgaacgacacgccgttcagtgatgaaactgttattaaggaacatattgatgcagggatccctctggccgatgcagttaactttctggtggataagtacgcactggttcgtatcgatcgcagaggattgagttggcaggagcaatcatcctatctccggcttgtcgatactcagcgaaccattaaggttattgagttgtggctatttggtgtaatgatgtag

SEQ ID NO: 224310 - DNA, 1026 bp, Klebsiella pneumoniae
atgcgtaaagcaacgatgcgggatgtgagcgaagcgacgggattttccatgtttaccgtttcgcgcgctctaaacggtggcgatggggtcgctgacgacagccgggagctgattttaaaagtggcgcgagagctcggctacgtacccaaccgcgcggcccaggcgctacgccgttcgagcagagactcggtggcggtgatcaccgcccatgcgtcgaactcttactatctcaacctgatgtccggcattcagcagatgctgcagccttcgcagtggaccgtggtgcttggcgatattgcggtcaacggcatctacgactgcgcacaggaagatcggatgattaaccgcctgatcgagtcacggatggccgggatcatttcgacggtgacgctgcagccggaaagcctgactctgctggcgaaatgggacatcccggtcgtcttcgttgattccccgccctacggcgagcacagctttccctgcgtcacgaccgacaattaccatgccagcctgctggtcggaaaccatctggcgcagcacggctataaaaactggctgctccttatctacccggaccgctggaccacgcgttttgagcgcgagcgcgggatacgcgaggccgctgagcggtgcggcgctacgcttagagttgtcgaaacggaaaacgacgcgcagtcggctgctgacaaactgagccagtacctcgaccgccagaaagcgctgccggatgtccttattgtcggtaacaaccctatcctgttgggttcgctcaaacagctccagcagcgccagatagccattccagaggatatggccctgattgcctacgacgaattcgactgggcgccgctattaaatccgccgctgacggtgctcaatgaaaatagcgaagagattggcagacagtcggctgaaatgcttatccagttaattaacccggaagggaaaggagaaatcaacacccaacgtaaagttcccgccgagctggttattcgccagtcctgcggctgtaaaaaaaacgcataa

SEQ ID NO: 224311 - DNA, 954 bp, Klebsiella pneumoniae
atgaccaaacttcgcaaagcatggctggctgtcgcggttactgcggtaatcaccaccatgacaggatttatccccgccgccagcgccgcgccgcaggagggcaaaaaaatatcccacatcggcttaatggtgcaggacatgtccaaccccttcttctcggcaatggaaaggaacgcaaagcaggccgcggcaaaaatcggcgcaacccttaacgtacaagatgcgcaggtcgatctggcaaatcagaacacgcagattgacgcctttattcagcagaaagtggatctgatcattatttccgccgtcgatgagtccggcatcgaaccggccattcagcgggcaaaagccgccggaattatcgttatcgcggtcgatacgcccgccaggggcgctgacgcggagatcatgaccaatgccatccaggccggcgaaacctcctgcgaatatctgttcagccagatgggcggcaaaggcaaagtgctgctggtggacggcacgccgattcagaccattattgaccgcatcaaaggctgtaaaaacgtcgcgcaaaaatatccggatatcaaaatcgtcgggcagcaggcatcccgcaacgaccgcgcttccagcctgatggtcaccaccgatatgctcaccgccaatccggatgtctccggcattttcggtatgaacgatccttcggcgctcggcgcagtgctggccgttgagcaggccggcaaagccggtgcgattaaagtcaccggcgtagacggcagcccggaagcggttgaagaactcaagcgcagcggctcaccgtttatcggcaccgcaacgcaaaacccgggcgaaatggtgcgccaggccatctcgcttgctcaggatatggttgacggcaagcatattgcgtccccgaccgtattgatccccagcgtgctggtcacgcgcgacaacgtagatagctatccgggctggtaa

SEQ ID NO: 224312 - DNA, 1533 bp, Klebsiella pneumoniae
atggccgacatcacttcaccccccttgctcaggctggaagggatttcaaaacgctacggcgcgaccctcgcgctgaacaacgtacgctttgatttattcgccggagaggtccatgccctgatgggggaaaacggcgcgggtaaatccacgctgatgaagatcctctccggaaacgagcagcgcgatagcggcgcgatctatatcaacgggcaggagattgatattcgcacgccaagagatgcgcgcaaatatggcatcgccatcatccatcaggagctgaatacggttcccgatatgacggtggcggaaaatctgtttctcggccaggaaccgacctctttcgccggtattctcgatcgcaaacggatgctccgggaggcccgggagaagctggaccggattaacgcggacatcgacccgcaggcgccgctcggttcgttgagcatcggacgtcagcaaatggtcgagatcgcccgcgccgtcagtgaaaacgcaaaagtactggtgcttgatgagccgaccgccgccctgtcgcgggcggagaccctccagctttaccgactgatcgagcagatgcatcaggatggggtcgggatggtctacatctcgcaccgcatggaagaggtatggcagctggcaaaccgggtcacggtgttcagggacggcacgtggatcggcacggaaaccctgagcagcgtctcgaccaccgatatcgtacgcatgatggtcggccggcaaatcgtcgatctctatcagcacgaaccgcgtacgcccggcaaagtactgctggaggtcgcggatctggcgggtagcgcaaccggcccggtctcctttgaggtcaaagcgggcgaagtcgtcagcatgtccgggctggttggctctggccgaactgaagtagcccggctgttattcggcgccgaccctcgtacccagggaagcgtgcgtattgacggcaaggtaagccatccgtcagatcccaccgccgccatcgccgacggaatcgggatggtgaccgaggaccgcaaaacccagggactgtttctgggccattcggttgagcacaacattgatatcagctcgctggagaactttgtcgccggcggcgtggttaaacgcaaaaccatccgcgccgccgtccttgagcagatgcgcaggttacggctgcgggaaaatgcggtcgaacttcccgtcagcgccctgtccggcggaaaccagcagaaagcggcgctggcgcgctggctgctgcgcgattcgaggctgctcatcctcgatgaaccgtcccgtggcgtggatattggcgccaaaagggaaatttacgaactgatcgacaaactcgcccgcgccgggaaagccattctggtgatctcctccgatttaccggaggccattggcatcagcgaccgcgtgctggttatgcgcggcggccgaatcgttcaccagttaccctcatattcagcaacggaagaagaagtgatgctgcacgcaacaggaacctttaccagtcaatccggagaatgccatggacaacaataa

SEQ ID NO: 224313 - DNA, 1020 bp, Klebsiella pneumoniae
atggacaacaataaacctgtgacggaactgccggtcaaagcgccgtttgattttgcgaaatggtgggatcgggtggggatcttaatcgttctgctggtgctgctgatcctgatgtcgacctttgcgccaaactttaaccgcgtcgataatctgctgaatatcgcccgctcgatttccgtcaacgctattctggcggcgggcatgaccttcgtcattttaaccagcggaattgatttgtccgtcgggtctattgtcgctgtctccggcgtggtctcggtggttgcggcgatggccgggatccctgcgccgctggcgattctggctggcgtgggcgtgggcgcgctgtgcggcctgctgaacggcgtgctcaccgcctatctcgctcttgcacctttcatcgtcactctcggcacaatgaccttcctgcgcggtatggcctacaccattaccgaagggcaacctattgtatcgagtagcctgagcttccgcgagctggggaatggctatctcgccggcatccctgttccggtcactattatgctggtggtttatctactggcgtggttcattcttgagcgcacgcggttcggtcgtcatatctatgccgtcggcggcaacgcccaggccgcgcgcctggccggcgtcagggtaaaacgcgtactggcggcggtctatatgattgccggcgtctgcgcgggtctggcgggcatcatcttcgccgcccgggtcatttccgcccagcctacggcggggacgggatatgaactggacgccattgcggcggtagtgctgggcggcaccagcctcgccggaggacgcgggcgaattatcggcaccctgattggatcgataattctcggcgtgctcagcaccggcctgattctgctgagcgtgccctttttcacccagctattgattaaaggcatcgtcatcattcttgccgtggcgattgacggactgaagcagcatccggaactgtttaccttctggcggaaaaaagagatcgcccgtacccgctag

SEQ ID NO: 224314 - DNA, 1371 bp, Klebsiella pneumoniae
atgacatatcacattacgctgacggacccgatgaacggtacccgggatcgcgaaccgattacgtttactctcccggagaaactgcaggagcccctgtggtgggctatcaccagcgaggaccagcggatcctttgccagcgcctcactaatgagtcgacgcaaaacagtaccgcctttatcgctacggtaagcttcagcggcacgctccggatgcggcttgaccggccgctaacggcggctgaagtcggtgaagtcgccggtatccaccgcctgcctagccgggagaaagactgttttgtccgcctcaataccggctgcttcgatctggaaatgtgtcggggaaccgcccagggcgtgggttcatccaagtgggggctgcgccattttcgctgtctgcaggacaacgtcgagctgcttccttccgggaataacgccatcggcggtttttacggcccgttctttaccccggaaaatgggctgattaacccgccggaacataccctcgttgatattgaaattcttgaggaaggcccggtctatcatcactatcgcatgcacggcacgatccccgatgggttattagcggagctgcgcggtaagcacttcaccatcgactggaagttcagctggaataccccgtggtttcagcggcgctactgggtggatgacttttcgacggtcatcaacgggcgttcggtgaccaacaagatcaccgtcggcgacgagtttgaaagcggtccgggaaaactgctgtttgaccgcttcgcggcctacggcggtacccgctatcgcgcaggcgacccctacgccgaagagctggtcgccatggtggctcataccgttaccacctctgaaaaccagagcccgaaatttgccgaattccgcgaacagctcgccgatatggcctccgctcattgggatctttactggcgaatgttctgccgctgggaaaaagtgctggatgaagctgaaatccgcgaaaggcttggcgttgtgtgcgcccgggcgcacgttcgcgccgacctgaatgaacgggaatggcgcctgactgattctcccgtcaacgtttccgccgtgccggatgaaaccgtgttcccgggaccagccagtaaaaccgtcgagtacgattcagcgagcggccgggcgatgatctggtggacctcccgcccctccggcgcgtttcagatagtccagcgccgtcagtccggttgggtgaactggggcagcaacggggaaaacgagtgtccggagctcccagtcggggtcgatatcaaaaccgcctgcggcatattcgctgacaactggatgcaggtagccgacaacctggaaacgccgccgcaggtcgcggtgagtcaggaggaaaagccatga

SEQ ID NO: 224315 - DNA, 921 bp, Klebsiella pneumoniae
atgatcctttgctgcggagaagccctgatcgatatgctgccctgccggagccgtgaaaatgctcccgcctttacgccctgcgtcggcggcgcggcgttcaataccgccatcgccctggggcgccaggggatggcggtcgcgctgttttccggtttatcggacgattttatgggtgacatgctgcgccacacgcttgacgcctccggcgtggattattcgccctcaacccgcacgccgctaccgaccacgctggcctttgtcaggctggaaggcggacaggcgcgctataccttttacgatgagaatagcgccggcagaatgctgactgaaagcgacctgccgacgctcggtgatgacgtatctgccgtcctgttcggatgcatcagcctgatagccgaaccgtgcggcagcgtttatgaagcgctgatggtaagagaggcgccgcgccgggtgatgttcctcgaccccaatattcgtgaaatcttcatccaggaccggcagaaacacctggcgcgcatgatgcggatgattgctctggcggatatcgtcaagctttccgatgaggacctcgcgtggtttgccgaacccggcgaagaacacgaggtaatacgccgttggcttgctctgggaccaaagcttatcgtggtcacccgcggggctgacggcgccgatgcctggaccgctaatttccatcttcatgttccagggattcgcgtaacggttgccgataccgtcggcgccggggatacggtcaatgccggtattctcgccagcctttcgcaggccggactccttgagaagcctaaattagtgacactgtcacgagaacaggtgcgccgcgcggtcgatctcggtatgcgcgccgccgcggtgacggtctccaggccgggggctaacccgccgtgggaccatgaactctga

SEQ ID NO: 224316 - DNA, 141 bp, Klebsiella pneumoniae
atgaaaaataatccatggctcgtgcgcttacgtaatacctctattccggagcataagcttcgtcccgcgaaatggctggcgctgattgccctgctgctgctggcgcagctgatggtcgaatccctgttgctcaatgaatag

SEQ ID NO: 224317 - DNA, 297 bp, Klebsiella pneumoniae
atggatgtactgccggtggtggcgatgagcactattctggtcgtcaggccgcgtcagcagcgcctggagtggcagatagatgaacgtcagggggagatctacaatagcggaaatacgtttttccgggtgattgttcaccagggttgcgcggggagtgatgaacgcgcccggcagctgtatctgctgccgggcgaacgctatcgcgacgcggctctggcagggaaaaacagaaaattcgtggtagccaatcagcgctactttccgttggggaaggcatgccctgattctattcattga

SEQ ID NO: 224318 - DNA, 429 bp, Klebsiella pneumoniae; identical to SEQ ID NO: 180190

SEQ ID NO: 224319 - DNA, 1227 bp, Klebsiella pneumoniae
atgaagggaatgcagaagattaaaagaggaaaatgtttctcaggaattattcactatgctttgaaatcagtatctcatcataaaactgtaccaagaataatcggtggaaacatgcttggaaactctactactgagttaatcgatgaatttaatacagccaaaaagcttcgtggagatatagtaaagccggtgtggcacaattcacttcgattaccaaaagatgatacgcttacagattatcagtggtctaatatcgctgatgattacatggcacgtatgggtttctcggaaacacatctaaaatgctatgttctacatgatgatattaacggtcaacatatccacattatcgcctgtcgtattgatctcattgatggcagactctacttaggtaaaaatgaaaatctcatcagtacgcgtattatccaagaactggaagaagattataagttaactcgtactaaagggtcatcagctactggagcgccatcatctaagtcgaaaaatagaaaaagtcgtggagaggatatgttggaaaaaagaactggtaagtcatgttctaaagtcataatccaggaaactattgaaaccttgcttgtcaaaaatctttcgactatagaatttgtacatcaactcaaagaaagaaacattgtagctgttccaaacatctcatctactggtcgtatgaatggcttctcgtttaaatatggaaatatggctttcaaagcatcgcaattaggaaaaatctattcatggtctgctttacagaacaggatcaattatattccagatcgcgacaacgcttttcttatcaatttaaaagcatcttgcagggaaacacttaatatgataaccccttctgggattgtaatagaagaggttaatcccacgatagatatgcttgtactttgtaaaacttctgataacgatagatacgataccgattacaccaaagaatgtatctcgacaattccgagtaatagcgaagagatgttaactgatgctcccaaattaagcttagaaataccaaagtttagatggctagaaacaattccctatattgatgcagttattagtctactaaaaaacatcaaaatactaacactcaaacgaccaaaaaaccttggtattatcaaaaatataagagttgcgaagatagcccctttatgcctcgccacaacagctgagcctgtctcggtacaccgcaaacgatcaccatcattgtag

SEQ ID NO: 224320 - DNA, 645 bp, Klebsiella pneumoniae
atgagcatttactctatgaagagcaacagtaaacaagcagaaactgttgctcctaaattcgttttcttaggggaaacctacgagtttgttgaaactttttcaggcgaagtcatcgaatcatttaatgaacagatcttagtaaggaatgattcaggtgaagaaacaaaaatttctgactacggtattacattcaggaattcacaccgcattcataaatatgagttgcgccaatatagtcgatatgagcggtgtagtgtaaattacgatgctctgatcgtaaatgagaatacaggtgagtataaagtaaatttaagcagaaaactcattgtcatacctgcattcatgacaatgttattaaataatgtatcaatggcatcacactacaaagtgatgcctgttcccaaacttttttatctccttttcactttgctttgcttagcttctttcattgccttctgtattttacttgcaggatataaagacgggtatgttttcaatgaacacaaatatgagtggttaacatatctcctatctcgctcagcaacttttatctgcatccaatggatgaaaagaaaaagttcaaggtttgataacgaaatcagaagcattatttataagttagttaaaaataaaacatcatcataa

SEQ ID NO: 224321 - DNA, 414 bp, Klebsiella pneumoniae
atgaaaaatacaaagcttgatcttatggagagatatttaattattctcgataagtttgtgagtaaaatatcagaatctggagtgccgcaacaaaaagtcatcgaacaatcatatctattttgttctggattttatattaaatataagcaagaaattgaaaagataaaattctctaatagtgatgttgttttgacgtttctactctattcatactataaatttattaataagttagatgatgatttaattgataagagacgtataagaaaaatatgctctttgcttattaattttattgtcgataatggtagtcaatcagagaaggtctatgttcaggaaaaaaagaagtatgatgctttccagttacaaagagatttatcaatgaaaaataagagaaaaaaatatgggttgtaa

SEQ ID NO: 224322 - DNA, 861 bp, Klebsiella pneumoniae
ttgtttgatgaggtagacaaattcgcatcgatgtattttgatagtgaagaaaacaaggaaacggttaataccattctatggcaaatgcgcgagatgatttctaatcgtagaaatgtgggcgttgtttttgctggttcaacagcagcaaaagaaattttcataactaatccagcatcacctttctataacagcattgagcatatagagttgactccattctcctgtaaaacaaaagaagcagaaaatgctgcccgcaaaattgttgagcctcttaaaattcgaggtaagtatgaattaagcaaacaaagcttagagcatctattatgggtgtgtgccggtataccttattatatgaaactactggctggcgcaacgtactcagtcattcggcagagcaaggttattgagtctgatataaatgatggactatatgccctcttaaataaaaataccggcattacaaaacttgacagtataggtggggcatctgggaccgatgatttgcgtacaacattaactctaaaaacaagtgatgaaggtatcatagcaagagctgttttatttaccctcgcagaattatatagtcctgtaagtggccattccgttttgagaggtaaacttacctcaagtgattgcaaacttacttatgagtacaaactgacaaaaaaacaaataaatgatggaattgactcatgcataaaattgggactaattaaatacagtcaaggttcgtcaagtaataatttattcattgcgattccaattttaggtgagtcaattagatttaactcacatagattttgggcagagattgatacagagctgaaagaattaaataatcatttgggggaagagaaatga

SEQ ID NO: 224323 - DNA, 1347 bp, Klebsiella pneumoniae
ttgagtcataaagcttatctctgccatttactgaatgttgaaaaggaaatattaaatgtcgcaaaaataaaatcaatcgcattcgacaacttacttaatttctttaagtcagcctgttctcaaattgaacatgactcaatattaccaaaagctaaaattgttagtttaggtgattcatttttgtttgctcataataacatcaatgaattcaataaatatgaagaagaattcaatattgtttttatgggtttaggtaattcaacaccatatacattaaaagtactttgggaatctttttcaggagaccctaaacaagcagagttgcgtgcatatttcatgtatatatgctggagcttacatgcaaagaatgtcttggcaaaatgccttacattttctcctattgagttagactctcgtaaagcaacagcattagccgatatttcagaaaaggcgttgattgacaagaataatgaccttctacaaccgttgtatgatttaaaaaattcactatcatcaaaaccatatgctttatttgtggatctacttagaaaagttgctcctgtgtatatggaagatgcagcatcattacaattagttggtcctctggaaattttgacgccgaaattagcaaaaggtcgtctctgcattaccccacgaaaaaatgatgcccctgatactctcatcattacattaccccccaaaggtcctttgagatttgacggtggaaaattgaaaaatgaattactcggaccatttttagaggaaagtataattccaattgattttgaactcctcatcaaggatctggaagactttaacattgaaattgatatcgactccatttcaatcactggcattaagaataaatatagttcaaagctaaatattaaattagttaacacaattagttttaataaactaacaccagatgaaatagaagatgctttcgataatttccctgaacaacaaatgcgaggtgatgaatatgtacctcgtattgaggatgagcgtaagattgaaaaagcattaatcaccagcaagactcttcgaagtatttggattaccagcccgagacgctcaggtaaaaccacaatgctttatagaatcttggattcttattcacataaagttggtagggatatcatagtaatttactttaccttagatgagaaaattaaaagcactactgattttaataaatggctatggaaaagattgagaactatctttgctaataaagaattaagaagcctatataataatttcaatgatattgggaaagatttggattatgaaactgacgttggaacattcatgtcttcaatgtcggtattgttaatcgagtaa

SEQ ID NO: 224324 - DNA, 861 bp, Klebsiella pneumoniae
atgagaaaagaaatatataatgaggataaatacaagagccaaatacaaaaatatgctctatgctgtgatgattttaatgatggtgtatacaggaaaccgagagaaaaagctaccttaaagaaatatataggatataataataaatattttataaatggttttgtttttgatgtggatcatgaatatggggcaattgcgtgggatatggctggactgcctaaaccaaatgcgatcatacaaaatacaataaatggtcatgctcatttactttatgctctaaaaataccagtattaaaaacaaactcttcaaaaataaaaccactaagattagcttctgttgtgcagtgtggatttacagaaagattaaaagcagataaatcttacgctgatattctaatgaagaaccctcttaacatctttgaatggagaaccacgtggacagatattaacgcgtatgatctatactatttagctgattttgttcctgatgtaattagaaagaatgatagcaaaaaaagaaatatatatggattagggcgcaatgttaatttattcgaagatctaagagtaattgcatataaaaatatactaaaatatcaagagagtaaaaatgagcatgaattttataattatttgtatttaacggctgatataattaacaaacagagcaactctaacaacccattatcacataatgagattaggcaaatttgccaaagcgtttgtaagtggacgtggaaaaatttctcaaaaaaacagttttcaattattcaatctaaacgagggatgaataatgttggaaaaataaaaaatactgataccaaagaaaaattagaaaaagcattgaggatattattatga

SEQ ID NO: 224325 - DNA, 255 bp, Klebsiella pneumoniae; identical to SEQ ID NO: 83001

SEQ ID NO: 224326 - DNA, 510 bp, Klebsiella pneumoniae
atggaagatgatgctgaaattcatgagaatcttgatgaaaaagcagaaaccttattacaattacatgatttttttgatgtgattattttaggttactcaaaagtaatttttaacaaacgtaggcaaatgcagttcattcgtcccgtattaaaactaaaagttaatgattgtgcaattgcatttccctataaacagtggaaatgtggaacagtatgctattccatatcacataaaggcgcacaaaagcttaaaaaaatcaatgagatggcagcaaaaacagcagatgattgggagttttttgaaaaatctgggctcataataggacatgctctccctatattggtaaccgaaaactttaatagctttggaagcgcccttgaagaggatagaaatacctataaaaacaggagttattttttaagatatattgcaggtatagtaaggcacgcttttttaccgatgcgatatatacagtttttgaagattaaacgtgcacatagaacctattaa

SEQ ID NO: 224327 - DNA, 204 bp, Klebsiella pneumoniae
atgcgcgtcttgaacaagaagcagccactgaagccgctcgccataaatcaattcaaaaagaacttgagtggatccgccaaaatcctaaaggtcgtcaggctaaaggtaaagctcgtcttgctcgctttgaagaactcaatagcgttgattaccaaaaacgtaatgaaaccagtgagctatttattccacctggacctcgtttag

SEQ ID NO: 224328 - DNA, 276 bp, Klebsiella pneumoniae; identical to SEQ ID NO: 5786

SEQ ID NO: 224329 - DNA, 903 bp, Klebsiella pneumoniae; identical to SEQ ID NO: 214162

SEQ ID NO: 224330 - DNA, 2073 bp, Klebsiella pneumoniae
atggccgccgacaatcgcgcggcgaaaagtactaacgacgcggaagagaccatcaccgtagtggccgacggcgcgcagcagagcgccaccagcggctatcagccgctcagctccgccaccgcgacgctaacctcgatgccgctgctggatattccccaggtggtcaataccgtcagcgatcgggttctcgaagatcagcacgccacctcactcgatgaggcgctgtataacgtcgctaacgtggtgcagaccaacaccctcggcggtacccaggacgcctttacccgccgcggctttggcgccaaccgcgacggctcgatcatgaccaacggcctgcgcaccgtgctgccgcgcagctttaacgccgccaccgaacgggtggaagtcctgaaggggcccgcctcgacgctgtacggtatcctcgaccccggcgggctgatcaacgtcatcactaaacggccggagcggcagttctccggttcggtttccgggacctccaccagctttggcggcggcaccggcagcgtcgacgtcaccggccccatcgaaggcacaaatctggcgtaccgactgattggggaatatcagaatgaggattactggcgcaatttcggtaaaaacaaaagcagctttatcgccccttccctgacctggtttggcgagcgggcaacggtgaccgcgtcctattcgcaccgcgactacagcgccccctttgatcgcggcactatcttcgatctgaataccggccatgcggttaacgtcgatcgcaaaacccgcttcgatgaagcgtttaatattaccgatggctattccgatctcgctcagctcaacgccgagtatcgccttaacgacgcctggaccgcgcgcttcgattacagctacagccaggatcactataacgataaccaggcgcgggtgatggcctatgattcggcgaccggcaacctcacccgccgggtcgatggtacccacggttcaacgcagaagatgcactccacccgcgccgacctgcagggcaacgtggtagtgggcggcttttataacgagctgctgaccggcgtcgcctatgagaattacgatctgctgcgcaccgatatgctgcgctgtaagaacgtcaaaggctttaacatctatcatccggtctacggcactctcgacacctgtaataccgtctccgcctccgacagcgaccagcggatccagcaggagagctatgccgcatacgtgcaggacgcgctgtacctgaccgacaactggatcgccgtcgccggcgtgcgctaccagtactacacccagtacgccggtaaaggccgaccgtttaatgtcaataccgacagccgcgatgagaaatggacgccgaaagccggcctggtctacaagatcacgccgaacgtctccctgttcgccaacgtcgcccagtcgtttatgccgcagtcgtcgatcgccagctatatcggcgagctgccgccggaagagtccacctcttacgaagtgggcgccaaattcgacctgttaaacggcattaccgccaatatcgcgctgtttgatattcacaagcgtaacgtgctgtacaccgagagcattggcgatgagacggtggccaaaacggcgggcaaagtgcgttcccagggcgtggaagtggatctggcggggtccatcaccgataacctcagcgtgatcgccagctacggctacaccgacgccaaagtgctggaagatccggattacgccggtaaaccgctgccaaatgtaccgaaacataccggttcgctgttcctgacctatgacattcataacgtctataacagcaataccctgaccgtcggcggcggcggccatgcggtcagcaagcgttccggcaccaacggcgcggattattatctgcagggctatgcggtggcggatgtgtttgccgcctataagatgaagctgcagtatccggtgacgctgcaggtgaatgtgaagaacctgtttgataagacctactacacttcctcgatcggcaccaataacctcggcaaccagattggcgacccgcgcgaagtgcagttcacggtgaagatggatttttaa

SEQ ID NO: 224331 - DNA, 615 bp, Klebsiella pneumoniae
atgaaaaagttttgctatgtgccaattctcgccgtattactctcaggatgcgttgataacatcccgagtaaatatgatcattctaccgtgaatggtatcaatatgacaaaggctgagttgataactaagcttggtattccaagtagaacaatgaaagttgatagtaatacaatgacttatcaatgggatagtgatcagggtgaatcctctgaagggaattcgcagagcagttcatttgggagtgcttatggaaagtctcagaggtatttgggtggtgagactgacgcaggttctatagggagtggttttactgtaggaaatactcgtgggaatataacaacccatgtatgtgcctattccgctgcaattgataacaccagcaataaagttgtatcagcagacttagtcggtacagtggataataaatgtctttcacattttgagaagatgcttacattggatgaaatggccgtcagtaaacacaatgaagtacaaactcatgatgagaatgttcatgactatgccgcatggtggttactaatgcctatcagtggtccgtttattgctcttcacaatcgtcatgcggtggcagtcgaactcgacccagtgcgttaa

SEQ ID NO: 224332 - DNA, 1416 bp, Klebsiella pneumoniae
atgacacattacataagaaatgttggatgtagcttttttttggcaatagccgactttattagttttgtactgtcattatatatatctttgcaattgttatctttcagttatctttatgtcccaactgaacaaattgaaggctggataagtctgcactgggtgcttggtgttctctgtgtagggtggtatggaattaggttaaggcattatttttatcggaaaacattttggtttgagttgaaagaaataattcgtactttattaatatttgctgttatcgaaatggcaataatggcatttgcaaaatgggacttctatcgatacgcattctttttaacttggttaattgctattctacttgtacctatatttaggatcgttacaaaatggttcttgaataaaattggtttgtgggctcgcaatgcttggatcattggtagtgggaaaaatgcaattgatgcattcaaagccatacagagtgagcataatttaggcttaaatataataggatatgttgatgagtgcgatattgaaaatgattattttaaaagtttacatctcaagcattataaattcgattctttcccaattgattctattccaaaaacaactcaatttattgttgctgtagaatcagaacaaagcgaaataagaaattcatggctcagaacattcatgatgaagggatttaggtatgtttcaatcatacccacattgcgtggggtgccgctggatagtacagatatgtcatttatatttagccatgacgtcatgatctttcgtgtacataataatttagcgaaaatttcttctcgaatcttgaaacgaatttttgatattgtgggtgcatctataattataataattttatcgccattattgatatatattagtttaaaggttaaaaaagatggaggaccagcgatatatggccataaaagagtcggtaaaagaggagtccctttcaattgtttgaagtttaggtccatggtaacaaattcgaaagaagtgttagaaaatttgctattaaatgatcctgcatcaaaaatggaatgggacgccacgtttaaattgaaaaatgatccaagggttactaaaatcggagcttttttaaggagaactagcttagatgaattacctcagctttttaacgttttgaaaggtgaaatgagccttgttggcccacggcctataatagatgaagaactggaacgctataatgatgaagttgagtattatctgctgagcaaacctggaatgacaggattatggcaagtaagtgggcgaagtgatgtagactacgaaacacgagtatatttagatacatggtatgtcaaaaattggtccatgtggaatgatttagtaatcctctttaaaactgttaacgttgtattaagaagagatggtgcgtattaa

SEQ ID NO: 224333 - DNA, 1239 bp, Klebsiella pneumoniae
atgaaaggcagtaacatacgtcgttggggcgccgcgctggcggtagtgattatcgccggggccgcctactggttctggcacgatagcgggacgagcggcagcggggctcccgccgccgggcagggcccgcaggggccgggcggcgcacgccatggccgctttggcgccgcgctggcgccggtgcaggcggccaccgccaccgaagaagcggtcccgcgctatctcaccgggctgggtacggtgacggcggccaataccgtcaccgtccgcagccgggtcgacggccaactgctgagccttcacttccaggagggtcagcaggtcaaagccggcgacctgctggcgcagatcgaccccagccagtttaaagtcgctctcgcccaggcgcagggtcagctggcgaaagatcaggccaccctcgccaacgcccgccgcgatctcgctcgttaccagcagctggtgaagaccaacctcgtctcccgccaggagctcgacactcagcagtcgctggtggtggaatccgccggcacggtgaaagctgatgaagcggccgtcgccagcgcccagctgcagctcgactggacccgcattaccgcgccaattgacggccgcgtcggcttaaagcaggtcgatatcggcaaccagatctccagcggggataccaccgggatcgtggtccttacccagacgcacccgatcgacgtggtctttaccctgccggaaaacagcatcgccacggtggtgcaggcgcagaaagcgggcaaagcgcttagcgtcgaagcctgggatcgcaccaataagcagaaaatcagcgtcggcgagctgctgagcctcgacaaccagatcgatgcgaccaccgggaccatcaagctgaaggcgcgctttagcaatctggacgacgcgctgttccccaatcagttcgttaacgcccgcctgctggtggacacccagcagaacgcggtggtgatccctgccgccgcgctgcagatgggcaacgaagggcatttcgtatgggtgctgaacgatgagaataaggtcagcaaacacagcgtgacgcccggcatccaggacagccagaaagtagtcatcagcgccgggctttccgccggagatcgcgtggtcaccgacgggattgaccgcctgaccgagggggcgaaggtagaagttgtcaccgccagcagcggcgagcaggcgcagcccgccccgcgccagagcggtaaacacggagcgcgttcctga

SEQ ID NO: 224334 - DNA, 1479 bp, Klebsiella pneumoniae
gtgaaattttggcgcccgggtattaccggcaagctgttcctcgctatattcgccacctgcatcgtgctgctgatcagcatgcactgggcggtgcgtatcagttttgaacgcgggtttatcgactatatcaagcgcggcaatgagcaacgcttaaccatgctcagcgacgcgctgagcgagcagtatgcccagcatggcagctgggcgtttctgcgcaataatgaccgctttatcttccagctgctgcgcaccttcgaacgggataacgacgaccgctcgccgccggggcacgccatgaagccggacgccgccccggacgggccgccgccggatggcccccctgacggcccgcgcccgaggccggaaatgccgccccacggctggcgcaccatgttctgggtggtggatcagtcggggcgcgtgctggtggggccgcgtgagcgcgtcccggaggacggcacccagcgcagcattgtggtcaacggcgcggaggtgggcaaagtgatcgcctcgccggtagagcggctgacgcgcaataccgacattaacttcgaccggcagcaaaagcgcaccagctggctgatcgtcgcccttgccaccctgcttgccgcgctggccactttcccgctggcccgcggtctgctggcgccggtgaagcggctggtggaaggcacccataagctggcggcaggcgacttttccacccgcgtgacggtgaccggcggcgatgagctcggccgcctggcgcaggattttaaccagctcgccagcaccctggagcggaaccagcagatgcgtcgcgatctgatggccgatatctcccatgagctgcgcaccccgctggcggtgctgcgcggcgagctggaggcgattcaggacggggtccggcgctttacccccgagtcgattccttctctgcaggccgaggtggctaccctcaccaagctggtggacgacctccatcagctgtcgatgtccgacgagggggcgctggcctaccagaaaacctcactggatatcatcaccctgctggaagtggcggcgggcgcttttcgcgagcgcttcgccagccggcagctaagcattcaggtgtcgctcccggagcaggcgatgatcttcggcgaccgcgaccgcctgatgcagctcttcaacaatctgctggagaacagcctgcgctataccgacagcggcggcagcctgcacatcaccgcccgccgcagcggccgcatgctggtgattgacttcgccgacagcgtccccggcgtcagcgatgagcagctggcccgcctgtgcgaacgcttttaccgggcggaaggatcgcgcaaccgcgccagcggcggctccggcctcgggctggcgatttgcctcaatatcgtagcggcccacggcggcaccctgcgtgccgaccattcgccttttggcggggttagcattaaagttgagttacctctggaacatgatttaccgagagacgtatga

SEQ ID NO: 224335 - DNA, 723 bp, Klebsiella pneumoniae
atgactgaattgcctgtagatgaaaacaccccacgcatccttatcgtggaagatgaaccgaagctcggccagctgctgattgattatctgcaggccgccggctatgcgcctgcgttgattaaccacggcgacaaggtcctgccctacgtccgccagacgccgccgcatctgatcctgctggatctgatgctgcccggtaccgacggtctgacgctgtgccgggaaattcgccgcttctccgatgttccggtggtgatggtgacggcgaaaatcgaagagatcgaccgtttgctggggctggaaataggcgccgacgactatatctgcaagccctacagcccgcgggaagtggtcgcccgggtaaaaaccatcctccgccgctgcaagccgcagcgcgatctgcaggcgctggacgcccagagcccgctgattgtcgacgaaggtcgttttcaggcctcctggcgcgacaagctgctggacctcactcccgccgagttccggctgctgaaaaccctctcccaggagccgggcaaagtgttctcccgcgaacagctactcaaccatctgtatgacgattatcgggtagtcaccgatcgcaccatcgacagccacatcaagaacctgcggcgcaagctggaggcgctggacgccgagcagtcgtttatccgcgcggtgtatggcgttggctaccgctgggaagcggacgcctgccggctggcgtag

SEQ ID NO: 224336 - DNA, 1362 bp, Klebsiella pneumoniae
atgtttaaaccagaactcctctccccggcgggaacgctgaagaatatgcgttacgctttcgcctatggcgccgatgccgtttatgccggtcagccgcgctactcgctgcgcgtgcgtaacaacgaattcaatcacgaaaatctgcagctcggcatcaatgaagcccacgcgctgggtaaaaaattctatgtggtggtcaacatcgccccgcataacgccaagctgaaaacgtttattcgcgatctgaagccggtggtggagatgggtccggacgcgctgatcatgtccgatccgggtttaatcatgctggtgcgggaacacttcccggagatgccgatccatctttcagtgcaggccaacgccgtcaactgggcgacggttaaattctggcagcagatggggctcacccgcgtgatcctgtcgcgtgaactgtcgctggatgaaatcgaagagattcgccgccaggtgccggagatggagatcgagattttcgtccacggcgcgctgtgcatggcctactccggccgctgcctgctctccgggtatatcaacaagcgcgacccgaaccaggggacctgcaccaacgcctgccgctgggaatacaacgtggcggaaggcaaagaggacgacgtcggcaacatcgtccacaaatatgagccgatcccggtgcagaccgtggagccaaccctcggcatcggcgcgccgaccgataaagtctttatgattgaggaagccaaacgtccgggcgagtacatgaccgcctttgaggacgagcacggcacctacatcatgaactcgaaagatctgcgggctatcgcccacgttgagcgtctgacccagatgggcgttcactcgctgaagatcgaaggccgcaccaaatccttctactactgcgcgcgcaccgctcaggtttaccgcaaggcgatcgacgatgccgccgccggcaaaccgttcgataccagcctgctggagaccctggaggggctggcccaccgcgggtacaccgaaggcttcctgcaccgccatacccatgacgattatcagaactacgagtacggctactccgtctccgagcgccagcagtttgtcggcgaattcaccggagagcgtaacggcccgctggcggccgtggcggtcaaaaataagttcagcgtcggcgacagccttgagctgatgaccccgcagggtaacgtcaacttcacccttgagcatatggagaatggcaaaggcgaaaccatgccggtggccccgggcgatggctataccgtctggttacctgtgccggacgacctgcccctgcagtatgccctgctgatgcgcaactttactggtcaaacaaccagaaatccgcacggtaactag

SEQ ID NO: 224337 - DNA, 1344 bp, Klebsiella pneumoniae
atggccgataacacacttcactcttccgcccgcgctaactggctggagcgccgctttgcgctgcgctcgcgcggcggcacgctacgcaccgaatgcctggccgggatcaccggctttctcgccgccgcctatttactggtggttatcccggggctgctggggattggcgggatggataaaggcgccgccaccaccggcaccattctggtcttcgtcgtcggctcgctgctgatggcgttttatgccaacctgccgtttatcgtcggcccgggcattggcggctcggtgctggtgggggtgacgctggccggtagcgaagggattggctggcagactggcctcggaattgcctgctggtcggggatcctcttcttcctgctgacccgctttggcctgcgcgaagtggtcacccgctcggtgccgcagtcgatcaagctgggattgacggcctccatcggcctgtttgtcgccgtgctcggttttcgcaatgccgggctggtgctggccaatgcgaaaaccaacgcgctgatgctcggcgactttctcgcccccggcgcgctggtggcgctgtgcggcctgttcctggcgatagccctgcaggcgcgtaaggttccgggcgccattttgtgggccattctgtgcgctaccctagtgggtatcccgttcggcgtgactaaactgccgacgcattttatcgatgccccccactcgctggcgccggtgctgggacaggttgacctgctgggggcgttaaacatcgccttcctgccgttcctgttcgtctttttcgcatctgagtttttctccaccatggggacaacgctggcggtgggcggcgaggcgggtctgctggatgaagaaggcaacatgccgcagattaatcgcccgttcatggtcgattcgattgccgccgcgctcggcccgtgggtgggcattccggcggcgacggcgctgattgaatcttcggcggcagcggaagcgggcggcaaaaccggcctcaccgccctgtcggcggcggtaatgttcctgctgatgctgctgttcacgccggtggcgttaatgatcccgaaagaagccaccgccccggcgctgatcctgattggcctcaacatgttcagcggcctgcgcaaagtggatcttgccaacttcaccgacgggctgccggtgctgatgatggtgatgatcacccttatcgccaacagctttggcaccgggattgccggcgggctgctgttttacattgtgatcaaggctatcgccggtaagtggcgggagatcccgattggcctgtgggtattggccgtcccgctggtgtattacttcgcgaccttagtcaggcattaa

SEQ ID NO: 224338 - DNA, 2082 bp, Klebsiella pneumoniae
atgctcactatgactcaagtcgcgaagaaaattctggtaacgtgcgccctgccgtacgccaacggctccatccacctcggccacatgctggagcacatccaggctgatgtctgggtccgttaccagcgaatgcgcggccacgaggtcaacttcatctgcgccgacgacgcccacggcacgccgatcatgctcaaagcgcagcagctcggtatcacaccggagcagatgattggcgaaatgagtcaggagcatcagaccgatttcgccggcttcgacatcagctatgataactatcactcgacgcacagcgacgagaaccgcgagctgtcggagcttatctacacccgcctgaaagagaacggttttattaaaaaccgcaccatctctcagctctacgatccggaaaaaggcatgttcctgccggaccgttttgtgaaaggcacctgtccgaagtgcaaatctccggaccagtatggcgataactgcgaagtgtgcggcgcgacctacagccctaccgagcttatcgacccgaaatcggtggtctccggcgccacgccggtgatgcgtgactccgagcacttcttcttcgacctgccgtcgttcagcgaaatgctgcaggcgtggacccgcagcggcgcgctgcaggagcaggtcgcgaacaagatgcaggagtggttcgaatccggcctgcagcagtgggacatctcccgcgatgcgccgtacttcggcttcgaaattcccaacgcgccgggcaaatatttctacgtctggctggacgcgccgatcggctacatgggctccttcaagaacctgtgcgacaagcgcggcgacaccaccagcttcgacgaatactggaagaaagattccacggccgagctgtatcactttatcggcaaagacattgtctacttccacagcctgttctggccggcgatgctggaaggcagcaacttccgtaagccgactaacctgttcgtacacggctacgtgacggttaacggcgccaagatgtccaagtcgcgcggcacctttatcaaggccagcacctggttaaatcatttcgatgccgacagcctgcgctactactacaccgccaagctctcttcacgcatcgatgacatcgacctgaacctggaagatttcgtgcagcgcgtgaacgccgacatcgtcaacaaggtggttaacctcgcctcgcgcaacgccggctttatcagcaagcgtttcgacggcgtgctgtgtgattcagaaaatcgtttaagttttgctgatggatcaattccttttgcgcttgttgatttgttcgataaaacatcaggtgactttgttgaacgtatcgaacgcctttatgaagagcgtgagtttgccaaagcaataaaagaaattatgtggttagctgacgaagccaacaagtttgttgatgatttcaaaccatggttacttgcaaaagatcctgaaaaagaaaatctacttcattccgtaagctcatttagtattgagttattcaaaattctgatgacgctcttaaaaccggttgttccagctctggctgagcgtgcggaagcattccttaatatggagttaaagtgggatcaaatacgcactcctttgattagccataaggtaaatccgtttaaagcgctgtacaaccgcatcgagatgaaacaggtggaagccctggtagaagcctctaaagaagaggtgaaagccaccgcggcgccggtcaccggtccgctggcggacgatccgattcaggagaccatcacctttgacgatttcgccaaagtcgatctgcgcgtggcgctgattgaaaacgcggaattcgtcgagggctccgacaagctgctgcgcctgacgctggatctcggcggcgaaaaacgcaatgtcttctccggcatccgctccgcttacccggatccgcagccgctgattggccgcctgacggtgatggtcgccaacctggcgccgcgcaaaatgcgtttcggcatctccgagggcatggtgatggccgccggccctggcgggaaggatatcttcctgttaagccctgacgacggcgccaagccgggtcagcaggtgaaataa

SEQ ID NO: 224339 - DNA, 1161 bp, Klebsiella pneumoniae
atgctcactgttaagcagattgaggccgccaagcctaaagacaaaccataccgcatgctcgacagcaacggcctgtacctgtacgttccggtgtctggcaaaaaggtgtggcagctgcgctataagcttgacggcaaggagaaggtgctgactgtgggcaaataccctctcatgtcattgcaggaagccagggataaagcgtggacagcaaggaaggatgtttctgtcggggtcgatccggttaaagccaaaaagttgtctgtgaaggacaattcattttcagctatttatcatgaatggtacgaccataagcggcaggtttggtctgaaggatatgcggatgaactttcccgcatgttccgcgacgatattctgccgatgatcggatatctggaaatacaggacattgagccgatgcagatacttgaggtgatccggaggtttgaagaacgcggggcaatggagagggcaaataaagccagaagaagatgtggcgaggtattcaggtatgcgatcgttacaggcagggcaaaatataatccggctcctgaccttgctgatgccatgaagggatatagaaagaaaaattatcctttccttccagcagatcagataccggcattcaataatgcgctatctggattttccggaagtattatttcgaaaattgccacgcaggttttgcaatatacagcgctgcgcacaaaagagctccgttctatgcaatgggaaaacgtcgactttgaaaacaggatgataaccatcgacgaagaagtaatgaaggggcgccgcgtccatgtggttccgatgtcagatcaggtaataaatctcctgaatactctcaaaccgatcacaagccctgtttcctcttttgtgttcgctggccgtaatgacaagaaaaagcctatcagcgagaatgccgtattattggttatccgacagattggctatgaagggctggcgagcgggcacggtttccgccatcagttcagcacaataatgaacgagcatggctggccggcagacgcgattgaaaaacaactcgcgcacaccgccagcgggtcaatccgtggaatttacaaccatgctcagtatctggataaacgaagggaaatgatgcagtggtgggctgattatattgatgggcgcacgggagagtaa

SEQ ID NO: 224340 - DNA, 1989 bp, Klebsiella pneumoniae
atggcagaagtaccgttaccaactcccaccgacaacccggtacccagcactgatatccgggacgcagtttatgccggcgccatgctggataaggttgtcaccagtaccgaaccgacatacatcgatcgcctcggcggcgagcattacaccgtagatggaattaaggcggaaggggacaaggttgtcgaggaaacccggcagaacctgatccctctcagccggcagtatatgacgctggctgatgctcaggcagacatagcgaatattcctgatggttcagctacctacgtgcgcagcactgatggtagttcgctagctgatgagtacatcaacaacggcgggacgctgcagcctaccgggcggcggatgatccgtgacgactacggataccaggtatcaccagacggtgtggccctggctggttatgacccggagacaaaaagagtggccccatttttaaatacggatggtcgacttatccaaatcggtcctgatgggaaatattatgagctcctcacgccgcaggaagcggagttatacgcactgggaagcgagggacaggtgacgcagtttatcggcggtgaaaaggtgtggcgtatgatcgttgacgccacgaccaaccaaatcgttgaggcttacacggttggcggacatcactgggtctattcggatagcggtctggttctggttaaccaggagagtgggggaggtggcgacgatgatgccaaccagctccctgagtatggactgcatctgtcaggctctacggtatatccgtactcagagacagtgcctgtttgttttatctttgtaactgctgggcagtccaacgcacgtggttattgccctgacgccgatcaaaccattgtcgcagcaacgccgatatatcctgataacgctttcatgctcagcggaggggttaggcgcacagggacacgcagcactactctggtgccactggtagaggcggtaagcgggacagataaagaaacggccgccagcggcctcgcgaacaccttcattcgcgatatggctgcagccaccggcgtaatgccgcgcacgttatcaatcgtatgtgcgcagtctggccaggcttacgagtaccagaaacggggtaaccaggtatatcagtatctgctcgattcaatcgaagactgcgtaacggcctgtaaggctaagggatggctgccgattgttctgtgcgttgactggatgcagggggagtccgacgaggactggagtgggcttcgagaggggatgtatgagtcgcgacttcatcaataccagcgccaggccatcagtgacatcatggcaagaacgggccaaaacgaaccgccgattatagcgcaaacgcagatcggatacgttaacgataaccacggagcatttacaggacaatatgtcaggatgtcagtaaataaacttcatggtcacgagcaattcaggtgtgtaaatactctttatcagtatgattttatttctgacggtttgcacctgacatgcgcaggacagaaccggcgcggtgctgctgtagcgagagcaattatccaggagtggtttacgagcggatggtacggaatggttccgtctggtttcgtgtggaactcacccacgcaaatacaaataaatatcccttcgtataccaacctgacgatagacacaaccaatattagtactgatggcctggcaaattacggttttaactacacagatgaatcggcgtcgccgcctgccatttcgagcgtcgcgattagctctgacggcaagggcgtgctgattaacctggcgaccgccccctctggccgttttgggcgcgtttcctatgcgacagtagaaaacccacttcagagcggggcatctgtcaaaccttccggacggactcttggtgcgagagggtgtgtaagatcttcttctggtatcacgtgggtgtatgacacatccgtaactctctacgactggctcccagcttttagaattaacgttttctga

SEQ ID NO: 224341 - DNA, 414 bp, Klebsiella pneumoniae
atgagctttgccagtcaatctacgcagcaaatttttccatttccggctgacgttgcctttgaaaaacttttagaggctattccagaagtcgggatgacgattaaacagaaggatgacacacttcgccgagtttccgtaagtgctggaatttcacttttctcatggggtgaaaatgtgtctattgtggtgaattccgacggcgaaaactcatgcgtcgtcggtatagactccgccctgaagttaggcgttaacgtgacaggtgcacacaggcatcagaaaaacttcgacaaaatcatttatgcacttagcggcaaattaaaagagtggcaaaggcagcagcctttagacctcggtcccgaaaaaacagatgatgagtatctcgaagaggcccgaagaaaagctgggctaatataa

SEQ ID NO: 224342 - DNA, 342 bp, Klebsiella pneumoniae
atgacagaagaagagtggctcgaaggtcttcgtgggctgcctgaagatgtgattttaaagatccactttgaccttcaagagaaaattaagaagcactataaactgcgcgatactggcaagaatctcgagaaggcaattcattactgccaacagcaaatagcccttgccccattagctatgtctgccatgaagaaaaatcctggcatgtacgataatgggcaattctttgctcctggacatcatggttacagacaatacgcgacgatcctcaagaagcagaaggacgcagccggcctggatgctctccttaaaaagaaaaaggcggaaggatgggcagactaa

SEQ ID NO: 224343 - DNA, 213 bp, Klebsiella pneumoniae; identical to SEQ ID NO: 205495

SEQ ID NO: 224344 - DNA, 468 bp, Klebsiella pneumoniae
atgaaccggctaatcgcagtcatcagcgccatagtgatctgcctggttgtttgccttgggtggctggccagccactaccacgacaacgcgaccgagttcaaaaggcagcgcgataaagtgactgagcagctcagcctggcgaaagacaccatcgctgacatgcagacccgccagagagacgtcgcagcgctcgatgccaaatacacgaaggaattagccgatgcaaaagctgaaaatgatgctctgcagcgcaagcttgataatggtggtcgggtgctcgtcaaaggcaagtgtccagtgtcagccgcaacccaaaccaccggcgccgccagcatgggcgatgatgccaccgtcgaactctctgcagttgctggacgaaacgttctcggtattcggtccggaatcgtcagagaccaaacagccttgagggcgctgcaggaatacatcaccacgcagtgcctgaggtga

SEQ ID NO: 224345 - DNA, 480 bp, Klebsiella pneumoniae
atgctggaactcaataagcagcgcagggcgtttctggatatgctcgcctggtcagagggtactgacaagccagggcagaacaccaaaaacaagggttatgatgtcattgtcggcggatctcttttctctgactacagcgaccacccacgaaaactggtcaacctccccaaacttggcatcaaatctaccgctgccgggcgttaccagttgctttcaaaatggtgggatgcgtaccggaaacagcttggactgaaagacttctccccggcttcacaggaccaggtggctctgcagcaaatcaaagagcgtggcgcgctgccgctcatcgataacgggcagattcggcaagctatcgatcgttgcagcaatatctgggcgtcattgcccggggcaggctatggccagtttgagcataaggccgacaacctgatcgcaaaattcaaagccgctggcggcgttgtagccgaagtacagccatga

SEQ ID NO: 224346 - DNA, 324 bp, Klebsiella pneumoniae
atgcgaatgccctacaaacaagatttcatcgccgctctgctggcagctaaggagcagggtatcggcgcaatactggctttcatcatggcgtatttgcggggccgctataacggtggcgccatggcgaagacgctcatcgatgcggtcatgtgcgcgatgatcgcctggttcgtccgcgaccttctcgacttcattggcctgagcagcaatctcgcatacatcgccagtgtcttcattggctatatcggtactgactcgatcggcaacctgattaagaagttcgccgccagaaaagcaggggttgatgatgctggaactcaataa

SEQ ID NO: 224347 - DNA, 207 bp, Klebsiella pneumoniae
atgcgcattctcaactctttcaaaaaaagccaggcagccactaaagcaacgctgatcgtcaacggcaaattcgacaaagcagcaatcatgcgcgcagcatgggcagaagcaaaaggcttcgcatctcttcccaaaaatgcgggtcgtaaagcttgtgaattctttgctgccgccctgaaatcaacctggaaacttgctaaggcgtaa

SEQ ID NO: 224348 - DNA, 372 bp, Klebsiella pneumoniae
atgaacatcgaagcttttatcgccgctggaaaggctgcgttcgggaatcacttcgtcaccgagatggcggaaagactttccgtcagtgaccgaacagtccggcactgggtaacaggtaagtatgcactgccatcaaccataggtgcggatgtgcagcgtgtgcttcattcccgcataaccgaaattaatgaggccatcaaaatgactgcagaaaaattcctgatgaacccctttaccggatcagtcgacacggaggaaaactggctggcagaaatgccaacctgggacgaggacccggcagaatgcaaacgccagttcgacacccttgtcgaggtcgttaaaaacgaagatggcgactggatcgaagcataa

SEQ ID NO: 224349 - DNA, 141 bp, Klebsiella pneumoniae
atgagccgggacgttatcgaactcattcgcgaccgctggcaaaagctccgcctcctgcgtagccgcggcaccgtgctggttgactacaaaatattacgcaatttcgtccgtatctataagcgcctgggagagacagcatga

SEQ ID NO: 224350 - DNA, 597 bp, Klebsiella pneumoniae
atggcgcaaacactgcaatttgagaagagttatcaaaacgtactgattcccgcagagccgggaaccagcgaatacctgcaacttatccccgtagggcaactcctttgcggtgagttccgcaagccccggaattacgcattccacaagaagttcttcaagcttctgactctcgggtatcactactggacgccttccggtggcctcattgagcccgcggagcgtaacctcatatccgggtttatcgactttctctcatccgacctcgatcagcgcgcagcactccagaacgccgcggagatgtatctctcctcggtcggtatctcccgttcccgcgatatggcgctgctgaaacacttcgaatcattccgcgagtgggcaaccattcaggctggcttttacgacgaataccagatgcctgacggtagccgtcgccgtgtcgcaaagtcgatctccttcgccagcatggacgacagccagtttaacggcgtctacaaatcagtgctgaatgtgctctggaactacattctgcgtcgcaaattccactcgccggctgaggctgaaaacgccgccagtcagctgctgagctttgcggggtga

SEQ ID NO: 224351 - DNA, 381 bp, Klebsiella pneumoniae
atggcactgaccaaaaaacagcgcgcagagctgcgcatgaaattcggcggccgctgcgcttactgcggctgtgagctgcgcgataaattccatgccgatcacgttgaggctgtgcgcaggaatatcagtaagggatacgcgatggataagccagaaaacgacaccatcgacaatatggtaccagcctgcatcccctgtaacctgttcaaaatgtgcagcacggttgaggattttcgcaatcgcattgcaactcaggttgatgtgactcgccgggcatcgagaagctaccgcacagcggaatcattcggcctggttcaaccaactaacgcgccggtagtgttctggttcgaaaagtgtcaggcagaaggagccaaccaatga

SEQ ID NO: 224352 - DNA, 264 bp, Klebsiella pneumoniae
atgagcatcgccacttatctcaataccggtttagccattctggggtgggcatacatcatggttaaaacaggccagtggattaccaaaaatgctctgaggcagtgggacaagcgtcgtaaggaatctcgccgccagaaagctgtgaatgagttttatgacgcctttgagcttaacaacctggagccgggttcgaccgttcgcctggccactaaaggcaacctgacaatcatgatgttccgcagcgagggaaaggccaatgactga

SEQ ID NO: 224353 - DNA, 693 bp, Klebsiella pneumoniae
atgaaaaacgaaatcgaattcaaatttggtgattacgcaatcatcgagcagaaacgccacggcgtacctaacgagatgtttgttcataaggtggttggtcaacttcgctctaacacctgggttgatgttccggttagtgttccggcgactgagacgctgcatggtgagatggaggacatttgtctctgcatctgctgcggaattgacgagaccgaggttcgccgttatcgcgtcaaggatatgcggcgccattctcctgtctctttggtggctgatgaaaagaggggttctactatcacattacaggcagtaaacgagctcattcggtcgctggagtcggcaggcgagctgtcgataagagagcagaagttcctgaagctggcgaaagcgtttaagcagctggaggcggagaatgtgcaaatcaaagctatgaacgattgcttatctgaggaactgcgtggttatgagtctgatggcgcttttgaggggccaaagatgcatctgctgtggtggcaggtcgaaacccccgccacagatcgcatcgtagccgggattaaggctgatggggtggaggagttcgcggcaaaacttcgaattcctggtgatgaccagttttttgacgctttagcaaaaggggttgcacttgctgctgacgacttctccaagcagctgcgcgagggggccgacaaatga

SEQ ID NO: 224354 - DNA, 285 bp, Klebsiella pneumoniae
atggagaattcaacagcacgaaacaaacaccaggccaggaatattgagtcatggctgcataaccaaatcgcaatgaaggggacgaccaatgtggccaatgccatgggtcttacaaagtcgagcatcagtaaatggaaggaaacctggattccgaaaatagcgatgttacttgcggtcttggagtggggagtggtcgatgacgatatgtctcgactggcgaaagaagtagcaagcctgcttagaaaagagatggccccaaagtgctcgcaacactttgaggcctga

SEQ ID NO: 224355 - DNA, 213 bp, Klebsiella pneumoniae; identical to SEQ ID NO: 184980

SEQ ID NO: 224356 - DNA, 564 bp, Klebsiella pneumoniae
atgaggtctacgggtaaaaccaaccagaccgagctggggaagcaggctggagtgccgcaatcctctatctcaaaaatcctgcgcggggacagcgagacttcgcgccacgcgggtaagatagcggcagctctcggagtgagtgccgactggctcattaatggaacaggatcaatatacggagattctaaccaacctctgcaggctatcgacgtctctaaaaacgttaaggtttatgattttgatggctttactggcgattatgtatcctggtttagcgaacttcctgaacatttccgcgcttacataatcaagggccggactggcatagctcaagctcccgccggcgccatcgtaattgtcgatccagaggctattgcaacctctgatgacctggttctcgtcagactcaaagagacattgtctgtcttcaaatatcatatcggaggcgatggtaatgggtatctttcagtggatgacgtgagggtccctttagcaccagtatctgatctctcttctgtcgttggacctatcgtccaagtcttcataccggaattaaataagtaa

SEQ ID NO: 224357 - DNA, 195 bp, Klebsiella pneumoniae
atggctaactcaattcctaacaacggacgcgccgtgatgatgcgcaatcgccgcaccggcgccgcctggctggtcagcttcgactatcgcgacggcagttactggcatgagcctcagggcaatctgcgccacatccgccggccatacgcttcacgcagtatcgaaccgaacctggttccagccgggacgcattaa

SEQ ID NO: 224358 - DNA, 339 bp, Klebsiella pneumoniae
atgagctatgcgctggcgctcagcctcagctgctttatctgcctgctcgcggtcgaaagcgtcattcatcaacagggccatttcgtggtcagactcaatccgagctgccagctgcctatcgaactcttcattcatgaccagcgcttcggcatgcagtgcgttcatggcctcttcggccttaatgcgttcctgttcggcttcccactcatcacgaggcttaaggattgcgtcacgaatggcatcacattctctggtgaaaactcgcaattcctcttcggcgggcttaaccgcctctttcaatcgcttgaggtattcgcgaccaggcttctcaatagctga

SEQ ID NO: 224359 - DNA, 615 bp, Klebsiella pneumoniae
gtgaggtcagcggatgcgcggttgttttgtcgggtggcgcttcgcttacccgacctacaggatccactcacaggctcacaccccgtaggcccggcaagcgcagcgccgccgggcaagatatcaggcacggtatccttgatttcgccgggtggcggctgcgccttacccggcctacagccccaaatcaccgctggcgctggggtcgctgaaactgccggtgctggcggcctcaacatcgctgagacgttcccggcaggccggggcagcccgcatggatgcgggctgagggccgtgttttgcacggacgctgcctcggcccgacccgaagcctgcagggataagtcgaaggcaccgcgcagcggcgatgttgctggccggagcccgggggtacagggggcggcggcgactggccgccccctgtgcgctccctgcgccatgagtgacataacgcagaagaaatattgggagcgcaatctgcccggaattaacacagaagctgtagccctgccagacgcagcgcgaacagggaaatattcagttgtgacgttatttcgccgggtggcggctgcgccttacccggcctacaggatccactcacaggctcacaccccgtag

SEQ ID NO: 224360 - DNA, 366 bp, Klebsiella pneumoniae
atgctccagctgcaggcgggcctcatagttgagcagcgagcgattgacgatgccgcctttgtgcggcagctgaccgagatagatattttcggcgacggtcatctccgggatcagatgcagctcctggtagataattgccacgccggcattcagcgcctccatggtattggcgaatgccatctgctggccgccgatctgcagatggcccgcggtcgggatatagttgccgctgagaattttcaacagcgtcgatttgcctgcgccattttcgcccatcagcgcgtggatctgtcctgggtagcagtcaaaactgatatcggacaaggcctttacgccagggaacgtcatggtgatgccgcgaaatga

SEQ ID NO: 224361 - DNA, 981 bp, Klebsiella pneumoniae
atgcacaaatttactaaagcgctggcggccattggtctcgctgcggttatgtcacaatcagctatggcggaaaatcttaaactgggttttctggtgaaacagccggaagagccatggtttcagactgagtggaaatttgctgataaagcaggaaaagatttaggctttgacgttattaaaattgcggttccggatggggagaaaaccctgaatgccattgacagcctggcggccagcggcgcgaagggctttgtcatctgtacccccgatcccaagctcgggtcggcgattgtcgccaaagcgcgtggctatgacatgaaggtgattaccgtcgatgaccagttcgtcaatgcgaagggcaaaccgatggagagcgtaccgctggtgatgatggcggcgagcgaaattggcgcccgccaggggcaggaactctataaagagatgcaaaagcgcggctgggatgtcaaagacaccgccgtaatggcgatcaccgccgatgagctggataccgcgcgccgtcgcaccaccggctccatcgatgccctgaaggcggccggcttcccggacgcgcaaatctaccgcgtgccgacaaaatccaacgatatcccgggagcgttcgacgccggtaactcgatgctggtccaacatccgcaggttaaacactggctgatcgtcgggatgaacgacaacaccgtcctcggcggcgtgcgcgcgaccgaaggtcagggctttaaagctcccgatgtgattggcatcggcatcaacggcgtggatgccgtcaacgaactgtcgaaggcgcagccgaccggcttctatggttctctgctgccaagcccggatatccacggctacaaaaccagcgaaatgctctacaactgggtcaccaagggcgtcgagccgccgaagttcacggcggtgaccgatgtggtgttgattacccgcgataacttcaaagaagagctggcgaaaaaagggctgtaa

SEQ ID NO: 224362 - DNA, 1563 bp, Klebsiella pneumoniae
atggctagatacacggcttcagcctctgaagggctgcagggaagaccgatcttgttacgccatcagttagcctacggcggcggaaatctgttagggagcggcgcactggcgataagcggcgcatggctactctatttttatacgaccttttgcggcctgacgctgatcgaggcctcatttatcttctccgtcgccagcatcattgacgctatcagcaacccgctgatgggctatctgacggataattttggcaaaacgcgcttgggcaagcgcttcggccgccggcgtttctttctgctaatcggtattccgctgatgatgttctacccgctgctgtgggtggaaggcctgagtttctggtactaccttagcacctatgtggtgtttgagatcatctacacctctatcatggtgccttatgaaacgctggcgacagagatgaccgatgatttctcactgcgttcaaaactgaccggctataaagctatctttggtaagctggccaacttcctcgcggcgtttattcccggccagttcattctgctgtatggcaaagattctgccacccctttcttcctcaccggtctgacctatggcgcgatcctgatcgtcgctatttcctgcctgtggttgtgcagctgggagcgtgagcgcggggaagaggtggaaaccagcgcgaaaaaaggactgctgagcaccctgctgtcgctggcgaaagatatgcgttcgactttttatctacgcgtattccgcaaacatcttggtatgtacctgtgcggctttggcgcggaatggctgtttgcctccatcttcacctatttcgtgatcttcgttttacaacacgatccagcgatggtggccgggctgaacagcctgaactcgattctgcagctgatctctacggcgctgtttatcggcctgtgcgtgaaaaagggcttcagcaaaccctatatcctggcgctggggatcgtcattttcgcggttctgctgtatacctcgctgtggtttttccatctaccgtccggcctggcgacagtgctgatgttcggcattaccgtgctgttcggcctgggtaccggcggggtttactatataccctggaccgtttacaccttcctggccgatgtcgatgagatctacaccggacgccggcgggaagggatctatgccggcgccatgaccttctcaggaaaaattctgcgctcgattgtggtgttctcaatgggggcgatcctgagcttctacggtttccagtcaaaagcgcacagccaaccggaaagcgcggtgaccgctatcgcagtggtattctgcgtcggggtgatcgcattagccctggccgccatcgtcttcagcaagcagatgaagctggaccggaaggcccatctggtggtgctgcaggaagtcgcgcggataaaagcgggcggcaaaattagcgatattgcgccggacgtgcgggttatcgtggaggatctggtcggccatcgctacgaagagtgctggggcaacagcaaattgttcaaagatgctgcccctgcgcctgcgcagaccgtcgtttcccattaa

SEQ ID NO: 224363 - DNA, 597 bp, Klebsiella pneumoniae
atgagagataaaattattaaagaatttgaaattacgcaaccagaaaaaataaaggttgtttatccaccaattgatatttccccttcacatccatataagaatatttctaatattgctcgtcgagtaaccataggtatgataaatcctagtccggcaaaaggcgattttatatttatcgggcttgcaaaaaaatttcctaatgttaattttatgtatttttcaaaaaataataagcaatatcaacttgagaacattatatatggtggatggataagtgatagaagttctttattttcaaaaattgatctcttgattgtaccttctcaatggcctgaaccatttggaagagtatctgtcgaagccatacgaagtggtttacctgtaattgtatctggatcaggaggattaacagaaacagtagacaagttgtttgtaattgagaaatatgattgtatagatgaatgggttaataaggtagaatgggcgcttaataatactgatatccttgaaaatacttggtcaaagtcgctagaagtatcagagcaatttgttactgagcagcatgagaaatctttacttgagatttttcactcataa

SEQ ID NO: 224364 - DNA, 696 bp, Klebsiella pneumoniae
atgcgatcatataccaaacgtttattggaggctgaagagtccaaagctacgttacatcttcggaatgagaatttagaaaaactaaattctgaaaaagaagcaattattgagcaagccgtatctagaataaagcaacttgaagcatctaacagcgaattacaaagccgagtacaacaagaaaggattgatgagaaaataccaggatatgtcgatagcgttaaaagtgaactaagttcagatgacttatatttcattaaaatgtcgcaagtatgggcttttactggctgcattttcgggctacttgctgtatgtgcatcattttatacactctacgccacaattgacttcaacaatgttaaaggctttgagctattttattttttcacacgtggtttaattggtatttccattctttcttggctagcatatatttgccttggcaactctaaaaaatatacccatgaatcaattttgagaaaagatagaagacatgcactaatgtttgggcaagtattcctgcaaatttatggttccacgtcaacaaaagaagatgctgtgttagtctttaaagactggaatatgtctggtaactctgcattttctgacaaaacagaactccctccgggaatccaatctttatgggattcaaccaaagaaaaactaaagccaagtaccgctgaaaaagcacaggagtga

SEQ ID NO: 224365 - DNA, 939 bp, Klebsiella pneumoniae
atgtcaactcaaaaaaacacatttcgccatgttagcgagagtctaaaaacttcaataatgcaaaaccgtgggggacagaaagtaattgagcgtatacttgttgcgtatggttttacttcgcggcaagcattttgcaatcatctgggtatctcacaaagcacgatggctaacaggtatgctcgtgacacatttcctgctgactgggtgataatttgcagtatagagaccggcgcatctatcgactggttggcatcgggaatcagctgtgaatcatcctcagttttattaaatgatgaacgtttagcccataccaaatctgatgacctggatagaactaactcaatagcccaaaagttcccaatcgagaccagcataaatcctaataaaggagggaaggcggcaattgatcgcttagtcgcagcctacggctttagcacccgacaagccctagcaaaccatttgcaggtttcaaaaagcactgtagcaaacaggtacttacgagacacgtttcctagcgattggatcattcaatgcgctcttgaaacaggaacttcattactctggctcacaaacggcaatggccccaaatttatcgataattccagctctgtagcccaacttaaacaccaaacaatcattgacggtaaattacatgatgaaggctacttagcatttgacaagacgcttataccttccggattgaaaaaacctattggagttaccgcagaaggaaaaacctttattgcagatacagaatatgatgatgtttcagatggtagttggttgattgagattgaaggtaaagtaagtttaagaaaattaacaagaattccagttggaaaagtaaaaatcacatcagatacaactgattttgtttgtaagcttgaagacattacaaccatcgcaaaatgttgttgcgttttttcaaaggaaatttaa

SEQ ID NO: 224366 - DNA, 939 bp, Klebsiella pneumoniae
atgccagcaggaatggaattatttccagcaacaaatagtgatcagtggagtttaataaaaaaaataattgacgatagtgattattatattgttatcttggcagggcgttatggttcaattggtcctgatggaataagctatacagaaatggagtatcgttatgctttggaaactggtaagccagttataggttttattcataaagataaaagtaacctccccgcaaaacgttgtgagtcaaaccctgaaagcgtagaaaaactaaaggctttcgaagagctagttaaaacaaaattatgtcgtttttgggagtctcctgcagagttaggtagccaggttagcagaagtttgattagactaattaaagaatgtcctgcaattgggtgggttaaaggaaatttagtaactaatgatggtgatgcaaaggaaatattgaaattaaaaaggcgaattgaggagcttgaaagtcaacttgtatcaagtatgactgaagcgcctgcaggtgcagaaaaactatctcaaggagatgagctttttgaattggattatgaattctgtgtgtcgcctacagaatggagacataatggtgaagaatataccgataaggtcaaattaagctggaatgatattttttcatatgtttcgcctttgatgatagatgagatagtggatgataagctatatagtgctttaaataactgtgtgcgaaatgcagttcaagatatcatctatgaggattttaaagatatgaatttattatctttaaaagtgtctaattctgatttccaaacaataaaagtgcagtttagggcgcttgggttaattattaaaagtgaaaagagtagaagtgttaaagataaaggtacttattggactttaacaccgtatggcgaaaatttaatgacaacattgagagcgattaaaaaaactttggtatag

SEQ ID NO: 224367 - DNA, 465 bp, Klebsiella pneumoniae
atgaagtttgttgcgcctgagcaggtgccggagcaggcggaaattatcaaaaatacgccgttctggcccgatgtggatttatcagagtttcgcagcgtgatgcggacggatggcacggtgacgtcaccccgtctcggacaactcatccggtctgcgatgtcagaggtcaatgcggagctgtacgacttccgcaagcgccagcaggcgctgggatttatgacgctggccgatgtaccggcggacttgctggacggtaaaagcgaacgtattcaccactaccacaacgccgtttattgctgggcacgtgcgcaggtgaatgagcgttaccaggactacgacgccacggcctccggtgtgaaaaggggggatgagctggcggaggccagcggcgacctgtggcgtgatgctcgctgggcaatcagccgggtccaggatgcgcctcactgtacggtggagctgatctga

SEQ ID NO: 224368 - DNA, 384 bp, Klebsiella pneumoniae
atgaaaaagatactgatcggtgggttattttcggtgctgtacatggcgctgattatttttagtctctttattccaaacagtattgttccggcactggttacagccttgacctgggtagcctgcctgctgagctggggagcggtgctgctttgcctggctgggtggtatgcgggcggcactcatcggggagaggcaaagcaggcgctgacgcactttttcagtacgccaggaaaccaggtgatccgatgggccaggtgttcactgcttgtgatttttctcgcctttacgggccacgttgtcaccctggtattttatctgctgacgctggccgcgcttaaggttctgcgtgcacagattattgatgcggagccggtgacggtatga

SEQ ID NO: 224369 - DNA, 429 bp, Klebsiella pneumoniae
atgacgaaggcgctggcggtaattttggcgctggtagtgctggcgcttggctggcagtcatggcggatgaaggaggccagccagaccatcgagcggcaagggcgggatctgaaaacgacaggcgaaaaactggcaaaaacgaacagccagctgatcgccctgtccatcctgtccgaaaccaataaccgggagcaggcaaggctttacgcggcggcagaaagtacaaacgcgctgctgcgaagccgtcagcgcagaattgaggagttaaaacgtgaaaatgaggatttacgccgctgggctgacactcttctgcctgctgacgttatcaggatgcgcgaacgtccggccctcgccggaggtgcagcttaccgtgaatggttgtcccagggtgacgcagtgccgcctggaaaagtcggcggcacgcactaa

SEQ ID NO: 224370 - DNA, 432 bp, Klebsiella pneumoniae
gtgaacaagcctcaatccttacgccgcgccctgaatagcgcggtgccatatgtccgcgataacccggacaagctgcatttattcgtggataacggaacggtggtggcaaccggggcagcgtcgttgtcctgggagtatcgctatacccttaacgtggtggtcgtggatttcagcggcgatcagggtttattgatggcgccggtgttggcctggttaagggaaaatcagccggatgctattcataaccaagaactgcgggaaaagttgctttcctttgaagtcgatattttgcgcaatgatatctgtgatatcagcctgaatttgcaactgacggagcgcgtgatagtcagcgctgacggtgacgtgtccagcgtcgaagcggtgccggaaccggccgaaccggacgaaatgtgggcggtgagccgtggctga

SEQ ID NO: 224371 - DNA, 465 bp, Klebsiella pneumoniae
gtggctgagctgcaggaagttgacgcctggttagatgcgttgctggcgggactggagcctgccgcacgtaagcgcatgatgcgggagctggcgcagcagctgcgccgcagccagcagaaaaatatcaggatgcagcgcaacccggacgggacggcttacgagccgcgtcgcgtgacggccagaacgaaacagggccgcatccgtcggcaaatgtttgcaaaactccgcaccacaaaatacctgaaagctgttgccaccccggactctgccagtgtcgaatttgagggcagggtgcagcgcattgcccgcgttcatcattacggtctgcgtgatcgggtcagccgtaaagggccggaagtcaaatatgctgagcgccggttgctcggtattaacaaagtatctgaggatactacatacgaaaccttgcttcgttggctattagtaatatgccaaaaaaataactaa

SEQ ID NO: 224372 - DNA, 552 bp, Klebsiella pneumoniae
atgtgcctacttatcctcacattaatagctttagcctttttaatatcaatcttccgaaacagccctctaataacagacatccaaaacattttcagatacaaatctgacgacccccctcctaagacacctgctgaacctataaatccagcagaagagtctgccaatagaatacagttcttctgtcagagactgatttttgcagccttgactatttttctacttgtaaaaggtggtgttgaaataatcgacaccttacaccctaattttttatcagatcataagtttttaacacatataaaagagataaagacacttagttatgtagcaaaagctttagctgtttcctgtggattccaacttgcttttatgttaataacaaaaggcccagatgaagcagtggaaccaataatgcttggtatcgcatccgttatcttacttatgttatctgtaatagccccagagaaatggagcgtacaaaactcattatcagttactatgctaatagcatgcatcgcaggcttattttatttatccaggaaacttaaaaagtga

SEQ ID NO: 224373 - DNA, 603 bp, Klebsiella pneumoniae
atgactagcagcctgttaccgccggggtcgtctgcgctggagcgcaggctggcgcaagcctgttcaggtatcagtgatttaaacgtgccgctgcgtgacctgtggaacccgtggaaatgcccggcaaagtttctgccgtatctggcctgggctttctccgttgaccgctgggaggaaaactggacagaaactgctaaacggcaggcggtcagcgatgctttctggatccatcagcgcaaaggaacggtggcggcagttaagcgggtgattgaggggctgggttactcaatgactcttgaggagtggtggaaagtagccgatccagcagggacgtttcggcttgagatcgatttgaatgagatcggcatcacggagccgatgatttacgagcttgagcggattattggcgatgcgaagccagtcagtcgccatatatcgcagctcacgctctctttgaatgttacggctttagccagtataggctctgcatttattgattcagaagtcattacagtgtacccgcccgaatatgtcccggatggcggtatttattacgacggtcagcagcattattccggcaatgtttatttttcaggaaagtga

SEQ ID NO: 224374 - DNA, 1740 bp, Klebsiella pneumoniae
atgacgaaaattaccgaaacaattaagtgggctgatgaaatttatcagattgcccgtctggataaagttgaaggcggtgcaacggggaccgctaatattcaggcaaagcagttagccgcccgtacacaattcctgaaaacgatgctggaaggatttaccgattatcgggaatccactttcttcaaaacagcagaagacccggacgggacgattgccgggcgtgccgccacgcccgccggtaaaattttccgcgtggctcaggggcctgaggctgatgagtcgtttattttttacctgaatgctgacggcattgcagtaccggtcgcattctatgccgggaaagggtatgtggatcgcagaatcgtgccggggtcattcagcggcaagatgctgcctctggctcacggaagcaatgatgtcgtgccgctctggctggatgatggctgtctcgatgcagccggattagggcctcaattacaggagtttgtcgccggaataccgaatatgtgggcgcgacaatatctcccgcaaaaaaactttaatcctaaattctttcctgcctgctttggcgataacgacgttgtcccgctgtggtttgacgatggattccctgacgctgccgggctggggccacaattacaggcgtttattaagaatctggttggtgatggtggtggtggaaccgttagcggtgaagtgacagataaaacctttattcagggcgatacctaccggctacagtataagtttgcgcgtttatttgtcggcgagaaagtagggattcattatgcctggacgggggattcatggacggaaaaaaacactatccctctgtcgttcctgaatcagatgggcgggaagtataaagacccaggctggataagttgctctacgcgcggcgatggcgtcatggccggtattacgctgaaaaccagcgggtttactgtctatgacggagacaacgagcacaataatgccgcgccgcgttatggcgcaggccctgacgggaacgccatgtacaataccggcagcgtggcgtatatgacctggtcaggggttaaggccaccgatttgacgctgttttattacgacggaaccgggtcattcagcatcatcattgacgatgttacggtggcgaccatcaccggcggcaatacaggtaaggcgctggcgcataagatcagcggcctggtttccgttgcacataccgtgaaaatccagactgccgggaatggcgttgtgtctatcctggggatgtacggtaaagatgcgtcgaatcagtctggtgttactgtctcccgcatggggaatggcggagcaatggcgtcggattatctcaactggaaagactggatcgcccctgtcgcgtcagctctggagattgatttactgtttatcgtgctgggaacgaatgattttcgtaagtctgccgggacggaacaatatcgcaacggcattcagacaattattgataaacacaaagaggcatcacctgatatttgtatttgcctggtatcgccgggacagtgcagcgcatcgggaacgcctgccctttctgaatacgataaaaccatgcgcgaactggcgctgaaaaataacatcaactttatcagcgggtatgaattgttcccgaaaagatatgataattccgccggtgcatggcaggacacattacacctgagcagcaaaggtgcatatatcattacccgaatggctaaagaaaaattttatcaggagtaa

SEQ ID NO: 224375 - DNA, 753 bp, Klebsiella pneumoniae
atgtttacatctctttttctcggtggtcctgtcccatttaaatcgggaatgaaaatgatggctgattttgaaaagataaactggtttcaggatttccccgaaacggatggcatcccttttgccgggtattattggggggcaaactccagtgatattactctcaactcttttgattctgacaaaccgctgatggttaacggggtcgtggaaaactcgcaagggtttgttaccgtaagtcgcgataattaccttaacacccaatacaaggccccggtcgcgctgaccgtcgcaggggtgatgcgcagggcagcggcaggcgggggagctaacacctatgccgtggcagatttttctggcgcagcagcgaatgcgcatggttttggcatcggtacagcagttgacgggcgtcttttggtagcgctccagaatgcgggggtgtcggggccagcctatgcctatgcctcattcccggaatccattcaggtgggcgatttttttgcgttcacttcgtttattcgtcagggaacgattacgattgccatttatgacccctctaccgggaaatatgtttcgagtgcgtcctccgtgccgggagatattgccgcaggggataaagatattttaatcggttgtaaaacggataataacaactccgggttagcaaccgattttaagtcggtggttttaattaatggctctctgacaacaggtcaacatattgccgtacagaaatatctgctggaaatggcataa

SEQ ID NO: 224376 - DNA, 1173 bp, Klebsiella pneumoniae
atggcgcaagactatcaccacggcgtgcgtgttgttgaagttaacgacggcacccgctctatcacgacggtgagtacggcgattgtaggcatggtatgcaccggcgatgatgccgatgcctccatgttcccgctcaataagccggttctgcttaccgatgtattgaccgccagcggcaaagcgggcgagtccggcacgctggcccgctcactggacgccatcgccgaccaggcaaaacccgtcaccgttgtggtgcgtgttgcccagggcgaaacggaagcggaaaccacctccaatattatcggcggcgtaaccgctgacggtaagaaaacgggcatcaaagcgctgctttcggcgcagtcgcagctgggtgtgaagcctcgcattcttggtgtgcctggtcatgacacgcaggctgtttccactgaactgttaagtgtggcgcagagcctgcgcggctttgcgtatctgtctgcctacggttgtaaaaccgtggaagaagcgattgcctaccgcgaaaatttcagtcagcgagaagggatgctgatctggcctgatttcatcaactttgacacggtgctgcaggcagatgcgactgcttacgccactgcccgcgcgctgggtctgcgtgcaaaaatcgacgagcagaccggctggcacaaaaccctttctaacgtgggcgtcaacggcgtaaccggcttgtctgcggatgtgttctgggatctgcaggacccggcaaccgatgccggactgctgaaccagaacgacgtcaccaccttgatccgcaaggatggtttccgcttctggggttcccgatgcctcagcgatgacccgttattccagtttgaaaactatacccgtaccgcgcaggtgctggcagacaccatggcggaggcgcatatgtgggcggtggaccagccgcttaatccttcgctggctcgcgacattatcgaaggtatccgcgccaaaatgcgcagcctggtaaatcagggctacctcatcggcggtgattgctggattgatgacagtgtgaatgacaaagacacgctgaaatccgggaaactctggatcgactacgactatacgccagtgccgccactggaaaacctgatgctgcgccagcgcatcactgaccgttacctggtggatttcaccacccgcgtaagcgcataa

SEQ ID NO: 224377 - DNA, 897 bp, Klebsiella pneumoniae
atgtcacatattaactacaatcatctgtactacttctggcacgtgtataaagaagggtccgtcgtgggcgcggcggaggcgctgtttctgacgccgcagaccattaccgggcagatcaaagccctggaggagcgcctgcaggggaaattatttaagcgaaagggaagggggcttgagccgagcgagctgggggagctggtttttcgctatgccgaccgaatgtttaccctcagccaggagatgctcgacatcgtcaactatcgcaaagagtcgaacctgctgtttgacgtcggcgtggccgatgcgctctcgaaacggctggtcagcggcgtgctggatgccgccgtcgttgagagcgagcagattcatctgcgctgttttgaatccactcatgagctgctgctggagcagctgagccagcataagctcgacatgattatctctgactgcccgatcgactcgacgcagcaggaagggctattttcggtgaagatcggcgagtgcagcgtcagcttctggtgcatgaatccggcgccgacgaagccgttcccggcctgcctcgaagagcggcggctgctgatccccggccggcgatcgatgctgggacgtaagctgctgaactggattaacgtgcagggcctgaaggtggagatcctcggcgagtttgacgacgcggcgctcatgaaagccttcggcgccgcacataatgcgatatttgtcgcgccgacgctctacgcgcatgatttctaccatgatgaatcgattgtcgaaattggccgtatggatagcgtgatggaggaatatcacgctattttcgctgaacgaatgattcagcacccggcggtacagcgtatctgtaatcgcgattattcgtcgctgttcaccgaaccccgatag

SEQ ID NO: 224378 - DNA, 405 bp, Klebsiella pneumoniae
atgaaatcgctataccggctttccgtagggcttatcctcggcgtgtcatttatcacctcggcggccgctaacgaccataaaattctcggcgtgatagctatgccgcgcaatgaaaccaacgacctgacgctgacgctccccgtctgccgggtggtcaaacgcattcagctcagcgccgaccgcggcgatgtacaactctccggggcgacggtctactttaaggccagccgcggcgccagccacacgctgaacgtccccgccgggatcaaagagggcagcaccaccggctggatcaacatcaatagcgataacgataacaaacgttgcgtgaagaaaatcgccttctccggccacacggtgcactcctcagatatggcatcactgaaaattatcggcgatgactaa

SEQ ID NO: 224379 - DNA, 231 bp, Klebsiella pneumoniae
atggctccggcactccaccgcggcgagaaactgcgctttttgctccgcgttcagtttattccagctgtgctgcagaaaatgcgccagcaactgctgctcgatctgcggcgtcgacagctgtttgtcgaccttcgctttcagtcgtttacatacatccagcaggatcgcgcgataaaatttgccatggcggcgcagcgtgttggcgatgctatcgccgccaaaatgctgtag

SEQ ID NO: 224380 - DNA, 825 bp, Klebsiella pneumoniae
atgaagcgcctggcggtcgccttatgcctgggcgcggcatcgttaagcgcgacggctgccagcaccgattgcggcgcggggtcgccatcggcagaaactatcgccgccaccatgcatcaggcgcaacggctcaaacagcaattgaacagcgagccggaaccggtggttattttagtgcgccagggtcaggatatgtccagccgcgggctgacctggtctcacgcaggttacgccctccgacaggccgataatagctggcgggtgtaccataacctgaatacctgcggtacggcgcggtcagcgctgtacgtgcaggggctctatgagtttctcgccgatgaactggttaaccagcagatagcggttttacgcccgcgcggcgaacttaacgccgccttacaagagcttttacacagtcctgtcaaactgaacctgttccacagcccgcgctataacctgatcgcctggcccttctccgggccgtatcaaaactctaacggctggctgctggaactcttcgcccgcgccaacgacagccatatctggtcacgtcagcaggccagagactggctggcgcaggagtcgtaccaaccctcgctggtcaacgtcacgctttttgagcgcctgggcgcaaaggtggtggccagcaatgtttttaccgacgatcagccggatgagctattggcgcaaggtaaagtgggtttaaatagcggcgatagcgtgattcggtttatcgcgcgttacagccgggcgatacccggctgtcagcatctgaatctacccgactctgtttgcgtttttatacctgaacaccaggttcaataa

SEQ ID NO: 224381 - DNA, 432 bp, Klebsiella pneumoniae
atgcgtaaaacgtccatcttcgccgcagcattgctggcaatttcgtccatcgctcatgccgatgagcgtaccaccgccgtctatgctctctcttcgggaattgccagcatcggcagttcggcattagtgagcggtattattctctcgccggtcctggttcccgtcgcactgatcaccgcttctgtcgacaaaaacaaaaagcaaaaaaccgcgctgctgaccaccaaagaccctaagcagaacaccgtcaaaatggtgctgccgctgcaggttgtcgaaaaggccgatctcaaaaccggggataagctgacgctggagaaagccccggaaggcaccggcgcattgctgaaaaaagaggataaggttctggcccacatggtaaatcaagaggacgcgtcgctctccgctaaccaaccgctgtcggcgaaatga

SEQ ID NO: 224382 - DNA, 534 bp, Klebsiella pneumoniae
atgccaactatcatcactcatgccgctgttccactgtgtctggggttagggctgggacgcaaaattattcccccacgcctgctgctggccggcgtagcgctggcgatgttgccggatgccgacgtgctggcgtttaagttcggcgtcgcctacggcaacgttttcggccaccgcggatttacccactcgttactgttcgcgctggtggttcctttgctgtgtctggcgatagctggcaggaaatttcgctgcgggctggtgcgcagttgggcgtttcttagcgtctgcctgttatcacatagcctgctcgatgccatcaccgacggcggtaaaggcgtcggctggctgtggccctggtccgatgagcgcttcttcctgccctggcaggtgattaaagtggcgccattcgcgctatcgcgttatgccacgccttatggccatcaggtgatcctctctgagctgcagtgggtctggctgccggcaagcgtactggcgttactcctctggctatatcgtcaatctattcaacgttaa

SEQ ID NO: 224383 - DNA, 768 bp, Klebsiella pneumoniae
atgagcaaaggtactgttatctgcctctgtgatttaacagggaaaatggctgagccatgggtcgaagcaggttatcgcgccgtcctggtggacccgcagcaccctgaaacttcgatcgacggtcctgttgagcgcatatcggcaaccatccttgaggcgatgccgcggctatctcagatcatccgctctgagaacgtcgtcatcgtcatcggcttcccaccatgcacggacgtggctgtttccgggtcccgttggttcgagtccaagcgcgccaaagacccgcatttccagggcaaagccgcgctggtcgctgagcaatgccggatggttggcctggcggccggctgtccgtgggcattcgaaaacccggtgagcgtgttcagtagcatcttcggctcggccgattacacgttccatccgtaccagttcactgggctgtgcacggatgacaactacacgaagcagacctgcctctggacgggtaacggcttcaagccgccggcagagaatattcacccgcaagtggcgcaggcgatcgaacgcgtgaagcagcactttggccggatggtgccgaagaagaaggcactggaggtgttcaactttcatggtgagaacctcatcgctgactggtatccggacaaccgaattcacgaatgtccgcccagcgacgagcgcgccaacattcgcagtgctactcccctgggctttgcaagggccgttttcctttcgaatgcaccccacctcaataagaaacgggaggcagcatga

SEQ ID NO: 224384 - DNA, 381 bp, Klebsiella pneumoniae
atggcggcggataattccggcgttgttgaccagaatatcgacccggcccatcgccgccaccgcctggtcgaccagaacgctcatatcattctcttggctgagatccgcctgaatggtgtgaaagcggcggcccagcgccagcacctgggcggccgtatcatggggaattttacggttgatgccgacgatatcgcacccggcctgcgccaggcccagcgtcattccctgtcccaggccggtatcgcaaccggtcacgatggcgaccttacccgtcaggtcgaaggcgttcagtaccatattcacctctgtcagctgatctactggcgtacgatgacgccacctgtgaccagcatagagggaggaaaacaaaattacaattaa

SEQ ID NO: 224385 - DNA, 1284 bp, Klebsiella pneumoniae
atggcacagcagaaaccccacgacgtgaacgagccgtcacgtcgtcgcttactgaaagggatcggcgcgcttggcggcgcgctggccatcaccggcggctgcccggtagcgcatgcggcaaaagcggaaagttccccggggacgctcacacccgacgcgcgccaggaaaagcagccattctatggccggcatcaggcgggcattctgacgccgcagcaggcttcgatgatgctggtggccttcgatgtgctggcggctgataaagccgacctagagcggctgtttcgactgctgacccagcgtatcgcctttttaacccagggcggcccggcgccggacacgccgaatccgcggctgccgccgatggattccggcatcctggggccgtggattgcgccagataacctgaccatcaccgtctcggtcggccattcgctatttgatgagcgctttggcctggcggataaagcaccgaaaaagctgcagccgatgacccgcttccccaacgattcgctggatgccgcgctgtgccatggcgacctgctgctgcagatctgcgccaatactcaggatacggtgatccacgccctgcgtgatgtcatcaaacatacgccggatctgctgagcgtgcgctggaagcgggaagggtttatctccgacagcgcggcgcgtagcaaaggcaaagagacccccatcaacctgttggggtttaaggacggcaccgctaacccggcgagccacgacagcgcgttgatggataaggtagtgtgggtgacagccgatcaggacgagccggcctggaccgtgggcggcagctatcaggcggcgcgcatcatccagtttcacgtggagttctgggatcggacgccgctcaaggagcagcagacgatctttggtcgcgacaagcacaccggtgcgccgctggggatgaaaaacgaacacgataccccggattacagtaaagatcctaacggcgaagtcattgcgctggatagccatattcgtctggccaatccccgcacgccggaaacccagtccagcctgatgatgcgccgcggctacagctattcgctgggggttactaacgccggacaactggatatggggctgttattcgtttgctatcagcacgatctggaaaagggttttctgacggtgcagaaacggcttaacggcgaggcgctggaggagtatgtcaaaccgatcggcgggggctacttctttgttttacccggcgtagtcgatgaaaaacactatctgggagagtcgctgctgcaggcctga

SEQ ID NO: 224386 - DNA, 2076 bp, Klebsiella pneumoniae
atgagccaggtggataacgccatcctcgatgcgctgacgcacgtcgctttcccgaaaggcttcgtccaggcagagccctcctcggtagtgaccattgataacgtgacctatcccgtctggcgggccgatgcgctggtcgtcggcagcggcgcggccgggctgcgcgcggcggtggagcttcagcgtcgccagcaaaacgtcctgctggcgacggcgggcctctatatgggcacctccgcctgctccggttcggataagcagacgctgtttaccgccgccactgcgggcactggcgataacttcattgcactggcggaggcgttagccagcggcggggccatggatctcgataccgcctatgtggaagccgtcggctcgttacatacgctgggggggttacaatatcttggtctggagctgccggaagatcgctacggcgccattctgcgttaccagacagaccatgacgaggccggtcgggccacctcctgcggcccacgcacctcgcggctgatggtgaaggtgctgctcgatgaggtgaaacggctggggatcccgctgttaaccagcgcaaccctcattaagctgctgcaccagcgcgatgaaacgggcatcgatcgcgtggccggcgcgattctggcgaccggttcacgggcctggaatccatccgggctggcgattgtcaccgcgccgaacgtcgtcctggctaccggcggcccaggcgagctttatcgcgacagcgtctatccacacaaatgctttggctcgctggggctggcgctggaggaagggatcacgctcgctaatctgacggaaagccagtttggcatcggtacgccgcgcagcgcttttccgtggaatttatccggtacctatgtgcaagtgatcccgtatatctactccgtggatagcgaaggtaacgaacataactttctggctgattactaccgtaccacccaggagctggcgtcgaacatttttcgcaagggataccagtggccgttccatgccaccagagtgatggattttggctccagcctgctggatatggccgttgcgcacgagcagcaattgggccgtaaagtctatatggatttcctgcgcaacccgcagccggtgccaggcgacgtgccgttttcactcgagcggttggatgaagatgtccgggcgtacctggcgaataacgacgcgctggccgcgctgcccatcgaacgcctgcagcggatgaaccccttatccatctccctgtacaacatgcatggccacgatctcacccaggcgccgctgcagtttgccatgaataatcagcatatgaatggcggaattgaggtcgatatctggggacagacttcgctacccggctgctttgcggttggtgaagtggccggaacgcacggcgtgacccgccccggcggggccgcgctgaacgccgggcaggtctttgccgtgcgcctggcgcgctatatcgccgaagcgggctggcgaggggaaagcgacgcggtggaagcgctcgccaccggccctctgaagcagatcaacgccgtgatccaccaggcgctacatcacgcttcaggacgatcgctggtcagtctgagagaggaaatacaggcgcggatgtctgattacgccggatttatttgccatgtggacaccatcagaccggccgcgcaggccgcccggcaactgctggcaagtctcgctcacgacgcccttgcgattcaacaccaggctgagatccccgggcttttcatctggcgtcagctgacgctggcctcggcggctattctgaccatgctggaggagtacgttgccgcaggcggcggaagccggggcgcgcgaattattcttgacccgcaaggtgactgcctgccgttaactcgtcacggccccttagcgcaatggcgttttcgaccagaacaacaggccgacaaaaagacgaagctcactattcagtatcgggaaaataaatttattttccagcaacaaccattaagaaaatcaccggatttaaaaggtaattattttgaaaagaactggcctgattttctctgcggagaaatataccacaagcagtaa

SEQ ID NO: 224387 - DNA, 1542 bp, Klebsiella pneumoniae
atgaataaaatgacaacggctgacgcgctggccgcccagattgaggatggcgcgacgatcgctatcagcggcaacggcggcggcatggtggaggccgactatctgctggcggcgatcgaaaaacgctttctggaaaccggccatccctgcgatctgacgctggtgcattccctgggtatcggcgatcgcgactgcaaaggctcgaaccgtttcgcccacgcgaaaatgttaaaacgggtgattgccggccattttacctggtcgcccaagatgcaggcgctggtgaagaacgaagagattgaagcctattgcttccccggcggggtgatccaggcgctgctgcgcgagatcggcgccggacgtccggggcttatcacccacgttggcctcggctcgttcgttgacccacgtcacgacggcggcaaatccaatgccatcacccgcgaagatctggtggagcttatcgagatcgatggcgaaaccaaactgcgctaccgcccgttcgccgtggattacgccattgtgcgcgggacctatgccgacgcgcgcggcaacatcagcctggaagaagaagccatcaatatggacagctactcgatggcgctggcggcacataatagcggcggcaaggtctttgttcaggtgcgcgacgtgctggaagcgggcgcaattgccccgcgtaacgtcaccctgccaggcatcctggtggacggaattgtggaatatcgcgagcagccgcagacctatctcggcggctacgacctgaccatcagcggccagcaccgccgcctctgctccagcgacgccattgagctggtcagccatccggtacgccgtctgatcgcccgccgcgcggcccgcgaactggttgccggcgcgtccaccaacttcggctttggtattcccggcggcatccccggtatcgcgctgcgcgaaggcgtgccgtaccagagtttatggctcagcgtggaacaaggcgtccataacggtatgatgctggacgatgcgttatttggttgtgcgcgcaacgccgacgccattctcccttcgctggatcagtttgaattctacagcggcggcgggatcgacatcaccttcctcggcatgggcgagatggatcagcgcggcaacgtcaacgtctcccatatcaacggcaacctgattggcccgggcggctttctggagatcgcccagaacgcccgcaaggtggtgttctgcggcactttcgacgccaaaggcagcaaaattgacgttactccagacggcctgcatatcgcgcagtccggacaaattcccaaactggtcgccaatgtggaaaagatcaccttcagcgccgattacgcccgccagagtggacaagaggtgctgtatataaccgaacgcgcggtattccagctgacggctgaaggcgtggagcttatcgaggtcgctccaggggtaaacattgagcgcgatattctgccgtatatggcgttccggccgattatcaggcaaccgcgcctgatggacagcaacctgtttacaccaatggaggaagcatga

SEQ ID NO: 224388 - DNA, 777 bp, Klebsiella pneumoniae
atgaatgcataccccgttctgttcagcagaacggcggcttcctgccgcctgacgctgaaccgcgaagataaatgtcacgcgattaatgaagagatgatcgaattactcgatcgttatttaagtgaaatagaaaatgacgctgcgctgcggctggtggaattaaccgccaccggcgacaaattcttctgcgcaggcggcgatattaaatcctggtccgcttactcgccgctggatatgggcagaaagtggattaaacgcggtaacgaagttttttcccgcctgcgcaatctgccacagctgaccgtcgccaatattaacggccataccatcggcggcggcatagaactggcgctgtgctgcgatattcgcattgcgagcccggcggccaagttctccacaccggaagtgacgctcggcatgatccccggctggatggggattgaacgcgtgcttaaccaggtgggccccacggtgggccgccagatgctgatgctcggcaaacgccttaccgcccagcaggcgcaggcggcaggcttaattaacgaagtggtcgaaaaagcgcaggtggagagctggatggcaaatcagctcactaccgtggagaaatgcggcccggtggccctggcgcatattaaacagctcattctggccctcgagaacaaacatgcggattatccgcaccagctgctggccggattgatgtccgccaccgaggactgccagcaggcgacgcgcgcgttcgcggaaaaaggcaacgtgaccttccgcaaccagtaa

SEQ ID NO: 224389 - DNA, 846 bp, Klebsiella pneumoniae
atgagaaatcttctgcagcgccccgatctgttcagcatcaataccgcgacgcttggctataaaacgccgcttcccgccatcattgatgcctgtgcggctcgcggcattggcgccatcgccccctggagaagggagctggacggcgagaacgtatcggcgattgcccgccagctggcggcgaatcatatggccgtatcgggatattgtcgcagcacctattacaccgcccctacgctggcagaacgtaagcgcgcaatagacgaaaaccgccgggcgctggacgatgccgcgacgcttaacgccgcctgctatatgcaggtggtcggcgggttgccacagggcagcaaagatctgtatgacgcgcgtgagcaggtgaaacacggtatccgtcagctgctgccgcactcccgggaggtcggggtgcctattgccctggagccgttgcatcccatgaccaccgccgatcgctcctgtctgtgtacgctgcgccaggcgctggactggtgcgatgaactcgaccccgacggtgaatatggcctcggcgtcgcggtggatgtctaccacgtctggtgggaccccgaccttgccagtcagatccagcgggcgggtaaacggatcctggcgtttcacgtttccgactggctggtaccgaccaccgatctggtcaatgaccgcggtatgccgggcgatggcgtgattaatatcccttcgattcgtcgtctggtggaaagtgccggttttcatggcgccgtggaattagaaatattctcgccgcacaactggtggcaaaaagacattactagcaccctggatattagcgtcgatcgcatcgcgcattattgctaa

SEQ ID NO: 224390 - DNA, 792 bp, Klebsiella pneumoniae
atgaaatcgaataatccagttgccgttatcaccggtgcggctcgcggtattggcaaaggttgcgcgcttgagctggcccgcggcgggttcaatctgctgatcaacgaccgccccgatgcggaaagtgtgcaaaaactcaaggcgacccagcaggaatgcattgccgaaggcgtagaagtgatctgtttccctgccgatatcggcgacctatccctgcatgaagagatgctcgatgcagcgcaaaatcagtggggacgtctggattgcctgctcaataacgccgggatctcggtgaaaaagcgcggtgatattctggatctgcagccggacagttttgatgaaaatattaccatcaacacccgtgcgcccttcttcctcgcgcagtcgttcagcaaacgcctgctggcgcagcctaaaccggaacacgaattaccgcatcgctcgattatttttgtcagctccatcaacgccatcatgctggcgatgaaccgcggggaatacaccattgccaaaaccgcggtgtccgcggccgcccgcctgttcgccgcccgtctgtgcgaagagcagatcggcgtatatgaaatccgtccaggtcttatcaaaacagaaatgacgatcccggccaccgcctactatgacgaactgatcgccaaagggctggtgccgtggggacgctggggcttcccggcggatattgcctctaccgtgcgcgccatggcggaaggcaagctgatctacacctgcggccaggcggttgccatcgacggcggcctgagcatgccgcgcttctga

SEQ ID NO: 224391 - DNA, 639 bp, Klebsiella pneumoniae
atgtatattgataccagcaacgcgcaaagtctgaaggaaaaactccttctcagcgcggtgaatgaattcgcagaatatggctatgaaggcgccagggtagataatatcgtcaaggcggcggattgcagtaaacagacggtctatcaccatttcggtaataaagagaatttatttattgaagtgctcgaatatacctggaacgatatccgccagaaagaaaaatcactggatgtttcaggattatctccagcgcaggcgattgagaagattattgattttacctgggattattatatcgataatccgtggtttttaaaaatcgtgcataatgaaaaccagagtaaaggcatccattaccagaaatcaaagcgtctgcctgaaattaaccattcgcatcttgaactgatggcctcattgctggatgaaggaaagaaattaaatattttcaaaccggatattgacccgttgcaggtgaatattaatattgctgcgcttggtgggtattatttaattaatcaacacacgctgggactggtttatcacatcagtatggtatcgccacaggcattagaagccagacgccaggtcatcaaagagacgatcctgagctggctgctaattgataagactgcgatttga

SEQ ID NO: 224392 - DNA, 675 bp, Klebsiella pneumoniae
atgcccgggcgctttgaactgacatctaccctggcgaaaatctggcacgccccggatcattttcgcctcctggacccgctgcctccgatgcaccgccggggaattatcgctggcttcctgttggttattattggtattctgcttccctccgatgatagccaaagcccggcgtccaccagccgtgaagcgaacctgaatctacagtcgcagtcccagccgcaagctggcggcaatcaggccgttccgctgccgccgatcactaatacgcctaccgtgagcgacgccgatcagatggcgccggtcgctccggagccgattcaggatgagcagccggatcaggcgcagacgcagcagcccgccgccacccagccttatcaatcctcatcacagcagtccgcgccgggtattgagcagcaatggcggacctatcgcatcgagtcaggcaaaaccctggcgcagctgttccgcgatcatgggctgccggccactgacgtctacgccatggcgcaggttgaaggcgctggcaagccgctaagtactttgcagagcggacagacggtgcagattcggcagaacgccaacggcgtggtcaccgggctcactatcgataccggcaacggccagcaggtgctgtttacccgccagtcgaacggcagctttgtccgtgcacggtag

SEQ ID NO: 224393 - DNA, 531 bp, Klebsiella pneumoniae
atgagcttactcaacgtacctgcgggcaaagatctgccggaagacatctacgtcgtgatcgaaatcccggcgaacgcagatcctatcaaatacgaagtcgacaaagagagcggtgcactgttcgttgaccgtttcatgtccacggcaatgttctatccgtgcaactacggctacatcaaccacaccctgtccctggacggcgacccggttgacgtgctggtcccgactccgtacccgctgcagccgggctccgtgatccgctgccgtccggttggcgttctgaagatgaccgacgaatctggtgaagatgcgaaactggttgccgtaccgcacaccaagctgagcaaagaatacgatcacatcaacgatgtgaacgatctgccggaactgctgaaagcccagatcactcatttctttgagcactacaaagatctggaaaaaggcaagtgggttaaagtcgacggttgggacaacgcggaagcggcgaaagccgaaatcgttgcctctttcgagcgcgctaagcagaagtaa

SEQ ID NO: 224394 - DNA, 957 bp, Klebsiella pneumoniae
atgtggaagcgcttacttcttgtcacagcagtttccgcagctatgtcgtctatggcgatagctgccccgctaaccgtaggtttttcgcaggtcggttctgaatccggctggcgtgcggcggaaaccagcgtcgcgaaagaggaggccgccaagcgcggtatcaccctgaagatcgctgatggtcagcaaaaacaggaaaaccagatcaaagcagtacgttcctttattgctcaaggggtcgacgcgatcttcattgcgccggtggtggccaccggctgggaaccggtgctgaaagaggcgaaagaggccaagatcccggttttcctcctcgaccgttccattgatgttaaagataaagatctctacatgaccaccgtgaccgccaacaacgtgctggaaggccagctgattggcgactggctggtgaaaaccgtcgacggtaagccgtgtaacgtcgttgaactgcagggcaccgttggggccagcgtggccatcgatcgtaagaaaggcttcgccgacgcgattgccaaagcgtcgaatatcaaaattatccgctcccagtccggtgacttcacccgcagtaaagggaaagaggtcatggagagctttatcaaagctgagaataacggcaaaaacatctgcatggtgttcgctcataacgacgatatggccatcggcgctatccaggccattaaagaagctggcctgaagccgggcaaagatattctgaccggctccatcgacggcgtgccggatatctataaagcgatgatcgccggagaagccaacgccagcgtcgagctgacgccaaatatggccggcccggcgttcgatgcgctggagaaatacaaaaaagacggcaccctgccggagaagctgaccattaccaaatcgacgctgtacctgccggatacggcgaaagaagagttagagaagaagaaaaatatgggctactga

SEQ ID NO: 224395 - DNA, 885 bp, Klebsiella pneumoniae
atgaaaattgcttttgatgtggatgtcattaaggacctcgggatcacccgcatggtccatcaggtagcggagtggggctacaagtacattgaacagtcgccgcacccgcagattaacccgttctacaagcacccgcgcgccagccgggagatcatggcggagtacaagcaggcgctgcgcgataccggccttgagctgtcgtcgtttatctgcgtctaccgctggtccggcccggacgaactgcgccgtcaggcggcggtgaaaaactggaaacggctggtggaaattgcggtagagatgggcgttcaggtgatcaacaccgagttctccggcgatccgaatcagcccgaaatctgcgatgaaatgttctatcgctccatggaagagctgttgccgatttttgagcgggaaggcatccgcgtggagatccaggcgcatccctgggatttctgcgaagagaacaatgaaaccgtcgatatcgtgaagtcgttccgcagcgataacgtgaagtacgtctacagcgtgccgcacacctttttctacgacaaaggcgtcggcgacgtggcgagcatgctgcgctatgccgggagcgatctctctcatgtcctgattgcggacacccgcaatcatacgaaacattgccgctatatcgttaacccgccgggcgtggatgccgtggtgcaccagcacgtaggcgtcggggaaggggatgtggatttcgacgcgctattccgcaccctgcgcgaaatgaaattcgccgagcagaccttcaaggtcggcggggagccgattgtcgccacctcgttgtttggctacccggaaaaaatgaaataccaggcagtggaaacccgtgaacttattgaacgtgaattgctgcgccggtaa

SEQ ID NO: 224396 - DNA, 1311 bp, Klebsiella pneumoniae
atgtttaaaccttttacgctagtcgcggttggcctcagccttgccctgagcggcgcggcgctggcaaaagagaaaatagacttcatgttcccggcgccggtggacggcaagctgaccatggagatgacccgcgtcattaagcaattcaacgactcgcagcaggatgtcgaagtacgcgggatcttcaccggcaactacgacacaaccaagatcaaagccgaatcggcgcagaaggccggccagccgccggcgctggtgatcatgtccgccaacttcaccaccgatctggcgctgaaggatgagatcctgccgatggatgagctgtttaaatatggcgatcaaaaggccggcgattttctgcacaaggaattctggcccgcgatgcataagaacgcccaggtgatgggcaccacctatgcgatcccgttccataactcgacgccgatcctctactacaacaagacgatgttcgatcgggccgggatcaaacagccgccgcagacctgggccgagctgctggccgatgccaaaaagctgaccgacgagagcacaggccagtgggggatcatgctgccgtcgactaacgacgactacggcggctggatcttctcggcgctggtgcgcgccaacggcgggaaatactttaacgaagactatccgggcgaggtctattacaactcgccgaccgccatcggcgctctgcgcttctggcaggatctgatctacaaggacaaggtgatgccgtccggggtcttgaactcgaagcagatcagcgccgcgttcttctccggcaagctcgggatggcgatgctcagcactggcgcgctgggctttatgcgcgagaacagcaaagactttgagcttggggtggcgatgctgccggccaaagagcagcgcgcggtgccgatcggcggcgccagcctggtgagttttaaaggcatcagcgatgcgcagaagaaagcggcgtatcagttcctgacctatctggtgagccccgacgtgaacggcgcgtggagccgcttcaccggctacttctcgccgcgcaaggcgtcatacgatacgccggagatgaaggcctatctgcagcaggatccgcgggcggcgatcgcccttgagcagctgaagtacgcccatccatggtactccacctgggagaccgtggcggtgcgtaaggcgatggagaaccagctggcggcggtggtcaatgatgccaaagtgacgccggaagcggcggtgcaggcggcgcagaaggaagccgacgcgctgatgaaaccgtatgtggataagaccgcgctggcggaagtgaagtga

SEQ ID NO: 224397 - DNA, 246 bp, Klebsiella pneumoniae
atgctcagtctgcaaaacatcagtaaacgtttcgacggcaaaccggcgctcagcgccctgtcgctggatattcacgaaggcgaattcgtggtgctggtcggcccgtcgggctgcgggaaaagcaccctgctacgcctgctcgccgggctggagccggtcagcgaaggccaaatctggctgcataatgagaacatcaccgccgccacgccgcgcgagcgcaacttcgcgatgatcttccagaactaa

SEQ ID NO: 224398 - DNA, 1470 bp, Klebsiella pneumoniae
atgaacacgcttcgtcaggactctctcgccggcatcgtcgtcttccttgtcgccctgccgctgtgcctcggcatcgcccaggccagcggcttaccgcccttcgtcggcctgctgaccggcatcatcggcggcctggtcgtcaccgccctcagcccctcccgcttcgccgtcagcggccccgccgccggactggtcaccatcgtcgtcgccgccattgaatccctgggttccttctccgtcttcctgatggcgctggtgctggccggcgtgctgcagttgctgttcggcatcctgcgcgccgggcgctttatctcgctggttcccgccagcgtcatcaaaggcatgctggcggcgatcggcatcctgctgattatgcagcagatccccgtcgcgctcggcagcgcagaagagaccgggctcgttgatatcgtgaagggtaacgccaccttctccctcagtgctatcgccgtcgccgcgggcggcctgctggtgctctggctgtggggttcgccgcttatccgccgggtgaagagcctacgctggatccccggcccgctgatcgctgtcctgctcggttgtgtcaccaccgtattaatgacccaggccgcgccgcagcagcttgccactctgccacgcatcaccctgccggcgttcggcagcctcggcgatctgctgggcgagctggaatctcccgcatggagcgcgtggcgcaatccgtcggtgtgggtggtggcggtaaccctggcgctggtcgccagcctcgaaaccttgctcagccaggaggcgctgaaaaagctgcgtccgcaaaatccgccgccttcgccgaaccgcgaaatggtcgcccagggcgtcggcaatctgctctccggcgtgttgggggcgatgccgatcaccgcggtgatcgtccgcagctcggtgaacgtcagcaatggcgcgcagagcaagctgtcgatctttatccacggcgtcctgctgttaatctgcggcctgtggttcagcggcctgctgaccttaatcccgctcgccagcctcgccgccgtgctgctgtataccggctataagctggcgacgccgcggctgttcatcgagcagttccgccagggtgcggcgcagtacgtcccgttcctcgccaccatcggcgggattatcgccttcggcatgctggcggggatcgggattggccttgccacgcagatggcgttcagcctctggcgcagccatcgccactcgctgcagctggcgcgctacgatgaccactacgtgctgcgcatccagcagaatctgacctttatgcacaatccgcatctgctggccctgctggcgaaaattccggaaaagagcgtggtgatcgtcgagcacgacagcgtcggctacctcgacccggacgtgcgggcggtgctggatgattttgccgagaacgccccgcagcgcggcatccgccttaatcagtggccgctggccagccgctga

SEQ ID NO: 224399 - DNA, 717 bp, Klebsiella pneumoniae
atgcacgattcatttatatcatatgcaatagaagataatgattttgtatcggatttagcatttggattgaagagaaatggattaagtgtttggtttgctcctctgtctcttaaggtaggggaccgattgctcgattctatcgaaaaaggattgaatgaatcgaggacagggattttgattttgagtccatcttatctttcaaaaaactggacatcttatgaaatggatattcttattaaacaaaatattgaaggtaataaaaaaatactcccaatatggctaaatgttactaagaaagatatcgagaataagcacatcggactaagcggaatagtagggattacagatacagcggaagtttctagagtcgtatctcagttggtagaagctctgtcagatggtgcaccgtatagaggtgttattcccagttgggagaatccggaataccggtttttaagtggtgtcagtgaagtaaatcttcaaagtattgatggtaagacaactacaattttcgaactattagttcacagtaatgatgagcagtttcctttttggttagctggtaagtcttattcaaaggaggagcttttattgcgcgttgctgaagttataggagcagatcctgctagagtaaaaaaatgggttggagatgatggctatcagcagctctgggatatgtgcattgaatatggttatgatccaaagatgttttgctaa

SEQ ID NO: 224400 - DNA, 2160 bp, Klebsiella pneumoniae
atggataatgaaattaatagagataatgaagaaggtcgtcgcattgaattttcctcacatgatgagtatattttttctcattgccaaaacataaataatctaattaacaaaaggaagtatgacgaggcgagaaataatttaattctacttttagatttccataaaaacaacagtcttcattataatgctcttgtaaatcatcttatcagagcgttagggttatatccttatattcagacagacactgctgattggcatgaccggttaatttatgatctgttcaaagttgatgtaggattaacaaatcctatcacactacatcgagaacaatcattaattttgaagagattattaagcggtgaagacttagctataagtgcccctacaagcttcggaaaaagctttatcattgatgcttttatagcattaaaaaaacccaacaatgtattaataattgtaccaacgatatcactcacagatgaaactcggagaaggttacatagaaaattctcttcagaatataaaattataactacagcagatgtggaactttcagaaaaaaatatttttattttccctcaagagagagccattagttatttggagaaaatccaaagcttagaccttttcattattgatgaattctataaggcaagtgaaaaacatgataaagatagagcaccagccttgatcaaagcaatgatgaaattcactaagttagcaaagcagagatactacctagcaccaaatattagtgagatcataaacaatccgttcacaaaaggcatggagtttgtcaaaatagattttaacactgtctttttagaaaaacatgatctttcagaagttatcagagaagatgaagacgaaaaatgtgcagcactgttagatattttatcgaagactcaagggaaaacattaatatatgctgggacatataaaaacattgaaaaaatttcaaaccttatattaaagacacaacctaataaccaatcatatatattaaaggaattttcaagctggttaaaacaaaactatgactcgaactggaagttagccaaattacttgaaaaaggaatgggtgtacataatggtagattacaccgctccatcagccagttacagataaagttatttgaagaaaaacatggaattaaaaatattgtttcaacttcttctataattgagggtgtaaatacatctgccgagaacgttgtaatttggcaatgtaaaaatggtaatagcaacctcaaagatttcgcatacaaaaatattatcggcagaagcggtaggatgttcaaacattttattggcaaagtatatttattatcagcacctccaaaagaagagaataatgagctagctttaaccattcctgaatctcttgttggtgaaattgacgaaattgaatataataacatcctaacacccgagcaaatctcagcaatcataagatataaagaagaaatgtactccatattagggcatgagacattcaacaaattattaaaagaaggagcgtttaaatcaaatgattattttttaattagagatattgcctttgatatagtgcaaaaaccgaaggaatgggaaaacataatatatttaaattcaaacaccccagatgaatgggaacacttcctatacaaaataattaacttacagcctgctggatggggcggaaagcattctagatttgtttcttacatcaagattgcgagtttaaactggaagctttcaatcccacaaatattagaaaaactttctaaactaggtatcactattgatgatttttttgagcttgaaaaaacgttaacatttaagttaacctctcttttaaatgacgttaacgttttattaaatgaattaatgccttataaaaacacagatatttcaccatttatttttaaaacctccaatgcattcctcccatcagttgtttatcaattagaagaatacggcctccctcgaatgctcacaaaaaaaatatcgactgcctttaatctaaacttcgagagtgaatcattaactctgcatgaaaccattgattacttaaaggtaattgacgatattattgacttatcagtcgcaatcgatgccagtcttatggaggagtatattttggataacttctttgaaggtgtaacgtataataaataa

SEQ ID NO: 224401 - DNA, 918 bp, Klebsiella pneumoniae
atggagtttgatattcttattgatcaaagcctttcttctttcgtaactgaaagtggaaccagtaaaataacaaacaataatcttctttctattattaatgattttgaagatggatgttggcgctatcaaaagtttcaccgttttatatgggataacattttacaaacggctctttctaataaagagagagaagctctaataggtggtcctgggacatcacttgctcttgcatcaaaaaaccttagacttacggatagcgaaaaagacataagtaaaggaagtgaactcgcagaaattttcttatatggcataatgcgtcatcactttaaagcgctaccagttgtacctaaaatattctataagcaaaacagtcaagacaacgcaaaaggtgctgacagtgtgcatgttgttattattgacaatgataatttttcgttatggtttggagaagctaaattctataatagcattgaagatggacgtttcgatacgataatcacatctgtgaaaaattcaattacaactgaaaaattaagaaaagaaaatagcataatattaaatacacaagacctctatgatctagtgcaagacaatgcattaaaactcaaaattgcaaaagttttatcttctgataattcaatggacaatataaaaccattaattaacatacctattttcattttacatgagtgtcctataacagaaaattctaactgcttgtctgatgagtacaaatcttccattattaaattacataaagaacgctctgaagctttttttaaaaagcatcatgagaaaataaaaaacatttatggttatgaaaaaattaaatttcatttaatactattcccagtacctaagaaggacgtaataatagataagtttttaaatagcgtcagattttataaggaacaataa

SEQ ID NO: 224402 - DNA, 324 bp, Klebsiella pneumoniae
atggcgtttcggctggcgttcgagcttgccgaagcgctggagatcggcaaactggtaattgaggataaatcgcccttgggttccggctttcgcattatcgacgagcctatgtacagcgcccattcgggcaggcagcttctttccctcttttcttacgacagcgccgcgctggcggcatccgcattctctatgctggtcgtgggaacgcctgaagtgggtggcgaacctctgctgggcgatatcgcggtcgtgaaatatttccgcctgatacggatcctgcgccgcttacgtgaattacagcgactgaccgggggaggtgaataa

SEQ ID NO: 224403 - DNA, 1116 bp, Klebsiella pneumoniae
atgtcagacttaccaaagaatatccaagttatatttgataacaacccaatgctcaaggaactaatcccgaatccagttttggcctcaggatcatcttttatcgttgcttttaatgataaactagcactgagcacaaaaaactctgaaaaagacgatatttataaagttgtctttaagaaagattcatctcgagatttaatggccattaatagtggcgaattaaagggattgctcactactacttgtatagagaaaggtaaaattagtgatgtggcaggtttagaaaaaatagaaatagataatgaaaatgaacttatgcccacattgttaggcataagtctttatagttctattcaagccagtctatcctatatatctcaactctttactgatataagaaaccaccaaattatcgaggaacaagccagatttgaaagaatttctgaaacaatagtagatagttttagaagcatacctgatatttcattagatcgttcgatgagggatgtttatttaacgcgaatcgttaaaaacaatgacgattgttttgaactgtatgcttcacaaagaatacaattcgcaaagcttttgcaatcagagccagaatactattctaccggttacaaccattattacaatagcaacaacggccaacgattttatcctgatcgtttttttataaataacgtattaacacatcctgtattcgcagtctttgaacgattagtcgctggcagaatttgtgaaattgttattagcggtaacttttccgatagcaatattcaaagacacaaagatttcatatatagaatccaaaccaagctagaagaacttatgaaataccggttatgtgctttcgaacgcttcactatggaacaaaaaaacatcatcgatgaagatttaaatttaactggccatgaccgaaaagaattagaaaaaaacctagccgaacacattaatttcgttaaagaaattaatgagaaaatattttcactattaaaagacaagcttgatggatttaacgtactaacacaccttatggatcaagatgagataactatatatatccttgatggaaaattattaataaataacttcaagtcaaccccaaattaa

SEQ ID NO: 224404 - DNA, 2088 bp, Klebsiella pneumoniae
atgaatactgccccaaaagagctccgcaaacgattgaaagaagccttcgaaaagtttgacctgcccacggcgctcgcagccctggaggaaatggaaactgaagaggtcgctgacgttctcattgagaagatggctcaacctggtgcataccagattcgtggcaatcgttccaaacggaacaagttctacgacacgcttttgaactcatcagccatgttggataagcacgattcgatatgcccatgtgccaatgaaataaaccgaaatatcattaggatagagggctgttttgatgatattcgggattcattgccgaaatgcgacatctcccaatatcctgtagacatccaattctggagtcagattgagcgcacgtcgtgcgagttggctgagatcgatagcgccagcgataaggaatgggggaagattgaagagaagcttaaggcgcgcattccgaccgcgatgcctgaagcgttgatgacgcagcttgaacatggtggaatcgtgaatgtcgacgcggtttatagtggcctagtaggggcgcttagcttgacattgaagatgctctcttttgagaaaaagctgcttcatgatggcaagctggtcgctcccacaatgcctgcgattaccgaagatcatatctataaggctggttcaatccagctttatgcgttgtcgtggaacgctcttgaggatgccgccaaccgaaccctatttttcggtgggaaaataggaaatgcgcaggatgcgaagatatctattgatcatttctcggtggaagaacaagtcaaattcccggaccccatctttttctaccgtaagccgaccgatatcgaagcttacgactttatggccaaccgcaggctgcacacctggggggtgcagaatacgttgctgatggcgaatatgacagcgttacgcaaaaccgtaatgaaggaaggtgcagcagtacctgagcttactgcaggctttgtctctgaggacgagggtattacgctgatgaagctatcagagattcttgcctatgatgttttcaaggaccaggagcgcttccacggactgaccctacgggagtgggtgcgaggatactgtgtgctaggactgatgggcacggcgaagcaagacgactcctgcctggtcacattcgaaaaaagtgaaattgagcaagggtttcgcgattacaagcttccagaagaatgcatcccaaccattatccatcatctgaccttcggccaggatagtcgcgacctatatgactcgccgttgatttactcggaagatggcaagtacacctttttcgccaacgttcttaaaacctgcaacttaaccaacgtgctgttctctaggttgagctctctcacgacccagatcgataagaagggcaaagggtttgaggaccgagttgtgtctagcttcgtcaagtggggatatccatgcaaatctaagaagttctatattgacgatgccgagtacgaatacgacgccttggtactgattgatgacaccctactgctcatagagtgcaagaacaacctgttgtcaggtaacaatacagtccaggcgtttcgctatgctaagtcgatttgcgataacgtcggacaaatcaaacgtcttgtgcgcggcctgagagaacgtcctgatgttgttgaatcgctgttcggtagaaagcttgatgacttaacccttgtgcccattatgctaaactccatgacttactcaagggagcctgtggagggcatctacatttcggactggtcggcgttaagcaagttcttcaccgaaagcaccatctctcgcttcggtttgcagaatggaaagaagataaataagcagactattcatacactctggaaaggcaagagacccactgcgaaagagttgcttgattatttgacgatgcccatccagttgaagatgatgcgaaagcacctgcgcttcacttatttccctcgtccgatgtccgagagcgcaatcttctttgcacaagagctgagtgtcgatgaagagaatatgctcaaggcccgagagggcccctttgccaagaaggctggcaagaagaaaaccaaggcgcgccgtaagaagcgctga

SEQ ID NO: 224405 - DNA, 195 bp, Klebsiella pneumoniae
atggctgggattgaagaggctacggcatattcacgtttatcccattatgaaagcggaacgcacaaaccttcgtttgagctggtttgtagttttgcaaaagtgctggatgtgccggagtgctatttttatactattgacgataagtttgctgaagcggtgctggccctttatcagagttttaaatctgaatcgtag

SEQ ID NO: 224406 - DNA, 219 bp, Klebsiella pneumoniae
atgttttctgccggaagtaaaaacttaatttgtcccgatagcgttggctcctttaaaagggatattaatggaacaaactatgatttaatcacttcctctgataatgaagataatgcaaaaaaactaaaagatatgactaagatctgcgtcgttcttcacagtgacaatgcacaacaatgggatacttttttcgagaataacgatcaaaacaaaggatag

SEQ ID NO: 224407 - DNA, 789 bp, Klebsiella pneumoniae
atggcgaacgatcaggaagtgaagtacctggtaccgggtctggagcgcggtttacaactgctgctggcgtttggcgaacagcatcgcgatctgacttttgccgagctgcatcggctggtggatatgccgaaagcgaccgcctatcgcgtggtgcagacgctggaatatatgggctttctcgagcgcaacgcccgcaccaataccttttcgctgggcatgaacgtactgcgtctgggctttgaatatatcgcctcactggatgtcgctcaggtgggtcagccggtcatcgagcaactgcgcgatatcagccagtgcagcagccatctggcgatccgcgacggccgcgacattatctacatcgcccgcgtcagcgccgccggttcgcgtatcaaccaggtcagcgtcggaacgcggctaccggtgcactgcacctcgcttggccgcatgctgctgaccgatgtttcccgcagcgagtttgaacaattgttcccgaatgaacgtctgccgggcaatacgccgggccagctgtacgaccgcgaagcgctgtggcagatggtgcagcaggataaagcccgcggctacgtgattggcgaatcgttctatcgccacggcatctcatcgattgtctatccggtctttaaccgcagcggccgggtggcggcggtcgtcagcattctggtgccgtcggacgagatcccgcaaagcgatcgcgaacggttgcagaacgacgtcagtatggcggcggacaaaatttccggcttcctcggatatttgtcacaggcaagttaa

SEQ ID NO: 224408 - DNA, 1197 bp, Klebsiella pneumoniae
atgacggcgcggatagtcattatcggcggcggccaggctggcggctgggcggcgaaaacgctgcgtgatgaagggtttagcggcgagatttgcgtggttgccgaagagcaatgggatttttacgagcgcccgccgctgtcgaaagcggcattgctggaggccgaaccggcgctgccgcggttattcagcgccgaggtgcagcaggcactggatctgcgctggtaccgcccgctgcgcgcgaaatcgatcgaccggcaaaataaaaccctggcgctgagcaacggcgaaacgctggcgtacgacctactgctgatcgccaccggcggccgcgcgcggctgccgtccgaggcctgggggcagcatcctcaggtatataccctgcgccactggcaggacgcgcagcgtctgaagcagcggttggcatcggcaacgcggctggcgatcgtcggcggcggctggattggcctcgaaatcgccgcctcggcgcgcaaaagcggcgtagccgtgaccctttatgaacagcagccggcgctgtgcatgcgctcggtcagtatggaggtctcgcaggcgctggatgagttgcatcgcgggcagggcgttgatattcgccgcggctgcggcgcgctggagctggaagatgataacggcttgccgacgctgcactgcgacggccagcgggaaaccttcgatgcggtagtggtggggatcggcgtcgatctgaatctcgaactggcgcgcgatgccgggctcactgtcgatcgcgggattgtcgttaatgcccaagggcgcagtaacgatccggcgattttcgccgctggcgatgtcgcccagcaccatcagtacggtctgtgcattcagtcgtgggcctttgcgcaaaatcaggccagcgcgacagcgaaagcgatgctcgatccacaggccagcggctacgacgaggcgccgtggctgtggtcagatcaatacgatcgcaatatccagatcctcgggatcccgcaagcgggcagccggaccattgtgcgtgacgagccgcagggcgcgatctacttctccctgaatgccgatggacgcttaactcagctggtggccttcaataatgcacgtatcgtgaagctggcgaagcgctggatggcggcgggaagggatctctctaacgtcccgctcgctgacccgactttctcgctgatgtcattgcgataa

SEQ ID NO: 224409 - DNA, 537 bp, Klebsiella pneumoniae
atgatctgcatcttcaacatcgcctttctcgcctatctgtgggggatcaacggctggctgccgggctacctgattaaaggcaaaggcattcatctggaacacgccggctggctgtcgtcgatgccatttatcgccatgttgctaggcgaaattatcggcgcctggctgtccgaccgcgtcgataggcgcgccgccgcctgctttatttccctggcaggcgcgggtattggcctggcggcagtgatgcatttcaccacgccgctgccggtaatcgcggcgatgagctttagcacctttatgtggggcaccggcgcgccaaacattttcgcgctgctggctaaagcgacccatccacgggtcagcgccacggcgggtggaattttcaacgggctgggaaactttgccggggcgctatcgccggcggtgatgggcgcgcttatcgccttcacccatagcatggattccgggctgatttttctggcggtgatggcggcggtgggctgcgccctgttactgccgctgctgagacgttactga

SEQ ID NO: 224410 - DNA, 795 bp, Klebsiella pneumoniae
atgaatgcacaaattgaaggacgcgtcgcggtagtcaccggcggttcgtcaggaatcggctttgaaacgctgcgcctgctgctgggcgaaggggcgaaagtcgccttttgtggccgcaacccggatcggctggctagcgcccatgcggcgttgcaaaacgaatatccagaaggtgaggtgttctcctggcgctgtgacgtactgaacgaagctgaagttgaggcgttcgccgccgcggtcgccgcgcgtttcggcggcgtcgatatgctgattaataacgccggccagggctatgtcgcccacttcgccgatacgccacgtgaggcctggctgcacgaagccgaactgaaactgttcggcgtgattaacccggtaaaggcctttcagtccctgctagaggcgtcggatatcgcctcgattacctgtgtgaactcgctgctggcgttacagccggaagagcacatgatcgccacctctgccgcccgcgccgcgctgctcaatatgacgctgactctgtcgaaagagctggtggataaaggtattcgtgtgaattccattctgctggggatggtggagtccgggcagtggcagcgccgttttgagagccgaagcgataagagccagagttggcagcagtggaccgccgatatcgcccgtaagcgggggatcccgatggcgcgtctcggtaagccgcaggagccagcgcaagcgctgctattcctcgcttcgccgctggcctcctttaccaccggcgcggcgctggacgtttccggcggtttctgtcgccatctgtaa

SEQ ID NO: 224411 - DNA, 765 bp, Klebsiella pneumoniae
atgaaaaaggtcatgttaattggctatggcgcgatggcccaggcggtgattgaacgcctgccgccgcaggtgagggtggagtggatcgtggcgcgcgaatcgcatcacgcagcgatctgcctgcagtttggtcaagcggtgacgccgcttaccgatccgctgcaatgcggtgggacgccggatctggtgctggaatgcgccagtcagcaggcggtcgcgcaatacggcgaagcggtactggcgcgcggctggcatctggcggtgatctcgaccggtgcgttggcggacagcgaactggaacagcgtttacgtcaggcgggcggcaagttgacgctgctggctggcgcagtagccgggattgacggcctggcggcggccaaagagggggggcttgaacgagtgacctatcagtcgcgtaaaagcccggccagctggcgcggcagctatgccgaacagcttatcgacctcagcgcggtcaatgaagcgcaaattttcttcgaaggcagcgcccgcgaggcggcgcggctattcccggcaaatgccaacgtggcggcaaccatcgcgctgggcggtatcggccttgacgcgacccgagtacagctgatggtcgatccggcgacgcaacgcaacacccatacgctacacgccgaaggattgttcggcgagtttcacctggagctgagcggcctgccgctcgccagcaatccgaaaacatcgaccctcgcggcactgagcgcggtacgcgcctgccgtgaactggcataa

SEQ ID NO: 224412 - DNA, 444 bp, Klebsiella pneumoniae
atgatcgataacatcacgctggataatctgcatattggctgcaaagccagtaataaagcggaagtcatcgccatgatcggcgcggagtttaaagccaaaggctatgtcaatcaggaatgtgtccactttctgctggagcgtgaacatcaggtctcgacctttttaggcaatggcatcaccctgccgcatttgccgaaatccgcgacggatatcatccttaaaaccgggattgagatctatcagtttcctgatggcgtaatctgggatcggagcaatgtaatgtttattgccatcggcgtgatcgcgaaagagaaagagcatattgacgtactcaaggaaattgcctcgatatttagcgatgagctgatcgctaatgcactgtcattaatctctgacaaacatgatttcctgaaaattctgcagcataacgccttgccccattaa

SEQ ID NO: 224413 - DNA, 369 bp, Klebsiella pneumoniae
atgagcgaattttcacgagaaacactactcaacattatcgagactgaccatgtgcaatgcggtgatgcttcggcattggcccgcatggcgctggccgcaatggacagcgagccggtggcgtacatcagcaaatcagactttgatgccggttatccgcatatcctggcaagaagagatttcaataaggcttgcaccatggctgtatatgccgcgcagccagcgcaggtagtgccggaggaaaaacaaattccaaatacactgagcatgtacgccgtggatgcagtagcagccatcgctgaggtgaagggctggaacgcctgccgcgcagccatgctcgcagccgccccgcaggaggtgaaaggtgaatag

SEQ ID NO: 224414 - DNA, 177 bp, Klebsiella pneumoniae
atgttcaaaatcgaaagttccgaacaacgcctcaagagggttctcacagaaaacgccggtaaattcaccatcgacgaagacggcggaatccataccaactggcagcatcccgaagtacaggcaactatgcgcaggcactttgaggcgctcagcaaaattaaggtggaccggaaatga

SEQ ID NO: 224415 - DNA, 483 bp, Klebsiella pneumoniae
atgacaactaatatcaccgaactggcgcagagcctgaaacgtcgagctgcttcagcaaatgagtttggcgaaggcctgtttttcataaaagccgaccacgtcctcgcgctggtagaggcgctggcatcagagaaaaggatttgcgcaacgtggagaaaaacagctaagtcgaccggtgaaaagctggagaaggcgcaggccatcaacgcagcagcagaaaagctggtccgctgcaaaggtcgctatcacagtgagcagaactatcgcgcactggcggcgctgtttggcgtgacaaccccagacctgccgccgctggatagcgagtcaagcgccgtcaccgtgaagctgaccgacatcaatgagtacttggcagaggttaacgataaaacgctaaatcgggcattccggctactggctgaaggtgtgcgtgctggtgatgtcgccgctatgcgcgccgctggcatcaaggtggaggatgagtga

SEQ ID NO: 224416 - DNA, 207 bp, Klebsiella pneumoniae
atgagcaaccgcatccctgactttggctggaaccgcctgaagctggcaacgctcacctatgagcaactggcggagcttgaggagcaggttaaggccgagcatgcctgtaaaaacggtatccacctcttcgacaaagccggtcagcgcaaactcgatgcccttagctgggctgtatacaacaagcagaaggcggagcgtgccgcatga

SEQ ID NO: 224417 - DNA, 261 bp, Klebsiella pneumoniae
atgagcatcgccacttatctcaataccggtttagccattctggggtgggcatacatcatggttaaaacaggccagtggattaccaaaaatgctctgaggcagtgggacaagcgccgtaaggaatctcgccgtcagaaagcagtgaatgagttttatgacgcctttgagcttaacagcctggaacccggctctaccgttcgcctggccactaaaggcgacctgacaatcatgatgttccgcagcgagggggccgacaaatga

SEQ ID NO: 224418 - DNA, 540 bp, Klebsiella pneumoniae
atgaacaacaacggattaactctcaaccaactggcagaacgtaatgccgcattggtcactgatgtcgagaaattacgtgccgagcgtgaccaactggctgcggagaatacctatcttctcaacggcgcagcccgtgaacttaacacttcatggatgttccacaaaacgatgcttggcgcacaggcggccctggtatgtcttgctcatggatatcaggctgcagctcgcgaatggctggaaggcaccaccgacgaagctggggctgtaatccctgatgatatttccgttggtgaactgcctgaatggttcgacagccagatggtcagcaatgacgggaaaagcgaattcctgacccgggcagaagccgaagaggctatcaagaaggcatgccccgccaccgatcgcatcgtagccgaagccgaggcgcgcggagttgaaaaaggtatcgcccacctggagaagaagttcagcaatatcggagttcagattatgaatctgcaatggctggcagactcgctgcgcgaaggggacggaaaatga

SEQ ID NO: 224419 - DNA, 720 bp, Klebsiella pneumoniae
atgatgatgaaaaagaaaccattgaccgcagaacagttggctgatgccgcaaggctgaaggcaatatttgaagccaagaaaaaaacactcgggctttcccaggaaaccctggccgagcagatgggtatgggtcaaagtggggtggcgcagctactaaatggagcaaatgcgatcaacgcaacgcacgcggcacagtttgcgaagatacttggtgtaaaggttgatgactttagtccaacgctggcagctgaaattgccgccatgtttgaagctattgccaatgggagaagccattctgcagtttttgaatacccgctattaactgaagttcaggctggttcattctctgccgtaaactgctacatggcaaaagacgcaaaagactgggtatcaaccaccgtaaaagccagctcctcctcattttggctggaagtatctggacattccatgactgctccaccaggagtgaagccaagtttccctgagggtatgttgattttggtcgatcctgaacaggatgttgaggctggtgatttctgcgttgccggtatttataacgactcagaagtaacttttaaacgcttcatatgggaagatggaaaaccctggcttgagccgttaaaccctaatcctagatatcaagctattgaatgcagtgagcattgtcggataatcggtaaggtcgttaaggcccaatggcctgaagaaattttttcctaa

SEQ ID NO: 224420 - DNA, 219 bp, Klebsiella pneumoniae
atgaagaccattccactcaaggattatgtgcttgctaatggccaggcaaaaactgcggaagctttgggggtttatcaaagcgccatcagtaaagccataaagcaaaaacgccgggtcaatgtcctgattctggaggacgggaaaattgaagctgaagaagttcgtccttttccaagcaaaagcaggccagaagatccgggggctgtagttgaaggctaa

SEQ ID NO: 224421 - DNA, 471 bp, Klebsiella pneumoniae
gtgacaaaaaaaattgaatcagaggtgataaagcggttgcaagcgctcagccctgaaacggtaaggctggatgaaatgaatcgagtagtgactctgatcgggtggaccttatcagaaaaacttccagacacctatagcgatgagaacaaaggcaaggatatcgaacacgactccgattcgcttgggatttctcgggtaaccagaaatggttgctgtaacccgaccgaggccgtcgtactggagcatttcctggtaggggtggttaatccactcaccaatgccccaaaaaaagacgccaagggaaaccagtgctgtagggccagaaggataggcagaaagaactccagtaccgttcagcagaaaaacgaatgcaccagcgacaatcaaaactttgtaccagtagtccagagtcaatttagacaaagggttattcatttaatgcaccggctgttccgtgggataagaaagtga

SEQ ID NO: 224422 - DNA, 969 bp, Klebsiella pneumoniae
atgagcactaaattaacaggatacgtctgggacgcttgcgcatcttcggggatgaaactatccagcgtggcaatcatggcgcgcctggctgacttcagcaacgatgagggtgtttgctggccttctattgcgaccatatcccgtcagattggcgctggtgagagtactgtcagaacggcgattactgcgcttgagaaagagggatggctcactcgtacgcaacgccgcaacggcaaccgtaatgcatcgaacgtctaccagctcaacgtttccaaactacagaaagcggcattttctcacctgtcagtttctgacacgtcaaaatctgacacatcaaaatctgaaccgtcaaaatctgatgcgtcaaaaattgacccctcaaaatttgaggcgtcggaatccaccaaaaaaaccagttttgacccgtcagaatctgggggggatccgtcagtaaaatcaactactgatccatcagatataaatccttcttgtccggacgcttcgcaaccggacgaacagggctctgcagatgaatttctgtcacgacatcctgacgcggtggtgtacagcgctgcaaagcggcagtggggaagtcaggacgatttaacctgcgccgagttcatttgggggaaaattatcagcatgtacgaactggccgctgaaagtgatggtgaggtagttcggcctaaagaaccaaactggaccgcatgggcgaatgaggtgcgcctgatggtgatgcaggacgggcgaacccataaacaaatttgctcacttttcaaacgcgccaacaaagattcgttctggtgcaaaaacgtgcttagcccgtcgaaacttagggaaaaatgggatgagctgtcgttaaaactttctgctccactcaatagctcccgccaggagtcgtccatttcgcgagccagcttcgacggggttgattactcattgccagaaaactcggggttccgcacatga

SEQ ID NO: 224423 - DNA, 579 bp, Klebsiella pneumoniae
atgattaacccgtccgaggttggaaaagctggtgaaatggtcaggctgaaaacgctggaggccatctggattcaagggaagctgcgcatgtggggccgctggtcttacatcggcggcggtagtggcggcaatatgtttaaccagttactggcttccgggaaagtcactaaaacagccatcaacgaagcattacgccggatgaagaagtctggcatctcgaagccagagcttgaggcgttttttcgtgaaatactcgcggggaaaaacaaaagcggcctggccttctgtacagacgatgaaggactgctgattgataaggtactgggggcagtccttattacaggtggtcacaaagagctgtatcacctgctggtggagcattaccggttacggaagagcaaacgccgcatagcggaagagctctatgaaaagcatcccgactggtgctttatgacctgtagacgcagagttgatacgtggcttagtttggcagaatcgatgctgtacgcaccaatgtgtgacgcattcggcacaaatggcgacagattttacttgcaaagtgagccagaaactgcttga

SEQ ID NO: 224424 - DNA, 240 bp, Klebsiella pneumoniae
atgccgcgaaactcagatatcgaaatagcctggcgtcaggcaattgtcattgagcctaatggccgccgcaccgtgacaacgtccggttttatccgggaactcgcaaaagttaactggcaccggtcgccacgccaggctaaccagtggatagagcactatgtgacgacattccgggatgtctcaacgcaggaaggcgatgatcgcacgttccagttatacaacccaaacggagggctataa

SEQ ID NO: 224425 - DNA, 1263 bp, Klebsiella pneumoniae
atgccacactcgctttacgccaccgatactgacctgaccgcggacaacctgctgcgcctgccggcggaatttggctgcccggtctgggtctatgatgcgcagattattcgccgccagatagcccagctcagccagttcgacgtggtgcgttttgcgcaaaaagcctgctctaacattcatattctgcgtctgatgcgtgagcagggggtgaaggtggactcggtgtcgctgggggagatcgagcgggcgctggcggcaggctacgatccgcagcagaatcccgaggatatcgtcttcaccgccgatctgatcgacgacgccaccctcgatcgggtgaaggcgttacagatcccggtgaacgccggctcgatcgacatgctgagccagctgggcgaggtgtcgccgggccatcgcgtctggctgcgcgtcaacccgggctttggccacggccacagccagaaaaccaataccggcggtgagaatagcaagcatggcatctggtacagccacctgccggcggcgctggaagtgatgcgtcgctatcagctgcagctggtcgggatccatatgcatatcggctctggcgttgactatggtcacctggagcaggtgtgcggcgcgatggtgcgccaggtcgtcgactttggccaggatctgcaggccatctccgccggcggcggtctgtcgattccttaccgcgaaggtgaagaggccatcgacaccgcccactattatggcctgtggaaccgcgcccgggagcagatcgcggcccatctggggcacccggtgaaactggagattgagccaggacgcttcctggtggccgagtccggcgtgctggtgtcgcaggtgcgcagcgtgaaagagatgggcagccgccacttcgtgctgattgacgccggctttaacgacttgatgcgcccggcaatgtacggtagctatcaccatatcaccgctctggcgggggatggccgggatctcagcgccgcgccgcaggtcgaaaccgtggtggccgggccgctgtgcgaatccggggatgtctttacccagcaggaggggggcaaagtcgagacccgcctgctgccggcggtggcgcctggggattatctggtgctccatgacaccggcgcctacggggcttcgatgtcgtccaactataacagccgtccgctgctgccggaggtgctgtttgatggcggtaaggcgcggctgatccgccgtcgccagaccatccaggagctgctggccttagagcttatttaa

SEQ ID NO: 224426 - DNA, 177 bp, Klebsiella pneumoniae
atgaatgaaaacaagctgctgggattggcatggatatcgccctatatcatcgggctgatcgtctttaccgcttttccctttgtttcatctttctttctcagttttaccgagtacgacttgatgagcccgccggtatttaacggcatcgaaaactatcgctatggaaggtgcgaataa

SEQ ID NO: 224427 - DNA, 2634 bp, Klebsiella pneumoniae
atgtcacatttaaaatatggagcagaccaaataggctctccgttctctcgactcaatttaatgtcagtatttagcctggcaccgcttccggttgcactttggattgctatttactcagtctcgacacacgctgaactgtattttaacccgcgatttttgtctgacgatcctgctgccgtagctgacctttctagttttgagaaagggcaagaagtaccaccaggaacatatcgtgtagacatttatctcaacgaaggatatatgacaaccaaagacgtatccttcagcgcagctgccgacgggtatggtcttattccgtgccttacgcggggagaattatcggatatgggtgttaatgcctcatcggttgatgggattaatgctctcgagtctgatgcctgtgtgtcgctcagtgagatgataaaagactccacaaccaatttcgatgttggtaagcagcgattaaatctgacggtgccccaatcatttatggctagtagtgctcgtggttatattccgcccgaattgtgggattcagggattaatgctggaattctaaactataacttcactggtaatactaatgacaataaattttctggcagtagcaactatgcctatttaaacttgcaaagtgggattaacctgggagcatggcgattgcgcgacaatactacctggagctacagcagcgaaggtagttcgggttataactcaaataactggcaacatgttaacacatggttggagcgcgatatcgtttctcttcaatcaagattaacgctgggtgatagctatacagatagtgacatctttaatggtttaaattttcgaggcatccaaatatccactgacgataatatgctgcccgatagtcagaaaggatttgcacctgttatccatggtattgcacgtggtacggcacagatcattataaaacaaaatggctatgagatctatcaaggtacagtaccgcctggcccatttactattaatgatatttttgcagcagggaacggaggcgatcttcaggtgacagttaaggaggccgatggtagtaaccaggtgtttactgtaccttattcctctgtgcctattttacagcgcgaaggttatacccgttattccttaactgcaggtgaataccgaagtggtaataatcaacaaacagatcctaactttttccagggtacgtttatgcggggcttgccatacggttggacggtttatggtggcacacaattagctgagcgttaccaggcttacaatcttggggttggaaaaaatatgggagtgtttggtgcattctcgttggatgttacgcaagccgatacaaaattaccagatgataccgagcatgaaggccaatcggtacgaatgctttataataaatccctgattgaaacgggcacgaatttccagcttattggctatcgatattctactcgtggctattttgattttgccgatacaacttacaaccgcatgaagggttctacccttgatactcatgatggacttgtagatgtacagccaaaatatactgattattacaacctcgcatatagcaagcgtggaaaagtgcaggttggtgtgagtcagcaacttggctcaagtgcaacgctctatttaaatgcgagtcgtcagtcctattggggggcgaatgatgtagatgaacagcttcaggctggtataaacacgactttcggcggtgctaactggtctctgaattacagtctttctaagaatgcctggcaggatgggcgagaccaaatgttggcattgaatgtcaatgttccatttagtaattggttacgttcggacaataaatccaactggcgcaatgcttacgtaagttatagctcttcgcatgacttaaatggccgaatgacgaatatggcaggtattaacggtacattgctcgaagacaataatttgggatacagcatccagacaggatatgtaggtggaggtccaggcaacagttcagctagtggaaatgcatctcttaactaccgggggggatatggaaacgcaaacgtcggatatagtcaaaaccgcgatggtagccagctctactatggcatgagtggcggtattctggcgcatgctgatggcatcacgttgagtcagccattgaacagcacgtcggtattagtgaaagtgccgggagcaggagatgttcgcgtagagaatcagactggggttactactgactggcgtggctatgccgtgatcccgtacgcaacggaatatagagaaaaccgaattgctctgaataccaatacgctggaagacaatgttgaacttgatgagtccgttgtcagggtagtacctacgcatggtgcaattgtaagggctgatttcaaagtaaatattgggctcaaaattctgatgactctaacccgaaatggcaagcccgtaccatttggtgctgttgtcagcactgaagggagtaaggggggcagtatcgttgctgataatggccaagtatacctaagtggtatgccgcaggccggcaaattgcaagttaaatggggtgatagtgcagattcccgttgcgtagcaagttacagcttgcatgaggaaagtttaaagcaggccttagtcaacctggctgcagaatgtcgctaa

SEQ ID NO: 224428 - DNA, 525 bp, Klebsiella pneumoniae
atgcgaaaattattatatttactgggcactgtgcttattctaaatacaacccatgcttcagcagttgacagtacgatcaccatcactggtcaggtccatgacaatgcgtgtatggtgcaacaggctgggcctatttatgtcgatttacttacacatgccgcaaagcagttcaattccgtaggggattcatcaccaatggtgcccttcgatattgttctgtcgccctgcggcagttctgtaacggcagctaaagtcggttttagtggcacagcagatggcattaattcaaatctggtagctttgaacacttccagctcttctgcggcaggaatgggggttcagatcctggatggtaacaaggtagaacttccacttaatactcctttttctggaatatcctggataccgctaatgggaagccagaccaatgttcttcgattctatgcgcggataatggctacacaagttccggttaaggccggtcaagtgagtgctgatgccacgtttattcttgaattccagtaa

SEQ ID NO: 224429 - DNA, 504 bp, Klebsiella pneumoniae
gtgaactgtacaaaatcaggcagtcttttggcagcgctgttactgatggtttcaactggattacaagcagctgatgtgacaatcacagtaaacggtagagttgttgcaaaaccatgcaccgtatctgtcattaatgccaatgttgatctgggtaacctttacacatataacctcgctagtgcaggtgataagaccgtttggcatgatgtatctcttgagctcacaaactgtcctgtgggaacgtcaaaggtcacagccacgtttacaggaatttcagatagtacgggttattacgttaaccaaggatcagcaggcaatatttatcttgagctgcaggatcgaaatgcttctgcgctagggaatggtactacaaaaactattcaggttaatgattcaactcaggcggcaaccttcccgctacaagttagagccataacagttaatggaggcgcgactcaggggtctattcaggcagtgattaatgtcacttacacctgggcttga

SEQ ID NO: 224430 - DNA, 948 bp, Klebsiella pneumoniae
atgaataaatatattgctaatcgatttaataagctcttatttgtcttgctatgtataatcttttatactaaagagacttacgcatttaaatgtgttgatgctgcaaacaatgtcttatatagttcgactggtggtggagttgctgatctctacgtaaatttaacaccccagattcagcctggccaaaatcttgttgttgatatcgcatcttcaattttatgtgaaaatactagacctactacacgtgatgactatgtaaccttgatgtcgggatcaacatacgatggagcattaagaaattttaaaggtactgtccattattatggacaaacttatacatttccattgcaaaaaccgacagcagagagaaaatttgctaatgctgggcaagaaccatggcaggtaaaactatacttgacaccaatttcggttgcatcgggagttctaattaaacgaggggagaaaattgctacgttagtgctattccagcgaggagttaataaaggcactgcgaatgagaatgagcaaactgttacattcacatggaatgtaatggccaatcatgatgttacgatactaacgggtggatgcactatagctgccgataacgtaacggttaatcttcctgattaccctggcacggctaaagtgcctgtaaaaatcaattgtgctaaaaatcagaacctaaaatttttcttgagcggtacgactgctgatgctgcaagaacgatatttgttaatcaggctaatgcatcgcctgctcagggagtcggtgtgcagttaaagcgaaataacgttattataccagctaattttgatatttcactgggcacggtagccactgctaatgttgacttaggattggttgcaaattatgcaagaacaattggtcaggtaactgcaggtaacgtacaatccattatttatctcacatttgaatatgagtga

SEQ ID NO: 224431 - DNA, 501 bp, Klebsiella pneumoniae
atgcagctcaggctatcgccggttatcagaatagcagggtgtgctgtcagtatgctgatattcttttattccgttcagcgtctggtagcattaaaaaataaatcagaagggacgttgatccattgcctgtcagcgtttgatagtcaggtgaataacagccgcctgcagggcaaggtgacgctatatctgtaccggggaagaggcagccttcagattagcggggattatatatcgccggcaggcgtgcacaccccggtcaagctcgtatccggtatggcgtatctgacgacgggcgaggattatcatgtccggttcaccggaaataaaacctcctttcgtggggatgatgtcccggatgaattcagtcaccttctccccttctccatgaccagcgaaaaagtggattatgtctaccggttacgccagcagaacgacgggagttatctgatccggcagaacggtattcccctgctgctgtgcaaaaaaattccccgccggtga

SEQ ID NO: 224432 - DNA, 801 bp, Klebsiella pneumoniae
atgaatacaacttttttgatcgacggcaggctcgtctttgattgtggacagaatgctctggccagcctggtccacccggatataacggaaaatctgaacgagccatgcgcccgctgccttgaggcgttgctggcggcgcagggaaatatagtcagccaggctgagctgtataaagctggctggggtgagtcttataaggaggtctcccccaatactctgtaccagaatatccttctggcccgtaaggccttccgcaaggtcgctgacagcgatgaggattttattattaccgttcccagacaggggtttcggtttaatgaaaccctggcggtgacgatcagtaacactcaagataattgcgctccagtgccggagatattgccatctgaattacacaatgatggcggtgaaaatgtattacccagtctgatgacctctcctctgctgttacgtcttgccataccggtttcagtgctattaatactgctttcggcgatgatatttatgttctcaactttctattacgcaaacacaactcataacgatttaaccactgactataattatgtgggaaatctcgccgggtgtgatatttacatcaataaacgccagaccctgtccggcctgaacgctgaacagattcaaaataaatggccggatattttttccggctgcgacagattaccgcagagatacgtcacgccgtatcgtaatcatctcagcgtattttatctctcatgtaacaatattaataaggcagacaggatatgcagctcaggctatcgccggttatcagaatag

SEQ ID NO: 224433 - DNA, 234 bp, Klebsiella pneumoniae
atgagaaaatttggttatattctgggtgatgacatcaatggcgtgcttgtgcttaaggaaaatagggtactgataccactgaacttccataagataagtcagaaacatatctacctgcgacagacgatgttccggttactggaatttatgttggagcggggaaactcaggacttctgcgcgacgaaataataatgcgttcggtctgggaagcctacggtggctttgttgaataa

SEQ ID NO: 224434 - DNA, 372 bp, Klebsiella pneumoniae; identical to SEQ ID NO: 212322

SEQ ID NO: 224435 - DNA, 1575 bp, Klebsiella pneumoniae
atgggcattatgataaagcctaccaaagaccgaaatggcacctattacatccgtaaagcggttccacaggagctacgtccaactattggcaaaggtgaactaaagctttcccttaagacgaaagacctcggacaagccaagctcaaagcccctgccgctctggcagaaatcaactctatcatccagaacgccaaagcagagcgctccgtaacgcaggacgatacagaggtgatcgcttcggtatggatgaccagaatcctccagcagccagaaaccatcaaagcacgttatgtacggcaatacgattatggttatggcctgaccgcagataacgtgcaattaagcaaatgtctgcgtaagggagagcaggcagacgaggcagatttccagcttgtcacccaacttatgcagtctgaactcgaagaggctcttcggtggacgccagcagtactgacgcccgcatggagacaaaagctcgcatggcgtctggcggagtacaggctcagtacggcagaaatgtatattattgatgaactacctgtctacaccgccatcaacgccacgcaacaaaagaaaagcatgactttcgccagtcttttcgagcattacaaagcacatatccggctaaccgacaaggacagagctgagtcacgtatacgggattacacaccatcggctaaccgattcatcaaattcatcggtgataaacccatccgggacatctcgaagagtgacctcgcggcgttccgtacgctcctggagctgaccccggctaaccgcagtaaggccgtcaacttgctgtcgctggagaatcaggccaaagctcagggcaagaaactcagcgccaacaccgtgcgaaacaacttcatgcacctctcggccatgttcactgttgcactccaagacgatctcgtggatgaacatcccttcgatagtttcaaaatgcgtaaaaaagtgcagacgatcaatgaggatatcccgttcaccgacgacgaaatcagggtgatgttccggctaccactgttccacggggagcaatctctctatggcgaaatggcctactggatgccgataatcctttactataccggtgctcgcgttgaggaaatcggacagctacgcagggccgatatcgtggatgctttcggtgttccctgcttcaaaatccagatggggaaagagcaatcagtcaaaacggctggctccgtgcgttacgtcccgatacacagccatatactggagctgggttttatggatttcgtcaataccagagaagtccagctctttgctgagaaatctgtcgttaacgataaatacgcctacaactatggccgctggtgggggcggttgatccgtaagcacggcatccgtaaggaagttaagccctcacacagcttccgtcactatttcattacgcaatgccgtgctctggacgtccgcgaagacacgcagaacaacattctcggacatgtccccggctccgttccacggcgttatggcagctatctgattgaaacaagccgggtactcattgagaggatccccagactggagctaaagcggctggaaaactga

SEQ ID NO: 224436 - DNA, 936 bp, Klebsiella pneumoniae
atgttaagaattcctgactcagactggcggaccgtagacggggtcccccagatttctattgctttcttgcggaaagtgacgcctcaggcagccagatttacgcagtggatacagcggacacataccagattgctcagggcccccgacaacgtcctgtcgtgctgcacatcgggcctgattgatggtgacattcccgacaaaaacggctggctttctgctggtgacgcccttgccctgctgacttacagcgtccactccagccagaatgggcttctcattgatgccattgaacaaaattctggtctgatactcccggtgaggcccggtgaaagccgtcttgaggggcaatttgccgtcagattacaccatttgatcgtcgaactaaggcaacaaccacgattcataagctatgagcttgaacggcaaaagcaggtcggcccctacagagtggatttcctcctcacagagcagtggtacaccgatatggcaaaaggggaaactgctaaacgccagttcaccattgaatttgacgagaaggctcacagaacgacacgttatcagctcaatgataagcgacgggatcggtggttacggaaaaatcggcccgatataaagctaatcagggtccgacatgaagagcaggaaacctggctggaagcggtccgccagctaaagcggttcgtcagtctggaggattgctatgcccactgcctgcgaatggcctgtatcagcctttcagactccacgctaaagataggcagcgagtcagcccgaaaagcctatgatgcagcccataacgaatgcagtttcctgctaaaaagcccacggcagcctctaagtgagatgggtaaactgctggacaggctgacaatcccctttgataaacgcagggacatatacttccagcgtgcaaaattgaggtcatacggcatataa

SEQ ID NO: 224437 - DNA, 132 bp, Klebsiella pneumoniae; identical to SEQ ID NO: 96206

SEQ ID NO: 224438 - DNA, 552 bp, Klebsiella pneumoniae
atggctacagtcggctacgcccgcgtgtccaccacagggcaaagtctggatacacagctcgaagccctgtccggctgcgagaagattttcagggaaaaaatcagcggagcgaaggatgaccgtccagagctacaggcgatgctggagtttgtccgggaaggtgacaccgtccaggtcacgaaactggacagactggcccgtaacacccgccatctgttagaggtatctgaatatcttcaaagcaaaggcgtagcattaaatatcctcaatatcggtatcaatacggcaactccgaccggaaagctaatgctaaccatgattggagctatcgccacatttgaacgtgaaatgatgcttgagcgtcaggctgagggcatcgcactggcgaaacttaaaggtaagtacaaaggcaggaaggctaccgctcgcagcaaatcgcaggaagttatcgagatgctaggccaaggattgagcaaacccgaaatatcccgccagttagggatcggcatcaccagcatttacaggattgtgcgtaatcaatctgacaactaa

SEQ ID NO: 224439 - DNA, 339 bp, Klebsiella pneumoniae
atgagaaaaacaatcggcttaatcgccatactgctcgtaagcagctccaccaccgcaacagccggcaacaacgtatatgtaaagctctcatgcgaaaacaacaccactgtggacataacgctcaagcaacaggaacaagttggttgggctgacttgtctaccccaaacggaacgcggcgggctaagttcttcatgggagcagaggatgataagggggttaatagtctgacattttccagtctgggcattgcgttcaacatcgactatacagcggataaaaaattcacactcaaaatgatcagtgggggaagtggcgagtattcctgcagcgtgatgtga

SEQ ID NO: 224440 - DNA, 1071 bp, Klebsiella pneumoniae
atggttactttatctctttttaataacaaaggcggcgtgggtaaaactacacttacgtggaaccttagcgttgccttggcagccaaaggcaaatccgttctactgattgactttgatccgcagtgcaacctttcaatagccactttgggtgatgagaactttgctcggcttttagaaaaaaatgcccaagtaccttttggacagaccatacgagcattcgggcagccttacattcagcaaaatagaaaaccagaagttattatcagccatcccaaataccccatgccgcaaggctcaggacaatttgatatcgttgcaggggatttttggcttaacaacctttcagacacactcaatgttggtaccgatctgattgcaggtacaagcatctatcgtttcttgatgcctcatctgatttcacaggcagcagagcaagcaaccgacatcaattatgattatgtactgattgatttaccgccatctttcaatacattggttcgttcagccctctactgttccgattactttattgttccttgtactgcagatatgttctcagcgtattgcattggcttgattggtgaaatgttacctaagtttgcaaccgactgggatcaaggtacttcacgctatcttagtggaaacgcggcggacagtcttttaccaacaaaaggtaaaccaaagtttgccggatgggttttcaatggtttcgacatgagaaaacctcagggatctagtgtctcggctgaagttggagcggatttagcccacagaaatgtaattagtgatgctgttgaaaacaacttgatcccaagcttacgtactattggttcttataatgctgtacctgacttcgttactaaagaacctgttgcaaaggttgaagatatgaacgtcatggcacctgacagcatcatacaaagtgttcctctgaagtatcttcagactgtacgtccaacaaacttagttctcacggcaggaagatgggccaaaaaccaacgagacttgatggataaaatgattgctgaacatgacaagttagcagaccacgttatcagtaattgtgtctaa

SEQ ID NO: 224441 - DNA, 1215 bp, Klebsiella pneumoniae
atgcccctcacagaccttgaaatcaggcgctctaagccgcgtgagaagtcctatacactcaacgatggcaatgggctgtctctgctcatcgagccgaacggatctagagggtggcgttttcgctaccgtttcgatggtaagcccaagatgatttcgttgggcacgtatccggatgtaactctcaatgatgctaggcgcaaacgtgatgatgcccgtaggttggttgctggcggcataaatcccagcgatgtacgcaaagaagataagctggcgaagctgagccgcaatcaaaataccttcgaggcaattgcccgtgaatggtacgccaagcgcatagaccgatggtctgaatcctacggcgaagaaatgatgaaaaccttcgaggctgatgtatttccgtttatcgggaaacgtcctatcgccgatatcaaaccgatggagctcatgtcagttctttctaagctggatgaaagaggagcgacagaaaagttgagaaaggttaggcagcgttgcggggaggtgtggagatacgcgattgttactggtcgagctgattacaacccggcaccggatctagccagcgcgttcacccctcataagaaagagcattacgcttttctcaccagtgacgaacttcccgaattcttccgtacgctgaacacgtatagcggtagttcggttgtaaagttggcgatgcgcttgcagattcttaccggcttacgccctggcgaattacgccagggagagtggattgaaatcgattttgataaacgtctatgggaagtaccacctgcgcgcatgaaaaagcgtcgacctcactgcgttcctttatccgaccaagcgatcgccctcttggagcagttacgcctcgtcaccggcaactatcggtttattttccctggtaggattcagcacagtaaaccaatgagcgaaatggcgatgaatgtcttgatacgtcgaattggatatgcgggaagagtaaccgggcacggtttccggcacaccatgagtaccatcctgcacgaacagggctacaacaccgcgtggatagaaacgcagctggcacatgtcgacaaaaactctattcgaggaacgtacaaccacgcccagtatctggatggccgccgcgaaatgctccagtggtatgccgactatatggaggccttggaaaacggcgaaaatgtagtgcatggaacgtttggaaaaagcgcttaa

SEQ ID NO: 224442 - DNA, 198 bp, Klebsiella pneumoniae; identical to SEQ ID NO: 39922

SEQ ID NO: 224443 - DNA, 183 bp, Klebsiella pneumoniae
atgaacatagatcagggtcagaacaccattgaaattactacggagctttgcgcgctgctgattgctactgaaatggtcactggcaaggtggatgagaccgacctaaaaattctgctttctcttggtcgccgtttagcccatgccgtctgggacaacctgaatgacgcggggtttggcgaatga

SEQ ID NO: 224444 - DNA, 204 bp, Klebsiella pneumoniae
atgaatgatatttacaatctggttcgccgcgctgacggaaaggccgtatatagcttcccggttggtggtcgttatctggtggatacttctaacggtattcaatctttgcgccctctgatggaagacgagattattttcactgtggagagtgccgcgcgctttctgaagaagattggttatcaggtaatcccgccagcggcgtga

SEQ ID NO: 224445 - DNA, 750 bp, Klebsiella pneumoniae
atgagcaaaaaacttgcggataaagtggcgttagtcaccggcggcagcgccgggattggcctggcgtcggcgaaagcactggcggagcagggcgcgaaggtgtacatcaccggccgccgtcaggaggagctggatgcggcggtaagattcatcgggcccgccgcccgcgcgatccgcgccgacgccgccgtgttaagcgaccttgacgcggtatttgcgaccattgccgaagagtccggccggctggatgtgctgttcgccaatgccggcggcggagacatgctgccgctgagctccatcaccgaagcacacgtcgaccggattttcgccaccaacgtgcgcggggtggtgttcaccgtgcaaaaagcgctgccgctgctcgccgatggcgcctcggtgattttgaccggctctacggcggcggtaaaagggacggctaacttcagcatctatagcgccagtaaggccgcagtacgcagcctggcgcgctcctgggcgctggaggttagcgaccgcgggatccgcatcaatgtggtcagcccggggccggtacgtaccccgggtctgggagggctggtggcggaggcggaccgccagggtttgttcgatgctctggcggccggcgtaccgctcgggcggctgggcgagccggaggagattggccggacggtggtatttttagcgtcggatgagtcgagctttattaacgccgcggagatctatgtcgacggcgggctggcgcaaatctaa

SEQ ID NO: 224446 - DNA, 1128 bp, Klebsiella pneumoniae
atggctgaagtgattttcaacaaactggaaaaagtctactccaacgggtttaaagcggtgcatggtatcgacctgaagattgccgatggcgaatttatggtgatcgtcggcccctccggctgcgccaaatcgaccaccctgcgcatgctggcgggtctggagaccatcagcggcggcgaggtgcggattggggacaaaatcgtcaacaacctggcgcctaaatcccgtggcatcgcgatggtgttccagaactacgccctctatccgcatatgacggtgcgcgaaaacctcgccttcggcctgaagctgagcaagctgccgaaggcgcaaatcgacagacaggtggaagaagcggcgaaaattctcgaactggaagaactgctcgatcgcctgccgcgccagctctccggcggccaggcgcagcgcgtggcggtgggccgggcgatcgtcaaaaaaccggacgtcttcctgttcgacgaaccgctctccaaccttgacgccaagctgcgcgcctcgatgcggatccgcatttccgatctgcataagcagttgaaaaaatctggcaaaccggcgaccaccgtctacgtcacccacgatcagacggaagcgatgaccatgggcgaccgcatctgcgtgatgaagctcggccacattatgcaggttgataccccggacaatctctaccaccagccgaaaaatatgtttgtcgccgggtttatcggcgcgccggagatgaatattcgtcccagccagttggttgagcacggtggtcgcctgcatctgacgctgggcgatcagcggctgccgctcaacgatcggctgcaaagcaaagttgaaacccataagaatcagcaggtgttctttggcgtgcgcccggagtttgtctctctctccgatgaaccgtttgccgaaggttcctgcgcgggtgaaatggtacgcgtagaaaacatgggacatgaattctttgtttatctcagggttgctgattatgagctgaccgcccgcgtgccgtcggacgatgcgaagccgatgattgccaagggactgaatcgcaaagtctatttcacctttgatctcaacaagtgtcacatctttgacgccaaaaccgaacagaacctctctctgtga

SEQ ID NO: 224447 - DNA, 981 bp, Klebsiella pneumoniae
ttggcgttctgccgcggtctgcttggtctgagtgaatccgccgcgatcccggcgggtatcaaagcaacttcggaatggtttccttcgaaagagcgtggcattgccggcggtttattcaatatcggcacatccctcggcgcgatgctggccccgccgattgtggtatgggcgattatctacttacactggcagttcgcttttattttcaccggttcattcggtcttatctttgcttttttatggctgtttttatatcgcccaccagaaaaacataaatggatatcggaagaagaaaaacaatatattgctgacggtcaggaaaaggaattacagtccgatggcgataaacgtccgccgctgagagtactgcttaaacagcgtaatttctggggtatcgccatgacccgctttctgtcggatcccgtctgggggacgttaagtttctggctaccgttatatttaatccaggtccggcacctgccattaaaagaaatcgcgatgtttgcctggcttcccttcctggcggcagatatcggctgtgtagcgggaggtgtgctttctaatctgctgatcacgaaatttaacgtcacgacggtcaattcccgacgcatcggctttacgattggcgcgctgctgatgacctcgttgtccgccgtcggttttgtggaaaacgtctactttgccatcgcattgattagccttggcggattcgcccaccagatgctgtcgaccatggcgatgaccttagcgtccgatctgtttaaaaagaaccaggttgctaccgtcagcggtatggcaggctccgccgcctggctggggcaactgctcttcaccatggtgatggggctgctggtgcatcagattggctacacgcccttctttattgcgctcagcattcttgatctcatcgcggcggccattatctggcttacggttatcgatccacaacgcgccgtcagagagccgatactcaccacctga

SEQ ID NO: 224448 - DNA, 879 bp, Klebsiella pneumoniae
atggccaacaatcagtcacagcaaaccaacgtgtcaggagctgcttcggtgagtcagcttactttacctatcgtaaatgatggttttataaatgtaataaccgagcttcctgcgtctggtttaattgcaaaaacattcatttgttcaaactttgatttagcaaaccaaactaatgtctattatatgaaggtttataatgatgataagtttgtaataaatgagatggtcggttatatacttgccaaagcaagcggtctggatgtggcaaataaagcatatctacttgaaatagatagtataacacgtgcacttattgatgacttttacaaacgtagaggtcttgcgaacaataaagagcattataattcaaattatgctttcttaatatctagtgctccaggaataaacataaatacttatcatagtaacatcgttcttcaaacagcgttttttaaacagaagataagcaattggaataaaaataactcactaattgcttttgatgagtgggttgcaaacacagatagaaatgcaggtaacattttgtttggtaccaatgcaaattatgttatcgatcatggttcaatgcctgttcaaatgaattggactaggagttgcctgcaatccaagcagtgtttcaaaaatgtacattatatcaatacctccacagtgatggggaaaaatccattagatgtagatcttttaaacgaatcatctaagcatgctttagcttttagtaacgtgaaaaactccataataagtattatcgcaaataccgtaaaaatgagtcctgactatcaagaaatgcttgattttattgaggatagatctaagagtgttaggacggctacatatgcaaatatggcaggagccagataa

SEQ ID NO: 224449 - DNA, 801 bp, Klebsiella pneumoniae
atgaaacaatttaattggcataaaatacagtggatgccctttttcaatactcaggaggttattaacgttggagtcgtcgttagtgatgaaaataacaatgttttgaatatgaagcttattgatgatttatcaaagataaaatgcttttttggtgattcgatagtaagcgatgcatctctggcatttgatgttattaaggttatgattggtagcaacactatatctggtaatattgataccccccagattaaaataaaagaacagggtattgctttctctaatagtgttgccttgctgacagagcaattaatgagtcaagttgtaacggcttataaagttaaagagaaaaagtctagatactctcctttaacaactaaaagattactgacagcattgaaggacgaagtgccagaacaatttaaagggtacattcctgataatccatttttagaagttagaccggatgtgtccgtctatattcctttgcgaaaacatggattaagtgaagtagcaacagtaatatctgcagactatatagatgttgaacgcagatctactcgtttttatgaagctatgagagatctctctttggttaatttagcctctcatggcaaaaccaaatctaaaagtgcttttgttttaaaacctcaaggggttgactctttaccaaaatcactcaagaaaagtattgatggtgaaatagatatgtttacttatcaagctaaggacagaaaatttgaagtagtcgtatgcgatgatacagcggatttcgtcgaaaaagcattatcatggtgtgcttga

SEQ ID NO: 224450 - DNA, 663 bp, Klebsiella pneumoniae
atgggaaccgctattaaaaagagaaatctggaagtaaaaacccagatgagcgaaacaatctggctggaaccttcaaataataagacggtttatctgcaaatcaaaaatacctctgataaggatatgagtggcctgcaggcaaaaattgccagcgccgtcacttcaaagggatatcaggtcgtcagtaacccggatacggcgggctactggatccaggcgaacgtgctcaaggccgataaaatggaccttcgtgagtctcagggctggttaagccggggttatgaaggcgcagtgactggcgccgcgcttggggcagggattaccgcttacaactccagttctgcaggggcgactctgggtgtaggacttgcagccggtctggttggtatggctgctgacgcgatggtggaagatgtgaactacaccatgatcaccgatgttcagatcgcggaaagaaccaaaactcaggttcagactgataacgtggccgtattacgtcagggaacatccggcgcaaaagtgcagacaagtactgaaacgggtaatcagcacaaataccagactcgcgtcgtctctaacgctaataaagttaacctcaagttccctgaagcccagcctgttcttgaagaccagctggcaaaatcgatcgctaatattctgtaa

SEQ ID NO: 224451 - DNA, 2214 bp, Klebsiella pneumoniae
atgcttgataaaattaacattaatatcaaaaaaactctattggcctttatcatttgtttagtcgctattccgctggctcgttttatttcaccgcaaacgataattgacggcaaccttatttatattgcctggctgccaatcagcgtgatgttttctgttatttttatctttggccgctatgcaattgcgccattaattctcgcgtttgccatcaccaatagttttctcattaaattaacgctgccgcaggcgtttatcttacttttttgtcaactgttcgccgtgtttgtctcctgcgctattctgcgactgttggtggggaagcgctggcgctgcggtccaacggcaaaacatatgggggcgcggatcttctggggcggcttcttcgcgccggtgctcctgaaaatcaccatgtatctcgccggacaatattttgcgtttccattagctattaccagttactttggtagtatgccgttgatttatactgtaatagatatccaaagtttaatcagtgcggcattaatttttacgacgtttctttattatccaatgcggatgattatcagtccgcgctacgcccgacgtttctggcagcaggaatgtttaccgtggctggcaccgcaatatcgctcctttaccctatattggtttatcgcgttggcggtgatattaacgctattgtgtgcgccgtatcagtctgaatttattgccggttatttagttccggttatttttattgtctactttatcggtatcagtcgaataggccatgcgctattgcgtatttcatggtctgtctcggcctttttgctggtggtatataacaaaaactttctccagggggtgcaaagcgagtattcactctcctttgtgctgtcggttctgatctcctttactatctgtttgttttatatggccgacatctatgcccgcagcgaccgcaacaaacgccgctggcgtagccaggcggaagaggatccgctgaccggcttgcctaacctgcgcgcgctggagagccatttacagagctgtcctcagcaggctatctgcagcctgcgtattgataatctcgactttctcagtcggcattatggtctgatgatgggggtggactgtaaacggcagattattcgggcgctgcaaccgctgctgggagcggcggataaagtcttccaggtaccgggcagcgaactgatcctcgtgcttgatgggccggagccgtcgtcccgcttgaatcacatggtcgcggtcctcaaccacaaaaagttcagctggcacaatcagccgctggatttggagtttggcgcggcctggggccgcgatgacggccagggtgagggactttaccagatgctgggccagctaagctggctttccgaacaggcgggcagtgaacgtcgggtgctggcgctggacgaggagcaggatctggtggtggatcaaactaccgagcaggtgcgcctcctaatgcgcgtcaagcaagtgctcaaagatcgcgcgctgatgctctatgcgcaaccgattcagaatccggagggggagggttatcatgagatcctcacgcgcatgcgctgtggcgatagcgtcattatgcccgaccgattcattccgctgattgtgcagtttaacctcagccaacgttttgacatgctggtgctggagaccttgttcagtatgctccataagcatcccggccagcgcttctcggtcaacctgctgcctgcaactctgatgcaaaagaacagcgcagggcagattatcgcgctgtttcaacgctatagcgtctcgccagaacttataactattgaggtgaccgaagagcaggccttctctaatgcggacaccagtcggcaaaatcttgaagcgttgcgcgcgtttggctgcgccatcgctattgatgactttggcaccggctatgcgaactatgaacgtctgaaacatctacaggccgatatcattaagattgacggctgcttcgtccgcgacatcctcacggacccgctggacgccatcatggtgaaatcgattgtcgagatggcgcgggcgaaacagatgagcgtggtggcggaatatgtcgaaagcgaaccgcaaaaagcgcgcttgctggagctgggcgtgaattatctgcagggttatctgatcggtaaaccacagccgctggatgaatgtcaggcaaaaaaaagccgggcattgcccggctcagatgactga

SEQ ID NO: 224452 - DNA, 1203 bp, Klebsiella pneumoniae
atggaccgcgtcttgcattttgtcctcgcgatcgttgtggtggctatactggccctgttggtcagccatgaccgccaaaagatccgtattcgttatgttgttcaactgcttgtcattgaagtcctgctggcctggttcttcctcaactccgatattggtctgggttttgtgaaaggattttccgagatgtttgaaaaactcctcgggtttgccaacgaagggacaaacttcgtgttcggcggcatgaacgataaaggcctggccttcttcttcctcaaagttttgtgccctatcgtcttcatttcggctttgatcggcattttgcagcatattcgtatcctgccgattgtcattcgcgcgatcggtaccgtcctgtcgaaagttaacggcatgggcaagctggagtccttcaacgccgtgagctcgttgatcctcggccagtcggaaaactttatcgcgtataaagatattctcggcaaaatgtcgcgcaaccgcatgtacaccatggcggcgacggcgatgtccaccgtgtccatgtccatcgtaggcgcttacatgaccatgctgcagccaaagtatgtcgttgcggcgctggtgctcaacatgttcagcacctttatcgttctgtcattaattaacccttaccgcgtggaagagagcgaagaaaatctgcagatgtcgaatctgcacgaaggtcagagcttcttcgagatgctgggcgagtatattctggcaggttttaaagtcgcgattatcgtggcggcgatgttgatcggcttcatcgcgctgatctcggcgctgaatgccctgttcgccaccgtgaccggttggttcggctatagcatttccttccagggtatcctcggctatatcttctacccggtcgcctgggtgatgggtgtgccggcaagcgaagcgctgcaggtgggcagtattatggctaccaaactggtctccaatgaattcgtcgccatgatggatctgcagaaaattgcctcgacgctctccccgcgcgcggaaggcattatctctatcttcctggtctccttcgccaacttctcatctatcggtattattgccggggcgatcaaaggtctgaacgaagaacagggcaacgtagtttctcgcttcggtctgaagctggtgtacggctccacgctggttagcgtgttgtccgcctcgattgcggcgctggttctgtaa

SEQ ID NO: 224453 - DNA, 690 bp, Klebsiella pneumoniae
atgtgggacggcccttacggcgactggggatcgcgaaaatatctggtagccagtcttaaccagagccttaaacgcatggggctggaatacgtcgatattttttaccatcaccggcctgatccacagacgccgctgatggaaacgatgcgtgcgctcgatcatctggttcgtcagggtaaagcgctatatgtcgggatctccaactatcctctggcccaggcgcgggaggcggtgaagatccttaacgacctcggcaccccctgcatcatccaccagcctcgctactcgatgttcgaacgcggcgtggaagaaggactgctggattttctgcagacggaagggattggaagcatagcgttttcaccgctggccggcgggcaacttaccgaccgctatctcaacggcattccggccgactcgcgcgccgccagcagcagtcgttttctgcagccggagcaactgactcctgcccgattagaaaaaattcgtcagcttaacaggcaggcggaagcgcgtgggcagaagctgtcgcagatggcgctggcctgggtgttgcgcgaagagaaagtcacctcggtgctgatcggcgccagcaaaaccgcgcaactggatgatgccgtcggcatgctgcagaatcgccatttcaccaccgaggagtgcgcggccatcgacgctatccttgcgctgtaa

SEQ ID NO: 224454 - DNA, 1662 bp, Klebsiella pneumoniae
atgcaaccgacctacactattggggattatctgctggatcgccttgtcgactgcggtattgaccgcttgttcggcgtgccgggagattacaacttacagtttctcgatcgcgtcatcgcgcacagcgccttggggtgggtcggctgcgccaacgagctgaatgcggcatatgccgctgacggctatgcgcgcatcaaaggggccggtgcgctgctgaccacttacggcgtcggcgaattgagcgcgctgaacggcattgcgggtagctatgcggaacatattccggtattgcatatcgtcggtgcgccctctaccggcgcccagcagcgcggcgaactgctgcaccataccctcggcgatggcgattttcgccatttcgcccgcatgagcgagcagatcacctgtagccaggcgctgctgaccgccggcaacgcctgccatgaaatcgaccgtgtgctgcgcgatatgttgacgcatcatcgccccggctatttgatgctgccagccgatgtcgccagagcggcagcgattgccccagcccagcgcttgctggtggagcccgctccggcggatgaaaaccagcttgccgggttctgcgaacatgccagccgcctgctgcggggcagccgacgcatttccctgctggcggacttcctggcgcaacgttatggcctgcagaagacgctccgggagtgggtggcgaaaacgcctgtcgcccatgcgacgatgctcatgggcaagggattgtttgatgagcagcagagcgggtttgtcggcacctacagcgggattgccagcgcgccgcagacccgggaggcgattgaaaacgccgacaccatcatctgcattggcacgcgcttcaccgacaccatcaccgcaggatttacccaacatctggcgcgggaaaagactattgagatccagcccttcgccgtcagggtgggcgatcactggttcagcggggtgccgatggataaggctttggccgcgctgatgacgctttccgccccgctggcggcggagtgggctacgcctcaggtcgtggcgccggaggctgaggagggcgctgaaggcgagttgacccagagaaatttctgggcgacggtgcagggcgccctgcgtccgggggatattattctcgccgatcaggggacggccgcctttggcattgcggcgctgaagctgccctctgaagcatcgctgatcgtccagccgctgtggggctcgattggttttactctcccggccgcctatggcgcacaaaccgcggcggcggagcggcgggtggtgctaattgtcggcgatggcgcggcccaactgaccattcaggagatgggctccatgctgcgtgataagcaaaagccgcttattctgctgctgaataacgaagggtataccgtggaacgggcgattcatggtccagagcagcgctacaatgacatcgctctgtgggactggcagcggctgccggaagccttcgcccctgacgttgcttcgcgctgccggcgggtcactcagacgtctgaactgcgggaggcgatgacggagagcatcacctcggataccctcaccctggtagaagtgatgctgccgaaaatggatatccccgatttcctgcgcgcggtgacgcaggcccttgaggagcgaaacagccgcgtttaa

SEQ ID NO: 224455 - DNA, 1236 bp, Klebsiella pneumoniae
atgctccatcctcgcgccagaacaatgctgatcctgtcggtgccggccatcctgataggcatcgcctgcagcctgatcctgatcgtggcgatgaaggttgccgcgctgctgcagcgcgtgctgtggagcaatctgcccgcgcagttgggggtgagcgccgacagcccgctgtggatcatcgccatgctgacggcgacaggcatcgcggtgggtctggtcattcgttacagccccgggcacgccgggccggatccagcgaccgagtcgttaatcggcgctcccattgccaccggcgcgctgcccggactcctggccgcgctgatcctcggcctcgccggcggcgtcagcctcggcccggagcatccgattatggtggtgaatatcgcgctggctgtcgccgtcggctcccgactgtttccgcgcgtcagctcgctggactggaccatcctcgcggcctcaggcaccatcggcgccctcttcggtaccccggttgccgccgcgctgattttttcgcaaaccctcaatagcagcaacgatacgccactgtgggatcgcctctttgctcccctcctcgccgccgccgccggcgcgttgacgacgggtctgtttttccatccccatttttcgctgccgatcccgcactatggtcagatgcgcttcgttgatattctcagcggcattatcgtcgccctgatcgctatcgccgtcggcatggtggccgtctggtgtctgccgcgactgcatgccctgatgcatcggttgaaaaatccaatcctgaccctcggcatcggcgggctgctgctggggatcgtggggacgataggcgggcccttaacgctatttaaagggctggatgagatgcagcagttggccttcagccagacgataaccgccgcggattttctgcttatcgcgctggtcaaactggcggccctggttcttgcctcagccagcggctttcgcggcgggcgaattttcccggcggtgttcgtcggggtagcgctggggctgatgctgcatgctcatgttgacgcagtgccggcggcaatcaccgtttcctgcgcgatcctcggcatggtgctggtcgtcactcgcgacggctggttgagcctgtttatggccgccgtggtggtcccggatacgactctgctgccgctattgtgtatggtgatgctcccggcctggctgttgctggccgggagaccgttgatgattgccaaacggcataccgattaa

SEQ ID NO: 224456 - DNA, 201 bp, Klebsiella pneumoniae
atgaaacatgagatgcaaccagatagccttgttgatctgaaattcatcatggcggatactggctttggaaaaaccttcatttacgaccggattaagtccggagacctccccaaagccaaactcatccacggcagagctaggtggttatatagtgaccactgcaagttcagagaaaagctcctgtcccgctccgatgggtaa

SEQ ID NO: 224457 - DNA, 222 bp, Klebsiella pneumoniae
atgagcgcagaaatcatcgatcaggccaacgagctggcagagcgccggctggaaatgaccatccagaacatgcgcatcaaccataacgcagtttcggctactcactgctgcgactgtggggaagaaatacccgagcggcgccgggaactggtggcgggctgtcagcgctgtgttagttgcgccagtgatatcgaactacggttgaaacaggaggacaaatga

SEQ ID NO: 224458 - DNA, 750 bp, Klebsiella pneumoniae
atgaaagaacgcggaatgatttttaacggggagatggtgcgggccattctcgacggtcggaagacgcagactcggcggcctatcaaatggaaacagactcggttcactgaaattggtgagcgtgaagatggtagcagatggccatggagtgaagacgcagagcatgcttgcgatttctggcacccatgcccgtttggcgcagtcggcgaccgcatctgggtgcgtgaaacttggggcgttgtcagtcacgcctttagtgacgatggattgatgattgactgggttcctgatcgtccagcgactgccattcacgaaatgccgtttggcaatggctattactctggctacgccatttatgcagctgatggtgattttacttggggtgatgacgatggttatgaagatggccgttcgtgctggaaaccttccattcatatgccgagagcagccagccgcattctgctggaaatcaccgacgtgcgcgttgagcgtctgaacgctattagcccggaagatgcagagtcagaggggctggagcgtaccaactttacaggtttcggcgacgagcctggattacctagctatccagagccggatgtttatttcgatccactgaagaaacagtggaaggaatatccgcctgaagcattcgcggggctatgggaatccatctacggcgaaggaagttggcaggccaatccctgggtttgggttatcgagttcaagcgcgttgaaggcggtgcagcatga

SEQ ID NO: 224459 - DNA, 471 bp, Klebsiella pneumoniae
atggacgctcaggactatgggaaacaggtcaacttcgcggacggcccggactatgggaaacaggtcaacttcacggacggcccggactatgggaaacaggtcaacttcacggatggccgggagtgtgggaaacaagtcaactccgcggacggcccggactgtgggaaacaggtcaactccgcggacggccaggactgtgggaaacaggtcaactttgcagacgtccgggactgtgggaaacaggtcaactccgcggacggccaggactgtgggaaacaggtcaactccgcggacggccaggactgtggaaaacaggtcaactttacagacatccgggactgtgggaaacaggtcaactacgcggacagccgggattgcgggaaacaggtcaagttaggcaagcactatgggaaatacagcaattttagtatccccccatatgtcagcaacaaactaagggggaggaaataa

SEQ ID NO: 224460 - DNA, 1179 bp, Klebsiella pneumoniae
atgcagcgtattcatcccggtttgctggcattgtccgtgacagcgtttgctattggtatggcagaatttatcgttgtaggtattctgcctgaaatcgcgacagcactgaccatcgatctaccccgtgccggcaaccttgtgggtttgtatgcgctggccctggccgtcggtacaccgttactggtgatggcgatatctggcttcccccccaaaccggtgctgacagccctgatccttatgtttctggcaggaagcctgctttcggcactggcgagcagttaccctctttttcttaccgggcgactgataaccgccgtcgcgcatggcagttttttcgccatcggtgcgacggtagcggccagaattgtccctgcagggaaagcaggtaaggccatagccgttatgtttgccggactgaccctggctatggttattggggtaccgctcggtagctttattggtcagataatgggctggcgggtgccattaatcatggtgagtttactggctcttcttgcattactgtcaacaatgctctggctgcccggcatcaggaagagcggatccggtaatgtaagggaacagctgcaggctctgtcacatccggcaatcctgatcatgatgagcattacagtactgggctttggggccagttttgctgcctttacgtttgtgatccccatcctgactacactcagcgggttttcttccgaagtcgcaagttttctgttgatggttttcggggtggccacactgattggtaacctggctggcggtcatttttcatcaacccggggctggtctgtaacgctgggtattcagattgtattgctggccgtaacattaatagctttggctgtttttcttcagtggaaagtggctgtcactgggttacttttcctgtggggggggctggcatttggattatctcctgcagtacagcagggcatgttgtcagtggcggaacgctacactccgcgagccgtcggatttgcctctgccctgaatatatctgcttttaatctgggtatattctgcggggaaaatatcggcagtgtactcgtgcaccaaaataagctcggatacactccctttgccggggcggggatatgccttcttgccctgcttcccctcgggttactggtcagatatatcaaccgtgagactccgcagaaataa

SEQ ID NO: 224461 - DNA, 411 bp, Klebsiella pneumoniae
atgtttgagaaaatttcacgtgatgccattcgtacaatcacctcacgggctcaggagcaacacctggctgtttgtatcagtattgtggacaatgcaggcctgctgagaagtttcctgcgaatggacggtgctgttgccggcgcgattgacgtttcgattaaaaaagcacgcaccgcagccttgtttggttctgattcaggcaccctgggacaggaggcccgcccgggcgggaaaatttattcactggagtcgactaatggaggcttgatcagttttggaggcggtgttgttctgcgggatgatcagggcgctattcttggcgctgttggcgtggccggggctacggtagattcagaccagcaactcgctctgtcgggagccgcggccacgtcaacagcaggcagagtgtaa

SEQ ID NO: 224462 - DNA, 717 bp, Klebsiella pneumoniae
gtgactcagcgtaaatacatacagtccgtcgagcgggccatgttgcttcttgaaactctggtcacccggaacgaaggattccgtctggccgaactgtcagaacagttttcactgaataaaaccacgttacatgggttacttgccacgctctcttcgctcggatacgtttcacgccgggggcagcattatattgcaggtctacgcttacgggatgttgcccggccactcacggagacagaccagcaacttcgcgaacactttactcccgcactacgcaggctggctgcgctcagtagcgaaacctgttggctggcggtgccctgcggtacacgtgagtacctctatattgacgcgattgaaggtggaagttcactgcgggtcgccagtcccaggggaacacgggaaggactgacgacttcagcaatcgggcgtgtctttctggcttttgatgatgacctgacgagaaccctcagaaaggaagggtttattactgacaaactcaataacgagctggcctgtatcgctaaatgtggatatgcacttgatttagaggaggctgaggaaggactgaactgcctggcgctccctctccgtcagcagggttacgttgtcgccgcgctgggaatggcgggtccttcacatcgcctgcatcctgactatctcaaacgactggctgtcagagtgatgcgggaaatgttcgacattatcaaactttaa

SEQ ID NO: 224463 - DNA, 204 bp, Klebsiella pneumoniae
atgacctgggaatttcgcaagcggtctgatattgagaggaacgtctccaccggagagactgttgccgaactgccccgtcatgccatcaaagagacgaacaccgaccatctcttatccaaccagcctatgcctgaaaggcttccgacctgttactctcttttcatcatgatttttctgaggatatcaggccgtgactcagcgtaa

SEQ ID NO: 224464 - DNA, 306 bp, Klebsiella pneumoniae; identical to SEQ ID NO: 104005

SEQ ID NO: 224465 - DNA, 189 bp, Klebsiella pneumoniae
atggcttgcactaagtctacccaaacacgccctgaatttacatggcgttttctcaccttgggtgaattcacaaatcagatcgtcaatgttactgcttccaccgagcgcgaagcccgcgaaaaaacgccagaaggatgtgtctgtatcctggcgtgtcgatttcgtgttgaggaggtgcagcatgtttaa

SEQ ID NO: 224466 - DNA, 573 bp, Klebsiella pneumoniae
atgactaacaaaaatgccctagccgggcagggtttcgctcaacctgaaaacagcagcgatgatatttcggtcattaaatttgaggccgcgaaagtccgtattgttaagatcaacggtgaaccgtggttcgttgcaaaagatgtttgcgcggcgctggaattatccaattcgcgcatggcgttgcaggctctggatgatgacgagagaaataccgtaactttaacttacggtattcgcgggaacccaaatcatagcgctgtctctgaatctggtttctacaagctgatcgcccgcagccgtaaagctattacgccgggcacattcgctcatcgtttcagtaattgggtatttcgagaggttatcccttctatccgcaaaactggctcttatggtgtgccgttcgcgttcctgaacgactttagccggcgcatggcggcttatcagcaggaggccagcaaacgcgggtacaagttgcagcagtgtaagggggcaaaagaagctcttgagcgggaagaaattcagttgtggcgtaagtatcagcccgagctattgaaggaaaatggcgatgaataa

SEQ ID NO: 224467 - DNA, 213 bp, Klebsiella pneumoniae
atgtcttataccctcattcgcctacctgaagttcaacgccgaactggttacagtaaggcgtggatctatagactaattagccaaaaccgttttccttcagccgttaagataggctctcgcgcgattgcatttgtcgaaagcgaagttgacgaatggataagccagcgtatcgaagaacgtgatgcgttagtttccacaaaacctcaactgtaa

SEQ ID NO: 224468 - DNA, 759 bp, Klebsiella pneumoniae
gtgtcttacaattcaaaaagctgtagttcccttgaaaaggcatattataccccagttgaagcagctcttcggtggtgtaatcttattgcgcatgaggtattaattcttgagcgggtcggcttggatgttttacccggtgtcgggatgttccctcaatggccgtgtttacgtgttaatgccgaaaagattcttgatgctatacacaatggtgaaattgcttacggacgagatggaaaaacagtttctccgggtgagcaggtggctaagcatcgtctaactattcgtcactcagatcttaaagcatggatggcgaaaaattatcccaatcaaaagccctctttcctttttgatgtagttgagcagcagttgcatgcgggaattacagttgatgcatatcagactcttcaggccgagaacaaacggcttaatattcgattagctaatgctgtaaaaaccttccagcaacagaaacaagaaatctctgaattacaaggcgagcgcgactcgctacgacagatggtagataacgcagtacaacatatcgatgggcgctcagagacaacttatctaaatataatcggtggactactttctttgatgctaggcaattctccaagtggtagaaaaatgtctgagtttgccaatcagggcgcaattatcagtgcgatgcttgcccattttgaggggatccccggtataagtgtgagaacgcttgagggcaaattctctgaagccaataaaagccttaaaaaacgttaa

SEQ ID NO: 224469 - DNA, 606 bp, Klebsiella pneumoniae; identical to SEQ ID NO: 107131

SEQ ID NO: 224470 - DNA, 1416 bp, Klebsiella pneumoniae
gtgcttgttcgctctgaatcgctcctggttcagactgaatctgtcaagactgctgcaaagtcacatttgaatataggagacagtccatgtactaatgaaaatatcctacatcttcgggttgtagtatggccctatccgttgattaaagatgttggctacatcataaaaggagaattagcctgtagtgctctgtgggggagtttacgtcccaccttaagtctggaacattttgataaaaaatggacttcgcgggaaggagtgtggctttttggtattaagcttatggatgatatatccgtcaatggatatatttctgaaggtattatggtgaccctatcaccatttgtcttcagacgattcgaaactgatatgtattcaaaaaactttagcgctgttgtcggaaatagtaagcatgacaggcattacttcaatataggacctgatgctcctcttcttgatcggcatgatagcgttccactaaggtttagagtgtttagggcatgtagcctacattatgatctctgtgttgcaggaggtgggtattttacggggatattttcagagcactggagcatacaaatgttattagtaacagtgtcactactttccggtttaatgatttatattatcattatgaacagagcagaactcaatagttcactatctgcaaggtttgtaaaggctttgaaaaatgaagccctgtcgctggtctatcaacctatttacagaattgaagacggacagatctgcggatttgaggccttgctcagatggaaagatgaaagactcgggaatattagccctgaagtatttataccgctttctgaaagggaagggttgcaggaggatgtgactttattcgtcattaaccatgctatccgagaatttatccatactgctattcagaatgaaatatttttgagcgtaaacattaatccaagcgatcttgattcagaaaaattcagggataaactactaggattaatttctgaatataacatcccatataaaacaatccttcttgaaattacggagcgtcaaggaggggattttgaaggtatgaaaattcacattgataaatataaaaatcatggtgtcaggtttgccatcgatgactttgggacaggatattctaatcttaatctggtaactgcgcttgatgtagatgaaataaaaatagacaaatcgctaactagtgctattggtactgaatctttacgatatgatcttcttcccggactgcatgagatgttccgctccattgcagataagattgtgtttgagggtgtagagactcaggagcaggtgaactatctgaagacgttctggccacagagttatgctcagggctggtattactccagagcgcttccgctggaagaagcgagaaaacttaccatccgggaattgaactga

SEQ ID NO: 224471 - DNA, 567 bp, Klebsiella pneumoniae; identical to SEQ ID NO: 138496

SEQ ID NO: 224472 - DNA, 234 bp, Klebsiella pneumoniae; identical to SEQ ID NO: 171104

SEQ ID NO: 224473 - DNA, 444 bp, Klebsiella pneumoniae; identical to SEQ ID NO: 171105

SEQ ID NO: 224474 - DNA, 633 bp, Klebsiella pneumoniae; identical to SEQ ID NO: 171106

SEQ ID NO: 224475 - DNA, 378 bp, Klebsiella pneumoniae
atgccgggcaaccgcccgcattatgggcgttggcctcaacacgattttacgtcacttaaaaaactcaggccgcagtcggtaacctcgcgcatacagccgggcagtgatgtgattgtctgcgctgaaatggacgaacagtggggctacgtcggtgctaaatcacgtcagcgctggctgttttacgcgtatgacaggatacggaggacggttgtggcgcacgtattcggtgaacgcacgttggccacgctggagcgtcttcttggcctgctgtcggcctttgaggtcgtggtatggatgacggatggctggccgctgtatgaatcacgcctgaagggaaagctgccacgttatcagcaagcgttatactcagcgcattga

SEQ ID NO: 224476 - DNA, 186 bp, Klebsiella pneumoniae
atgtacgaaatctataaagtgatatttaacagggtgacccgacagcctatagtaatttcagaggacgtgaaatggaaaacaaaaagatcttcttgttggttgattgcttcagcaattattctcgatattagtttactgtcaacccatgcacatgacatctctagtgataataatctgctacgatag

SEQ ID NO: 224477 - DNA, 1836 bp, Klebsiella pneumoniae
atgaaaaaattggatttattaaaagctgcaaaaacaaagccggatttggctaaacttttaggcgttaagccttcagcattaacctattgcttatataaaactaagcccgaaactcaatactttcaattcgagataccaaagaaaaatggtggcaatagaattattagcgccccctctggcatgttaaaaaatatacaggcatctctttctgaattattgctggattgcttagatgaaattattattgataaatttccaaactcagagatagcaaggcaaaaagcaaaaaactccatagttttaaaattaaaatgctctggttcggaaattaaacagccttcattgtctcatggctttgaaaggaaacgttctataataactaatgcaatgatgcatttaggtaagaagcacgttttcaatatagatttagaaaactttttcggtagttttaatttcggaagagtaagaggttttttcataaaaaacaagaatttcttactcgagccagaaatagctacagtgattgcaaagattgcatgttataataatgaactaccacagggtagcccttgttccccagtcatctctaatttgataacacatgctttagacattaaattggctgctgttgcatcaaaatattcatgtacgtattcaagatatgcagacgatataaccttttccacaaggaaggatagtttaccctcgtcaatagcaaaatccgataatcatacatttgtagccggtaaggtaattaaaagtgagattaatcgctcaggattttcaattaatgaaactaaaactagaaatcaatataaagattcacggcaggaagtgacggggttagtcgtaaataaaaaacctaacacgaagaaagagtattggcgtcttgtgcgtgctcaatgcaatcatctcttcagaactggtcagtttaaagagactgtcgatggtgttgaagtagttggcaatataaataggttggaagggaagttaaatttcatcgaccaagttgatcattataatcggcttcgacaaagcgagaagctgaatccgaagtatcatttgaaaaaagatgctctcaaaaatggtcatgccaaaagtagacgttacttacatacttcgagagaaaaaacatttagtaaatttctgttttatcgtatgttctatggtaataaaaaaccgactattctcacagaaggtaaaactgataatgtgtatttgaaagcagccattcacaaattagcagcgttattccctaagttagcaattgaaaaaaccgccctagctccgtataagttattaacgcagttcgtcgaatacaatgaacgtaccaaatatttgttagagctttttggtggcactgattaccttaaggactttgttatacattacagacattactatcatgattacaaagcccctaaaccgtctaatccggttattatatttgtagataatgactctgggcctaagaatctgatcaattacgtgaatggagttgagggtgttcagatttttccagcgggtgttgcagatattcgtcaatccgattttgttcatattttttgcaatttatatctagtgctcacacctcaagttgaagggtgtcctgaaactgacatagagtatttctttagcaatgttgatcgacttaagcaacataaaggtaaatgttttaatacagttgctgatcgtgatccaagcaatgatttaagcaaggaggcatttgcaacgcacatagtcaatgcacataaaaatgatattgatttttcgagatttactagtttacttgaacggttagaaaaagtgatagatcactataacttaattaagtaa

SEQ ID NO: 224478 - DNA, 165 bp, Klebsiella pneumoniae
atgttttatatgcaatttatagcctttatgaacaccatgtataccttgagggcaaattctttaaaacgcatccattcatttcacgttgtgcatcccctcgatttcattaccatcatttcattacttgcaatgattgttgtgattgttgcgttttttatcatgtga

SEQ ID NO: 224479 - DNA, 150 bp, Klebsiella pneumoniae
atgccatctgagtatgatgaacaaccggatgcgactgatgctctgtttcccggcgaatatgacctttttgacttaatggctcatgttactgaagagaacctgcacgccccggtggattctggcccgcctgtcggccgggaagcgttatag

SEQ ID NO: 224480 - DNA, 906 bp, Klebsiella pneumoniae
atgcaggatctcaatgacttcgcctggtttgtccaggtggtagaccatggcggtttcgccgcggcggggcgagcgcttgaccagccgaaatccaaactcagccgccgcattgcgcaactcgaggagcggttgggcgtgcgtttgattcagcgaaccacccgtcagttcgcggtcaccgaggtcgggcagaccttttatcagcattgcaaagcgatgctgattgaggccgaggcggcgcagcaggcggtcgagacgctgcgcgccgagccgcgcggtagcgtcaggatcacctgtccggtcaccttgctgcatgtccatatcggaccgatgctggcgcgatttatggcgcgctatcctggggtaacgctgcatcttgaggcgaccaaccgccgggtggatgtggtcggggagggcattgatgtggcgatccgcgtccgtccccggcccatcgaggatagcgacctggtgatgcgcgtgctggcggaccgcgggcaccggctggtggccagccctgatctcatttcccggctcggacgtccgcaggcgccgtccgagctgagcgcctggccggggctcagcctgggtgcgaacaagcatcagcataaatggcagctcaccgggcccgggggagcgagagcggaagtgtatttcacgccgcgaatggtgaccaccgatatgctggcgctgcgcgaggcggcgatggccggcgtaggcgtggtgcagcttcctttattaatggtgcgcgatcagctggcgtcaggggaattagaggtggttctggacgagtggcagccgcggcgggaagtgatccatgcggtatttgcctcacggcgcgggctgctgccctccgtcagggcgctggtggactacctcagcgaagagtatcagcggatggaggaggattag

SEQ ID NO: 224481 - DNA, 861 bp, Klebsiella pneumoniae
atgaaacagatcacaggagtctacaccgcgcctgcgcagcattgggtaggcgacggcttcccggttcgctcgatgttttcctatcagacgcacggccagcagctgagccccttcttactgctcgactatgccgggccgtacaccttcccggcgggcagcgaaaaacgcggcgtcggtgagcatccgcatcgcggatttgaaaccgtcaccatcgtctacgccggtgaagtagagcatcgcgactccaccggacgcggcggggtgattggtccaggcgacgtgcagtggatgacggcgggcgccgggatcctgcacgaagagttccactcggaggccttcacccgcagcggcggcgagctgaagatgatccagctgtgggtcaacctgcccgcgaaagacaaaatggcgacccccggctaccagagcattaccgctgggacgatccccaccgtggcgctggcgaacggcgccggacaggttcgggttattgccggccagtatgacgacgtcagcggcccggcccataccttctcaccgcttaacgtgtgggatctgcagctgaatcaggggcacgacctcacgctgcgccaaccggagggctggagtaccgcgctggtggtgctggaaggggaagtgatcattaacggttccgaatctgctcgcgaaggccagctggccgtcctgagccaggcaggtgacgcagtgcatctggaggcgaccgccccggcaaaagttctgctgatggccggagaaccgctacaggagccgattgtgggctatggcccgtttgtcatgaataacaaaacgcagatcgcagaagctgtacgcgattttaacagcggccgctttggccaaatctaa

SEQ ID NO: 224482 - DNA, 678 bp, Klebsiella pneumoniae; identical to SEQ ID NO: 210673

SEQ ID NO: 224483 - DNA, 1800 bp, Klebsiella pneumoniae
ttgctgaatgatttggcctctgatttgaagcccctgattattcagcctgagccgggcaagccgaaactgacaggcatcaagctgtatgtctatggtttttcccgcggcgcggcagcggcgcgcacctttgtgcgctggctgagcgaactgctgcccccgccggcggcggagggtgaaaaaccgccgcagtgcctgcagacaggcgggatgcagctgcccgtcagcgtggagtttctcgggctgctggatacggtggcctccgtcggggtggcgcatgtggtgccggttgccgacgggcatatgtcctgggcagacggcacgatggagctgccggatgatgaaacctatggcgggctgataaaaaaatgtgttcacctggtctccgggcatgagcagcgtctctgctttccgctggactcggtgcggcgggcaaacggcaaatatccgccctgtgccagagaggtggtttacccggggatgcactcggatattggtggaggatatccgccgggggatcaggggaaagcgaatggtgaggatgacagcttattgctatctcaggtagttttgcatgacttgtatgcttcagcattttctgctggcgcaccgctaaaagtacctttacaagcattgcctgaggataagaaatcggatagctggcgtttgatgcctttagattctataaaggaatttttaatccatggtgacttattcaaccgcttcaacgcctggcgcgaacttaccctgggccaaaccacgccgaaaacgttcgatcccgaagcagcctctcactacgaaccacctgccgccggcggcagtctggaaaccgtcattgctgagcagatggcctggctcaccgcctggcgcatcgaccgctatgccagaggctcgatgctgaaaacgcccttctatcagcgcgccacgaataccgacgcgctgcctgccgcgcggaaggcggcagaagtgattcgtgataaagaacaggagaaggtgctcagtgctcgccagaaccagatagcaaaccagcctcctgacaggatggatgagctggttctgcagccgggcgtgaaggattttgacccaaagatggatcaaacccagctgttcgacgcggcgaaggagttcggaaaggattaccacgacggttaccgtatcccggataacctggcgcagctggtgctggataccgtgctgcagccggtgattttcgttctcaataccgatgatgaagcgcaggaataccggcgcatgaagcgtgacggagaagcccgggtggccgtcctctttcccgatgccggggaggccagcaacgcggagcagcctgccggactggtgagggcgctgtttgatgatcaggtgcatgactcacgcgcctggtttatgtatgccgcgctcggcacgcgcgagatgtggaccggttacttccgctaccggatgatttacttcagcgagcgctgcagtaaaccgctctcgccgctggtgctcgccggagacctggtgggttttgcgaccgtgaccgcgggtgtcgtgctcagtttccggcaaaagcgcctgaccggcaagctggccgggctggctgcgacaggcgccgtgcgctcgctggaggtggcggtgctggacaagataaccggggaagcgctgccggagctgcccggaggggcgcagttgcgggcatttacccacgagccgggaaccgttgtcgcacagcaaaaggtgcggaaagcggaagagcagctggcgcgggggcaagccgcgctgccggccagctggctggaggacgttctgacgacaacggtctga

SEQ ID NO: 224484 - DNA, 1098 bp, Klebsiella pneumoniae
atgaaggtattacatgcggcagaagtcgtgaaaggtggtgtttctacggttatgagacaacttttggaagatcaatattcttgggataaaattgataaagttgtatgtgtaataccggaaaaccaaaaagaggaactatcgccatatcacactaaatcgggaatgtatttttttaaacgtaaaaaaagaggaattctttcttttatttcattcattaaagcatttatttcatgtgtgttgcgtgaaaaaccagatatagtgcatctgcacagcaccttttcaggtgttcttgggcgactttgcctttttattttacgtccaattgttaagcctgtagtaatatattgccctcacgcattttcatttatgatgacaaatcaaaaaataaaaaagaaaatttacgtggcaatagaaaaaatactacaaaaaaatactgatgctataatctgcgttagtaaatatgagttggaagagtctgtaaaatatggatttgataaatcaaaattaattttgatatataacggtgtaccacgtaagagattttatgataaaaaaacgactggtaataacatcaatttgttattcattggtcggctagactatcaaaaaggatttgatatattaatttcagcaatggaaaaaactattaatggtaatattaaactgaccgttgttggtgattctgataacagcaatgtaaaaaaaaattccgattcaataaaatacgtaggatgggtagctcctgaaaatatagagcagtattatcgagaagctgatttggttgttgtccctagtagatgggaagggtttgcgatggtacctttagaagcaatgagttatggtcttcctgttatatccagtgatgcaacatccttaccagaagctattaaacatagggtaacaggttatcttttcaaaagtgagtctgcatcaaatcttacagatgtgttggataaacttgatttaattgaagctaaaaaattgggtgaaaatgccttgattttctttgaagaacactttcaatcaatacatatgctaaaagaagtaaaagaattatacttaattaaatttaaaattaaggatgccagcgatgaataa

SEQ ID NO: 224485 - DNA, 696 bp, Klebsiella pneumoniae
atgtgttcgatggatcgtattgaaaacaccaactgtagtcaattggatttctttcgtgaaatgcaattaactgtcaacctttctagccatcctgcttgtataaggctccgtgatggatccttttcccatttcaatcattctttcgctacaacttttctgcacaatattaacgttaacatatggtttaaccgtctggaaatctcctcttctttacgtctgtcagctcttgacgccgaagtttactcaggcgatcgaaaaatgcttattgaggaaaatttgcccattaatgggaaccgatgggattttataatagaacggatgtcatttgatggaacggagttcactctgtggaagttctgtcatcttcaacgaggcggttttttactgtctcctgttcgttctggttttataaaaaaactcaacgaatttaagaatgcactcggttttttaactgatgttcagattgagactctggctctatattcttttggtgcctcccacaatcagatttcagaggttttaaatatagcggttggaacatcgaagaacagagttaatcgtattcttgcagctttaccaatccgcacgagagaagaggttttttattttttattcgccagtggaatggccttttcattctgtaaggttgttacagaattaattggaagtcgcgttaataaattgttaactaaatag

SEQ ID NO: 224486 - DNA, 1005 bp, Klebsiella pneumoniae; identical to SEQ ID NO: 92421

SEQ ID NO: 224487 - DNA, 783 bp, Klebsiella pneumoniae
atgaatcttgagctacttgacgccccattcccccataaggatatcgagtggcgtattcagcaggcagggaaaagcggatcgtcaatttgggcaaaggtcctggcctatgtcacaaaccgggcaatcatgaagcgccttgatgaggtttgcggaaaggccggctggcgtaatgagtaccgcgatataccaaacaatggcggcgtcgaatgcggaatttccataaaggtcgatggtgagtggatcactaagtgggatgcatccgaaaacacgcaggttgaagctgtaaaaggcggacgctcaagcgctatgaagcgcgctgctgttcagtggggaataggccggtatctctacgatctggacgtaggcttcgcaactatatcaggcgaaaaagcagaaggttttacttacgcacgcactaaagagttaggcgctttttactggaagccacctgccctgcctgcatgggctcttccttcggctgtttcaagcagtggccagcgtaagccagcggtagaaacaagcggcgaacagtttcagccagtaaagccgtcgataactgcagaggaagctgacgatattctcgcggagttctgcagggaaattgagagtgaaaacaatccggaagtcataactcaaaaatacagcgaagcatggttcgctctggacggattttccgaacatcaaagcaaatgccatgaggtaactggcatccggcgcagggagataaagcaggcgttaggaagctctgaaagtgcaggtggcagccatgaaagtaacagctga

SEQ ID NO: 224488 - DNA, 291 bp, Klebsiella pneumoniae
atgaaagtaacagctgagtcaatcctgtccatcctgcgcaaggatgcgcggaacaacattacggtatttcatcgctggcagacagtgccgggagaaggtgcgcataccgttgggataaccctgaactttcatgagccctattacgccggatgggcccctgcgctggaaatgaaagaggtattcatctcagtaccagaacttgaggtcgttaagcctttcctgactgtagaacgctggggggacttaacacttggcggggaaatttaccggttaccacgggaggcccaatga

SEQ ID NO: 224489 - DNA, 600 bp, Klebsiella pneumoniae
ttgttcgcgttgctctgcctcgcggcggatgcgatcggcttcttcctgtgctttgcgccgctcggcttcaacagcggcctgtttgtctgcctctgctttctgctcggctgcaatgcgatctcgctctgcctgctcagcttgtgctttcaacacagcttcacgatgcgccgcttcttcacgttcacgctgtgcgcgctgctcaacttcgcgggctgctgcagctgctgccagtctcttaatttcttcttcatgggcaatgcgctggcgctcagcctcagccgctttatctgcctgctcacgatcgaaagcgtcattcatcagcagagccatttcgtggtcagactcaatccgagcagccagctgccgatcgaactcttcattcatggccagtgcttcggcatgcagtgcgctcatggcttcttctgccttaatgcgttcctgttcggcttcccattcggtcagcggcttacgggtcgcatcgcgcagctcgtcacatgcgtcaacgaaccgcttaatttccgcctcagcagggcgcacagcctctttaaggcgtttcaggtactcgcgccccggcttttcgattgccgtcttgctgcgtga

SEQ ID NO: 224490 - DNA, 705 bp, Klebsiella pneumoniae; identical to SEQ ID NO: 8686

SEQ ID NO: 224491 - DNA, 369 bp, Klebsiella pneumoniae; identical to SEQ ID NO: 180747

SEQ ID NO: 224492 - DNA, 198 bp, Klebsiella pneumoniae
atgcgcagttcggccagctggttcaacttcacccaggtgaagcccttcatcgtacgcaccgtaaatccccaggcctcggccagctcgatcgcctcctggttgtgggtgccggtgtaccacatcgccaatacggcgttatccgcggcgagttcccacaccgggagccgcttcatatcgagcaagctcatggtggggtag

SEQ ID NO: 224493 - DNA, 276 bp, Klebsiella pneumoniae; identical to SEQ ID NO: 118716

SEQ ID NO: 224494 - DNA, 264 bp, Klebsiella pneumoniae
gtgagccgccagacgatctggaagaaactgcataacgtaatggtgtggtttacccgagtggtaaacacgcgtctgcgcctgagcgcctattccagccgcaaaattgccgcctttaatctcatgtctgccggcggcgaacagggtttgctggtcgcctctgaaatgctcgggcacagcaacccggcaatcacccgaacttacctccagttaggcagtaaggcctccgccattcaatcccgtctggccatggaggtatctgtatga

SEQ ID NO: 224495 - DNA, 141 bp, Klebsiella pneumoniae; identical to SEQ ID NO: 36145

SEQ ID NO: 224496 - DNA, 1170 bp, Klebsiella pneumoniae
atgagtactttaaaagtgagtaacttcgccagacagggttactcgattgtctttcctttgtttctatttttcagcgcgattttttgcatgtccacccggaccaataatctgctgcatttatcgatcctgctgctattgctgtcgctggtacgccaggaaaaccgccaggcgctggccggggtgttacgcgagcagtggcagacctggacgctgctggcggctttctttatctattacgccctcagtaatgtgtggggccatacgccgcagcatattgactcgccgatcacccacggcgtgtatctgaccgggtatctgttgctgatgacgatgctgctcagggacggacgaacccgccggctggcgatgctggcggtggtcggcgggatcaccgtgctctccctgtggacgctgattatcgaccatacgctggttctcaccgaacgagcggtctcccccgagaaccccggaccaacgaacgttatcgaccttgccggttactgcggcatcggcattttaatctgcggcatgctactgaaagaaaaagccagccactggctctatctgccggtggtcatcatgctggtgatgctgctgctcacccaaagccgtgggccgatcatcgccctggtgctggcggtcggctgtacgctgcacctgcacgtcttcacccgccgcaacctgctgatcgccgcggcgctggctgtgctggtagcgctgcttttggtcatgacgccggtgggcgacatgctgctcgcccgtttcgaggagctgggcacccaaagcgggctgcgcctgagcatctggcaccatacgctgtcggagatggccagccagccgtggctggggcgcggtttcagctatgaactggatttcatcaactacagcggcgagcacatcaccaccacccacagtgtgtatatgggcgccctgctgaaaggcggcatcgtggggttactgctgctgttggcgatcattgcctgcgggctatggcaggcgtggcgcaagcgccataccgacagccgctacagtctggcgatcctgttttacgcgctggtgtttatggcctcgcaggggatgtttatcatcagcaatccccgggaaacctgggtgctgttctggctgccgctgggcattgcgctcagcaaagggttggcggaaaaacgctaa

SEQ ID NO: 224497 - DNA, 345 bp, Klebsiella pneumoniae
atgcgcatcttatttgtgattgacggtttacccggcggcggcgcggaaaaagtggtcctgaccctggcggcacagttcctgcgcgacggcgatcgggtgtcgctcatttcgctgcgcgatgtctgcgagtacccattgcccgaggggctcgactaccaggtagttgccgatcgctgccgtaaaccgtggcgcaagctgaccgagctgtcccgccgcgcccgccagctggatgccgcagtcgtgcgggccgaacagcaggggcaatttgaccttgtgctctccaacctgcacaaaaccgaccgcatcgtcgcccgcagccgggcgctgcgcgagcgtaacgtctag

SEQ ID NO: 224498 - DNA, 990 bp, Klebsiella pneumoniae
atgagtcaaacgcctttattgagcatcgtggctgccgtctacaacggtgagaaatttctagcgcaattctttgagtgcattgaacagcagcagctggacagctatgaactgatcctggtgaacgatggttcgacagacaacagcctggcggtgatcgccgaatggcaggagcggctgcagaacgtccaggtgctggagcaggaaaaccagggcgtctcggtcgcgcgcaataccggcctcgccgccgccagcggcaaatatctcgcgtttccggatatcgacgacaaactctatccgggcatgtatcgcacgctgctggagatggccgagaaagaacatctcgatatcgccacctgcaacggcacctatgtgtacgaaaagcgccgcgagagccacccgatcttcccactggatcgcctgccctcgacgggtgtgctgccgggccatgtctggcttaagcaggccctggactcgcggaagtttctgcacgtcacctggcttaatatttatcgtcacgactttatccgccagcatcacttccatttcgagcctggcctgcgccatcaggatatcccatggaccacagaagccctgctggccgcggagcgcgtgcagtacaccagtcagcagttctatgattactacattcactctgagtcggtgtcgcataagccggacaacgacgacacgctgatgcgttcggcgcgccactatatgaagattctggagatgctggaggcgattaaccagcgctacccggataaagtacgccatatcgccgcctgtcgctggcagatcgccaaagaaggcctggggatcatccataccttcgatagcatgaaagatgagtccaaaaagcatgttattattaacgagttcttcgaccgcggtatctggcggttaatctggaaaaacgcctgtactttccgtttacgctggcgcctgggacgccgttatctgcgtattaagcgttatcgccacgcgggatag

SEQ ID NO: 224499 - DNA, 732 bp, Klebsiella pneumoniae
atgatgggattaaatcaaataaacaaaaatcttgcatgttttcaattgggtcgaataataaaacaaaaaatactcagaaaaatgagcaatagcaacgctcaaaaatcaaatgtaaacattattggttcaaataatgaaaccaaggtcaaccaattcaacatttcaatttacgccaatgatgttttgtcaattacaaatgaacttagagagaatataataaataccctagagggcgagttagttaattctgaacttaatgtttttttatgctatccgaacattttgaaagataaattatttgactcttgcatcaaaaatcttaaaaccgaacttagtaaaatagatgctgtgatttatgaagggggaggaaaacaaactctgcccgatactgaaagtgtgtatatacatatagcagaattagattttattaacaaaaagtgtgatagtatcatcatattcgtcttagatgaattaaccctatcgcagataactttaataagttattacaaaataactaaagatattaaaaatccagatttgatagtcatctgcaatgacaaaataaaaaatctcgatcgttttttttcattaggtgttcttcaatattgtgacgataacagtattaaaatatttgacatatccgacattgaagatgaaaaaattgaaaatattattagacgagtcaggaataaaaagctcgtttctaaaaacaaaggccttttgggaggataa

SEQ ID NO: 224500 - DNA, 1488 bp, Klebsiella pneumoniae
atgtctaactcaataaactttcgcttacttttatgggccacctcaattattcaaccagcagccccatctgagatattatattacttgagattaatattaacagatgatggagcattacctaacattgattcattaaaacagcaccttaaagaattgcataaaattggctatgtggaattagtttccattaaaaacgagctgtattctataactccctctggcgatgaaaaactttcagcaaatttaaaaaaactaagagacaagttgcgcattttccttcttgacaaatgccataaatccactaaattgggtgtgctagcctctactgatacaaagaatatggacggcgcaccgccgtctttgcagttaaggccttacataaaagaggttccgcacccaagcctgtcttgggcgtccgggaccttgcccagccgcccaagacaggcttgggtgcggatctttgagcaattacgaattggttcaatgtccagtagtcaggctagcatcctttcaaaagatagtgacagcctaattcccgaaaaaaaaattatcgcagctccaattttctattcttacaagtcactaaacagtccccttttcgaaaataacggtattttaacggtcgcatcttgtatcggacttacaccacgacttataagctctatgataaaaaatccagatagatattatcggatttttgatatgcgtaaaaagagcggtggtgttagaaaaatatcagcaccacgaaaattcatgaaggtaacacagtactggataaatgattattttttgaataggctaaatattcactcttcatgtttctcatatagaaaggggatcagtattcatgacaatgcttatccacatcaaaataataagttcattgccaatatagacattgaaaactattttggctccattaataaaaccatgataaagaactgtcttttaagaaataatatatctgagcatatagttaatactattgctggtttaacaactctgtatggtactttaccacagggtgcacctactagccctaatatatcaaatgccatattgtatgaattcgatgaattaatgacaaaccaagctttagttagagactgtgtatacactcgatattctgacgatataaccataagtggcgataatagacatttaatagaagagctcgtcagcctcgcaaaaaataaaataaactccatgggctttaccttaaataatgcaaagtataggctgctctcatataacaacagacaagcggttactgggattttaattaacggcccactaaggccacctagagcatatcgccgaagagttagagcaatatttgaccaagcaataaagtcaaatgatcaaacctcgttaacaattaatgcgttaaaggggcatttgaattatttacagtcattcaaaaaatatggcttcagctttgaagaaactaaatattcattaatcattgaaaaattaacaaaaaagtaa

SEQ ID NO: 224501 - DNA, 246 bp, Klebsiella pneumoniae
atgatgcgctgccctttctgccgcacggcggcccacgttcgcaccagccgctatatgtctgacagcgtcaaagagagttacctgcagtgccagaatgtgcactgctcggcgacgttcaaaacgcatgaatccatctttgaggtgatacgttccccggctgtcgatgagaaacccgcgccggtgccaacagcacccgcggcaccacgtcaggtgaaaggctgttacagctcaccgttccgccattaa

SEQ ID NO: 224502 - DNA, 738 bp, Klebsiella pneumoniae
atgacgcagtccgctattattcccgactaccttaaaccctcgatagaacgcctcgaaacggccagagaagcgcatctcaccaatgcccgacgcatggacgaaaccacgacggcaatccgccaggtgcaaacccaaaaaaatgagctggagcaggaaaacggtactgattccggcgcatggcgtaccgcctttcgtgccggtggcgctgtcattaccgacgagctgaaacaacgccatattgcgcgtgtggcacggcgagaactggcacaggaatgtgacagcatgaacgaggtactgtcttttgagctggacagccttcgcggagcctgcgaccggatggccagggcataccgtcaggcgcatcacggcgtcctcagccagtatgcagaaaacgaactcgatactgccctgcgtgaaagctgcggtgccctcgtcagagcaatgaaactcagtattctggttaaagaaaatccgcttgccaacaccatcggccatcagggctatgtcgagccagagcatgacgttatgcagcaggttaaaacgtggcttgagcaggcggtgaggggctgcaatatccgtctgactgatgaacccgtgctgtttaaagcaggtctgtcggcctcttcgctgccgcatatggagcatgacgttgcgaccacacccggccagcgcaaggtctggcaggaaaaaatgcgggaacgtgaggccgacctgaaagcacggggattactgtcatga

SEQ ID NO: 224503 - DNA, 267 bp, Klebsiella pneumoniae
atgcacactgctttttcttccccgtctcctgctcctgccgcgcctctgatgccggtctctgacgccgttcatgagcgttttattcgtctgcccgaagtgatgcatttatgcggcctgtcccgttcgactgtttatgacctcatcagtcgggggaccttcccgaaacaaatcagcctcggcggaaaaaacgtggcgtgggcgcagtctgaaatcaccgcatggatggcagatcgtattgccgagcgcaaccggggctatgacgcatga

SEQ ID NO: 224504 - DNA, 321 bp, Klebsiella pneumoniae
atgaaacagccattaccgaccgtattacgtgccgcactttatcgccgcgccgtggcttgtgcgtggctgaccctgtgcgagcgccagcaccgttacccgcatctcaccctcgacgcgctggaaagcgccattgccgccgagctggagggcttctatctgcgccagcacggcgaggaaaaaggccgtcagattgcctgtgcattactggaagatttaatggaagccgggccactgaaagccgcgccgtcactgtcctttctcgggctcgcggtgatggatgaactttgcgcccgtcacatcacaccgcctgtactgcactga

SEQ ID NO: 224505 - DNA, 684 bp, Klebsiella pneumoniae
atgacggcgaatattccggtaatcaccattgatgggcctggcggtgcgggtaaaggtacgttgtgcaaggcaatggcggaagcgctgggctggcatctgttagattcaggcgcgatctaccgcgttctggcgctggcggcgctgcatcatcatgtcgacgtggagtccgaagaggcgctggtgcccctggctgcccatcttgacgtgcgttttatttctactgacggcaacctggaagtggtgctggaaggggaagatgtcagtagcgaaattcgcactcaggaggtcgcgaacgcggcctcgaaagtggcggcttttccgcgcgttcgcgaagcgctgctgcgccgccagcgcgccttccgcgaactgccggggcttatcgccgacggtcgcgatatgggaacggtagttttcccggacgcgccggtgaaaattttcctcgatgcctcggccgatgagcgggcgcatcgccgcatgcggcagttgcaggaaaagggctttgatgttaactttgaacgtcttttgtccgagataaaagagcgtgacgatcgcgaccgaaatcgcgccgtggcgccgcttgtcccggctgccgatgcattagttctcgattcaaccgaactaaacattgagcaagtgattgaaaaagcgctacaatatgcgcgcgaaaaattggccgttgcgtag

SEQ ID NO: 224506 - DNA, 1797 bp, Klebsiella pneumoniae
atgcgtctaccatggcttgccggatgcgccatcattgcaatgctgccgcttctctggctacccgtcttgccgggcccgtgcagtctggcgggcgcgagcgcactggcgctggcgctgattcgtctgcatggaagggccgtcgccggagtggcgatgacgcttctgctggtggtctggggagtattgagcgcgcatcaggcgctgtggccgacccggcaccttaccggcgccatccggcaagcggaagtgatccttagcgagacggatggccagaccttgcaccgtggacagatggtgcgcctgcggggccgctatctgtttcccccggtaggcgtaacgctgtacggggaacttgcacctgcgccagcctgtgcgggtcaacactggctgatgacgctgcgcctgcgcccggtgcacgggcagctcaatgacgggggcttcgacagccagcgctatgcgctggcgcagcaccgaccgctgagcggagggatcgtcgccgcttccgcgctggatgcccgctgcagtctgcgcgcccgctatctgacgtcgctgacccggcgactgcagacttatccctggcgcgcggtgatgttgggattaggaatgggggagcggctgtctttgccgacggagataaaggtcctgatgcagaacacgggcacttcccatctgatggctatctcgggtctgcatatcgctctcgcggcttctcttatcatgctgttgctgcgcggcgtgcagtatattctcccgggccgctggatcggctggcggttgccgctgctggccgggctggccggcgccgtcggctatgcctggctgaccggtatgcagccgccggccctgcgcacttgcttagggcttgcggtctgttgtgctttacgtttgtcgggtcaacgctgcacggcgtggcaggtgtggctctgctgtctgggagcgatactggttgccgacccgctggcggtgctgtcgcaaagcctgtggctatctgccttcgccgtggcggggcttatcttctggttccagtggctcccgttgcctgccggccgctggcgctggccgtggaagaccataattgctcttgttcatttgcaggctggcgtgacgctgttgctgctgccgctgcagctgctgctattccatggagtcagcctgacgtcgatggcggctaatttgctggcggtaccgttagtcaccctgttggcggtgccgcttattctgaccgcgatgctggtgcatctctcggggccggagatagtggagtcgctactctggctggcggccgatcgcgtgctggcgctactgttttggggattacgacgtttaccggacggctggttgacgctggatactcgctggctgtggatcagtatcctgccgtggctgttggtgatgggctggcgttttcagagctggcggcattcaccggcgttgtgtctcagcgtgctgtttttgctgacgcggccattcagccgacaaccgcctgcggacgaatggcgggtgacgatgctggatgtcgggcaggggctggcgatggtgatcgagcgtcacggtaaggcattgctttacgataccgggccggcttggccgcagggtgatagcggtcaacaggtgattatcccgtggttgcgctggcaccatctgcagctgcaagggattatgctgagccatgaacatctggatcatcgcggcggccttgattcagtgctgcaggcatggccgcaggcctgggtgcgcagcccgttaggctgggcgcatcatctgccgtgttatcgcggtgagcgctggcaatggtag

SEQ ID NO: 224507 - DNA, 288 bp, Klebsiella pneumoniae
atgatggtcaataagcggccggtgctgatctatcagacgcgcttagcgccgatcagggtgattgtcacgatcagcgacatctatctgcgcgatgcgctatatagcgataccgatgacaacgggctggcactctgggtgcagaaccaaatgattgccagatatggcgatgttaagccgctggctgcggacccacaccaggaggtatttacctcgcccgctggcaaaacagcacgacgccagcgcgctcgcccgcggaatttattccgctggccgaacgtaccggcttaa

SEQ ID NO: 224508 - DNA, 894 bp, Klebsiella pneumoniae; identical to SEQ ID NO: 216887

SEQ ID NO: 224509 - DNA, 225 bp, Klebsiella pneumoniae
atgaacaacctttcagacgtagcggcgggggcctcctacgtcacttctattggcagcggcggttactggctgctccagctccttgataaagtcagccccagccagtgggcggcgatcggcgttcttgccagtatcgttttcggtctgttgacctacctcaccaacctttatttcaaaattaaagaagatcggcggaaggcgcgggactatgagcaacaaagctaa

SEQ ID NO: 224510 - DNA, 3360 bp, Klebsiella pneumoniae
atgtcggtacccagccagacaccctataacgtctacactgccaacggtttgactaccgtttttgcttatcagttcatgattatgacagctggtgacctggaggtttctgttaacggaaacccggttagcagcggttttactgttcagggcgccggccagaccggcggtgggcaggttgtctttatcacaccgcctgctggcggatccgtcgttatgctgctgcgcaaactgacaattaagcgcgataccgattaccaggacaacggcgacttgctggcagacaccatcaacgccgatttcgatcgtctctggcttgccatgcagcaggcgtttttgagcgatagcctgtcactgaaacgccctctgctcggtggtgactataacgccggtggtctgaaaatcattggtgtcaaagacccgacaaacccacaggatgccgccacaaaaggctgggtagacctgcaatattccgttccaacttcagaggcaaaacaggctgcggctgaggcaaaagaagcacgcgatgagtcccgggagatcgctgataaattcggtgatgttgacaaggccgtcactgaagcacaagccgcaagggatgcagccgatatccatgctcaggattcagaatcagcatcggtgcgtgctcaagcggctgctgattctgcagagtctattgttgatattgatggtacatatccagatgaacctacaggtttagctgcaacagcagaaggtaaatattttcgagttcccatgggggaaggaagctcaacagcttttaaatattttcgaaaactatcaggtgcagctgtaccggttgctatgctggccggtcaggcagctgttactgatgcgcagaatcggtcccgtgtaggagcaaccggtgcttgggtgaataactcattgtacccgtttagcacatttgcttctaacaacgagaacgatttgcgcctgcatgccaacgcagtgggtagtacctcatataaagaggtgtattccccgttgactcaggtggtgggggctggggatatagtcacagttaagtacaaatactccgggactggcgccgtacctactattggtcttaaaactgcgcagaatggtacctttgtaagcaatcaacctgcgctcgctaagacgcatgactatacaactgtgcagctcacagcaacggcagctacagccaccctgctggcagtgtccctgaataccagtatagctactgacattaaattaattttaattgtttctaccaataataagaatgcaataactacagcaattttggattctattgacggcattaatagcctaagcgcccagttaacgcttggtgcagttagcaagtgggtgaataatcctgggtacccgttccctgtgttctcgcaggttaacaataaccgcgtgacatacgtcaactcgacggccgtctattcggagatgtatgccgatgttaatgtgccttctggcggtgctttaactttgaattattctctggatgttacagcaggtcgtttgtttgcgcgacttgcaaatggtagtgcatggacaggtgacgaagtgcaattagcgggtggtggagcgcgacaaacccttacattagtagcaactgatgataccagacaactgaaaatttactctaaagctgagatttcagcagggtcaattttcgctgaggttgtttatggacaaaaaaatgcacttacggaacaaatcgactcactatatacagcagtagcatcagcaaacgctattcttgcaattttatctcaaagctcaacatttgattcatttgtaaaaagctcaccctatacttacacattaagtgattctggcattgcttataaacaacttattaacacaataaatactataagcagcgttaccactgtaaaaatgatgtataaaatttcatcgacaaatgctgtgttgaaaatacaaagtagaaacggcgggaactggggagcgaatgaaacgcctttgatagctgatggaagttatcatgaggtcaacctgtcaatttcttctggccaagttttttcagggtggggagtatattcgtctgcaaaagcaggagggtattatgctgatgttacaatgataccaatatctgcaaatggagttttctttaccccggctactgcaattttgtatgggttgatgcagacgtctgcagatttagatagtcgtgttactgccctggagcagggtattgcggccgaccaaaatacggacgtaatctttcctgcaaacttctacgccgtggattcccgccccctacgtttttatggcgctaatctggtcagtggtgaacgtccgtggcataacggcgctgatgtggtgctttccagtcatggttatgaaggaaagcctattttgctcaaaagtatcgtgccggacgccaccattttaccgtcagaaatcaatggccccacgctggtagttaatgtgcgcgcagatcaatcgggtgctgtttacaggaagaaagctgcgttcactaaactggcggcaactcagacaggaaacgtaaaagtcgcgactatcatggactctctcggcgagagatgcgtaccctggctatacttcgccctcaatgccacgggggccacctacgtaggcgccggttcccgaaaaacgcgcggcatgacggacgacgggagttataccctgccaaacacaccagcggacggaattccgtttgacggtcgcggcgggtggactacgttcgactatatcggaaagacgcagaaaacaaatttcagccagcctttcctgcgtgatgcagtagcggcagacttcgatgcatatcctcaatactgttttgacaaagcgtactctgggcaaagctacgcggataacccgaacctcgccgcctatcacatctttgatgtaacagcatggatgtcagcgtcaggggtgagcgccagcgataaactggtggtggtcattcagctcggatacaacgacctctactacagctacacgccgctgcagactgcgcaggcgcaagaatttatgatcgcaaaattccgcgaaaaaatcgccaattcccggtttgttatctcacaccaggcgtttggctggtcaggcactagcgcaccagggaattgggaggggttctccccgtggattactcagaaaattaagcagttcgacaacaggttagcggacaaaatcctgctggcaccggcttgggcacagctgagctacaaatacgggatgaatgagacggtaacggccacgtctgataccggcgtccagactgtatcactgccggatgatgtccaccccggtgagcttggtggcgcgcagtggggagacgcgttgttagcgcctgttttagccgcctggcaattataa

SEQ ID NO: 224511 - DNA, 2880 bp, Klebsiella pneumoniae
atgcctatttatccgcaacctgatgcgccgctgagcgttatggataacgcacttcaggccccaacgggctttgatgtttctctgccagaaggtactaacccagaaccgcagcaggctgagccttctgtatgggatgctgcatttcgtacgaataactcactagctgggatggtacgaatgccacaacagttcgaaccggcagcagggtacaacccctatgccgataaaaatgagatcaaagggtatgagcaatgggctacagctttcgctgattcacagtctccagaggaaaccgcctggattaaaaaccacattgacaacgaaaatgaagacagacgcgttactgctgacgctggttggaaaggtaccttagcaaatatcgcatcgggcatgcttgatcctttcactctcgtatcaatgtttatccccggcgcgcagggcacccttgctgctcgtatcggttcgcaggtcgccattggcgccgctggtaccgcaattagcgaagtcgcgctgaaccagcagcagtccaccagaactgccggagagagtgccgcacacattgccgcaggcgctatgttcagcggtatttttgccactgctggcgcgatgatcaccccgtcggtaagaacagcggccacacgggaaatggctgatgcgctggaaaatgtcggcatggctaacgctattaatcgtgggatggatagcctgcccgatggtggtagtgtcggtgcgatgcagatcagacaggcaacgcttgacgatctcacgcttgatgggggaaaagcggcggatatcgcgttgaaggctggcgggtatatgacgccaatatcgcgggtcatttcgtcgccatcgcgtaacgctcgaatcacggcgctggaactggcggaaaataactttgcgctgcggggtaaccaacgcggatttgagacccctgttgcggctgaaacccgcgtgcgtggctggaggagggaggaggccgcagtagtggtcaccaataagcaggcgtatgccaaatataaatctgatggcggcgatctcaattacacccgattccgtgaagaagtcggcgacgccatgcgaaatggagacattcacggtaatgctgctgttcaggatgccgcgcgtgcattgcgtcaggtagtcgacagggtgaaagttgctcagcaggatcttggcttactaccgcctgatgcggagctaaaagcgttggggcagaccagttatttccctcgggtatacagagtggggaaaattgttgaggagcgcgataaattccgtgatcttttagttaactggtggtcgcgtgggccttccgctatgtcacgagaagatgcggagatcgccgcagacgcaacgataaataaaatcgttggcgcaaaaatcccccaggattttacgaacgtttttaccgtcaaagttcctggaagctcacggcagcgtactttaaatctgcctgataatatgatgcgcgattatctggagagtgacgctaactatgtattgcagcggcatatccgggaggcctctccggatatcgaattaacccgcgtttttggaaaccgcaaccttgagtcccaacttaaggctatacaggatgaatatgacgaactgatgcgggcgcgtcctcaggagcaggccaaattagctaaagcacgtgagaatgatatccgggatatcactgctatgcgtgatcgtttagttggtacgtacggaatgcctgatgacccatcatcattttttgttcgcgctggtcgggctatgcgtaacgtaaacttcgttaccaaacttggcggcatgacggtttccgcgattccggatctcgcccgcggcgtgatggtcaatggattcagtaaaacgatgaagggttatggtgccctgatatccaggtcaccggcgtttgccgccaacaaaagcgaaatgaaaaagatgggggttatggttgaaacggtacttaattctcgttcgcgtctgatggctgatctggttgacagctctacgcgtacgaacgcggctgaagctgggctagaccgcgtcaccgatgtgttcggaaagcttacgcttatggggcagtataacgacattaacaaagcgattaacggcatggtgaccgctgacagtattctgtccggggcagctccggcttcccggattgcgaaactgggtatcagtccggctacagccgcgcgcataagcgaacaatttcgtaagcatggcgaggtgcttgatggttggcatattggcaattttgaaaaatgggatgatgattacgcagcaggtgtatttcagtcggcagttttgaaggataccaacaacatcattattacgccgggggtaggcgatacgccattgtgggccagttcaccaataggacgcacagttttccagtttcggtccttcacgacggcatcatataaccgggcgacaatcggcggtttatcagaaggtaccgcgcagttttactatggcacggcatttcagattgcactcggtgcgctaacctacgcacttaagcaggctgcaaatggtaaagaagtggattggtcacctcagaaactggctattgaaggtatcgaccgatccggcatcctcggaccgctgatggaatacaacaacatggcggagaaggctaccggcgggatgtttggcttagggcccctactcggtaccggcacacaatcccgctacgccagtcgtggctttatcggttctgcgctggggccaaccttcggcctactggatacggtcaccgacgtaaccgctggcgtgcttaatggcgacgccggcgaccgcgtcctgcatagtgtgcgtacattactgccggggaataacctattctggatcgcgccactgattaatcaggttgaccccgggatgaaatag

SEQ ID NO: 224512 - DNA, 1989 bp, Klebsiella pneumoniae
atgcgcgccaacctgataaaaacgaattttaccgcgggcgaaatttccccgcgcctgatggggcgtgtcgatatagagcgctacgccaatggcgcaaaaattatcgagaatggcctgtgcgtggtgcagggtggcgtgatgcgccgcccgggtacgcgttatgccgcagccgccaaacatggcgaccgcaccgcccggcttatcccctacgtgttcaaccgctcgcaggcgtatgtcctcgagttcggcgacggctacgtgcgtttctaccagaacgggcagcagctggttaacggcgacaacaccccgtacgaaatcgccagcccgtacagcgtcggcatgctgcctgaagtaaattacgtccagggcgcagatacgatgtttctggtgcaccagggcgtaccaccgcaacgacttcagcgccgcgggcaactcgactgggtgctcgagccggcaccgttcatcgtcgagccgttcgacgaaatccgcgacacgccggataaatggtgcaagccttccgttaaagagtttgtaggctccgaaattaccctgacgctcagcgacgaagaaccgccggcagacgaagacggcgattttaccggtgccggctgggttgctgaagacgtgggctcatacgtccgcattaacagcggactggtgctgattaagagcatcaccagtgcgcaggttgccgtcggcacaatccgcacggacctgagcgccacgcaggcggcttcacccggcgcgtggacgcgtgaggataccgtatggactgatgagtttggttaccccggcgcggtgacgctttaccagcagcgcctggtgctggccgggtcggtgaaatacccgcaaacgatctggttcagtgagacgggcgtttacctgtcttttgagctgggaaccaacgacgacgatgcgatcagctttacgctgtcttctgaccagctcaacccgattgtgcacctggcgcaaatgaatacgctgattgcgttgacgtacggcggcgagttcactatcaccgccggcagcgatgcggccatcaccccgaccaatatttcggtgaaaaacccaagcccgtacggctgcaacagtatccgcccagtgcgtgtcggtaccgaaattctgttcgtgcagcgcgccggcagaaagctctacgcggtggcgtacgatcccgacagctatgtcgcttattctgccaacgatttgactgtgctggccgagcacatcaccgccggcggcgtgctggatatggcctatcagcagcagtccgattcgattatctggatggtgcgggccgacggtgcgctaatcacgatggggattgaccgcgcgcagaacgttgtcgcctggtcacgccagctcaccaacggtgcgtttgagtccgtggcgagcattccttccgatacagacgatgtggtgtacgcactggtgcgcagaacggtgaacggacagaccgtgcgttatgtcgaggtgttcgatagcgtgctgcatactgatgcggccgttaccggctggagcgaaccgggggcggctgtgtggtcgggattctcgcatctcgagggacaaacggtcgatgtgctggccgatggctctgtgatgccgcagcaggtcgtcaccggtgggcagataacgctgaagcgtaacgcgcacctgatagaggtcggactgcactacgacaccactatcgaaacgctcacacctgaagtttccaccaccgaaggcactacacagaacgcgcgcaagcgtaccagtgaagtaaccctgcgatttatggataccaccggcgcggagtgcaacggccaggtgatcccgttccgcacgttcggccccaagattctcaaccagccggcaccgctttttacgggtgatcaccgcatcgggaagctggggtgggagcgcggtgaagataccttgctaatccagcagcgccagccgctgccgttccaccttctcgcgataattatcacgtttaccagcaacgggggctaa

SEQ ID NO: 224513 - DNA, 564 bp, Klebsiella pneumoniae
atggcttccagtgtatccatctgctcaaacgcattgctggcgcttggcgccaatccgataaacagcttcgatgaggccagcgaaaatgcgcggctctgctcgaacctttatcccaccatccgcgacgacctgctgcgaaaacatccgtggaattgcgcagtaaaacgtgtcgtgctttcccctgaaacgaccgccccggctttcggatttcgctatcggttccccctccctggtgatgtgatccgcattttatccgttggtaacgagtacgacgacgtgcgctaccgcatcgaaaacggtcgcgtgatggcaaatgagaacgtcgtttacctgcgttacatcttccgcaacgaagacgaatcctcctgggatgctgcgctcgtcaatctggccgaggcgtttatgacggcgaagctggcctatgcggtcaccggatccgccagcctgcgcgatagcctgacacaagaggctgcgtttttgcttcgccaggcgaaagccatcgacgggcaggaagacccgccggaagagctcggcggttatccaacctacgaatcgaggttctga

SEQ ID NO: 224514 - DNA, 261 bp, Klebsiella pneumoniae
atgagtgaagcaaaaccgcaggacggcagcactgtaaaaggctaccgcacactaacgccagctgacattgagatgatgaatgaggtcaaagctgtaagccgcgagttcctcaaaaagctggatttcctcaaatttgtgcatgaaagcgaaccagagccagaccctcaaactctgcgctgcctggcaatcgcccgcaccaaaatgcaggaagcctgtatgtgggcatgccgtgcggtggcccgcccggatgtagactgctaa

SEQ ID NO: 224515 - DNA, 849 bp, Klebsiella pneumoniae
atgtggaagattaaacacttattcatgaacgccgagcagggcgccgaagcgccagcaggtagcacagggggtaatgatggtggcaatggcagtggtgctgaaaatccgggcgctggtaatcctgctggtaattcgctactcagcaccggcgcgggcgaaccgggcgcgaatgactggatacctgaaaaataccgcgttatgggcgaaggtggaaaactcgacattgaaggctctgcccgcaaactggcggatgctcacacgtcgcttgaaaagcgccttggcagcgtcggcacgccgccaaaaactgctgatgactacgccccagaggtaaaggccgagggcttcaactgggaagagttcaaagctgacccgcgcatgcagtcgtttatgaaatcagcgcacggcaaggggatcaccaacgaccagatgagtttcatcatcagcgagtatgcgcaaatcgccccgtcgctggttaacggtgcggcggaactggatgctgaatccgctaccacgcagctgcgtgaagtctggaagactgacgccgaatttaacaaaaatatcggactggctttccgtgcgttcaattccctgaccgatgaaggcgatcgcggccgcatcgatgaaatcggcaataacccgatggtgatctgcatgctggcgaaaatcggtgcggaaatgcaggaggacgcaccggcgggcgccgacagcaatccggcagagcagcagaccatccgcgacctgatgaagtccgaagcgtacatgaatccaaagcatgccaaccatgaacgcgtatctgcacaggtgaaagcgtattaccagaagcgttacggcgatcaaactgtagcgtga

SEQ ID NO: 224516 - DNA, 234 bp, Klebsiella pneumoniae
atgattacaaaacaagcatcacctgcggactacaagcgcattttcgaggaaatgcctggcgggccgcaggtgctggatgagttaacgcgccgatacgggcgcgctgcgtacgtccccggcggtaccgagggcgaccgcgaaacctgttaccgggccggacaacgtgccgtgctcgatttcattctgatgcaaatcaaccgtgcagatggagtaaacgacgatgtggaagattaa

SEQ ID NO: 224517 - DNA, 1623 bp, Klebsiella pneumoniae
atggatgatctcgccgtaaagctggttaagcgtgccgatacgctgaaagccaaccgacaggtgcacgaaagcgtctggcgggaatgctacgactacacctatccgctgcgcggcgcggggctatccgatgaggtgctggacgcacagagcgcgaaatcaaaggtggcacggctgcttgacggcacggccaccgacagcgcccgcatgctggcgtctgctctcatgtctggcatgaccccagcaaacgcacagtggctgaacctagacagcgaatcgctgccggatgatgccgccgcgtggttgtccacctgtgcaacgctggtatgggaaaatatccacgccgccaacttcgacgccgaaggctatgaggcgaatctcgatgtggtgtgcgctggctggttcgcgctgtacatcgacgaagaccgcgaagagggcggattctcgttccagcagtggccgctggcgcagtgctacgtcacatccacccgccgcgatggcatcgtggacaccatttatcgccgctaccagctcaccgcagagcaggcgattaaagaatttggcgcggataaggtcagtaagaagattcgcgatgcggccgccaaaaagccggatgacaaattcgaattcctgcactgcattttcccgcgtgaaaactacgtggtgaatgcgcgcctggctaaaaacctgcgctttgcatcgtacaacgtggaagtgagcggcaagctcattgtgcgcgaatccggctatcacgaattcccctgctgcgtaccgcgctggatgaaaatccccggcacgccgtacggtatcggcccggtatacgacgcgctgccggactgcaaagagctgaacgaaacgaagcgcatggagaaggccgcgcaggatctggcgatcgccgggatgtggattgcggaagacgacggcgtgcttaacccgcgtactgtcaaagttggcccgcgccgcatcatcgtggcaaacagcaccgaaagcatgaaaccgttgctaaccggcgccgatttcaatgtggcatttaccgcagaagaacgcctgcaggcgtctatccgcaaaatcatgatggccgatcagctgcaaccgcaggacggcccggcgatgaccgcaactgaagtgcatgtgcgtgtggcgctgatccgccagttgctcggcccggtctatggtcgattccaggctgaatacctgcagccgctggtagagcgctgcttcggcctggcatatcgtgccggtgtattcccgccagcgccggatagtctgcaaaacgccaatttcaacgtgcgctatatctcgccacttgcccgcgcgcagcagctggagaacgtcaccgccattgaacgccttggcgcgaacgtggcgaatctggcgcaggtatcacccgatgtgaccgacctcgtagacaccgacgaagcaacacgcgtgatagcggatgcgctgggcgtaccggcgaaagtcattcgctcgtctgatgccgtcgaacaacttcgccagcagcgccagcaggcgcagcagcaacaggcaaggcaggcgcttatgatgcaggcaggtagcgaagcggccaccacagcagggcagcaggtgggcgctgcgctgggccaacgagtagcggggggctaa

SEQ ID NO: 224518 - DNA, 225 bp, Klebsiella pneumoniae
atgtgtggtggaagtgcaccgaaagtcgtacagcaggatccgcaggctgaggcagatgcagcagccgacgcagcagcgaaggccgcgaacgccgacgcagcggcacgcaagaagcgcaagaaaggttcctcgttgctggcaagcggtgccgaaggcgcaacggatacaggttcttccctgctgtctaccggcgcgcaggcagcgaaaaataccttaggggcataa

SEQ ID NO: 224519 - DNA, 396 bp, Klebsiella pneumoniae
gtgacggatgaaaatacgctagtggaggaattgcaattgctgaattccgaaaccgcgccggttccggttgccgtggagggaaaagcctcagcgccagaaattcaacagcgtgtagcgcagctgcttgatggtaccgctcttgcagaacgtaacgcgatccttgccgctctcaattctcagggtgcaacaaccatcgctcgttttgatgaactggattttatttccatcaatggccagcgacttaccgacaacctcgaattcctcaccctcgtacgcaaagccactgacgccaccaacggcagcgctggtgcaatggtgacgaacgaagagggcaagccgcagccagtacgcggcgcacctgtattaaccgaacacggctggcacgttccaggctaa

SEQ ID NO: 224520 - DNA, 597 bp, Klebsiella pneumoniae
atggcgcagtattcttttgtaaaagcaccaggcaatgtattaattccggcgacgcctgacgcccgcgaatttttagaaaaaaaagtccgtatgggcggtattttgtatgcggattttaagcaggcaagaaacccggcattccaccgcaaatttttcgccctcctgaatctgggctttgattactggcaaccttctggtggtgcaatatcgccagccgataaaaacctggtacgtggctatgtgcaactggtggcccactatgccggacacgccgacactttgcaggaattggcggatcagtatctccgcgatgaagcagaaaaacgcgccgggaatatcagcgcggtaaaatcgtttgaagcgttccgttcctgggtgactatcgaagccggtttttataccgaataccagatgcctgatggcactatccgcaaggaacccaaatcgatatcgttcgcaaaaatggacgatgtagagttttcccagctgtacaaatccgtattagacgtcctctggaacttcattctgttccgcaccttcccaacgcagcaggcagcagaaaacgccgcttcgcaattattcagctatgctgcgtga

SEQ ID NO: 224521 - DNA, 342 bp, Klebsiella pneumoniae
atgcctaaatctcccgcagaacgcaaagccgcgcagcgtgcgcggcagtccgccgctggcgagcgcaagattgaactggtgctggatgagcaggagcaggaaatgctggcgcgaaattgtgccgcccggcgccctggtcgtgcgccgtatgaaatggtcgagtacatcgcgctgctgattcgtcaggatgatgcccgggtgcgcggccggattaaagccatcagcaaacggtgttgcggtaagtgcggtgatcggttgccggtggcatcctgtccgcactccggagaagccgcttgctgggtaatgtacggctggcacgaaaccaaactgtcagcatattga

SEQ ID NO: 224522 - DNA, 315 bp, Klebsiella pneumoniae
atggctgagttacgcgcaggttgtcaggcgatgattattggcggcttctaccgcaccaatgacgggaagtcagtgctggtcgtcggtttcgtgccgaatggctcccggtttacctggaatggagaggtgtacgctgagccggttcctatgggagatgcatggttgatatcaggcgatcttgtggcacgggatggcgctactggagaggcaaaaaggatggatttcgcgctgatgccagcaaaatacctgatgcccattgatggtgatgacttcagcagcgaagacgagcgccataaggagcgggagcatgcctaa

SEQ ID NO: 224523 - DNA, 591 bp, Klebsiella pneumoniae
atgagcaaaaaatacactttgatttatgcggatccgccctggacgtaccgcgataaagccaaagatggcgagcgtggcgccgggcataaataccagaccatgactgtgctcgatatctgccgtctcccggtctgggaactggccgctgaaaactgcctgcttgctatgtggtgggtaccgacgatgccgctcgaggctttgaaggtggtcgaggcgtggggtttccgtctcatgacgatgaagggatttacctggaataagtgcggaagccggcagaccgacaaactcgttatgggaatggggcatatgacgcgcgcaaatagcgaagattgcttgtttgctgttaagggaaatcttcctgcccggctggatgccgggatcatccagtctttcactgcgccgcggctcgagcattccagaaaacccgactgtgtgcgcgaaatgctggtgcaactgctgggcgatgtaccgcgtattgagttattcgcccgccagtcatcgcatggtttcgatgtgtggggcaatcagtgtgaatcgccagcggtggcgctgctgccgggcattgcggaatttattggggaggtagcttag

SEQ ID NO: 224524 - DNA, 153 bp, Klebsiella pneumoniae
atgaaaaagctttttaaacaggagtttgaaaattacagcgggcgtacgctgcgagttttcgccctgacgttgaactttgttgtgctgtttatcgtggttgctgcgctgtcagccttcggtatctgcatggttaacgtctgggggaatcaatga

SEQ ID NO: 224525 - DNA, 669 bp, Klebsiella pneumoniae
atgaccacaaatttaaattacccgaaaccagttaatccggatgatggctgtaactggctacccgttattctctggcgcatgaacgccggcgcccgtgcgcggagccgttctgtatttgttgccgcaccacgaccagtaccagtgccggggattactccgcaaaagccagttaaacgcgaagcgccggtgcccgcagtttcaggtcgtcgccgtaaaacccatatcggcaccgtgatttattccaaaggtgaaaaaaatgtgcgcctgagtgagggggtcaccgtctggtcagcgggcgctaacgagcatttcgataaaaaaacaggtcagcgtgtcggtggtgctggccgtcatcggctgctactcgacagcgttcgcccgctgcttgccagcgatgatcaacctggtgccgggaaagttaccgcgcagcagctggtcgccgtgatgaaaggcaaaacgctttcttaccagactattctgggccagcttcagaaacactatccggaatgtcaggtcactctcaaagaaattcaggatcgagttttaaaaatgttcagttcgaactatgtcggtatcactcgccatgaagatacgccagtagttcatttcacgcttaacagcgtggatccccgttattacgtcgagtcagcgaaaaacaagagggtgtaa

SEQ ID NO: 224526 - DNA, 219 bp, Klebsiella pneumoniae
atgcagacaactacagaccgcatcacctggcggaacggcttccgcctgaatggtgagcctgccttcatgtgtgacgtgcaggagattttcgaagaacgtctcactgccaaaaaatgggaactctacgaactgcgcaaagccgagctgcgggaagagaacctcacgcctaaagaatacgaaaacgcctgccgccagctggccgatatgctggggatctga

SEQ ID NO: 224527 - DNA, 1116 bp, Klebsiella pneumoniae
ttgagagttctacacgtctataagacctactatcccgatacctacggcggtattgagcaggtcatttatcagctcagtcagggctgcgcccgccgggggatcgcagccgatgtttttacttttagcccggacaaagagacaggtcctgtcgcctacgaagaccatcgggtcatttataataagcagctttttgaaattgcctccacgccgttttcgttgaaagcgttaaagcgttttaagcagattaaagatgactacgacatcatcaactaccattttccgtttccctttatggatatgctgcatctctcggcgcggcctgacgccagaacggtagtgacctatcactcggatattgtgaaacaaaaacggttgatgaagttgtaccagccgctgcaggagcgattcctcgccagcgtagactgcattgttgcctcgtcgcccaactacgtggcctccagccagacccttaaaaaatatcaggataaaacggtggtgatcccgtttggtctggagcagcatgacgtgcagcacgatccgcaacgggtggcgcactggcgggaaaccgtcggcgataacttcttcctcttcgtcggcgctttccgctactacaaagggctgcacattctgctggatgccgccgagcgtagccggctgccagtggtgatcgtcgggggcgggccgctggaggcggaggtgcggcgtgaggcgcagcagcgcggactgagcaatgtggtgtttaccggcatgctcaatgacgaagataaatacattctcttccagctctgccggggcgtggtcttcccctcgcatctacgctcagaggcgtttggcattacgttactggaaggcgcgcgctttgccaggccgctgatctcctgcgagatcggcaccggtacctcgttcattaaccaggacaaagtaaatggctgcgtgatcccgccgaatgacagtcaggcgctggtggaggcgatgaatgagctctggcataacgatgaaaccgccagccgctatggcgaaaactcgcgtcgtcgttttgaagagatgtttacagccgaccatatgattgacgcttacgtcaatctctacactacgctgctggaaagcaaatcctga

SEQ ID NO: 224528 - DNA, 3642 bp, Klebsiella pneumoniae
atgcgtattgtcattgatttacaaggcgcgcagacggaaagccgctttcgtggcattggtcgttatagtatcgctatcgccagagccataatcagaaataacagccagcatgagattttcatcgcgctatctgccatgctggatgagtcaattgcggatgttaaggcgcaatttgccgatctcttgccggctgaaaatatagtcgtctggcatgccgtaggtcctgtgcgtgcgatggaccaaggtaatgaatggcgtcgggagagtgcggaactgattcgggaagcgtttcttgaatcattgcgtccagatgtcgttttcattacgagcttgtttgaaggtcatgtcgacgatgcggccacatcggttcacaaatttagtcgtcagtataaagtagccgtactacaccacgatcttatccccctggtgcaggcggaaacctatcttctggacgatgtcttcaaaccctactatttacagaaagttgaatggttaaaaaacgctgaccttttattgaccaattcagcgtataccgcccaggaagcgatcgagcatctgcatttgcagggcgatcatgtacagaatattgcagccgcagccgatcctcagttttgtatggcggaggtgacaacgagcgaaaaagagacggtccttggccattacggtattcagcgcgagttcgtgttgtatgcgcctggaggatttgactcaaggaaaaactttaaacggttaattgaggcttatgccgggctcagtgatgccttacgtcgcactcatcaactggttatcgtcagtaagctttccattggtgatcgtcagtatctggaatccctggcgtcagggaatggtttacagcagggcgaactggtactgactggttatgtgccggaacatgagctgatccaactctatcgcctgtgtaaactgttcatctttgcttcgctacatgaaggttttgggctacctgttctggaagcaatgtcgtgcggtgcgccggccattggctcaaatgtcaccagtattcctgaagtcatcggtaatcctgaagcattattcgacccgtattctgtctcttccattcgggataagatcgcgcaatgtttgactgataatgtattcctggcacatctgaaagaaatggcgcagcagcaagcgcgtaatttctcttgggataaagcagcggtgactgctctggaagctttcgagaagattgcgacagaagactccggcatcgcgcaggctttgcctgaggcattgattcagaagatccttgctatctctcatgggcaaccagatgagcgcgatctgcgcttgtgcgcaacggccattgattacaatctgaagacggcagaactttatcaaattgacgataaggcgctgacctggcgagtggaaggtccattcgatagctcatatagtctggcgctggtcaatcgggaatttgcccgggcactctcagccgatggcgtagagatgttattgcactccactgaaggaccgggtgattttgcgccggatgcctcgtttatggcacagccggaaaatagcgatctcttggcattttataaccaatgccgtactcgcaagagtaacgaaaagatagatattcttagcagaaatatctatccaccgcgggtttccgaaatggatgccaaagtaaaactccttcactgttatgcctgggaagaaacaggatttccacaaccatggatcaatgaatttaaccgggaacttgacggagtgctgtgtacttcggaacatgttcgtaaggtattgattgataatggactgaatgtgcccgcattcgttgttggcaatggctgcgatcattggctcaataccccggccgaaacgacaaacaatgtggatgacggaaccttccgtttcctgcatgtctcttcgtgtttcccacgcaaagggatacaggcaatgcttcaggcctgggggagggcattcactcatcgtgacaatgtcatcttgatcattaagacgtttaacaatccgcacaatgaaattgatgcgtggctggctcacgctcaggctcaattcgcggaatatcccaaagttgaagtgatcaaagaggatatgtctgccagtcaacttaaggggctttatgaaagctgcgatgttctggttgctccaggttgcgccgaaggctttggcttacctatcgctgaagcaatgctgagtgggctaccggccatcgtcaccaactggagcgggcaacttgattttgttaattcacaaaattcatggctggttgattatcagtttacccgggtaaaaacgcactttggtctgttttcctcaacctgggccagtgtggacattgacaacttaacggatgcgttaaaagcagcagcctcgaccgataaatcagtgctgcggggcatggccgattctggacgcgagcttattctgcagcattttacctggaaagctgtggccgatcgttcttgtcaggcggtcaagactctgcgcgcgcatattgatattgctcagcatcgggcgcgcattggctggttgacgacctggaacacgaaatgtgggatcgcaacctattctcagcatctggtggagagtgcaccgcatggcgcggatgttgtttttgctccccaggtcagtgctgaagatcttgtgtgtgcagacgaagagtttgtactgcgcaactggattgtaggtaaagagagcaactatctggaaaacctccagccacaaattgatgctctgcgactcaatgtcatcgtgatccagttcaattatggattctttaatcatcgcgaactgtcggcctttattcgtcgccagcatgacgctggtcgttcagttgtcatgacgatgcactcaactgtggatccgctggaaaaagagccgacctggaatttccgtcttgccgaaatggcggatgccctggcgctttgtgaccgattgttggtgcattcaattgccgatatgaaccgccttaaaggtttaggcctaaccgataatgttgctttattcccgcacggggttatcaactacgctgctggaaacgccgcgcgtcaacagcaggctttaccgttaatcgcgagctatggcttttgcttaccgcataagggcctgatggagcttgtagaatccgtccatcgcctcaagcaggccgggaaaccggttcgtttgcgtctggttaacgctgagtatccggttggagaatcacgcgatctggtggcagaacttaaagcggtagctcagcggctaggagttaccgatctcattgagatgcataatgatttcctgccggatgaagaaagtttgcggctgctctcggaagctgaccttctgatctttgcttatcagaataccggggagtctgctagcggggcggtacgatacggtatggcgactcaaaaacctgttgcggttacgcccttggcaatatttgatgatttagacgatgcagtctttaaatttgatggatgcagcgtcgatgatatcagtcagggaattgaccggatcctgcattccatccgtgaacaggacgcctgggcgaccaggactcaacaacgtgccgatgcatggcgggaacaacatgattattatgctgtttcacgccgtttggttaatatgtgtcaaggcttagctaaagctaaatattttaaataa

SEQ ID NO: 224529 - DNA, 1278 bp, Klebsiella pneumoniae
atgggttcgtcgttttatcgttcatttgaagaacgacacagaggttcggttgaagatatcaagagccgcctgagtttttatttaccttttctctcacgtctgaaggaaatttatcctgatggtgtgattgcggatattggttgcgggcgtggcgaatggctggagatcctgactgaaaatggcattgcgaacatcggcgtcgatcttgatgatggcatgctagcgcgcgctcaggaagctgggctgaatgtgcagaaaatggattgtctgcagtttctgcaaaatcaggcggatcagagcctgatagcgttgaccggttttcatattgcagagcatttgccttttgaggtactgcagcagctcgtcatgcataccttgcgggtgctgaaacctggtggtttactaatcctcgaaacgccgaacccggagaatgtaagcgtcggcacctgttcattttatatggatccaacgcataatcatcctctgccgccaccattgcttgagtttttacctattcattatggttttaaccgggcaattaccgttcgtctccaggaaaaagagattcttaaatctccggatgctgccgtcaatttggtcgatgtactaaaaggggttagcccagactacagcatcattgctcagaaaaccgcacctgaagatattcttgaacgctttgaaatcctgtttactcaacagtacggcctgacgctagatgccctgagcaaccgttacgatgagattttgcgcgaacagttttcgtcctatgcctcacagctggagacgttgaaccatacctatacgcgccagataagcaaaatgtcggagactattcagacgttgcaaggtcaggttgacgaactgagccatgtcatcggtcagaatcatcagcttcatcagcaaatggcggacttacataacagtcgttcatggcgtatcactcaaccactacgctggttgtctttgcaacgtcaattattacgtcaggaaggggcaaaagtgagagcccgtagggcggcgaaaaaaatattgcgcaaaggaatggcgctctcgctggtctttttccatcgctatcctaagtcaaaggtttatctgtttaaggttttgagaaaaacaggctgctacaaattgctacaacgtttgttccagcgggtcatgctggtgcactctgacacgatgatgatgcagtccagaagatatgatgtgggtactgaagaaatgacaagccgcgcgttgagtatttataacgaattaaaaaataaaaatacggagaaataa

SEQ ID NO: 224530 - DNA, 1215 bp, Klebsiella pneumoniae
atgagttatatcagagtaaagaatgtcggtaaggcttatcgccagtatcattcaaagaccgggagactgatcgaatggttatcccctcttaataccaaacgccataatctgaaatggatcctcagcgacattaattttgaagtggctccaggcgaggccgtcggtattatcggtattaacggtgcgggtaaaagtacactgctaaaactcattaccgggacttccaggcctacgaccggagaaattgaaatctctggacgtgtcgctgcattactcgaactggggatggggtttcattctgatttcactggccggcagaatgtttatatgtctggacaactgctggggttatcctctgaaaaaataactgaactgatgccgcaaattgaagagtttgcggaaattggtgactatatcgatcagcctgttcgcgtctattccagtggtatgcaggttcgattagctttcagcgtagcgacggctatccgtcccgatgtgctaattattgatgaagcattatctgttggggatgcttatttccagcataaaagctttgagcgtatccgaaaatttcgtcaggaaggtaccacacttttgctggtatcccatgataaacaggcgatacaaagcatttgcgaccgggccattttgttgaataaaggccacattgagatggaaggcgaacctgaagcagtgatggattattacaatgcgcttctggccgataagcaaaatcagtccattaaacaagttgagcacaatggtaaaacgcaaactgtttcaggcactggtgaagtaactatctctgaggttcatcttctcgatgaacatggcaatgtgactgaatttgcatcagtagggcatcgtgttagcttacaggtcaacgttgaggtcaaggacgatattcctgaacttgtcgtcggatatatgattaaggatcgactagggcagccgatttttgggaccaatacgcatcatctcaaacagacgctcacctccctgaaaaaaggagaaaggcgctctttcttattctctttcgatgcaagattgggggttggatcctattctgtcgctgtcgcgttgcatacttccagtacgcacctcggcaaaaactatgaatggcgcgatctggcagtggtattcaacgtcgttaacacggaacaacaagagtttgtcggcgtgtcctggttgccacctgaactggagatttcttaa

SEQ ID NO: 224531 - DNA, 795 bp, Klebsiella pneumoniae
gtgagagatttactaacgacgatttatcgttatcggggatttatctggagcagtgttaagcgtgattttcaggctcgctaccaaaccagtatgctgggcgcactatggctcgttttacaaccgctctctatgattttggtctatactttggttttttccgaggtgatgaaagccagaatgcccgataataccgggccgtttgcctacagtatttatctctgctctggtgtgctgacctggggattatttacagagatgctggataaaggtcagagcgtattcataaacaacgctaatttgatcaagaaactcagttttccgaaaatctgtctgccgatcatcgtgacgttatcggctgtgcttaatttcgcgattatattcagtttgtttctaatttttatcattgtcaccggtaactttccaggctggctctttctctcggtgattccggtcctgcttttgcagatcctgtttgccggtggactaggtatgattctcggagtgatgaacgtctttttccgggatgtagggcaactggttggggttgcactgcagttctggttttggttcactcccatcgtttatgtgttgaattcattgccagcatgggcgaaaaatttgctgctctataacccgatgactcgggtcatgcaatcttatcagtccatcttcgcctaccatcaggcacctaactggtattcgctatggccagtattggctctcgccattattttctgtgtcatcggttttaggatgttccgcaaacatgcggcagatatggtggatgaattataa

SEQ ID NO: 224532 - DNA, 855 bp, Klebsiella pneumoniae
gtggtgaactccggcaacggggcggcggggcacgtgattgatgaagtggagaaacgcttcgcggcggccggggcgccggtgacctttatcaaggtgcatcaccagccggacggccatttcccgaacggtatcccgaacccgctgctgccggagtgccgccaggacaccgccgacgcggtgcgtgcacatcaggcggacatgggtatcgcctttgacggcgacttcgaccgctgcttcctgttcgatgacgaggcgtcgtttatcgaggggtactacattgtcggcctgctggcggaagcgttcctgcagaagcagccgggggcgaaaatcattcacgacccgcgtctgacgtggaacacggtggacatcgtgacccggagcggcggccagccggtgatgtcgaagacggggcatgcgttcatcaaggagcggatgcgccaggaagacgccatctacggcggggagatgagcgcgcaccattacttccgcgacttcgcctactgcgacagcgggatgatcccgtggctgctggtggcggagctgctgtgcctgaagaacagttcgctgaaatcgctggtggcggaccgccaggcggcgttcccggcgtcgggggagatcaaccgcaagctggggaatgcggcggaggcgatagcgcgcatccgggcgcagtatgagccggcggccgcacacatcgacacaacggacggtatcagtattgaataccctgagtggcgctttaacctgcgcacgtccaacacggagccggtggtgcgtctgaacgttgagtccagagcggacgtagcgcttatgaatgaaaaaacgaccgagctgttacacctgttaagcggggaataa

SEQ ID NO: 224533 - DNA, 546 bp, Klebsiella pneumoniae
atgacacagttaacatgctttaaggcttatgacatccgtggtgaactgggcgaggagctgaacgaggacatcgcctatcgtatcggccgcgcctacggcgaatttctgaaacccgagaagatagtggtggggggcgatgtgcgcctcaccagcgagtcgctgaagctggcgctggcccgcgggctgatggacgccggcaccgacgtgctggatattggcctgagcggcacggaagagatttacttcgccactttccacctcggggtggacggcggcatcgaggtgacggcgagccataacccgatgaactacaacggcatgaagctggtgcgcgagaacgcgaagcccatcagcggcgacaccggcctgcgggatatccagcgcctggcggaggagaaccagttcgcgccggtggaccctgcgccagatttcggtgctgaaggagtacgtcgaccacctgatgggctacgtggacctggcgaactttacccgtccgctgaagctggtggtgaactccggcaacggggcggcggggcacgtgattga

SEQ ID NO: 224534 - DNA, 1416 bp, Klebsiella pneumoniae
atgttacttcctgtaattatggctggtggtaccggcagtcgtctctggccgatgtctcgcgagctttatccgaaacagttcctccgcctgttcgggcagaactccatgctgcaggaaaccatcacccgactctcgggccttgaaatccatgaaccgatggtcatctgtaacgaagagcaccgcttcctggtggccgaacagctgcggcagctcaacaagctgtccagcaacattattcttgagccggtcgggcgcaacaccgccccggccatcgccctggcggccctccaggccacccgccacggcgacgacccgctgatgctggtcctcgccgccgaccatatcatcaataaccagccggtcttccacgacgccatccgcgtcgccgagcagtatgccgatgaaggccatctggtcaccttcggtatcgtgccgaacgccccggaaaccggctacggctacatccagcgcggcgtggccctcaccgacagcgcccacaccccgtaccaggtagcccgcttcgtggagaagccggaccgcgagcgcgccgaggcctacctcgcctccggggagtactactggaacagcggcatgtttatgttccgcgccaaaaaatacctttccgagctggccaaattccgcccggatatcctcgaagcctgccaggccgcggtcaatgccgccgataacggcagcgacttcatcagcattccgcatgacattttctgcgagtgcccggacgagtccgtggactacgcggtgatggagaaaaccgccgacgcggtggtggtcggtctcgatgccgactggagcgacgtcggctcctggtccgccctgtgggaggtcagcccgaaagatgagcagggtaacgtcctcagcggtgacgcgtgggtgcacaacagcgaaaactgctacatcaacagcgacgagaagctggtggcggccatcggcgtggagaacctggtgattgtcagcaccaaggacgccgtgctggtgatgaaccgcgagcgttcccaggacgtgaaaaaggcggtcgagttcctcaagcagaaccagcgcagcgagtacaagcgccaccgcgagatttaccgtccctggggccgctgcgacgtggtggtccagaccccgcgcttcaacgtcaaccgcatcaccgtgaaaccgggcggcgccttctcgatgcagatgcaccaccaccgcgccgagcactgggtcattctcgccggcaccggccaggtgacggtcaacggcaagcagttcctgctgaccgagaaccagtccacttttattccgattggcgccgagcacagcctggaaaacccgggccgcattccgctggaagtgctggagatccagtcggggtcgtacctcggcgaggacgacattattcgtattaaagaccagtatggtcgttgctaa

SEQ ID NO: 224535 - DNA, 1005 bp, Klebsiella pneumoniae
atgaagtttttggtcactggtgccgcaggttttatcggcttccatatcgcgcagcgcctgctgaatgaagggcatgatgttgtcggaatcgacaacatgaacgactattatgacgtcagcctgaagcaggcccgtctggatcgcctggcttctccggcattccatttccagcagctggatctggccgaccgtgaaggtatggcaaagctgttcgccgcagagcaatttgaccgcgtgatccacctggccgcccaggccggcgtgcgctactcgctggaaaacccgtatgcctacgcagacgctaacctgatggggtacctgaacattctggaaggctgccgtcataccaaggtgaaacacctggtgtacgcctcctccagctcggtttacggcctcaaccgtaaaatgccgttctccaccgaagattccgtcgatcatccggtctccctgtatgccgccaccaagaaagctaatgagctgatggcgcacacctattctcacctgtacggcatcccgaccaccgggctgcgcttctttacggtttatggtccgtggggtcgcccggatatggcgctgttcaagttcacgaaagcgatgctggaaggaaaaagtatcgacgtttacaactacggcaaaatgaagcgcgacttcacctatatcgacgacatcgtcgaggcggtggttcgggtgcaggatgtgatcccgcaggccaatgccgactggaccgttgagagcggttccccggccaccagttccgcgccgtatcgggtatataacattggcaacagctcaccagtggaactgatggactacatcaccgctctggaagaagcgctgggaatggaagcgcagaagaatatgatgccgattcagccgggcgatgtgctggacaccagcgcagatactcaaccgctgtatgacctggtgggctttaagccgcaaacgtcagtgaaggacggcgtgaagaactttgtcgagtggtataaggattactatcagatctaa

SEQ ID NO: 224536 - DNA, 1167 bp, Klebsiella pneumoniae
atgaaaattactatttccggtacaggttatgttggtttatcgaacggtgtcctgatcgcgcaaaaccacgaagtggtggccttggatatcgtacaggccaaagtggatatgcttaaccagaagatctctccgattgtcgataaagagattcaggaatatctggcagaaaaaccgttaaatttccgtgccaccacggataagcacgacgcataccgtaatgccgactacgtgatcattgcgacgccgaccgactacgatcccaaaaccaactacttcaacacctctacggtggaagcggttattcgcgatgtcacagagatcaacccgaacgcggtaatgatcattaaatcgaccatcccggtggggttcacccgcgacatcaaagaacgtttagggattgataatgttattttctctcctgagttcctgcgtgaaggacgtgcactgtacgacaacctgcacccgtcgcgtattgtcatcggtgagcgctctgcgcgtgccgaacgttttgctgatctgctgaaagaaggcgcgatcaagcaggatatcccaaccctgtttaccgactccaccgaagcggaagcgatcaaactgttcgctaacacctatctggcgctgcgcgttgcctatttcaacgagctcgacagctatgctgaaagccaggggctgaacagcaaacagattatcgaaggggtatgcctggatccgcgtatcggcaaccactacaacaacccgtcctttggctatggcggctactgcctgccgaaagataccaagcagctgctggcgaactacgaatcggtcccgaacaatatcatcgccgctatcgtggatgctaaccgtacccgtaaagactttatcgcggattctattctcgcccgtaagccgaaagtggtgggtgtgtatcgcctgatcatgaagagtggttcggacaacttccgtgcctcttctattcagggcattatgaagcgcatcaaggcgaaaggtattccggttattatctatgaaccggtgatgcaggaagatgagttcttcaattcccgcgtcgtgcgcgacctgaatgccttcaaacaagaggcggatgtgatcatctctaaccgtatggcggaagagctggcggatgtggcggacaaggtttacacccgcgatctgtttggtaacgattaa

SEQ ID NO: 224537 - DNA, 1536 bp, Klebsiella pneumoniae
atgaaaatatcacgccgaaaaatactcaactttattataccaactttggtagggacatttttttcaggaaaaactctttcaaaggaacaaaaagaaaaatcaagtgataataaatccaataaccaagcaaatcaatatatgtatcacaatttaatggatagcccacaaggttacaaatttgtaggcggattttttgaagcagaaggaaaagcgcttgcaggtttaaaaggtgaatcattacagtccaggatactgaaaagaggacaatttgatattgaatccataccaaaccagtcacaagggattgcaggtatggtatttggcggacaaaacaatagaatagccataataggagatcaaaggggccgtattcaagtttatgcaagcatgaatggacttcataccgcacaacagatttcaataccatatatagagggtactgggatatttcatggcccacaccaagatagaatagtaaaatttccttgtgcaggtaacgaagatgataatctttctcctggattgtggttttctacatcaaaagacgggatcccagatttatatttagtatctccgttaagatacacggactttgataacccacatcaaaaaagcatcaattccacacaatttaaggtactcttagaaaaaagactcatccctgagtcactgcagcaaaaaaaatattcaacagtctggaatactgatcactgctggcttaagatcctaggcattagccatgataaagaacatctcggttcagtgtcaggaatattctcaaccggaagcccaaatagtaattcaaacataaagtactctatagacatagctaacttaagattattaaacgctgagaaaaacaatattaatgaactaatatcgatagttggattaaaagatttatctaattatgcatggagtcgtgacaatcttactaaattcgctattgagtttaacgaagaactcaaacaaataattttatacgctaaaataccgccacgttccgaaggaagtactttcataccaacacgaattacaaatgaacaacacataaaaatttataacgaagagaataacttaaagcatgagcctaaaaacattatttatattgaacctagctatgttttagaagataaccatatatgtagaatgcaagatggtatcctgaaatacacaccaggaatagtggttagggtaacacctgagcagaatgagctaattgacattcatggatttaccagaaatgataagcaatcatttatcagcaataaatatataggtaataaaaaaatatcaatacaaaaaataaataattcccaattaaaaatcgatggtgccgttccctataataaatactggaatgtttactcaccaatagatttaaacacagatgaaaaaatatgcattataaaaatagaagaagttacagataacggttttatagttaaactattatctaaagatggtgcaagagattacgatatcaatttattaccaaagaatagttggttcgatttacatgtaagaccaaaatga

SEQ ID NO: 224538 - DNA, 252 bp, Klebsiella pneumoniae; identical to SEQ ID NO: 136977

SEQ ID NO: 224539 - DNA, 615 bp, Klebsiella pneumoniae
atgtcaaacacaaatgaaaccccacatggggtgtcaaaatttaatttctcatctcagagcggaggcaaagaggcaataacacgcatccttcaagcctatggattcagcactcgccaagctctatgtgaccgtcttgggatatcgcaaagcactatggcgaaccgatggatgcgcgacactttcccgcatgactgggttatcgcgtgtcatcttgatactggcgcctcactattgtggttagcaactggtcaaggcagccccggaatgaacaacgcttctgaaaatgggttgcgtttgcaatataaagaaatcacaaacgggattatttcagactcaatagctgttcattacgattcgcatctaatccctaataatgcaacaagcccctctttagtgaagtttgaaggcgatgtgtatctagtggatgaatataagggtgaagtaaacgatggagtatggttcatagagattgatggattttacagcgttagacgaatttacagattaccaggctcgcggttgcgggttgagaatggtcctgcgtctttcgaatgcgaagtgtccgggattttagttttaggaaagatcataggaaaaacaactttcacggagtga

SEQ ID NO: 224540 - DNA, 201 bp, Klebsiella pneumoniae
atgttgactaaacaaccatcactcgcatcgctgctcgttaagcaaagtccatcacctcatttcgggcatggctggatcatggggaaggatggcaagcgctggcatccgtgccgctcgcaggatgcgctgctggctgaactgcgtactactaaacaggggaaaccatggctattgaaggcgattctgcgactgttccactaa

SEQ ID NO: 224541 - DNA, 342 bp, Klebsiella pneumoniae
atggctattgaaggcgattctgcgactgttccactaagtccggggcatcggctggatggcctgaatcatattgcagagctaagggcgaaagtgttcggcttgaatatagaacctgaactggagcgttttattagcgatatgcgggaccagcgagatattaaccataaacagaatgagcgtgccttagccgccatattctttatggctaagattccggcggatcgtcataacgtcaatatgaatgagctgacgactgacgaaaagcgggagctgataaaagcaatgaaccattttcgtgcagtggtgagcttatttccaaagcggctaaccatgccgaattaa

SEQ ID NO: 224542 - DNA, 2409 bp, Klebsiella pneumoniae
gtgagccatcacgacgttaaaaactacggcggcgcagatgatgccgccgctgcttttgtctggaataccccgaaaaaagcggttaacccatacacggacccggcggaagttgcgccggtgtctgcgctttcaaacctgatcgctctctacgccagcgacaacgagcaggagcagctgcgccgtgaggcgatgagcgatgaggtctgggaacgctatttcttcaatgaatcccgcgatcctgtccagcgtgaaatggagcaggaccggctgattagccatgccaaaatggcgcgcgagcagcagcgttttaatcccgatctggtcattctggctgacgttaacgccatgccgtcccatatcagcaagcctctgctggagcggattaaatatttccatagtctgggcagagcaaaagcctattcccgctacctgcgtgaaaccatcaggccgtgccttgaacgcctggagcgcgtgcgtgccagccaggtttctgcgtcattccggtttatggcgagccacgacgggctggagggcctgctggttctgccggaaatgaaccaggatcaggttaagcggttatctaccctggtggcggcacacatgagcatgtgtctggatactgcctgcggtgagctgtttacggatgaagacgttacgccggaagagatccgccggtcatgggaaagggtggccgctgaggccatgcgccttgatgttatcccgcctgctttcgagcagttgcgccgtaaaaagcaccgccgtaacccggtcccatacgaacttatcccgggttcgcttgcccgtatgctctgcgctgactggtggtatcgcaagctgtggcagatgcggtgtgaatggcgggaagaacagttgcgcgccgtctgcctggttaacaaaaaggcgtccccgtatgtcagctatgaggccgtgatccataaacgcgaacagcgccgcaaatcgctggagttcttccgctcgcatgagctgaccaatgagcagggcgatacgctggatatggaagacgtggtaaacgccagcagcagcaatccggcgcaccggcgcaacgaaatgatggcctgcgttaaagggctggagctgatcgcagaaatgcgtggtgaatgcgccgtgttctataccatcacctgcccgtcacgctttcacgccacgctcaataacggcaggccaaacccgaaatggaccagtgccacggtccggcagagcagcgattatctggtgaatatgttcgccggcttccgtaaggcgatgcacaaagccgggctgcgctggtatggcgtccgcgttgctgagccacaccatgacggcaccgtgcactggcacctgctttgcttcatgcgcaaaaaagaccgcaaatccatcaccgcgctgctgcgtaaatttgccatccgtgaggaccgcgaggagctgggcaacaataccggcccgcgttttaagtctgagctgatcaacccgcgcaagggtacgcctaccagctacatcgccaagtacatcagtaagaacatcgacgggcgtggcctagctaacgaaatcagcaaagaaaccggcagatcactgcgggacaatgccgaacatgtcaatgcctgggcttcgctgcatcgcgtccagcaattccgctttttcggtattccggggcgtcaggcataccgcgagctgcgtttgctggcaggccaggccgcgcgacagcagggcgataaaaaagccggtgcgccggtactggataacccgcgtctggatgccgtgctggcggcagccgatgccgggtgttttgccacctacatcatgaaacagggcggcgtactggttccgcgtaaacatcacctggtccgcacggcttacgaactcaatgacgagccatcagcctatggcgatcacggcatccgtatttatggcatctggtccccgattattgagggccggatttgtacgcatgcgatgaagtggaaaatggttcgtaaggccgttgacgttcaggaggcgccagccgaccagggcgcttgcgccccttggactcgtggcaataactgtccccctgtggaaaaaatgaacgaaaacggggccgtaagcggacaggatttaccggatattgcgggtatggatgagcgggagctgcaggagtatctccatagcatgagcaaaaaggagctgagggagctaaacgcacggcttcgcatggttaagcctaagcgccggaaagggtacaggcaggatgtggataatcagcagcgcctgcagctggagtatgaacttaaatcgagaggctttgatggctcggaggcggagatcgatctgcttctgcgcggcggcagtattccatccggtgccggtctgcgtgtcttttaccggaaccaaaggctgcaggaagatgataaatggcgccagtggtaccgatga

SEQ ID NO: 224543 - DNA, 1029 bp, Klebsiella pneumoniae
atgtataaaatttatgcaattgaccttttttgcggtgcgggtggtttgacccatggactaatacaagcagggataaatgtgattgccggtattgatttagatcctgattgccagtgggcctatgagcataacaataagactaaatacataaattcggacattagtgatgtgactggacaggatctgatgcgtttgtggccctcagatggtctaaggttgcttgctggttgtgctccttgccaaccattctcaagctatcgcaagggtaaaattgagtctgaggacggtaagtggaagcttttaggtgagtttggtcgtttggttaaagagtgcgatcctgatctgataactatggaaaatgttccaaggttacaaaagcataagattttcactgagtttgtaaaagaccttaagaccagtgggtataaagtttggcatggtattgttgattgccagcaatacggtgttcctcagaaaagacagcgattagttttacttgcttcaaagattaacgacgttgcgttaatccctccaactcattcagaagacaattatgtgacagttaaagatgtcatttcgcatttgccagagataaaaccaggtcagtctgatgataaagaccccctacatgtggctcaaggtatgagtccattgaacttagaaagaatacgccaatcaaaacctggtggaacttggaaggattgggatccagagttggtggcagcttgccataaaaaaagtagcggtaaaacttatactagtgtttacggacgtatgaaatgggacgagcctgctcctacaatgaccacactctgttttggatttggtaatggtagatttggtcacccgcagcaggatagggctatctctttacgtgaagctgccatccttcaaagttttccgggcaactatgttttttctgaacctggcgaaaagatcacatttgctactgtgggccgcttgatcggaaatgctgttccggtaaaactaggagaggtagttgggaagtcacttatcaatagtctataa

SEQ ID NO: 224544 - DNA, 1998 bp, Klebsiella pneumoniae
atggcggagcacagtgaagttttaccgcagggtgaatcatctacgcatacctatgagatgcaggttagtttgagcgtcttagggcatctgggtatcaatctctatagtaatgtggctgcagtgattactgaaactgttgctaatgcttgggatgctgatgcttccgaggttcacataaaacttactcctgacgagatcactatatcagataatggttttggaatgaccatcaatgatatgaattcaaagtacctaactgttggttaccaaaaaagaaataataaagaccaacttttaactcctaaggggcgtttacccatgggaagaaaaggtataggtaagttatcattgttttcgattgcaaagacagtaatcgttgaatctatcaaagatggcgagcaacacggcttaattatggaagtaccggcaattgagcatgctattaagagtggcgcaggtagatattaccctgagccgcttgatgcaactcaggttactgttagccaaggtactcttgtgactttacgagatttaaatcgctcccgaatacctgcaactgcatcagcgctgcgtaaaaaattagccagacgattctcaattattggtagcaatgattttaaagtttatgttgatggggttgaggttactgctaaagagcgtgaggatttaaagcatgttcaatttgtgtgggatctcaattcaggaatagattttttaaaggaatgtccagggctaattacagtaactgatatttcctctgctctggtagagagtccgcgattcgatccaaaatggaacatcaaaggatggattggaagtatcaaacaacctagccaattaaataccccagaagggaatcttaacagcatagttgttttgtctaggggaagattgttccaagaaaatattttggatgatatcaatgatggcggtatatatacaaagtatctaactggtcagcttgaggcggattttttagatacagatgaagatgaagatattgcaacaagcgatagacaacgagtggttgaggatgatcctagatatcaataccttaaatcattagttaaaattgcattgcgaaaagtagctggtcaatggagtgctttacgtgaaatgcaaggtgctaaggaagcaaaagagtcaaaccctgttcttgtggaatggattagctcattaaagccagcttcacaaggatatgcggaaaagatgattgctcagattgagtctttacctttagaagataagcctcaagagaaaaaagagttatttaagcacgctatctttgcgtttgaacgtttgcgaataaaagaaatgtcacgggaattagccgaggcagttatatttaatgctgaaaaacttttgccgcttctagaaaagcaagatgatctagaggcaacgttatattatgaaattgcaaaaagtcgagtggatgttatccaaagcttcaaggggctggttgataacgatgaaaaagaaaaggttttacaacgttatctttttgagcacctttggctattagatccttcttgggaaaggattgatggttccccaataatggaatccagagtcaaccaagagtgggataaaattgatgctgggcttactgaggatgagcgaaaaggacgtatggatataaaatatcgttcatcggcaggcaagcatattatcattgagcttaaaagagcaagtgttttgacctctgttgcaactttggtagcgcagggaaataaatacagacaagctgtaattaaatgcgcgaaaactgtggatccatcatcaacgccatcaatagacgtaatttttgttttgggtcgtgagccttcagattattctttcgatccttcatacactaaccttcagttacagtctgttaatggcagagttgtttactatgacggtttaatcaatagtgctcaaaattcgtatcgggaatacaccgagaagcaagccaccgttgctcggattgctgagattgtaaaaaaattagacgattaa

SEQ ID NO: 224545 - DNA, 1038 bp, Klebsiella pneumoniae
atgactgagaataccgcacaggatgtgatgccacccgacgtacaacccaatgatgcagcaactacccaggcgttcagctttggcgatcccattccggtactggaccgccgcgaacttctggactacgtagaatgtgtgcaaatggaccgctggtatgagccgccggtgagttttgacgggctggcgcggacctatcgcgccgctgtacatcacagctcaccgattggcgttaagcgtgacattctcagcagcacctacatcccccaccgcctgctcagccagcaggcttttgcccgtttcgtccaggactaccttgtgttcggtaacgcctatctggaaaaacggacgaacaggctgggcggcgtcctgtctctggagccatcactggcgaagtacacccggcgcgggattgacctcgatacttactggttcgtgcagtacggcatgaccacccagccttatgagttcaccaaaggtagcatctttcacctgatggagccggacattaaccaggaaatctacgggcttcccggctacctctccgcgatcccttcaacactgctcaacgagtcggctacgctgtttcgccgtaagtattacatcaacggcagtcacgctggcttcatcatgtacatgacagacgcagcacagaatcaggaggacgtgaacaacatccgccaggccatgaaaagcgccaaagggccgggcaacttccgcaacctgtttatgtattcgcccaacggtaaaaaggacggcatccagatcatcccactgtcagaagtagcggcaaaggatgagtttctgaatataaaaaacgtgagccgggatgacatgatggctgcgcaccgcgtccccccgcagatgatgggcatcattcccaacaataccggcgggttcggtgacgttgaaaaggccagccgcgtctttgtccgcaacgaactgatgccactgcagaagcgattgcaggaattgaataagtggctgggcgaagaggtgatccgattcgacccctatacgctggacctgcaggaagactga

SEQ ID NO: 224546 - DNA, 834 bp, Klebsiella pneumoniae
atggctgtaaaagcaaagcgcttccgcatcggtgtggaaggggcaacgacagacgggcgcaatattgagcgtgcctggctggaacagatggcggcgagctatgacccgcaggtgtataccgcgttgattaatctggagcacatcaagggttacacccctgatagcccattccgccgtttcgggaccgtggataagctggaggcagaggagattgcagacggcccgctgaaagggaaaatggccttgtatgcgtggatcaccccgtcagaggacctggtggcgtatacccgtaatctgcaaaagctgtttacctcgatggaagtcaataccagttttgccgataccggcaaagcctacctggttggcctggcggcgacggatgatcccgcaagcctcggtactgaaatgctgcagtttagcgccagcgccagaagtaaccccctggccggccgcaagcaaaaccctgaaaacctgttttccgccgcagaagaaacgctgatcgagtgggaagaagtccaggacgaaaaaccctccctgttttcccgcgttgccgcgatgttcaccaaaaaagaacagaacgatgaagcgcgtttttctgacgtgcatcgcgcggtggagctgattgctactgaacagcaaaacctgagcgaacgtactgatcactccctgtctgcgcaggatgcgcgcattgctgagctggaagcctccctgcaggaacagcagaccgcttttgctgaactggagcagcggctgagccaggaagacagccgcaaagattatcgccagcgcgcgccgggcggaaacgcaccggcaggcacactgaccaattgctga

SEQ ID NO: 224547 - DNA, 1065 bp, Klebsiella pneumoniae
atgaaaaagaaaacccgttttgcctttaacgcctacctgcagcagctggcacgcctgaacaatgtggaagtggaagaactttccagcaaattcaccgttgagccgtcggtacagcagacgctggaagaccagatccagcagtccgctgcatttctgacgctgattaacatcaccccggtggatgagcagtcaggccagctgctggggctgggtgttggcagcaccattgccggaaccacggataccaccaccaaagagcgcgaaccaactgacccgacggtgatggcggacgtggaatacaaatgcgaacagaccaactttgatacggtgctgacctacgcaaagctggacctgtgggcaaaattccaggacttccaggtgcgtatccgtaacgccatcgtgaagcgccaggctctggaccgcatcatgatcgggttcaacggcgtgaagcgtgccaaaacctctgaccgtgacgccaacccgatgctgcaggacgtaaataagggctggctgcaaaaaatccgcgaagatgcgccggatcatgtcatgggcagcgaaaccaaagaaggcgtgaccaccaaaggcgccgtgaaggttggtaagggtggcgattatgccaacctggacgccgtggtgatggatgcggtcaacgagctgatcgacccggtgtatcaggatgatgatgatctggtggtggtctgtggccgtgagctgctgtctgacaagtatttcccgctggttaacaaagaccaggagaacacggagaagctggccgctgatctgatcatcagccagaaacgcatgggtggcctgcaggctgtacgcgcaccgtatttccctgcgaatgcactgctgatcacccgcctggataacctgtccatttactggcaggaagatacccgccgtcgttctgttatcgataacccgaaacgtgaccggatcgagaatttcgagtccgtcaatgaagcgtatgtggttgaggattaccgctgcgcggcgctggtcgaaaacatccagatgggggatttcagcgcgccagctgtaccggaaggcgagggggcataa

SEQ ID NO: 224548 - DNA, 204 bp, Klebsiella pneumoniae; identical to SEQ ID NO: 136553

SEQ ID NO: 224549 - DNA, 216 bp, Klebsiella pneumoniae
atgacgcttgaacggatcagcgccttcatcacgtactgcatcgctgtactgctggcatggatgggagatttatcgcttaaggatgtgtcgacagtaggcggtgtgttaattggcgtgctgatgctggccatcaactggtactacaaacacaaaacctaccagctgctgcgcggcggaaaaattacacagggggaatatgaatccttcaaccgttaa

SEQ ID NO: 224550 - DNA, 603 bp, Klebsiella pneumoniae
atgactagcagcctgttaccgccggggtcgtccgcgctggagcgcaggctggcgcaagcctgttcaggtatcagtgatttaaacgtgccgctgcgtgatctgtggaacccgtggaaatgcccggcaaagtttctgccgtatctggcctgggctttctccgttgaccgatgggaggaaacctggacagaaaccgctaagcggcaggcggtcagcgatgctttctggatccatcagcgcaaaggaacggtggcggcagttaagcgggtgatcgaggggctgggttactcaatgacccttgaggagtggtgggaggtggctgaccccgccgggacgtttcggcttgagatcgacctgaatgaaatcggtatcacggagccgatgatttacgaacttgagcggattattggcgacgcgaagccagtcagtcggcacatttcgcgaatgactattttgacagggacaaatggacaggcatggatcggcgtggcggcgtacgacggggatacattagcggtatttccaccggattatgtcccatcggaaagcatctattacgacggaacagcatctttcaacggaaataatatttattcgggtgagtaa

SEQ ID NO: 224551 - DNA, 2856 bp, Klebsiella pneumoniae
atgacggacataaacgaagaaagtaagtgggtagagacagtacctcttatcacccgaggtgataaagtttcaggtgggttaaatggtgttgccaataagcaagcgttagccattgcaagccgcacgagatggctaaaagatcagattgatggcatgcagtctggggagatgccgtattcttctgaagtacaggcccaggaagctattaactcagggagactgaaagaaggatatttaattgcaattcggtcttccggttcaaaaaattgggtagatgagtacagagttgtgtcgggaggcctgcaaaaaacaggtaaatcattacctgcactggaatatatcgaaagcattacaaaaaacatggtggttggttccgtttcagggtgggagggtaataccctgtatccctttgatgaatttttatcaccgaacgagaacacactttcgcttcatgcttacgctgtaaacagcataaagtatcgggaggcgtgcggcagtttgcagatcccggttgctacgggggatatcattaccgtccgctataaatattcaggtacaggcggagcgccctcagtagggctgaaaacctcaatcaacgggacgttcgtcagcaaccaggtaacgctgacagccagcgataactggcaggaaatccagctgacggcgactgcggcgacggctacgctgatggcagtaggtgttaatactcgcctggctaccgatatccagttatctattattgcgtacagcaacaagaaaaacgccattacggccgctatcctggccgcaatggatggacaggcagcgctgacaggaaaaaccaaaattggcacggttaacaattgggtgaacaatagcggatatccgttttctgtcctttcccagacaaacgacaaccgtgttaattacgttaattcaacgggtatttactcagagatgtatgcgggcatcagcgtgccatccggtggcgttgtaactttaaactattcgctggatgttacggcgggacgtttatttgcccggctggcaaatggcagcgcgtggacgggtgacgaagtgcagctcgccggtggcggtgccagacagaccattacactcgtagccgcggaagacacaaaacaattaaaaatttacaccagagcggaaatatccgcagggtcttttttcgcggaggtcaactacgggcaaaaaaatgcgctgacagagcagattgattcgctgtattcggcagtggcatcagctaacgctgttatggccatactgtcccagagctcaacgtttgattcatttgtaaaaagctccccttacacctacacgttaagtgatgccggtgtggcgtataagcagctactgaacacggtcaacgccgtcactggcgtatcaaccgtcaagatgatgtataaaatatcttctaccagtgccgcgttaaaaatccagagtcgaaatggcagcgcctgggggggcaatgagaagccactgatagctgatggggattatcacgagattgacttaccgatagcctccggccaggtcttttcaggatggggggtttattcctctgcaaaagcgggaggctactccgctgacatcacaatgatccctgtttctgcaaacggtatcttctttactccggcgacagcaattctgtatagcctcatgtcctctgcagccgggatcgagacgcgcgtaacaaatctggaaagtggggtggtaacaaatcagaacactgatgttgttttcccttcgcacttttatgcagtggaggggagaccgcttcgcttttatggcgctaatctggtcagtggtgaacgtccgtggcataacggcgctgatgtggtgctttccagtcatggttatgaaggaaagccgattttgctcaaaagtatcgtgccggacgccaccattttaccgtcagaaatcaatggctcctcgctggtagttaatgcccgcgcagataagtcgggtgctgtttacaggaagaacgcgacatttaccagacttccggccgcacagtcaggcagcgtaaaggtcgcctgcattatggacagtctgggcgaacgctgtgttccgtggctgtattttgccctcaatgccacgggcgccacctatgtgggcgcaggttcccgaaaaacgcgcggtatgacggatgatggtgggtacaccctgccgaacacaccagtggagggcatcccattcgatggccgtgggggatggacgacttttgattttattggaaaaacgcaaaaaaccaacttttcacagccgttcctgcgtgatgctgtggccgccgatttcgctgcatatccgcagtattgctacgacaaggcgtggtctggtcagagttacgcagaaaaccccaacttgtccgcgtatcatattttcgacgtgactgcctggatgtccgcagcggccgtgagcgccagcgataaactggttgtggtgattcagctcggctacaacgacctgtattacaactacactccagctcagacagttgctgcgcaggaattcatgatcgccaaattccgtgaaaaaatcgcgaacagtcgtttcgtaatatcacaccaggcgtttggctggtcaggtgtcagtgccccgtataactggcagggatttaccccgtggatcacccaaaagttgcgccagttcgataatcgtatcggcgagaaaatcatcgtggcaccggcatgggcacagctgagctacaaatacgggatgaatgagacggtaacggccacgtcagataccggtgtccagacggtatcactgccggatgatgttcacccgggagagctgggtggtgctcagtggggtgatgcgctgctggctccggttcttgctgcgtggggattataa

SEQ ID NO: 224552 - DNA, 2886 bp, Klebsiella pneumoniae
atggcagaagtaccgttaccgttaccaactcccaccgacaacccggtaccaagtactgatattcgggatgcagtttatggcggcgccatgctggataaggttgttaccagtaccgaaccgacatacatcgatcgcctgggcggcgagcattacaccgtagatggaattaaggcggaaggggacaaggttgtcgaggaaacccggcagaacctgatccccctcagtcgccagtatacgacacttgcagatgcacaggcagatatcgctaatataccagtcaactcgtttacctatgtcagagatccatcaggcaacgcattagcactggaatatcagaatgtggccggagttttaacagccacaggccgtaaaatgccttcacgggcatcaatggtcattggtattgtggattcgtgggttaataacaacctttatccatttgattcattgtcatcgccaaatgaaaactcggtgtcgatgaatgtagctgctgtaagcactattgcgtaccgagaggcttactcagctttattatctcctgttgctgtaggggatattatcactgtccgttataaatacagcggaaccggcggcgccccaaccattggattaaaaacatcgctgaacggcacatttgtgagtaatcagccaacgctgacctcttcaaatgactggcaggaagtgcagcttaccgctaccgcagctacagcaacgctcctggctatcggggtgaatacaaggcttgcaaccactgttcagttatcaattattgcctacgcatcgaagaagaatgctattaccacagcaattcttaactcactggatagtatttccagtttaaatgggaaggtgcgtatcggctctgtcgattcgtgggttaataacagcggatacccattctccacattttcacaggttaacaacaaccgcgtgaactacgctaatgcttcaggcgtatactccgaaatgtatgccaacattaacgtggcatccggggcaacagttgagcttaactatgcactgaatataacttccggcaggctttttgcacggctggctaatggtagtacatggactggcgacgaagtgcagctatccggtggaggtgttcgtcagacagttaatcttgttgcgtcagctgataccaaacaacttaaaatatactcaaaagcggaagtttcctcagggagtgtttttgcagaggtaaactatggacagaaaaatgccctgacagagcagatcgactcgctatattcggctgttgcttcagccaatgccattttggcgattttatctcaggactccacttttgattctttcgttaaaagttcgccttacacctatacgctttctgatgctggaaccgcgtataagcaattacttaacacaatcaacgcggtatctggcgcttcaaccgtgaagatgatgtacaaaatcagttcagaaaatgccgcactaaaaattcagagtcggaacggtaacgcgtggggggcgaacgaaaaggcgctaaccgctgacgggaaataccacgaggtagacctagcaatcgcatcaggtcaggttttctccgggtggggtgtatactcatcagccaaagctgggggatattctgctgacgtaacgatgatccctatctctgcaaacggggtatttttcacgccagcaacggctatcctttatggcctgatggccgcttcggcttcccttgacagccgcgtaacagctctggagaacggccaggccaccgatcaaaatacagatgtgattttccctgcatacttctatgcagtggatggtcgcccgctacgtttttacggtgccaatatggtcagtggtacccgaccatggcacaacaacacagacatcgttctttccagtcatgggtatgaaggtaaatcggtactgcttaaagatgtagttcctgacgcgatgataatgccatcggaaattaatgggccaacgcttaacatcaacgcgcgggcagacggttctggaaatgtattccggaagaaagctgcgttcactaaactggcggcgactcaaacaggaagcgtaaaagtcgccacaataatggacagccttggagagcgatgcgtgccttggctttatttcgcgatgaacgcaacaggagccatctatgttggtgcaggttcgcgcaccacacgaggaatgaccgatgacggcggctatgttctgccaaatacaccggctgcaggcatcccatttgacggtcgtgggggctggacgacgttcgactatatcgggaagacgcagaagacgaacttctcgcagcccttcctgcgagatgcggtagctgccgatttcgccgcttatcctcagtactgttacgacaaggcctactctggccagagctatgcagataaccctaatctggcggggtatcacatttttgatgtgactgcgtggatggcggcgtcaggggtgagcgccagcgacaaactggtagttgttattcagctcggatacaacgacctctactacagctatacgcctcagcagaccgttgacgcgcaggaattcatgatcgccaaattcagggagaaaatagcgaattcccgcttcgttatttctcatcaggcatttggctggtcaggagtcagcgcaccgcagaactggcctgactttgccaaatggataacgcagaagatcaggaagttcgacaatcgcctgagcgaaaagataattgtggcgcctgcatgggcacagctgagctacaaatacgggatgaacgaaactatcacagcaaccagtgatacgggtgttcagactgtatcgttacctgatgacgtccaccccggagagcttgggggagcgcagtggggtgatgctctggttgctcctgttcttgcagcatggaactggtaa

SEQ ID NO: 224553 - DNA, 171 bp, Klebsiella pneumoniae
atgctattcaccaaagcagcccatcattactgctgcttcatggaacttttgagcctcggtctgtgctgcctctggcagggctgggaatctagcctgcgtaattttttcaaatggcagaaaataatcccgactcagtgtttcttcaccattctcatcaataacagtgaatga

SEQ ID NO: 224554 - DNA, 189 bp, Klebsiella pneumoniae
atgccgtacttcttcctgattttcgtcatcagcagcaatacatcgaatatgcaggtggttcccatgcagagtatggagcagtgcaaggcagccattaaggcgatgaaagttgcagatgataagaggtcctgggacgacgtttcgccgagcatagataatattcaatgcgtagaggtgaaaggtgcctaa

SEQ ID NO: 224555 - DNA, 705 bp, Klebsiella pneumoniae
atgaccagcaaattaaccagagagcgcctgcaggaaatcgctgaagatggattcctgaagcatggtgaaagcaaagagctggcccgcatggcgctggccgcaatggacagagagccggtgattattgttggtgatgatggaggggatgcgctttcttatcgccgccttatccagtcctttcagcctggcactaagctctatcgccacgcgcagccggtgccggtagtgccggatgaactcaacacaagaacagcgaacgatgtcatgaatgagcatttgagctggaaagactatggtgacgcagaagtgttttgtatcgcctggaacgcctgccgcgccgccatgctccaggctggtaccctcaccaatgagggtaccaaacaagcatggactggcatccctgatatcgataacgccatcaacatgctcgaccgcatcgatacactggaaagttgcgatgatgaccgtattgaggctgttaagaccgttttgcgcggactggctggcaactctccggtaattccggatggttcagcggacatgcttcggcgctggctggcatttggccgcggtatgcaaaatgcaggaagtcaactgccacacaacctgattgcggaaactgagtccatgctcgcagccgccccgcaggaggatattaacgcattgattccgttagtatcgcggaatgagcaggaggggaagtga

SEQ ID NO: 224556 - DNA, 837 bp, Klebsiella pneumoniae
atgactgatatcaccgaactggcgcagagcctgaaagcggcagcagagaaggctactccgggtgaatgggtttattttccgaaaaataccagcattgagtatgacgtaggcagtgatgaatctcagggctcaatcctctatgtcgatagtggtgatttcacccaagctcagacagacaggaatggagagttcatcgccctggctaaccctgcaaacatcctcgcgctggtagaggcgctggagcttaaggaagagcagcgcgctaactggccccagatggcgcagaaattgggggaagacttggatgcggcagagaagcgcatcgcagagctggagccctttcatactgcctacatggagtggagcgacaaaaccgcatgggtgcaaacagataagcgctttgatgttctgaagccgtggggcaagcatcgcgctgatgtgctgaaagaatatatccagcatctggagtcccgcaccgtcatcgtgaagctgccaaagcctattagcgttttgcatcgccgagagttcactgcggcgcactgcgcaatatacgcataccccgaggcagaagttaacgcggcgttggatgacgctggcatcaaggtggaggctgatagcctcgatgctgacgtgaacgacagaaatcagccggggatggttgtagcggtacatatcgatgtcggtgacttcgtgaaattcagaggtcaggtgtatgaggtgaaggaaaccgactttgacgatcacgacgtcactctatggttcgtttgtggcgaagtgctgaaatgcgcagcaggttgccagatagaagtggtttctgcgccggtggaggatgagtga

SEQ ID NO: 224557 - DNA, 489 bp, Klebsiella pneumoniae
atgactatcacattacagacagtaaacgagatcatcgcctccctggagagcgcaggcgagctgtcgatcagagagcagaagttcctgaagctggctaaagagtttcgcatttgcagcgcttcactggatgccgccataaaaaccgggaatgtgctggcagaccaaaattctcagctggctgcggagaatgcggcgctgaaggacatcaacgcatggtgcaaaacggatgcattcaaaaacatgtaccgggagtttaaaacagcagagtctcttgggtgctcagatgtggattgcatgcatgatgcaatgcttgtcgcaattatgcatgcgcctgccacccccgccaccgatcgcatcgtagccgaagccgaggcgcgcggagttgagaaggccatcgctcacctggagaagaagttcagcaatatcggcgtgcagatcatgaatttgcagtggcttgcagactcgctgcgcgagggggccgggaaatga

SEQ ID NO: 224558 - DNA, 264 bp, Klebsiella pneumoniae
atgtcaggaaaagaatacacaattcagcctaagtttatgtctgcgacatccatactcattccgccagataacacacaagctatgattaccttttatagtcatgagtttacacatgctccggctaatacaaacgcagaagggcagatgcagataaaagtagacttggttcctcaggaatcaattattatgaccccaagtcaggccatccttctggctgagtcattaataaccgcactaaaagctaatggcttatggaaagaataa

SEQ ID NO: 224559 - DNA, 600 bp, Klebsiella pneumoniae
atggaaagaataactccaacttcatccccatttacaaaaagtatctctagtgcggtgattacggcaactattgttggcgcgggtgttacagcttatgatggaggcacattaagttcgtgggggagtcaaagcattcgattgccgcatgactcattttctggatttgatactaaaatacacttatcagatgcgccaccagatcatctatcagcggacgttaaagtgagtaattttaccaaagatgagttgaatgcaaagctagcacaaaacaaagccgaagttgattcggttgcagctggcatgaaaactgaaatggcaaacttcagaacagcttacgttgagagtttttctgaaatatcaaaaactttaagccgtattgaagctaaggcagatgcaaccgaaaaacgactgactcaagctcagtggattgtgtccctggtgatcagtatttgcgccgtaaccttatctgctgtcatatttttctcgaacaaaagtgctcaacgtaacgattcgaatcacaatgtggctagccaacccaccgcaacgcttgaacagagccaccaaggcagcaatgccccccttccccccaagtctaattga

SEQ ID NO: 224560 - DNA, 225 bp, Klebsiella pneumoniae
gtgaaggttgagtttaatgatcaagggtcggtatcagtcatcacggtcaccagcaccgtgtttgagttccgccggcacaaccgggcgattgatgtcgcgttgttcctcacgcctgaaattaccagccagagcagcggttttttcattatgaaaacgatcttaagcgggaagacacatcacgcgctgcgggcctataaacatctgatccgggaggctaagcaatga

SEQ ID NO: 224561 - DNA, 915 bp, Klebsiella pneumoniae
gtggctgaacgatggtggaatgtgaagaaagccagcgtgacagagggctatgccgacgatatctggcgctctcttgaaagagatgtctttcctgcaattggcgacgttagcgttacagatattaaagctcacacactggttcaggccgtccaaccggttcaggccagaggagcactggaaaccgttcgtcgcctgtgccagcgcattaatgaggtcatgatctatgcccaaaacacagggctgattgatgctgttcccagcgttaatatcagtaaagccttcgagaagcctctgaaaaagaacatgcccagcattcgaccggatcagctaccacaactgatgcagacaatgcgaacagccagcattagcctttccacacgcggcctgttcatgtggcaacttcttactattacccgtcctgccgaaacggctgaggctcgttgggaagagatagacacggaggcacaagaatggaagattcctgcatcacgcatgaaaatgaaccgcgaccacactgttccattgtcagatgaagcaatcgcgatactggagatgatgaagccgttaagtggtaatcgagaatttatctttcccagtcgcattaagcctacccagccgatgaagagccagacagtgaatgctgcactcaagcgtgctggcttaggaggcatactcgtatcacacggtttacgttctatcgctagtacggcactcaatgaggaaggatttctgcctgatgtcattgaagcagcactggctcatatagacaaaaatgaggtacgtcgcgcttataaccgcagtgattaccttgagcaacggcgatcgatgatgcaatggtgggctgattttgttatggctgctgatcgcggaagtatgattgagggaggtatgaggggagagcgtttagcgggatga

SEQ ID NO: 224562 - DNA, 489 bp, Klebsiella pneumoniae
atggacaccgaatcgggatggtgtgttgatgggctggaagccgacatggcgaccacgctgtggccgctaagtgcaaatagagattgctcgattttagccgtcagcgtccgcgccctggcagtgttgcgaaaggtcagctcgctcaacaactgttcaagttcgctaacattgttgctggactgctcgaagattgcttccagatcgaagattgatttttgcgcatactgccgtgtcttcatttatttctgcggctccatatcccttcaattaagagatattatgctaattagcttaatttctaaaactattagctttcgcttgaaatataaattctcatctggcccacaactaaagtgggaactgtcattaattatccgtcatcccgctaaacgctctcccctcatacctccctcaatcatacttccgcgatcagcagccataacaaaatcagcccaccattgcatcatcgatcgccgttgctcaaggtaa

SEQ ID NO: 224563 - DNA, 147 bp, Klebsiella pneumoniae
atgaaaaactacttaaaaggtgtctgggaatatttcgcgagtcacatgttttttatgtatctcggctcagtttctttgcatggattgatatctgattttttaaaaaaattgaaccatcaacgattactgcaacagtttcaacgataa

SEQ ID NO: 224564 - DNA, 669 bp, Klebsiella pneumoniae
atgattaaactaataaaattaacagagccagatatattggctaagaattttaaaaaatggacagataaacatttatcaaatatagggtcaggcataaattcaagtgattatttaaaaaccaggtactcacatgaagatataaaagagcaactaataaaagaaactaacgggaaatgtgcatattgtgaaagcaaattattgcatatacatcatggtgatgttgagcatatatatccaaagtcattggatgaatcaaaaagattcttatggataaaccttacattatcttgtgagatctgcaatcagaataaaacaaatcttgacccaaatttaaataatattcaagatccttattcaggaaatcctgagggggtaattattttctgtggctcattggttcttggttctggaattagagggttatcaacgcttacaatattagatcttaataggaagcaattgatagaaaaaagacaagaaaagttagaaaaaatacttttgattttcaatcaaatatgctcagaggcattaccccaagcagcaaggcaagcaatatataacgatatgattaaaaatgaaacatcagcaaaccaagaatactcatcaatggtgaaaagtacaattcgtcatgttagttatattattcctggtgatataaagcaaaaataa

SEQ ID NO: 224565 - DNA, 1233 bp, Klebsiella pneumoniae
atgaaatttaaaaggctaaaaatatctgattggcgccaatttaatgaggtaagcatagactttcataacaaagtaacagtgattactggatctaatggagcaggaaagtcaacagtattaagaatattagctaagcatttctcttggaattgtgattttttggcaatgccgttttacgatgaagataaagggattaatgttttcactaataaacggcaaagcaattcatattctaatgccagacatcaaataggagaaatagagtattcaaatgaaattatatcctctatatatatagaagaacatcccaggactataaactatgatatagctattgaaaatattgaccgcagcattaaaggactgtttatacattcgcatagagcatcaaataactatgaaataacatctaaaataccaacgggtgttataaatgcggaagactcctataaaaaccatttacaagcatataagaaacacttagaaaacagttcatttaatggcaacccaacggtagaaatgaagcaatcactgttatccatggctgccttgggagttgggaatagctacataaagaaaaataaaaaatcagaaaaaacatttacttcattcatagaaatattaaagataactctacctaaaaacattggattcaaaaatataagatttgaagttcctgatgttatttttgaaacggattcaggcgactttgtattagattccgcttctggtgggattatgtctataatagatatatcgtggcaaatattactttattcgcaagatgcggagcactttacagcattaattgatgaaccggaaaatcaccttcatccaactatgcaacggtcattgctaaatgatctgataaaagcgttcccaaacgttcagtttgttattgtcacccatagcccattcattatttcttcagtgaaagactcaaatgtttatgcattacagcatgatgactccaataaagttaattctcataaattggatttagaagaaaaagcatcaactgccaataaaatattaagagatgttcttggagtttcaataactatacctcagtgggcggaagatgaattagataaaatatgttcgatgttaactgcagaaaacataactgaaaataatctaaatgaacttagaacttctttagatcaggcagggctgggtgagttttacccggaggccctttaccacatagttggtggtaaaaaaaatgattaa

SEQ ID NO: 224566 - DNA, 486 bp, Klebsiella pneumoniae
gtgacggacataacctacatcggaacccacgaaggctggctgtatctggccgtggtggttgacctgttctcccgaaaagttatcggctggtcaatgcaaccccgcatgacaaaagagattgtcctgaacgcattacttatggcggtgtggaggcgtaatcctcaaaagcaggtactggttcactctgatcagggcagtcagtacacgagctatgggtggcagtcattcctgaaatcacacggtctggaaggcagcatgagtcgtcgcggtaactgtcatgacaacgcggttgcggaaagctatttccagctactgaaacgcgaacggaataagaaaaggatctacggaacgagagacgaagccagaagcgacatttttggttatatcgaaatgttttataacagtaagcgttggcatggttcgagcgagcagatgccaccggctgaatatgaaaacctatattatcaacggctcagaagtgtctag

SEQ ID NO: 224567 - DNA, 279 bp, Klebsiella pneumoniae
atgagcggtaagcgttatcctgaaaagcttaaaattgaagcagtcaaacaggttgttgatcgtggtcattctgtttccagtgttgcaacacgtctcgatatcaccactcacagtctttacgcctggataaagaagtacggtccggattcttccactcataatgaacagtcagatgctcaggccgagatccgccgtcttcagaaagagttgaagcggattacggacgaacgagacatattaaaaaaagccgcggcgtacttcgcaaagctgtccgactga

SEQ ID NO: 224568 - DNA, 279 bp, Klebsiella pneumoniae
atgggtgatgcattggggcttatcgaaaccaaaggtctggtggcctgtattgaagcagcggactcgatgtgtaaagccgccaacgtcgaactgatcggctatgaaaacgtcggctccggcctggtcaccgtgatggtgaagggcgacgtcggcgcggtaaaagcggcggtggattccggtgtggaatcagcccagcgcatcggcgaagtggtgacctcgctggtcatcgctcgcccgcataacgacatcaacaaaatcgtcattaaacacaaggcctga

SEQ ID NO: 224569 - DNA, 909 bp, Klebsiella pneumoniae
gtgattaatttacagcgtctggatctcaatctgttgcgcaccctggatgtgctgcttagcgaaaacaacgttacccgggcggcgcagcggctgaatctgtcgcagccctcggtaagttttcagctcgccaggctgcgggagattttcgccgatccgctgctgatgccgggcccgcgcggcatgcagcccaccgcccgcgccgatgagcttcgccagccgctgcgcgccgcattagccgcgctggagcaggcggtggcgccggtggcgccttttaatccggccgcggcggcggagacctggcgggtggcggcgacggactatatggcttcggcgatcctcctgccgatgctgggcaggctacgcctggcctctcccggcagtcggctggcggtattcgagctgcagccggcgcggctggagcagcaggcggccagcgatgaagtggatctcttcttccatacccgcgagggcgcgccgccggggctccatcagcgcctgctgtttcgtgaacgctacgtgctggcgggccgggccgggcatccggcgctgcggcctgggcttagcctggaaacgttctgtcagctggatcaagcgatcgtctccccggacggaggcggcttcagcgcggcgaccgatatcgcgctggcgaatcttggcctgacgcggcgggttgtcctttccgtgccacatttcctgtttatgctggagaccctgcgcaatagcgatctggtagcggtgctgccggagcggctggtgcgcgggcagagcgggctggaagtcgtcgagccgccgctggcggtcgccggctttgagatgctgatgctgtggcacgaacgctggcaccgcgacccggcgcatcaatggctgcgccagttcattgtgaattcactggaggagcagacatgctga

SEQ ID NO: 224570 - DNA, 336 bp, Klebsiella pneumoniae
atgactaccccgcattctattgcagaattcaccgatccagaagtctccccggcagttagtcgtcaatcaaccgtgagttatgcgactcgtcatcctgattatcagcgtattccggcgttgaccatgaagggtcagtggctggaggcggcaggttttgccaccagaaccgcagtggatctcaaggtaatgaacggttgtatcgtgattaccgccaaaccaacagagccggagctcaccgccgctttgcgtcaggtcagcaagctgtcggcgcgtaagcaaaaacaggtacaggcgttaatcgacgccatcgccgggcaaaagcagaagctggcatag

SEQ ID NO: 224571 - DNA, 1743 bp, Klebsiella pneumoniae
atggcggtggaaaaactgattgtcgatcatatcgacacctggaccacggcgctgcaaacccgctccacggccgggcgcggcagctcgggcaagattgacctgtacggcattaagaagctgcgcgagctgattctggaactggcggtgcgcggcaagctggtgccacaggatccgaacgatgaaccggcgtcggtgctgctggagcgtatcgcagcggaaaaagccgagctggtgaagcaggggaagattaaaaagcagaagccgctgccggagattagcgaggaggaaaaaccgtttgagctgccggcggggtgggaatgggtgcggctgggaaccttatttaactcaatccagagcggaggaactccaagcaaaatcaaccctgcattttggggaggggatataccttgggccagcgtaaaagacctaggctcttcgcaatatatttcgaaaacccaggactatattacagaggcaggtttgttatctggtagtaaattagctgattctggagatgtattaatttgcactcgtatgggattaggaaagattgctattgcttcttgcccaatagcattcaatcaagatttaaaagcagtaaagctcacaagtcatattattcctaattttttctttaatacctattccactgtaaaaataaaaggtacaggcacaacagtagaaggaatcaagcaagaacaattggtgaattacatcacgggattccctccatttaatgaacaaaataaaattgttgttaaagttaaggagttgatgtctctctgcgaccaactggagcagcacaccctgaccagtctggacgcccatcaacagctggttgaaaccctgctaaccacgctaaccgacagccagaacgccgatgaactggccgaaaactgggcgcgtatcagcaagcatttcgacacgctgtttaccaccgaagccagcattgacgccttaaaacagaccattctacagctggcggtgatgggtaaactggtgccgcaggacccgaacgatgaaccggcttctgagctactcaaacgtattgcgcaggaaaaagcacagttggtaaaagacgggaaaattaaaaagcaaaaaccgttgccgccagtaaatgatgaggacaagctatttgaaattccatttaattgggaacacgtttatctaaatgatatatgtgaagtgataactgacggtacacatcaaacgcccaaatatacagataggggccgcccgtttatctctgcacaatgtgtaaaaccatttaaattcatgccagagaattgccgatatgtgtctgaagaagattatcagcaatatataaagaatagaactccggagataaatgacattctactcgcccgtgttggagcgggcattggtgaatgtgcagtgatcgatgtaaatctagagttttcaatttatgttagtactgcactaattaaaccaattaaatgtcatattaactcaaattatctttgcctatggcttaattcaccgataggtcgtttgttctcatcacgttatacatatggcaaaggtgtatctcaaggtaatttgaatctttcattgattaggacatttgttatatcgattcctccatataaagagcaaaatctgattgttgaaaaagtacgaacatatttatcaatatgtgagaaactaaaatcaaaaatccaatcagcccaacaaacccagctccacctggccgacgctctcaccgaagttgccataaattaa

SEQ ID NO: 224572 - DNA, 969 bp, Klebsiella pneumoniae
atggaaattttcaagatttggaaatcctttcttaaacatttcaaacagaaaaaattagactctgcggtagttatctacggagcgatcgccatctatttaattccctataaatttccgttgaaaagttatctggttgcgtttctttttatatctattttaattttcgcttgcactcaagagtctcggcttaaggaatatattggattttttgtacgtacatgcaatgaccatttgctgactcaatttgctggcattctatcgctaactgcatggtcaatttttttgcttttattgttgtctgctaatgtttttgttaacactataacgtattggttagcgattttattttcgctcctaatcctcattagcagtattttgacgattttagatattgctagaaataatactgcaaaaactcttaaaataatcggtctggcggttaccgtattttcaggtgtgtttacatttaccagtagctattcagccagtattttttggcaaattagtaatctggaactatcgccctctccatggttagaatattgctggaaagccacagcatttcttatgttcttcttgtggttatcacagccaatttgttatggattgtttatcacttacggtgataaagcgaaagggtatcgaatattcacattaaccggtgcctttattatgtcagtttttttgtttctccttgttcctaaactgtttggtgatgctgcttattatgtgttaaacagaaccatcaattatgaatggcgtgatgaagcaaaatgcggtgagctaaaagtgaagaataaaaatgaaaaatactttggatttaatactgataaatataccgttttttattcagataaaaatgataaatggggtttctatgagcttacttgtcaaaaaggtagcaataggaacgattcttatgcagtcgagtacttacctgaatataatattccagcgtggttaaaataa

SEQ ID NO: 224573 - DNA, 198 bp, Klebsiella pneumoniae
atgagcctggtcgactataccatcgcggttcgccgccgcccggagtggcgtagagtgcgcctgcagcctggcctgtggctggcgtgggcggtgatgatcgccgccctgttaatggccattgccccacagtggtttacctcctctaacccgctggaggggatccccggcgctcagcgcctggcgccgcaggcgcactaa

SEQ ID NO: 224574 - DNA, 1155 bp, Klebsiella pneumoniae
atgaaaaaaacgattttttcactggcgctgggcacctttggacttggcatggcggagtttggcattatgggcgtgctgccggatatggcgcacgatgtcggaatatccatacccgccgccggcaatatgattgcctggtatgccttcggcgtggtgatcggcgcgccgatcatggcgctgctctccagccggttttccctgaaatcggtgatgctgttcctggctggcctgtgtattctcggcaataccctgtttaccttctccagtagctacgccatgctggcgcttggccggctggtttccgggtttccccacggggcgttctttggcgtcggcgcgattatcctgtcgaaaatcgcgccgccggggaaggtgaccgccgcggtggcggggatgattggcggcatgacgatcgctaacctggtgggcgtcccgggcggcacctggcttgggcatcacttcagctggcgctatacctttgcgcttatcgcggtatttaacgtggcggtatttctggcgatcttctgctgggtgcccacgctttatgaccgggccagcacgcggctgcgcgagcagttccgttttcttgcctccccggcgccgtggctgattttcgccgccaccatgttcggtaacgccggcgtgtttgcctggttcagctatatcaagccctttatgctcaatgtatccggctttgctgaaagcaagatgatgctgattatgatgctggcggggctgggaatggtggtcggcaatctgttcagcggcaaaatttccgggcgctacagcccgctgcgcattgcggccatgaccgacggggtcatagccgtgacgctgctgctgatctttgccttcggtgaacacaaagtcgcttcgctggcgctggcgtttctctgctgcgcgggactattcgccctgtcagcgccgctgcagatcctgctgctgcagaacgccaaaggcggcgagatgctgggggcggccgggggacagatcgcctttaacctcggcagcgccatcggcgccttctgcggcggaatgatgatcgcccagggctttggctggaacagcgtggcgctccccgccgccgcgctgtcgtttctggcgatgagcgccttgctcatctatggctgtcatcagcggcgacaagcttactaa

SEQ ID NO: 224575 - DNA, 264 bp, Klebsiella pneumoniae
atgacggtcaataacattgaggccgccattcgcttaagcgcggcggggatgggcatcgcttatgtgcctgattttgtcgtgcgcgaggcaatggatgagggacaactgcaggaggtgttgcccggctgttgcatcaaggatgggtatttctccgtcctgtggcccgccagccgctacctgtcaccaagaatacgctgttttatcgattttatggctgcggcagagatacccttgtcacccgcatcggcaagccctaccacctga

SEQ ID NO: 224576 - DNA, 561 bp, Klebsiella pneumoniae
gtgctactggttgacgtctttatcctctatcgcgagtctaaccacaaatatgtccattcgtatcagaattcgatccgcgacccgttgacccgcctctacaaccgcagctttttctacgacactcttaaccaacagctggcgaaggtgaatgcccagcatccgctgtcggtgctcatcagcgacctcgaccatttcaaacgcatcaacgatagctacggccatgtcgccggcgacaaagtgatccagttcgccgcctcggtgctggaaagccattcgcgggtagatgacgccgccgcacgcatcggcggtgaggaatttgctctgctgctggtcaacaccggtgaaaaagaagcgcaagcgatcgccgagcgtatccgcctggcggtcagtgccggggagagccatttaccggagcgaatgaccatcagcatgggggtgtataccacctacgacgatagcgtgacagcggaagcgtgcgttcagcgcgcggacgaagccatgtatgaagcaaagaataacggacgtaaccaggtgatcgtctggcatcggcagggagggtga

SEQ ID NO: 224577 - DNA, 1125 bp, Klebsiella pneumoniae
atgagatcgggtcgctttattggcgttatgtctggtaccagcctggatggtatcgatgtcgttttggccaccattactgaaaacatggtggcgcagcaggctagtctcacctggcccattccacacgcgataaaagaagagattctggcgatttgccaggggcagtcgctgaccctttcgcagctaggtcgtctggacacccgtctgggacggctgtttgccgatgccgtactggcgctgatgcgccaggaaagtctcaaacccaccgacgtcatcgccatcggctgccatggacagaccgtatggcatgaaccgcagggagaggctccgcataccctgcaaattggtgacaacaaccagatcgccgcccacaccgggataaccgtagtgggggattttcgtcgccgggatatggcgctaggcgggcagggagcgccgctggtgccggcttttcatcatgcgctgctggcccaccccgttgagcgacgtatggtgctcaatatcggcgggatcgctaatgtgtcgctgctggcgccagggcagccggtgcgcggctatgataccgggccgggaaatatgttgctggacgcctggatctggcgccagaagggcaaaccgtacgacaaggacgcccaatgggctagcgaaggtaaagtgctgctgccgctgctgcaggacatgctgagcgatccgtggtttgccttgccggcgccgaaaagcaccggtcgggaatatttcaattacggctggctggagcagcatatggcccgctatccggggctacgcggggaggatgttcaggctacgcttgcggaattgaccgccgtcaccatcagtgagcaggtattgttaagcggcggctgcgagcgtttgttagtgtgcggcggcggcgcgcgtaaccccttgttaatggcgcgcctggcggcgctgctgccgggaaccgaggtctccaccaccgatgaggcggggatcagcggcgatgatatggaagcgctggcctttgcctggctggcctggcgaacgctggctggtctgccgggcaatctgccctccgtgaccggcgccagtgaagcctcggtgctgggcgccatttttccggctaacccgccgcagaatcggagttaa

SEQ ID NO: 224578 - DNA, 957 bp, Klebsiella pneumoniae
atgaaaatcctgtccgtgcgtcacgtcgccctcccggccctgctcttgccgctcattgccgcagcccaggccgctgatgaacaaaccatggtggtgaccgccgcgccaaccacggtttctgaactggatacccccgccgccgtcagcgtggtgaatggggatgagatgcgccaggccgcgccgcgcgtcaatctctctgaatcgctgggcgccgtgccgggcctgcaggtgcagaaccggcaaaactatgcccaggatctgcagctgtcgattcgcggctttggctcgcgctcaacctatggcgtgcgaggactgcgcatctatgtggatggcattccggccaccatgcccgacggccaggggcagacctcaaatattgatatcggcagcgttgacaccattgaggtgctgcgcggccccttctctgccctgtacggtaactcgtccggcggggtgatcaacgtcaccagccagaccggcacccagccgcccaccgtggaagccagcagctactatggcagctttggcacctggcactacgggatgaaagccactggcgccgttggcgacggcagccacgcaggcgatgtggattacacggtctcaaccaatcgcttcaccacccatggctatcgcgatcacagcggcgcgcgcaaaaatctggcgaacgcccggctgggggtgcgtatcaacgacgtcagtaagctgactctgctgctgaatagcgtggatatcaaagccaatgacgccggtggcctgaccgccgatgaatggcgcgataacccgcgccagtcgccgcgcggcgaccagtataatacccgcaagaatacccgacagacccaggccggcctgcgctatgagcgccagctcagtgcccaggacgatctcagcgttatgatgtacgctggagaacgtgaaaccaccagttccagtcaatcccgcgcgcgccgcagctga

SEQ ID NO: 224579 - DNA, 888 bp, Klebsiella pneumoniae
atgctaaaagagaacgtaaacgatctgctctcctttatggtggtggcgcgtgaacgcagctttacccgcgcggcggcccagcttggcgtgtcgcagtcggcgctcagccatgccatgcgccatctcgaaacgcggctcgatgtccggctgttgacccgcaccacccgcagcgtggtgccgaccgaagcgggcgagcgactgattcagcgcctcggtccgcatctggaagagatcgagcaggccctggctgcattgcgcgacacccgagagcgtccggcgggcaacctgcgcattaccgccggggagcatgccgccagcgcagtactctggccggcgctaaagccatttatgctgcaatatcctgatattaacatcgaaatcactgttgataatgggctcacggatatcgtgggtgaccgcttcgacgccggggtgcgtctcggcgaacaagtggcaaaagacatgattgccgtgcgcatcgccccggatatgcggatggcggtggtgggttcgccggcctatctgcagcgggccggtacgccgcaaacgccctgggatcttgcccaacatcgctgcatcaatctgcgcctgccgacacgagggggactttacgcctgggaatttgcccgcgatggccgggagattcaggtgcgggtggagggacagctgatcctcaacagcctgccgcagcgcatcgacgcggcggaggcgggcctcgggctggcctacgttccggatgactgcgtggcggaggccttagccagcggccggctggtgcgggtgctggcggagtggacccccgccttccccggctaccatctctattaccccagccggcgccagcataccagcgctttcacgctgttactggaaactctgcgacgctga

SEQ ID NO: 224580 - DNA, 564 bp, Klebsiella pneumoniae
atgatcattccttcaaagctgatccgcgccgctctggtgtgcgttgctaaaaatgatgcccgctactacctgtgcggagtccatatcaccccgaaatacattgagggaaccaacggtcatgtagcactgcgtatgcagcatggaatcaggacgaagaaaaatatcatcgtccagtttgaaggctgcgtgccagtcaaggcggaaacaacggagctgatcttcaataaggagccgatcgcaattcatcgtgatcagcaccagaatcgcctgtccattactggcattaagctactgagtggacgcttccctgacctggagcgcgtcatcccgaaaacacgggactttagcgttagcccagctatccaggcggaatacctgagctatccggcaaagatttttggacgtgaagaaaagtttgtccctgttcagcttcgtccatcaggtgagttcgacgcagtacggttccaatttaatgagcatatcaaccgcatgtacggaaaccctgagctggtcgttatgccttgccgtgataattattttaagggggagaatcgtcaaccatga

SEQ ID NO: 224581 - DNA, 948 bp, Klebsiella pneumoniae
atgcttaccggctatggccagtgggaatataacgttcaggccaacaacaccgagacctccagcgatcaggcgtggacccgtctggcattcgccggtatcaaagtgggcgattacggctccttcgactacggtcgtaactacggcgtgctgtacgacgttgaaggctggaccgatatgctgccggagttcggcggcgactcctacacctatgcggataactttatggcaggccgcgccaacggcgtcgcaacctaccgcaatagcgatttcttcggtctggtggagggtctgaacttcgccctgcagtatcagggtaaaaacgaaggccagaacgcgcaggatatcaacgtcggcaccaataaccgcagcagcgacagcgatgttcgcttcgacaatggcgatggtttcggcctctccacttcctacgacttcggcatgggcatcagcgcggcggcagcttacacctcgtctgaccgtacaggcgaccagcaacactatactcacaccgaacgatacgccaaaggcgacaaagcggacgcctggaccgccggcctgaagtacgacgccaacgatatttacctggcgaccatgtactctgaaacccgcaatatgacgccatacggctctaccagcagtaccaacggtggcggtatcgccaataaaacgcaaaacttcgaagtcaccgcgcagtatcagttcgacttcggcctgcgtccggccatctcctacctgcagtccaaaggcaaagatctgtacaataacggccgctatgccgataaagatctggtcaaatatatggacgttggcgcgacctattacttcaaccgtaatatgtccacctatgttgattacaaaatcaacctgctggatggtaacgacaaattctacgaagacaacggtatctctaccgataacatcgtcgccctgggcctggtttaccagttctga

SEQ ID NO: 224582 - DNA, 507 bp, Klebsiella pneumoniae
atgactacaaaaagacaggctcagagagccgctgagagcgatttacaggcattcctgaacgaagccgtcgaccgattcaaacccgacgccgccgtattagccgcgcgtatagataccgccgtccaacgttacgaagtaacgagcaccacacagcgtttcaacgctccagcaccgctggcaatgcagcaactccaagagaggatattggaaggctggcggtacgatatcggcatccctcaatccgtttacgttgccggtactggaaatatgagcatcaccctccgtaaaccggcgtcgctggtggaacaggagatagctgacctgaaaagacaggtggaggatgcatatcataacgagctggctgccgcgatcgagagagaagtggacaagctggtacaggacgccgccaacgaagcccagcaacgtgcagaggaggcagcagcagcagaacacgacgctatgcgccagcgtctccgcgatatgctgctgaatggggcgactgtatga

SEQ ID NO: 224583 - DNA, 147 bp, Klebsiella pneumoniae
atgaccaagaccaagagcgggccaccagcgcccgcctatatcgacccggacgcgctggagcgggctatcgctgtcgctcgccaaattaaagaggccaacccggatcgctacaaatcgctgcctgtccagccggaggttaaacgatga

SEQ ID NO: 224584 - DNA, 198 bp, Klebsiella pneumoniae
atgaaaatttacgatatcacagtgacaggaacaaccgccgactggctcaccgccacgcgtgggaatatacctctgccggtgttcgtccgtaagctgttggctgagatcgccagcaacccggaaaaatataacgacctgacccaaacccttaacgactcagtggagtgcaaatgccaaacccgaacaacgaaaaaataa

SEQ ID NO: 224585 - DNA, 1296 bp, Klebsiella pneumoniae
atgccaaacccgaacaacgaaaaaataaagaaacagattctcagcgcctttatcgactacctgaaagatcacggatgggtgatgaaagcgacaaataacctctcagtcctgttcaacatccgtgatggtttcaccctcaatgatgacagtatcagcggcctgttttaccagtgggccaaccggaactcatatgctgagattgagtacgaggatcattggtggaacaccatacgccaccggttaacgttcgtcatcggtgaagccttccagccagcggtagacccggaattatttgtgccgttgagttccggggtgcttgcagtcaatacgtacaaaagatacgtgaaggacgaaccagccaatggttttaaccctgacccggccccgtggattgaatttatcgagcgtctgtttccgcaggaaactgaccgggaaatagtgtgcgactggatggcgcatatgctccagcgccccgatcagcgtccgtcatggcacctgttattcacgggtgatactggcaccggaaaaggcgtgatctttgagcatatcctcaccccgctgctttctggtcagactgcctcgctggactcattcgccaaactgacggagaaacacagtacaacgctggcctccaatatgctgatccacctggatgatgtctccaccaacagcgacagccagatgacccggttaaaatccattcttagcgaggaatggcagcagatacgcccgctttatgaaaaagagcgtagcgcacgggtttacacgcggatcattctctcaagcaaccagccccgccccctgcgactggatgagaacgaacgccgctggtacgccccggagtttatgacgcacaaagctgaccggcaggagacgcaacaattcatccagaaccgtctcttgccgtgggtatccagcggcgggctggacgtgatttatgagtggcttatggcgcgtgacctgtgtcagttcaaccataaatacgtgccgcagtccgattgcctgcgccggatgatatcggattcagtttcaatcctggaaatgcaagtccgtgaatgggtggcagataacccggcattccgactggagacgctacaggcccagttccccgatctccgaaactgccagatagcttccagctacctgacggcgatgaagtaccggaagtgccagccgtaccagagaaacccagatccgaccggcaaaacgtcaaaacaatggtggtggatacctgatggctggacaccagccagcttgcgggagcaccttgcaaccgtcgaggagttcacattctga

SEQ ID NO: 224586 - DNA, 567 bp, Klebsiella pneumoniae
atgagttcgcatattgatgatttcaaagaatttatcaggcaaaacagtgctacagatgcctttagacgatatattctccactctgattgccaaatgatagagtctagtcaaagttatgctttgaaaagcaaaatttgcgataagcttaatgtgggattcgataatgtcatcatagtcggctcttgcaagctcgggtttagtataaaaccgactaaaagatttgttccatttggggatgagtcagatattgatgttgcgattgtatcgccaactttgtttgaaaatgtttggagaacagcgttggaatataaatacagcaatgcagactggcaatcaaaaagagaattctttaaatatttatcatcaggatggatacgtccagataaatttcctagaggggagaattttgctttttcaacggattggttcgagttttttcgcgaaatgacaaactcccgtgagtatggcgattataaaatcgctgcggggatatattacaattcattttttcttgagaaatatcaagaaacctgcttagaacaatgcatatttgaggttacccaatga

SEQ ID NO: 224587 - DNA, 1008 bp, Klebsiella pneumoniae
atgaacacttcagcatccaatagacgcttgcgtgttttattaactgcaataggttccgggaatttaataccgcaacctgattttcagcgtcgtctagtatggacaaataaagataaagtcgaattcataaagacagttgttcatggctatcccttccctgagatatacatagccgcaggaaaggttgatcctaaaaccggagagggagccgaggtattagttgatggtcaacaaagggttactactctttaccaatacttcaaaggggatactgatctgcgattacctgtcgatcttcctaagtacgctgaccttcaagaagatcaacaaatcgcttttttagaatatagcgtagtagtaagagatttaggtgcgatgtctatagaggttattcgtgatgtatttaagaaaataaactctactagttatggtttaaatgctatggaaattgacaatgcaagatatggcggagaatttaagaactttggagaggagttttcagaacatgatttttttgagcagtataaattatttacatcatccgatattaaaaggatgaatgatgttaggtattgccttggcttaacagtaactatcatgaccacatattttaatcgagataaagaaatagaatcttacctcgaaaaatacaatgaagtatttcctgctaaagacgacattaaaaaaaatatcgaatacacattaaattttatagactctttgaacttcaggcctgacagccgagcgatgaaaaaagctgatttttatactttatttgtagaaacctatcgactccttattaatgaaaaaaaacagttagataaatcaaaatgtcgcgcattgctagatgatttttacaaaaatgttgatgaggtttcttctgatcaataccatggaaaaaacgatgaacccaagatatattataaagctgccttacaggcaagtaatgatagaagtaatcgtataagtcgtggaaaaataatatctaatattttatctggttgttga

SEQ ID NO: 224588 - DNA, 579 bp, Klebsiella pneumoniae
atgagccgcacctttgcatactgccgcgtttcgaccagtgagcagacgaccgaaaaccaaattgtagctatccgtcaggcaggttatgacatcctcgatagtcgcgtgatatcggaaacggtatccggtggtgtgcaggcgatgcagcgtaagacctttgccgatatggtcactcataagctggagaaaggcgatcggctggtggtgttgaagctggacaggttggggcgtgacaacatcgatgtgcagcaaactatagcgatgctggtggacaaggggattgacgttgtttcgcttgatctgcctgtccgtaatcttgccagtgcggaaggaaagctgatgctgcaaatgttttcagctttcgcggagttcgaaaagtcccgcatcattgagcgtaccaaagaaggtcttgcgcgagctaagacagagggtaaaaagttaggccgtccggcggcgacggataccgttaagcgcgtgcaggaagccaaatcaaggggactgagtcagtccaaagcggcgcttgatttggggttgagcctgccaacaatcaagcgtaactggaatatcaaagaagcgtaa

SEQ ID NO: 224589 - DNA, 1800 bp, Klebsiella pneumoniae
atgaaaaagaaactttattcctatattcgctggtcatctgcacaacagaccgcagggacatcgcttgagcgccagactgctgcggcgcgtgagtatgcaaaagcccatgatctggagttcgtcgaaatcctcgatgctggcgtcagtgcattcaggggtaaaaatgccacagacggcgctttagctgagtttattgcagccgttgagaacggtgcgatcccttctgactcatggttgtacgtagaaaacctcgatcgtttgagccgcgcgaccgtaagaaacgcgttaaaattattactgcatatcaccgatcttggagtgacagttgttacagggatggacgggaaaatctattccgctgaaactatggataaggattttaccgaccttatgatctcgttgttgttattcagtcgcgccaacgaagagtctaaaacgaaatccgaccgtgtaaaagaagcctctatgaaggctctggcgagggttcaggcgggattgcccgccactataaaaggtggtggtgctgatccgttctggatacaacgcggagatcgggagacatcaccaacacaacaccccacccactggctggcgataaagaagatcgttgagctatccctacagggggtcggctgcaaccgcatccgccaggtactgaatgatgatccaacgttatacccaccaccacgccaaaaagacacaccacgccgccgggcattacttgatgctggtttagctccaacaggttggaatatccaccggattgaggatgccagacgacaaccatcactctacggtttgaaaactataaccctgtccgggcatacatatagtctggagggctattaccctgcggtttgtagcgaggaggagttccacctgatacaaaatatctctgccagcaaccggataaaatcaggagatatacgcaataccataaccctgttatccgggttgaacctttgtaaatgtggttcctgtggcggatgggtgacaacgttcagaaaaaacggaaaacttacctatcgctgtgacgccggacatcgaaaaatacatcactgtccaacaaggtggtctttgaatgcgaggatcattgagtccgccaccgtcagggcgctgatagcgggcgtggctcacaacattatagaggacagtcaggatctggaatctgtcgctggtgagattgataacaggcgggcggaagtggcggatattgatcgcaaacgtgaacgtctggctgcacgtatagccgaagaggatgatgatctgctcatgcagcaattacggcagtacaacgccagaaaacgagatctgttaacagagataggcgcgttaacgcaacgtgaagcgcttcgcagcgaaggacagaatgttgctgagagattagcagaggcccagcgattgcttactgctgatatggtcaacgacatatttacatctgatcgtttagcggttcgtgagttgatacgtaaatcaatgcgtcaggtcactatctggaaacggcaggacaaaagtcttaaggtcgagtgcgagtttatcagcgggtggcgctatacctttgagggagtgatgaaagagggtaaaaaatcctttattgaatacaggacatctccagacggcattaatatgatggagatttacgacaagctgaacgcaatcacagctaaggcgtttaaacatgtgctggatgtggatgataatgtgatgccccctactctgagccatgttcaggcatatcacgatatgtcggtgagattggggcattccccgcttactggcagtcaatttttctggcggtag

SEQ ID NO: 224590 - DNA, 645 bp, Klebsiella pneumoniae
gtgaatccgtcggaggcggtgctggtgggggtggcgaatgccctgcagtgcagtccgctggagacccggcatctgttcgtgctcgccgggctgaccccgccggaagccacccaggtgacggtgtgcgaaggcatcagccctggcacccgccggatgctggacagcctgatgccgcagccggccagcattcagaaaccgaactttgatattgtggcgtggaacgacagcttctgccgcctgatgggcatcgatttcgccaccctcccggaagaagatcgcaactgcatttatctctatctgacccatgagacctggcgcagccggatcgaaaatcgcgatgtgctgccgaccttcgtctcctatttccgcgccgcgatggccgagcaccgcggcgatccggcgtgggaaaacaaactggcgcgctttttcgccgcctcgtcggagtttgaagcgctgtggcatcagcgctacgaggtgcgcggcgtggaaaaccagattaaacattttaaccacccgcagctcgggcgattcagcctgcagcagatgtactggtattcggcgccgcgcaacggctcgcgcctgctggtctacctgccgatggacgaggcgggcgagcaggcgctggcgtggctggaccaacattaa

SEQ ID NO: 224591 - DNA, 2034 bp, Klebsiella pneumoniae
atgacagatctttcgcaaagcagagaaaaggacaaaatcaatccggtggttttttatacctcggccggactgattttgttgttttccctgatgacgatcttttttcgcgatttttctgccgagtggattgggcgcaccctggactgggtgtcgaaaaccttcggctggtactatctgctggcggcgacgctgtatatcgtcttcgtcgtctgcattgcctgctcgcgcttcggctcggtgaagctcgggccggagcagtcaaagcccgagttcagcctgctgagctgggcggcgatgctgttcgccgccggcatcggcatcgacctgatgttcttctcggtcgccgagccggtgacgcaatatatgcagccgccggaaggggcggggcagaccatcgaagcggcgcgccaggcgatggtctggaccctgtttcactatggcttaaccggatggtcaatgtatgccctgatgggcatggcgctgggatactttagctatcgttataatttgcctctcaccatccgctcggcgctgtacccgatttttggcaaacggatcaatgggcccatcggccacagcgtcgatattgcggcggtgatcggcaccatcttcggcatcgccaccaccctcggtatcggcgtcgtgcagctcaactacggtctgagcgtgctgttcgatattccggactcgctggcggcgaaagcggccctgattgcgctgtcggtgatcatcgccaccatctcggtcacctccggggtggacaagggcatccgcgtgctctccgagctgaacgtcgccctcgcgctggggctgatcctgttcgtgctgttcatgggggatacctccttcctgctcaatgcgttagtgctcaacgtcggcgactacgtcaatcgctttatgggcatgacgctgaacagcttcgccttcgaccggccggtagaatggatgaacaactggacgctctttttctgggcgtggtgggtggcctggtcgccgtttgtgggcctgttcctggcgcgcatttcgcgcgggcgcaccatccgccagtttgtgatgggcaccctgattattcccttcacctttaccctgctgtggctgtcggtgttcggcaacagcgcgctgtatgagatcatccacggcgacgcggcctttgcccaggaggcgatggcccacccggagcgcggcttctacagcctgctggcgcagtatccggcgtttacctttagcgcgtcggtggcgaccatcaccggtctgctgttttacgttacctccgccgactccggcgcgctggtgctggggaacttcacctcgaagctgaaggacatcaacagcgacgccccgaactggctgcgcatcttctggtcggtggccatcggtctgttgaccctcgggatgctgatgaccaacggcatctcggcgctgcagaacaccacggtgatcatggggctgccgttcagctttgtgattttcttcgtgatggccggactgtataaatctctgaaagtggaagattaccgccgggtcagcgccagccgcgacaccgccccgcgcccgatgggcctccaggatcgtctgagctggaagaagcgcctgtcgcggctgatgaattaccccggcacgcgctataccaaactgatgatggagacggtgtgctacccggcgatggaggaggtggcgcaggagctgcggctgcgcggcgccgcggtggaactgaagagcctgccgccggaagagggtgagaaccttggccacctcgatctgctggtgcacatgggcgacgagcagaactttatctacaagatctggccgcagcagtactcggtgccgggctttacctatcgggcgcgcagcgggaaatccacctattaccggctggagaccttcctgctggagggcagtcagggtaacgacctgatggactacagcaaagagcaggtgatcaccgatattctcgaccagtacgagcggcacctgaactttatccatctgcatcgggaagcgccggggaacagcgtgatgttcccggatggctaa

SEQ ID NO: 224592 - DNA, 882 bp, Klebsiella pneumoniae
atggcaaggaagagcgatccactggcgtttggtgggttggcgttattaacgctgatctggagctttagctggatcgcgatgaagcaagtgacgagctatatcggcgcttttgacttcacggcgctgcgctgtatttttggcgccgtggtgctatggatagtgatgttgatccgcggtaaagcgctcaagccgacgcctttcggctacaccctggcgatcgcgttattgcaaacctgcggcatggtcggtctggcacagtgggcgctaatgagcggtggcgccggtaaagtggcgatcctgagttataccatgccattctgggtagtggtgatggccgcgttattcttaggtgagcgcatgcggcgatggcagtatatcgccatcggggtggcatgcgtgggcctgatactcgtacttcagccttggcaactcgactttacctccctgaaaagcgccttgctggcgatcctctccggcgtgagctggggggcaggtgcgatcgtcgcgaagcgtatgtatacccggtatccgcaggttgatttgctggcgctaacgacatggcagatgctatatgccgccgtagtaatgagcgtagtggcctggctcgtcccgcaacgggcggtagactggcagcccgacgttttctgggccctggcttacagcgcaatccttgcaacggcgctggcctggagtctgtggctttttgtactgcgtaatttaccggcaagtatagccggtctgagtacgctggccgtaccggtctgtggcgtgctattttcctggtggctactacatgaaaatccaggaaaggtggaaggttgtggcattgcgttgatagtactggcgttggcgatgatcagtatcaagagacgaggggcatag

SEQ ID NO: 224593 - DNA, 429 bp, Klebsiella pneumoniae
atgagcaacattaccatctatcacaacccggcctgtggcacctcacgcaacacgctggagatgatccgtaacagcggcaacgaaccgacgataatttattatctcgatacgcccccgacccacgatgagcttattaaacttatttcagatatgggaattacggtacgtgcattgctgcgcaagaatgttgaaccttatgaacagcttggtcttgctgatggtaagtttaccgatgagcaattaatcgggtttatgctggaacatcctattctgattaatcgccctatcgtagtaacccccctgggaactcgtctgtgtcgtccttcagaagttgttctggatattatcccggagtctcagaaaggtgcatttactaaagaggacggtgaaagagttgttgatgagagcgggaagaaagtgaacctataa

SEQ ID NO: 224594 - DNA, 1290 bp, Klebsiella pneumoniae
atgcttttggcagggagtatatttttactgacgctggtactggtgatctggcaacccagaggcctgagtattggctggagcgcgagtatcggggcagtgctggcgctgggaaccggtgtcatccatatcgctgatattcccgttgtctggaatatcgtctggaacgctacagcggcatttattgcggtcatcatcatcagcctgctgctcgatgagtccggcttctttgaatgggccgcactgcacgtctcccgctggggtaacggacgtggccgcctgctgttcacctggatagtcttgctcggtgccgctgttgctgcgttgtttgccaatgacggcgccgcgttgatcctgacgccgattgtgattgcgatgctgctcgcactggggttcagccagggcacgacactggcctttgtcatggccgcaggatttattgcagatacggccagcctgccactcattgtttctaacctggtgaatatcgtctcggcggacttctttggtctgggctttacgcagtacgcctccgttatgatccccgtggatgcggcagcgattgcagccacgctgatcatgctgcatctcttcttccgcagggatattccggccacgtacgacgtttcgctgctgaagacgcctgccagcgcgatcaaggatccggcaaccttcagggcgggctggattgtcctgttattgctgcttgtcggtttctttgttctggagccgctggggatcccggtcagtgcgatagcggcggctggcgcagcagtgctgtttgtggtggcgaaaagaggccatgccatcaacacagggaaagtcctgcgcggtgcgccatggcagatcgttattttctcgctgggcatgtacctcgtggtctatggcctgcgcaatgcagggctcacggagtacctgtctggcgtgctgaatctgctggcagacaaggggttatgggcagcgacgttcggcaccggcttcctgacggcatttctctcatcagtgatgaacaatatgccgacggtactgattggcgcgctgtcgattgacgggagtacggcgaccggcgtcgtcaaagaggcaatgatttatgccaatgtgattggctgcgatttaggcccgaaaatcactccgattggcagtctggcaaccctgctgtggctacatgtgcttgcccagaaaaatataaagattacctggggatattacttccgtaccggcattgttatgactgtgccggtgctgtttgtcactctggccgcgctggcgtggcggctctctgtcactttgtaa

SEQ ID NO: 224595 - DNA, 321 bp, Klebsiella pneumoniae
atgctacaacctgttcagcttttcaaaatcctgtcggatgaaacccggctcgccatcgtcatgcttctccgggagtccggagaactgtgcgtctgcgatatctgtgcggccacctccgaatcgcagcccaaaatatcgcgacatatggctatcctgcgtgaggccgggctggtacttgaccgtcgggaaggcaaatggatccactatcgtctgtcaccccacataccggcatgggcagcagagacaatcacgacgacctggcagtgtatgcgggaggatgtgcgtgaatggctggataaatcagcctgcacctcctgctga

SEQ ID NO: 224596 - DNA, 699 bp, Klebsiella pneumoniae
atggaacaatttcctgccctgaatactgaatgctttgatcaacacattgccgaacgcctgcacctgcaggagccccccagaatcctgatcctgtacggttcagtgcgagaacgttcctacagccgctttgcagcagaagaagctggaaggctgctgtcagtcatgggcgcagaagtgaaaatgtttaatccttcagggctaccgttacccgacgatgcgccagaaacgcatccgaaagtcgttgagcttcgcagcctggtcagatggtgtgatggaatggtctggagttccccggaacggcacggtgccatgagcgcgataatgaaagctcagattgactggattccattaagtgaaggcgctgttcgcccctctcagggaaaaactctcgcagtaatgcaggtctgcggcgggtcacagtccttcaatgctgttaaccagatgcggatactgggccggtggatgcgtatgttcacaattcccaaccagtcctccgtagcaaaagcctggcaggaattcgatgaaaatgggcgcatgaagccgtcctcatggtacgaccgtatcgtcgatgtcactgaggaactatttaaaataacgctgctactgaaagggcatacgggataccttgccgatcgctacagcgagcgaaaagagagccaccaggcgttatcagcacgcgttaatcagagcaaaatctga

SEQ ID NO: 224597 - DNA, 597 bp, Klebsiella pneumoniae
atggctcttaaagcaaccatcaaagttaagcgctacagttcatggcgtggtgagtgtggtgaaattgctgaaaacattctgaagagaaactttaaagccacgcgacctaatgagaaatgggtcactgatgtgactgaatttgcggtaaatggccggaaactctatctttcccctatcatcgatctcttcaataacgaagttatttcctacagtatttcagaacgccctgcgatgtcgatgattgatgaaatgctattgaaggcattcgccaggctggatgacgacagtaagccagtacttcattccgatcagggctggcaataccgacaccgttggtaccagtatcagttgaagtcttctggtatcctgcaaagtatgtcccgaaagggaaactgcctggataatgcctgtgctgagtgttttttcggggcattgaaatcagagtgtttttataccagtgaattcaatgatattgatgaactcaaggtggttcttgaggactatatccgctattacaatacccgtcggatcagcattaaattaaaaggccttagtccggttgagtatcgtctgaaggcctacccattacgaatttag

SEQ ID NO: 224598 - DNA, 510 bp, Klebsiella pneumoniae
atgtccagacgtaaatatacctttgaagaacgcctccaggtggttatgcactatttcactactgatgagggttatcgtttgacatcagcacgcttcgacgtccctcgaacccaggtaagattatgggttgcagcctatgatgcttatggggaagagggattaaaatccagggacaagggagtctctgttgaccctgaggtcagaattgaagctgttagagctgtactttcaggtcagatttcccaaacgcaggcggctgccaaatttaaagttgctggcgccgcttcgataggcaaatggataaaagtgttcaacgaacatggagaggacggtttgcgttctttacgtgttggtaagaaaagggcaccccatatgattgatgaccctgttaaagcggaagctgtactggaatattcgaaggataaacggattcgagagttggaaaaaaaagtccacttccttgaattacgagttctttatctaaaaaagctgaaagccttggttcggtaa

SEQ ID NO: 224599 - DNA, 924 bp, Klebsiella pneumoniae
gtggcaaagcaaaagttcaaaatcaccaactggcccacctacaataaagccctcatcaaccgtggctccataactttctggctggatgatgaagctattcaggcctggtatgagtcagcaacgccttcatcacgaggcagacctcagcgctattctgaccttgccatcacgactgtgctggtcattaaacgcgttttcaggctgaccctgcgcgctgcgcagggctttattgattccattttttctctgatgaacgttccgctacgctgcccggattacagctgtgtcagcaggcgggcaaagtcggttaatgtcagtttcaaaacgcccacccggggtgaaatcgcgcatctggtgattgattccaccgggctgaaggtctttggtgaaggcgaatggaaagtcaaaaagcatggccaggaacgccgtcgtatatggcgaaagttgcatctggcagttgacagcaacatacatgaaatcatctgtgcagacctgtcgctgaacaatgtgacggactcagaagccttcccgggtcttatccggcagactcacagaaaaatcagggcagcatcggcagacggcgcttacgacacccgactctgtcacgatgaactgcggcgtaagaaaatcagcgcgcttatcccgccccgaaaaggcgcgggttactggcccggtgaatatgcagaccgtaaccgtgctgttgcgaatcagcggctgaccgggagtaatgcgcggtggaaatggacaacagattataaccgtcgctcgatagcggaaacggcgatgtaccgggtaaaacagctgttcggaggttcactgacactgcgtgactacgatggtcaggttgcagaggctatggccctggtacgagcgctgaacaaaatgacgaaagcaggtatgcctgaaagcgtgcgtattgcctga

SEQ ID NO: 224600 - DNA, 483 bp, Klebsiella pneumoniae; identical to SEQ ID NO: 214733

SEQ ID NO: 224601 - DNA, 1071 bp, Klebsiella pneumoniae; identical to SEQ ID NO: 208778

SEQ ID NO: 224602 - DNA, 813 bp, Klebsiella pneumoniae; identical to SEQ ID NO: 95542

SEQ ID NO: 224603 - DNA, 1854 bp, Klebsiella pneumoniae
atggtggagcagtacgggcgcgttcgtcgtttcctgccccatctgctgaataccgttaaattttcatccgcacctgccggggttaccactctgaatgcctgtgactacctcagccgggagttcagctcacggcggcagttttttgacgacgcaccaacggaaattatcagtcggtcatggaaacggctggtgattaacaaggaaaaacatatcacccgcaggggatacacgctctgctttctcagtaaactgcaggatagtctgaggcggagggatgtctacgttaccggcagtaaccggtggggagatccccgagcaagattactacagggtgctgactggcaggcaaaccggattaaggtttatcgttctctgggacacccgacagacccgcaggaagcaataaaatctctgggtcatcagcttgatagtcgttacagacaggttgctgcacgtcttggcgaaaatgaggctgtcgaactcgatgtttctggcccgaagccccggttgacaatttctcccctcgccagtcttgatgagccggacagtctgaaacgactgagcaaaatgatcagtgatctgctccctccggtggatttaacagagttgctgctcgaaattaacgcccataccggatttgctgatgagtttttccatgctagtgaagccagtgccagagttgatgatctgcccgtcagcatcagcgccgtgctgatggctgaagcctgcaatatcggtctggaaccactgatcagatcaaatgttcctgcactgacccgacaccggctgaactggacaaaagcgaactatctgcgggctgaaactatcaccagcgctaatgccagactggttgattttcaggcaacgctgccactggcacagatatggggtggcggagaagtggcatctgcagatggaatgcgctttgttacgccagtcagaacaatcaatgccggaccgaaccgcaaatactttggtaataacagagggatcacctggtacaactttgtgtccgatcagtattccggctttcatggcatcgttataccggggacgctgagggactctatctttgtgctggaaggccttctggaacaggagaccgggctgaatccaaccgaaattatgaccgatacagcaggtaccagcgaacttgtctttggccttttctggctgctgggataccagttttctccacgcctggctgatgccggtgcttcggttttctggcgaatgggccatgatgccaactatggcgtgctgaatgatattgccagagggcaatcagatccccgaaaaatagtccttcagtgggacgaaatgatccggaccgctggctccctgaaactgggcaaagtacaggcttcagtgctggtccgttcattgctgaaaagtgaacgtccttccggactgactcaggcaatcattgaagtggggcgcatcaacaaaacgctgtatctgcttaattatattgatgatgaagattaccgccggcgcattctgacccagcttaatcggggagaaagccgccatgccgttgccagagccatctgtcacggtcaaaaaggtgagataagaaaacgatataccgacggtcaggaagatcaactgggcgcactggggctggtcactaacgccgtcgtgttatggaacactatgtatatgcaggcagccctggatcatctccgggcgcaaggtgaaacactgaatgatgaagatatcgcacgcctctccccgctttgccacggacatatcaatatgctcggccattattccttcacgctggcagaactggtgaccaaaggacatctgagaccattaaaagaggcgtcagaggtagaaaacgttgcttaa

SEQ ID NO: 224604 - DNA, 1854 bp, Klebsiella pneumoniae
atggtcgagcaatatggacgggttaagcgctttctgccagcgatgctgcgtgatttacattttcagtctgcccctgccggcgaaaatacgctatcggccatacattacctggccgaactgagtggttcgaaaaaacgcctcctggagaatgcgcctgagcagatcattacaggtccctggaaacgtctggtgtacgactccgaaggccggatacagcgtgcaggatactcattgtgcctgctggaacgccttcaggattcgctgcgtcgccgcgatatctggctggagaacagcgatcgctggggcgatccgcgtcagaagtttcttcaggggaaagaatggcaggctcagcggatcgccgtatgccgggcgcttggacaccccaccgatggtggaaatgccgttaaacagctggcaaccgaactggacgaaacctggaaaacggtggcctcacgctttgagctgaatgctgccgtgagcatctgtcatcagggtaaatatccgtccctgaccatcagcagtctggaaaaactggaagaaccgcagccgctgattcttctgaacagccgcgtcaggcagctggtcccccctgttgatctgacagagctgctgcttgaaattgacgcccggactggttttacccgcgaattcactcatgtgagtgagtctgaagcccgtgctcaggatcttaacatcagcctgtgtgccgtactgctcgctgaagcctgcaatatcggacatgaaccgctgatcaaacacagtattccggcactgacccgccaccgtctgagctgggtaaaacaaaactacattcgggctgaaacgctggtcagcgctaatgcccggttggtcgattttcagtccacgctggaactgtctgagcgctggggcggcggagaagtggcttctgcagatgggatgcgctttgtcactcctgtaaaaacgctgaactctggccctaacagaaaatactttggctcagggcgtgggatcacctggtacaattttgtttctgaccagtattccggctttcacggcatcgttatccccggtacgttgcgtgactctatctttgtgctggaagggcttctggagcagcagacggggctgaatccggtggagattatgacggacactggagggtccagcgacattatctttggcctgttctggctgctgggctaccagttttcgccccgcctggcagatgccggtgaggcggtattttggcgtgcagataaaaatgcgaactacggggtactggatgagctggcgcggggatgcgttgaactgtcaaagatagaaacccaatgggatgaaatgatgagggtttccggttctctgaagctgggtacagtccacgcctcagaacttgtgggctcgcttttaaaaagttcccgtccgtcagggctggcgcaggcgattatggaggtgggacgggtcaacaagacgctgtacctcctcaactacattgatgatgaagaatatcgtcgcaggatactgactcagcttaaccggggagaaggccgtcacgccgtggcaagggcgatctgttacggccaacgtggtgagattagaaaacgttaccgtgaggggcaggaggatcaactgggtgcgctggggcttgtcactaacgcagttgtattgtggaacacgctttatatgcaggaagcgctatcacatttgcgcagcgctggtgagatcccggaagacgagcatatctcacgcctgtcgccactgatgtacggtcatatcaacatgctgggacattatacgttcacgctgccggaaaatattctgaagggagagttgaggccattaaatttcaattcaaacaatgaattattgccttaa

SEQ ID NO: 224605 - DNA, 657 bp, Klebsiella pneumoniae
gtgatgttctggaaccaaaaaaagaaagagaaagcagcaaccggcaatgaaaaaaagcgcttcgatcacctgctttcggtggccgagaaattacctgtcatgacgctgcctgatctcattcgcgctatcgtgcgaccagtacagagtgatttcttgctggcggtagccgaggaaggaacagatgcccgaccaaatatgacccctgaaaagttcttctttgaagggcttatccatgtgaaatcgtatgaaaagatgaaagaacatgagatggacggcgctgattacccgttgtcactggcaagtgatatggtgctgccgtggccttggagcctacaacgctttatcaataacgtttcacgtattggaagctataaggggaagccgtggaagcaggataatagcaatcattatgttgagctatggttgccctggcgtattggctttgtgggtggcggaaatcattcaataacggctggcattctggccggagaagggacgctaatccctgagcacgtttacgatatgtcctggctgtttgagctggtccgaacggacggtaatcactggtttgttgacgatcataaagtcgaagcggttaagtcggggcgttcagctgcggtgtttgagatagggcggctattagtggaaggagcttaa

SEQ ID NO: 224606 - DNA, 960 bp, Klebsiella pneumoniae
atgaatactgactttgcccattacaacgaagagcaactacgcaaactcggtgagctgcacagtttactccgtcacagcgatatcggctcatcttaccttgccacgctcccggagccccgtagtgttgaggagttgaatcctccacaggaaatcaatgtgactcattcggtacccgacgtcgacaccctggtggatatttaccggcagcagcgggttgataaagtccatgtcagggatgagcattattcaaccaaaatcacccgaaaatatcccggattcgttgtggtcagaaacaatcatgatcaggtgatgtcgctggtgggtgaaatcaaccggcttcgcgacaaatttgctgaggctgtaaaagctatcactcattaccaggactcccggtcagaaattctgcatcaggtttacccgtggctggtgactttacaggtgtcccgtaatatccggatcgttactgagcaaattcgctccctggggttcacctggcaaatccctgtcattcataaatttacccggctggaaacggttatcgaccgcttgcgcagggagataactgagctccagccggatatcagtctgacaaaacaggatgttgaacggctgaaacaggaacgaaccgaagaaatcatgatgctgtcgttgctcaatgatgaagtgagtcatgacgatgaaagttcgagaaaatttcggctcatccgggaaagtaactttccggctgttaacgtcaatatccggtacaccagtcctgaagatccagatgatgttcatgggccgtacaaactcaactttcgcgcgcctttaccattaattttgttcagcgaaccgggacggtttaatccgttaaaaaattacgtaaaaggtgaaaggcagaagcgcggcgattttaatgaaaaatatcgttctgtcctgccccgtatagggctggtggaagtcatcagggagtcaaaatga

SEQ ID NO: 224607 - DNA, 657 bp, Klebsiella pneumoniae
atggcggtgatcaatgccaaacgtgtataccgcatcatgcgtcagaatgcgctgctgcttgagcgtaaaccggaaataccgccctcgaagcgggcgcatacagggaaagtggccgttggagaaagtaaccagcggtggtgctctgacggcttcgggttcagctgtgataacggtgaaaaactgcgggtcacgttcgctctggactgttgcgatcgcgaggcactttactgggcggccagtaacggtggatatgacagtgaaaccgtgcaggacgtcatgctgggtgccgtggagcgtcgtttcggtaacagcctgccgacatcccccgttgagtggctgacagacaacggttcagcctaccgttcttatcagacgcgtcagttcgccagaatggtaggactggagcctaaacatacggcggtacgtagcccggaaagcaacggtatggcagagagcttcgtgaaaacgatgaagcgcgattacatcagcatcatgccgaaacccgacgggttaacagcggtaaagaaccttgcggaggccttcgaacattacaacgaatggcatccgcatagtgcgctggggtatcgttcgccacgggaatatctgcggcggcgaaccagtaatgggttaagtgataaaaagggtatggaaatatag

SEQ ID NO: 224608 - DNA, 288 bp, Klebsiella pneumoniae
atgcgcaactggctgaaacaggcggtgaagcgggctgaagctgatggcgtgcatttttcgatcgccgtgacgccgcataccttccggcacagctatatcatgcacatgctttatcaccggcagctcaggaaggtcatccaggcgctggccgggcataaggatccgcgctcgatggaagtctatacccgggtatttgcgctggacatggctgccaccctggccgttccctttaccgctgacggtcgagatgccgcggagatccttcgctccctgccaccggccggctga

SEQ ID NO: 224609 - DNA, 2847 bp, Klebsiella pneumoniae
atggcctttaacccggagctggggagcacgtctcccgctgtgctgctcgataacgctgagcgtctggataagctggtaaatgggtctgcgctgactgaaccagatcgcgctggcgttgagctggatacctggcgcggaatgatggcgaaaaatgatgaagtcaggcagaacctgatcccgctcagtaagcaatatgcgacgctggcggcggcacaggcggacatcgcgaatattccgacaggaagcgccacgtattaccgcagccctgatgattccgcgcttgctattgaggtaattaatacagcaggaactttacaacctaccggccgtaaaatgccgtcacagtcatcaatggtcattggtattgttgattcgtgggttaataacaacctttatccctttgatacattgtcatcgccgaatgaaaacgcggtatctatgaatgtagctgctgtaagcactattgcgtaccgagaggcttactctgctttattatctcctgttgctgtaggagatattatcactgtccgttataaatacaacggaaccggaggcgccccaaccattggattaaaaacatcgctgaacggcacatttgtgagtaatcagccaacgttgacctcttcaaatgactggcaggaagtacagcttactgccactgcagctacagcaacgctcctggctatcggggtgaatacaaggcttgcaaccactgttcagttatcgattatcgcctacgcatcgaagaagaatgctattaccacagcaattcttaactcactggatagcatttccagtttaaatggaaaggcgcgtattggttctgttgattcgtgggttaataacaacggatatccattctctgttttctcgcaggttaataacaaccgagtaaactacgtcaattcgacgggcgtctattcggagatgtatgcgaatattaacgtgccctctggcggctctttgatttttagctattctctggatgccacagccgggcgattattcgctagattagcaaacggcagcgcatggacgggtgacgaagtgcaactcgccggcggtggtgccaggcagaccattacactcgtggccgcggcagacacaaaacagttaaaactgtataccagggcggaaatatccgcagggtcttttttcgcggaagtaaactacgggcaaaaaaatgcgctgacagagcagattgattcgctgtattcggcagtggcatcagctaacgctgttctggccatactgtcccaaagctcaacatttgattcatttgtaaaaagctcgccttacacctacacgttaagtgatgctggtgtggcttacaaacaggcaataagcacggtggacaatatcagcggattgaacaccgtaaagatgatgtacaaaatatcttcatcgaatgcagctttaaaaattcagagcaggaacggaagcaactggggggcaaatgaaagaactctggtagctgatggggattatcatgaaattgacttgccgatagcctcggggcaggtattttccggttggggtgtatactcatcagccaaagctggaggatattctgctgacgtaacgatgatccctatctctgcaaacggggtgtttttcacgccagcaacggctatcctttatggcctgatggccgcttcggcttcccttgacagccgcgtaacagctctggagaacggccaggccaccgatcaaaatacagatgtgattttccctgcatacttctatgcagtggatggtcgcccgctgcgtttttacggtgccaatatggtcagtggtacccgaccatggcacaacaacacagacatcgttctttccagtcatgggtatgaaggtaaatcggtactgcttaaagatgtagttcctgacgcgatgataatgccatcggaaattaatgggccaacgctgaacatcaacgcgcgggcagacggttctggtaatgtattccggaagaaagctgcgttcactaaactggcggcgactcagaccggaaacgtaaaagtcgccacaataatggatagtcttggagaacggtgcgttccgtggctttattttgcactcaacgcgacaggggcgatatatgcgggcgcaggttcccgaaaaacacgcggcatgacagacgatggggagtatacacttccaaatacaccggcggatggtatcccatttgacggccgtgggggctggacgacgttcgactatatagggaagacgcagaagacgaacttctcgcagcccttcctgcgagatgcggtagctgccgatttcgccgcttaccctcagtactgttacgataaggcctattctgggcagagctatgcagataaccctaatctggcggggtatcacatttttgatgtgactgcgtggatggcggcgtcaggggtgagcgccagcgataaactggtggtggtcattcagctcggatataacgacctctactacagctatacgcctcagcagaccgttgatgcgcaggaattcatgatcgccaaattccgcgaaaaaatcgccaacgcccggtttgtgatttctcaccaggcatttggctggtcaggtgtaagcgcccctcaaagctggccagaattcgctaagtggatcacgcagaagctgcgcaagtttgataaccgtatcagcgagaaaattctcgtcgcccctgcatgggcacagctgagctacaaatacggaatgaacgaaactatcacagcaaccagtgatacgggtgttcagactgtatcgttacctgacgacgtccaccccggagagcttgggggagcacagtggggcgatgctctggttgctccagtactggcggcctggaatttatag

SEQ ID NO: 224610 - DNA, 2556 bp, Klebsiella pneumoniae
atgtcgctgaaggttaaattctcacgccaaaatatcttcgttatcttagccgtagcctgcgttggccaggctttcggtgaagaatattatttcgacccctctctattgcagggaacagcttacggacaaggtatggcgagcgttaacggacccgacacccccgccggagagtatctggttgacgttatcgtcaatggaacgctgataaaatccggcgtaaaaatccgctttaatccagtcaatggcggacagcgcaccgagccctgccttccgttatcgctgatgcaggccgctcaggttaaatcgctcccggacaacgcgctgcaaaatagctgccgtccgctaagggactgggtatcccgcggtgaatggcaatttgatagcgcgacgctacagctccggcttacgctgccgatgagcgagctgatgcacaggccgcgcggctatatcccgccttcgcagtgggacagcggcgcgctggcgctgtttttacgccataacaccaactggacccacacagacaacaccagccagcacttccgctaccactatttgtggagcggcatcaacgttggcagcaatattggcctgtggcagctccgccatcaggggaatctgcgctatgccgacagtaaccaaagcggtagcgcctggcattataatcgcgtgcgcacctgggtacagcggccactcaccgcaatcgacagcattatggcatttggcgataactataccgactccagtttattcggcagcctgtcattcaatggtattaaactcgccacggatgagcgcatgtggccgcagggcaaacgcggctatgcgccggaggtgcatggcgtggcgtcaagcagcgcgcgggtggtcatcaaacagctaggcaaagttatctatgaaacccatgttccacctggcccgttctatatagatgatctttacaacacccgctatcagggggatttgcaggttaaggtgattgaggctaacggaaaggtttctcgttttaccgttccctattccgccgttcccgactcggtgcgccctggtaactggcactacgcttttgctctaggcaaggtccgccaatattaccgcatcgacaaccgttttcttgaggggacgctgcagcacggggtgaataatcatctcacgcttaatcttggatcgcggttggcgcatgattatcaggcctggctggctggcggcgttctggcaacccgtctgggcgcgttcgggatgaatgccacctggtctggcgcacaagtggaacataacgatcggcagcagggctggcgcgcggagttcagctatagcaagaccttttccacaggcactaatctggtactggcggcttatcgctactcaaccggcggattccgcgatttagaagatgtgtttggcgtccggcaacaggagcacaacagcattgtttactactccgataccctacaccaacgccaacgtctttctgcaaccgtcagccagccgttaggtcggttggggacgctcaatcttagcgccagtaccgctgattattacaataaccggtcgcggatcacgcaactgcagctgggctatagcaaccagtggcgaaaagtgagttatggattcaaccttgccaggcagcgctccacctgggacgatagccgcttctaccacagcgttaacgaaccgcaggatctgaaccagcggcaaaaatataccgagacgacgctatcgttcactttatccattccctttaactggggcgacaatccgacctccgtggcaatgaattataaccagtcgcgcgcgaaccgatcctcaaccttgtcgatgaacggaacccgtggcgagcagaacgaactctcctggtcggtctacggcggctatgatcgctatcgcaatggggatgaagggacagcaacgacttttggcggcaacgtccagcaaaacacccgttttggcgcgctgcgcgtgggctacgatcagggaaaagactatcgtcaggtggcgctaggctcctccggaaccgtggtgttgcattccggtggcgtgacgttcggcccctacgccagcgacacgtttgcattaattcacgccgatggcgcacagggcgccgtcgtacagaacggtcagggggcggtaatcgaccgttttgggtatgccattttgccctcgctatctccctatcgtcgcaacaacgtctcactcgatacccggcagatgcgcagcgatgctgagctgaccgggggaagtcaacaggtggttccctatgctggcgcgatcgcacgggtgaacttctcaacgattaccggcaaagcggtgctcatcgcggtgaaaatggcagatggcggcataccgccaatgggcgccgaggtcatgaacagcgaaggggccgtcattgggatggtcgggcaaggcgggcaggtgtatgcccggatcagcacaccctctggctcattactggtgcgttggggaaaaggagccaaccgacgttgccgtgtgccttaccagttcgatatgcattctcctgaaaacgtgatttatctcacgactacctgcgagaggaaatag

SEQ ID NO: 224611 - DNA, 2148 bp, Klebsiella pneumoniae
atgaacgttattgcaatcatgaatcacatgggggtttacttcaaagaagaacccatccgtgaactgcatcgtgctctcgaacgcctggacttccgtattgtctacccgaacgaccgtgacgacttattaaaacttattgaaaacaactctcgtctgtgcggcgtgatcttcgactgggataaatacaatctcgaactgtgcgaagaaatcagcaaaatgaacgagtacatgccgctgtatgcgttcgctaacacctactccactctggacgttagcctgaacgatctgcgcatgcaggttcgcttcttcgaatatgcgctgggcgctgcggaagatatcgcgaacaaaatcaaacagaacactgacgaatacatcgacaccattctgccgccgctgaccaaagcgctgttcaaatatgtccgtgaaggtaaatataccttctgtaccccaggccacatgggcggtaccgcgttccagaaaagcccggtaggcagcatcttctacgatttctttggctccaacaccatgaaatccgatatctccatttcggtttctgaactgggttccctgctggaccacagcggcccgcacaaagaagcggaagagtatatcgctcgcgtgtttaacgcagaacgcagctacatggtgaccaacggtacttctaccgctaacaaaatcgtcggcatgtactccgcgccggccggcagcaccgtgctgattgaccgtaactgccacaaatcgctgactcacctgatgatgatgagcgacattacgccgatctacttccgtccgacccgtaacgcctacggtatcctcggcggtattccgcagagcgaattccagcacgcgactatcgccaagcgtgtgaaagagacgccgaatgcgacctggccggtacacgcggttatcaccaactcaacctatgatggtctgctgtacaacaccgacttcatcaagaaaaccctggatgtgaaatccatccactttgactccgcgtgggtgccttacaccaacttctcgccgatctatgaaggcaaatgcgggatgagcggcggccgcgtcgaagggaaagtgatttacgaaacccagtccacgcacaaactgctggcggcgttctcccaggcgtcgatgatccacgtgaaaggcgacgtaaacgaagagaccttcaacgaagcctacatgatgcacaccaccacttccccgcactacgggatcgtggcgtccaccgaaaccgcggcggcgatgatgaaggggaacgctggtaagcgtctgatcgatggctctattgaacgttccatcaagttccgtaaagagatcaaacgtctgaaaggcgagtctgacggctggttcttcgacgtctggcagccggagcatatcgatggtcctgaatgctggccgctgcgttccgacagcgcatggcacggtttcaaaaacatcgataacgaacacatgtacctcgacccgatcaaagtcacgctgctgactccggggatgaagaaagacggcaccatggatgacttcggtattccggcaagcatcgtggcgaaatacctcgacgaacacggcatcgtggttgagaaaaccggtccgtacaacctgctgttcctgttcagtatcggtatcgataagactaaagcgctgagcctgctgcgtgcgctgaccgacttcaaacgcgcgttcgacctgaacctgcgggtgaaaaacatgctgccgtcgctgtaccgtgaagatcctgaattctatgaaaacatgcgtattcaggacctcgcgcagaacattcacaaactgattgagcatcacaacctgccggatctgatgttccgcgcgtttgaagtgctgccatcgatggtgatgaccccgtatgccgcgttccagaaagagctgcacggtcagacggaagaagtgtatctcgaagagatggtcggccgcgtcaacgccaacatgatcctgccgtatcctccgggagtgccgctggtgatgccgggtgagatgatcaccgaagagagccgtccggtgctggagttcctgcagatgctgtgcgaaatcggcgcccactatccaggcttcgaaaccgatatccacggcgcctatcgtcaggcggatggtcgttacaccgttaaagtgctgaaagaagagaataacaagtaa

SEQ ID NO: 224612 - DNA, 1272 bp, Klebsiella pneumoniae
atgcgcttaactgatattgctgtaaaaaacgccaagccttccgacaagccaactaaaatttctgatggcaaagggctgtatctgctcgttcatcctaacggctcgaagtattggcaagcggcttatcgctatgatggtaagcaaaaagtcttctcaattggcacctacccttctgtttcgctctcagaagctcgtacaagcctcttagtgatgaaatctctgttagccagtggtatcgacccacttcaacagaaaaaagctgtaaaggccgaagagcgaggagattttacgtttgaagccgtagctcgtgattggcacaaaaaaatgtctgttagtgagcggtggatacctcagcatagtgagcgtattttaaacagtcttattaatcatcttttccctgctatcggctcaaaagatattaccaagttgactacgcgcgatctgttgctacctctgcgtaaaattgagggcaagggccaacacgaaaccgcttcacgtttaaaacagcgtattaccgctattatgcgttatgctgtccaagaagatatgattacccataatcccgctaatgaacttggcggcacgttaatcacacctaaaagaacgcattatccagcgcttgaacttgagcagatacctgatcttttaagtcgtatagatgcgtataaaggccgtaggctcactgtattagctttaaaactcactttattagttttcattcggtcgagtgaactacgcttcgctcgctggcctgaaatagattttaaaaatgccttatgggttattccgccagaaagagacgagatcgagaacgttagattttctgaaagaggatctaaaatgcgcatacctcattatgtaccgttaagtcatcaggccattgaaatattaaaagagctaaaagatattagctatgatattagcaatggtgagggtttgatatttatcggttgtcatgattatcgtaaacctatgagcgagaataccgttaataaagcattgcgacttatgggctatgacactcaaactcaaatttgtgggcatggtttccgcacaatggcctgtagttctcttgttgagtcaggtatatggactgaagacgcaattgaaagacaaatgagtcataaagagcaaaacaatgttcgtgctgcttatactcataaagcaaaacatattacgcagcgtcgtttgatgatacaatggtgggctgattatttggacgcaaacaaagaaagacatattatgccgtttgacttcgctaaaatgttatag

SEQ ID NO: 224613 - DNA, 324 bp, Klebsiella pneumoniae
atggatactgtgattttcaataacaatgaagatgcgtacaaaaagtggttaaacgataatccagaaggatacgttgttaacctgttagagaaagccaaaggtacggcaagtaaatctgacataaatagcacatgcctccaccatgtgaactgtttcgctataaatcctttagtgtcagataaagaaaaaactggatttacaacaggccagtatcaaaaaatatgttctgtatcagaggagtctgcttataacaaagctaaagaacttacaggtctaacgaccattaaacgctgttctttttgttttaagcatgtagatatataa

SEQ ID NO: 224614 - DNA, 1479 bp, Klebsiella pneumoniae
atgaaaggaaacgtagctaaaacagggagatcatttaaaaatagagttgagtatatattaaaagatgatcacgatttcatatgtagcaacatggcaagtgattataataatgttagtgatttaactgatgagtttaaaactgtaagcagctttagacaagatataaaaaaacctgtttttcatgcgtttttatctcttccaaaaaatgaacatttaacagatgaacaatggcaggagatagcaaaagactatttgaaagaaatgaatattgatatagaaaagcatcaatatatttgtgtgcgtcataacgatacagataaagaacatatccatattgtagccaataggattggtttagacggttctgtatggcatggtcagcactcagcatttaacacaatagcagcttgtgaacgtttggagataaagcacggcttaaccattacacaaagtctcaaagggcaaaaatcagaggtatcagcaccaaccaagaacgagatcgagcaagccctacgcaaaggtgagaaaccagctcgtatcgttctacagaacgcattacaggcggctatggtaggaaaaccagaccttgagacattcatagacagactgcaggctgtaggcatcgttccggccttcaacgttgcaagcactggcaacgtcgccggagtgtcgtttggtatcaaaaataatgaaaaaaatatttattttaaaggctcacagttaggtaaaaaatacagttggaacactattaaaggcaaggtgaaatatgacaaaaatagagatgatgaactcattagaagattcgcagcaagaaaaacagatgacgaaaatagtattggacgatcacctattgaaccaaatatcaatgacggtagaaccattatcagaaacgatgatgatattatcggagtcggtcagtacagcattaaaccagacacaacagacacttacgagggtaaacaactcgttagaagcaaccacaacagctttaaactcagcgaaaaatataatagaccaacaggcccaaaagttagaagaacaacacaaaaagctgcacaagtactcaacagagttaaaaaacaatacaataaagaaccaatcaaaacttataatcaaggtggcttcaatagtaggagttctaaacttagcagcggttctatcagtaggatacttgatcatgcagaaacagccacaacagccacgaataactttagactcaaaggccgtcgcagtttcaatagtagagcaactaagatcgaagagataagagaaaggttaaatattagaaaacctgttattcagcccaaaaataaagaaaaagtgattaaagaagaaataaagaaaaaaccattatatatgtttgattatgaaaatagatttaaatccaaattgaaatcaaacttaaaaaaagaaacattaaaactacaacagcaggaagcagaacagagtgtcaaatatccaacctttaaaccaaaataa

SEQ ID NO: 224615 - DNA, 372 bp, Klebsiella pneumoniae
atggatacagatagaaaaagaggccgcaagggtttaaatcacgcagaacgtagagatatatctatacagtttagattaaacaaagcagagtttgactatttaaaagaacttgtggaagcctccggccttgaaagaggccattacattagaaaagagattttaaactctgaacctattgttaaaagaaaaatgccggattttgaacaatccttgtttaaggaaatacagcatcaaggtaataatataaatcagattgctaaaaaactaaataccaacgaagactttaaacaatctgtagccgcagaagctaactttgctataaagcaacttatgaaaagaatattaaaggcttgtgaggtttatactgtatga

SEQ ID NO: 224616 - DNA, 261 bp, Klebsiella pneumoniae
atgaatgagaatgatatagatcagtccttgctagaactattagcaagatatttttattatatagacccaaatgaagaaaatacagcatttcttgaagcaaataaagatgaacaagatttatgttattttgtagcttatcgctatattaaagaaaataaaactcaagatcttattgatgctttgaaagatcaaaaagatgaagattatatcaaagcaatgaaagattatgtttatggaggtggtaaatatggatacagatag

SEQ ID NO: 224617 - DNA, 705 bp, Klebsiella pneumoniae
atgaaaataaataaatttaccttagccattttatttacattatccacacaatctatagcatgggctgataatattaatcatggtttagatgaatacggtaaaaaagtatcgacgacttccgaaaagggagcaataaaatatattaaatcatatcgaacaactgaaaaaccattaaatgcgtatagaatggattttgatacctctgaaaaaaatcttttgagcgtgccaaatgctgctcatgataaaacagctaaattgcaaaacttagcaataactaaagcatgggaagttaaattttgtcagccagatctgattaacttcatgttaaaaaataatattgatatggtcagcggtgctctaataagtaaaggtgatatacaacgaatggcagtttgctttaaaagtatgcaattacctgaatcagtatcagataaaagcgataaagatattgttataggctcatggtatgacgacgttggttcgcctgaatttttggatgcaacatttacaataacaaaaacatcacaaggatattttttaaaacgattaaatggtgatggtagtagtgggacctataaaataacaaaacttgataataaatataaaaagaacaatgataagttcggttcttattatataatagatactgaaggattaaagatttatgacaaggatgggtatataagaacagcaaggaaaaaataa

SEQ ID NO: 224618 - DNA, 975 bp, Klebsiella pneumoniae
atgcaggcacccggtataccggagaatgaagaacagaggctgaagtccctgtatattaccggccttcttgatacccgtgacgatgagcgttttgaacgcctgacgcggctggcccgcaaagcctttcaggtcccggtggccctgataagcctgctggatcgcgagcgccagtggctcctcgcctgccagggcgtcggcgtgcgcgaaactccacgtgatatttcgttctgcgggcacgccattctgcaggaagggccttttatcattcacgatgcggctgccgatgcgcgatttcacgataatcccctggttaccggtgagccacacatccggttctacgccggccagccggtgagcctgccggacggcacggtggccggcacgctgtgcctgatccacaccgttccccgcgccttcacggatgaggacattgcgtccctccgggacctggcctgtatcgtggaggacgaattcgaggccatcagcatggccatgacggacagcctgacgggcattcccaaccggcgcgggttttaccgcgccggcgaaaaactcttccgcgcaatgaaccggcaggatgcgtcgttcagcctcatctatttcgatctggacaggttcaaaccggttaacgatctctggggacacgcggaaggtgacgaggtgctgaagatctttgccggctttttacatcagcaccttgaaccgggtgaaatagcaggccgcctcggcggggatgagtttgccgccctgatccggcgaaacggtaacactcaatcttatctgcacgcgctgagtgccagtctcgatcattacaatgacacctcgggcaagccctacaacatcaattattcctttggcgaactgatcaataacgcagaccattatacgacactggcggagatgatcggtaaatgtgatgaagtgatgtacctgaagaaaaaaagaaagaccctgtcgcggaaaacagaaccgtga

SEQ ID NO: 224619 - DNA, 129 bp, Klebsiella pneumoniae
atgcataggataagttatgattccagcgtcattctcttcattttgcacagatccgaaaaaaggcaaagtcggatctccagactgcagcagggctgttttgaaaaaatgccggagatggaagcagcgtag

SEQ ID NO: 224620 - DNA, 582 bp, Klebsiella pneumoniae
atgaaagatgccaaatcaaaagacctctctgagttgtttaacaccattacggtgcgtaatgtgccatctgatgtggatgaagctatcacgcggcaggctaaagccgccggcaaatcaaagagtgattttgtgcaggagtttctgacggcaacatttggcgatctgatcggcaatttcatccgcaccagtgaactggttgccctgatggaccaggaaatggcgaggatggccggaacagtactgagcgagcatgtttatgatctggagatgactcaggccggccaccgggagttctgccgtattctcgggataaaaaacaacgatgatttgcagcgcattatgctcgcggggatgccataccttcagatccgcgccggacagctgagagggattgacagcctggcaagggggaactccctgtatgccgcactgctggtcaacggggcgtcccgggatgaagagacggtacaggcgcttcaccggtcactttttaatatgttcccggaaactgtttttcaggaaatgattaatgaactgcgaaaggcaatgcgcatggacgcttttgaatggtcgcttatctga

SEQ ID NO: 224621 - DNA, 1002 bp, Klebsiella pneumoniae
atgcagctggaagactatatctcggccgggcggctgaacatttacactgacgtgctgaagctgaaacctggtgaagaactgggcgggtataactggaacaaagccgtttccgccgccatgcagccgctgatgcactgccttgaggtgacgctgcgtaacgccatcgattacagtattcgccatgcccggctgcccggcgctgccggacactggcgaaccgataccaactggatctttgatttaccccgctatatcggtgacaagacctggatacgccagaacaagcgctacaaaatcgatgcccgtggccagaagctcatgcgtgacgggaaaccggtgtatgaccggacagcctgggaagaagactgtatccgtaaggtgtcaaaacgtatccgtgctgcgggcaaggcgccgacggcagagcgggtgatctccggactggactttggtttctggaccaattttctcacgaaaaactacgatgaaccgcggaaccgctcgcttctgtggccccagttgcttccgtcggtgttccccggcgccccggccggcaccccccgtcacgtgctggaaaagaaatttacccgtatccgtgacttgcgtaaccgcctggcgcaccatgaagcagtctggaaattccaggaggaagatccggttaccggtgcgccggattacaaccgcccggtatatggtcttcaggcgtccctgcagctgttgcgtcgggcatggaaagatatgctggaggctctcagctggctcagtcctgcaaggcatgctgcgtttctggcagaaggtcatcatctgcgtttcgaggcactggccacgcacgatggtttgctgagtttcaccggacgggcacagctgatgcacgacctgaacgtgcggcgcagtaaagagatcagaaaattattgcgggggctcggacagcaaaaaatcatccgcctgaccagccgtacccggatcattgccattattggtcccgattttatccgtaccctctga

SEQ ID NO: 224622 - DNA, 579 bp, Klebsiella pneumoniae
atgacagaccagaacaatgaagctcgcgatatgtgggccgaagcgttgagtttaatgtttaaaggcgatcaccaggaagaattgttccggatttcagatgatgagattgatgccctggaggggttgtctccggacagatggccaacggcaggacagacagacattaactgggatctgtctgttccggggcgcagacattcgatttaccttcctggtccacgggtattgcagcctgctgactgtgaacaaattgatctcagttctctggtgctggggaaagcctcttttgctgattttgacccgcttattaattccttctttcgactgacagattccagcctctgggtggaaattaccaacccaaaactcggaaaggccatactgcatatcgcaaaaggatggcctgtttcaccggtcctgttatctgtgcaccaagatggtggatttcatttcggggacgggacccatcgttatgaggtactgaagcggtctggaacacctcatttttattttctggctatgccggatgatgtatctgccattaataagcaacttacggttcagtggatgagcgactaa

SEQ ID NO: 224623 - DNA, 351 bp, Klebsiella pneumoniae
atggcccgttcgttgaataccaacaaaactttctggcatgaaggatggaagactggggatgttctgagatttacctatcaggacgaatttctggccagtgaactcgacagaagcatgagagaccaggccaaaaaaatgaagatccctctggatatctaccaggttatttttcagcataacctgacgcgggggctgattgaagaaatggtcagaggctcccgggctctcggctttgatggttttgtgggctacgaaattgaccgacactctgctaaaggccaacgaaaaagcagggaaattattgcattattaaatccggggtttattaccaggccagaatggctggcgtga

SEQ ID NO: 224624 - DNA, 264 bp, Klebsiella pneumoniae
atgagcttatatgagaaaaaatggttccatggtacgaatgaaaaatttgaagcgtggtcttttccacctcccagaaaaaaaggcaatgaaatactgcaggtaccgcatacagcagtatttctgacatctgaaaaagattatgctcagggagcaggaaagtatttgtgcgctgttaaatttattaagctacccaaaattattgatactgttaataactatgaaagcagtgagcgactgcgcttacaggtaatgaaaaacccgtag

SEQ ID NO: 224625 - DNA, 267 bp, Klebsiella pneumoniae
atgaaatcagatgttcaactcaacctaagagctaaagagtctcagagagtactcatcgatgccgctgcagagatccttcataaatcgcgaaccgactttatcctggagatggcctgcaaggctgcggagaatgtgatccttgatcgccgtgttttcaattttaacgacgaacagtatgcagagttcatcgatatgctcgatgcaccagtcgaggatgattccgccattaataaactactggcaaggaaacctcagtgggacgtataa

SEQ ID NO: 224626 - DNA, 405 bp, Klebsiella pneumoniae
atgccgtttctcgatgtgactgatgttctgcttgatccggactttgtcgacctgtcgctggtatgttatcgacaggtgcagacagtggacgaagataattttccgaccaataccgcgcaggctattccattctctggcgttgtaaccgtcgatcgctcgcttgaggctaagcgaatggccgccggacaaaacatcaatggtgccatcctcattgttacccagttcaggctaactcaggggatgcctgccagtgactcaacgccagaactcgacgctgatatcgttttatacagcggcagacggtaccgcgtgacctttgtcgatccgtacacccgatacggtgccgggttcgttcaggcgcattgcgagcttctggaattcgacgggggaacgccaattgagtaa

SEQ ID NO: 224627 - DNA, 459 bp, Klebsiella pneumoniae
gtgtctgactaccacaacctgttacatgtgattaaatcgcgcgtgtgtgaaaacaggagtatgtctcactccgcgtattatccgggcagcatgcaggacaatcagatcagaaacagaacggcgctgatttatgtcctcgaaatgattctccatcagcacagacaaaaatatgccactattttcaatccgcttgagggaaaagctgcgttgcatcacctcatctttatgaaaacaaaatggcggccgtcagaaatcagggaactgaagctggaagatgctctttttgttatccaggatgagctaaggatcgagaacataagcgacgaggctcaggaggctttaagttcgttcaatctgcctttggctgcttttctgtttgaggattttccagaagaggactggaactgtagggaaaactcagtgttccttcgaaacctgacgatgaaagcaactcaatag

SEQ ID NO: 224628 - DNA, 1470 bp, Klebsiella pneumoniae
gtgaatataaaatcagcacattttttgccagggacgaataaacgccttggtgacaaatacctgttacttgaatgccttggtgatggcagccatggttgggtatggcgggcggagcgcctgcaagatggaaaaattgtcgcagtaaaaatccctaaggatattactcgggaagaccgccagcttgccgaaggtaaagagcttttagacgtcgagccgcacgaaaatattgtgcaaatttttgatatgggccgtatagataatgaatggttctatattgaaatggaatatttcccaagccaaaccctggcgcaaaagcttgatgacaggcagcgtaattttggccagacctatgaacgtttattcagaatatatcgtcaagtgctctgtgctgtacattatttgtccgagctaccagtgccaatatcccatggagatattaagccacataacattttggttggcgaacgggacctggtgaagttgacggactttggcagctcagctttaccagaagaaatttacgttcgtacccgagaaaatggcgggactgtgttgtattcggccccagagttctccaacgtcgatagccgtagaggcagtctggaagagctactattgggcgacatctacagcttaggtgttttgctataccagctgctgacaggaaagctcccccatgatacgccagcacaagttcagcgccacgcacctttcaagcttccgacagagattaatagctctattcatacggacctggagcaagtggttcttacctgcttacaaaaacgagcggaggatcgcttttcaactatttccgaattaattcatgcatttgatgcagctaccactaagcaactaaaagttagtgctattgctccagtttttcagactaaacttgatcaggactggtcaagtgcggtacttgaagcaatgtccaatcagtcttaccaaaaggctgcccagttagcgtcgcaggagtatggccgcagtaaagatctacaagctttacatcagcaacttattgccttgtaccgcgccaatcgcttattcgactttgaaaaagttgtagaagataataaagcgatcttgctcgagggtaaattgactcaaccagcggctttgttcgagctgatagttaagacaaacttacagttgcgcaatattagtcaagcaaaatcctggctgttgcaacgaaagcaagttgaagcagaaaacgcgactaccatgtatttagaatcatctatccttggccttgaagcaaaatatcctgaagcaagagcactattggagaaagtaaaccaaacaactccaatgaagttccatgtgttaagccaactcattttagttagcgagcaaatgcgtgattactctggtgctgcagcatatttgaaagcagcattacgagttgcaccattggataacagcatgaaagagaaaaaagaattgtatgcaaagcttggggttatttga

SEQ ID NO: 224629 - DNA, 543 bp, Klebsiella pneumoniae
atgcctgaagtagcttgggtaaatgagacgtttccacttttagcaagcggtaagctattggaccaggatgtattggtccacagcttaggctgtagcgtttggaatacattcgggcatgaacagtcatttatggcggtagtggaatgtccggctccaggtacatttggtgctgatattcgctcagactcgggctggtttcataaatcatctgcatcgcctatgtgtttaatcgaatttgaacgctttgatggttcagcgaaggggcagcacaagctagaagaaaaattaaaaaacttactggaagcagcgcagcgctggaatcattgccccaaaaccctggtccttagtgcctggagccaaggcttagtaggtgcacctgatacccgaaaactgaaagacatttgccgcatgggtttcacttcatccactggtacccaagtaagcgccgctcctgatgttgaggtggtatttagtcgctttttatttatcaaaaatctgagcatgattgttttggacagaattcactatgaggtgttgatgtga

SEQ ID NO: 224630 - DNA, 1686 bp, Klebsiella pneumoniae
atggcttataaagttttaggtaaattagtcggtaacactggtgatgccagccagttaactatggttgtgcaagactcgttttcagtacgccgtggtgagtttgtacgcattatgcaccaggaacgcaaagatgaggggcaagtcgccgtactggggcgagtgactaagatcagtcgcaccaatatgctctacaacgccggctttggcgatggtgtgactgagcttgagcttttgcccggtgcgaatgtaactggtgagaatatgtttgctcaggtcgagctggttggttaccgcgatcctgttactcgtcaaatcaaaattccacgtcgcccacttaaccctggtaccgctgttgaaaccgtcgatttccagtttttgagtgatttttacgaatttaatgaacactccagtttgcacttgggcaacctggtaggctacgacaaaggcgagaatacagttcctgtttttattgacgtgaacaagttggtcactgagcatctggcagttctggcaatgacgggttcaggtaagtcttatactgttggccgcattattgagcgtttagtcgcggttaataacggtactgtagtagtatttgatccacatggtgaatatggtaaagccctcgctggcggtaatctgcaattctcaagcttcttagaagccactgacgataagcgtgatcaagaagcactaccactgataaaacagacctttgaaaaactgcaagccgccggtgcaggtattcaagtttactcgccgcagcacgaatcttttaaacataaatacgctagtaagaatacaccattagcgcttcagtttgaccattttgaaatggacgatattgctgaaatattacctggtttaacggaaccgcaacaacgggtactcgatgttgcaattcgttattggcgctctgcagataagaccgagccacgagatattaaccgcctacgcttcttattaggtgatggcattgaagagttaaaagagtgggacgacctttctgaagctgaggcgaaggcgttatcaggccgtagtgccgccgtcgcctcgatgaagctttcacgcgtgcttaatgaagccaaaagtttttacagtgcaacgatggctgagccaactgatatttacaaaatggtgggacgcccgagcaatcaacaagggcgtttagtcgttgttgacttacaaggtttgagtgatactgctaagcaagtcatttgtgcactgttatctagtgaaatattaaaggcggcctcaagcaaaacggacccgctgcgcccatgctttatcatttacgaagaaggccataattttgctccggccggtggcaatgcagtcagtcaccgcattattaaaaagatcgccggtgaaggtcgtaaatttggtgttggatttggcattgtgagccagcgtccatcgaaattagattcagatgtgacctctcagtgcaatacgctaattacgatgcgcttaaagaacccagacgatcaacgatttatagctaaagcatcagatatggtgagcaaagctgacctggaggaacttcctagtttatcaaccggtgaagctctggtgtgtggtcgttcaatccctgcaccactgcttgttaaaataggtagtaaggcattaattcacggtggtgaatcaccggaggtattgcgtgtttggggctctttcaatggctaa

SEQ ID NO: 224631 - DNA, 1158 bp, Klebsiella pneumoniae
atgaatgagaacaaaacgatgaatttagcgcaatctctcgccatcgatagccagctccgcttacctggaagcgcaggacgcttgcttaaacaggtccgtgatattgagcaagtggcaccgctgttccgtgatgctggcttagtgaaagcggtccccaagcccacaatcgttaatttacgcgtagccggtattgcgactaaatcgtgcttagacaaggtattgggtggttttatttatgccagtgcagcagtacgcacagatttgctaatagatgacaataaagtcagtacggcgggtagcgactcggtatcagaactggatgatattgattttgaagcacagcgtaaacgacttgatttaattgaaattcgtcattcttatcagttagttgagaaaaaactcttaagttatgagccaggtgatttaattttgctggatacgccgttgtttttagcacgggatatggctccgctggagcgcaatgtccgtcataaacaagagtacgaaaaaaccaggcaagtgatagaaactttttggcaaaaccatcgctctaaaatttttccgtggaatcaaaatggtgtagtgcttgcgagcattttggctgagcgctttagtgcaattgtaagtatcgccaaacaagatttacgtaccgaacaaggccgcaaacaaattttagcctctgatgggttttctaaagagttgatgcaaaatctggcagggctggatgaaagtttggtgggcgtgggggatttgcgatttatcaatggcattttaggcaactattcgcgcaccgtcgcatttcgtttgtctgagcaagaaaaccgcattgaacccaacattgaagctaagcaagggttaattggttttcacttccgtagtgcccgaggtggacagataaaaatggtgcaattagcgggtgacgaaccagaatggaaaagtgctgatctcgatttagttgcctctcgcctgatagtgctggatatgcaaaacaaaggtaatgcaatgccgttgccacaattacttggctatcaacagcttggcattttacctaaatttgctacgttttatcgccagggtttacaccaggctctaaagaataatgatattgaggcagggtggttggcaggcctcgatgagggattgaataatggcttataa

SEQ ID NO: 224632 - DNA, 849 bp, Klebsiella pneumoniae
atgagtctttacttatctgcagcactggccagtaatcgtaaaggtcggtttttgcaaactgttgcgggggcaacccccttaacgaaggattggattagctcgccgccagccagcggtttgttgttagtacaagcagaagagttgactgacgctaatactatgcaacgcctgtatcactgggctatgcaggcaggttgtgccgctttggtgataaacctgaaagctgaacaatttaccttattagcgcacttgtcctccccactagattggcagttagtaccagcggtcttgagggtgcaagagccagggctaaccgctttgctagccagtgaaacagaccaggctattgctggctttactggcagtgcagatcgccaccaacaccaggccggcgatgtggtgcatacccgttacatacgaaaacacagcaacagtgggctattagcctttaccacgttacctttgtggtcgctgactttactcgatcatagtgagatcctggtgagatggttgaattggtttgtggaccacgcaggcattgctgaacgaatcatcgaacctaacgcgccatcaaccgactacacacctgataagcacgatctggttgtattgctactactctacgctggaagtagcatgagcttacaagcgttgtctgagcataacgcggttaagctgatgtttgatgttaacagccttgatattgtcaagcggggggagatgttgcggcagcacgattttatcgacgaagcgggcataacagccaccggtaaaacatgcctacaagcctcgcaatattgggcttatgccccattacttaacgagcagctacacacaggagcgctataa

SEQ ID NO: 224633 - DNA, 4287 bp, Klebsiella pneumoniae
atgagttttgaattaaacgaacagatggttgatagcctggcaaaacaacatcgctgggcggcgacgggcgtatcagattacccacctcgcgacccgttagtgggccagagcagatttttcaaacgctttcaaacctttttgcatacggtggatcacgacgatgatcgctttgcccatgtgtttgccgtcgaagccgaatggggccggggtaaatctcgtttaggccatgaattggtcgcacaaattaacgactgttccaggggctggtttgtccgcgacgaacaaggccaactacacaataagcagctgtttaatcgcgacacgcaagacaaatacctggcgctctacattcgctactcgcaagtggcatcagattatcaaaactcggataactggtttgcttttggtttatatcaggcgctattaccactggccacccaaacctttgatggatcgattcaaagtgaaattgccaaacaagcctatgaacgcttaatgccatttggttttaaatctgaactgttagcagatgccttacagctgaacgccaaccacagcgaagaagacctctatactgaccaaacgctggtagtcagtttggtgcaagccgcctataaagtattacagagctttggcgtacagtatatgttggtggtgctggatgagctggaaaccgttgcagaagccgccacttttggcctggaagacgaacgagataaacgcctcgatggccaggccattcgcctgattggtaaagcaattaaagaggaagaccctcgccgtaaacttccatggttgcgctatgttgcactgtgctcaccactgcttggccagcaattgcgcgaaattcaatcggtcgcacgccgctttgagttagtggaacttgagcataatgcctttgccgatgtatcagactatgtggcaagcctcttaaaagacggcaagctgggttttaattaccctgctggtttagtggaagctgcatacgccatgagtggtgccaacttcggttggtttaacgtggtcatggctaatgtggatgcggtgctgagtcaataccaacaagcaggccgcagtatcaaggatgtgggcgatttatttgaagctgtgttggctggttctggccgcgtggccaggcatgttctggataaaggtgcgatagaaggcattcaaacccgcgaccaggcactattgaccgaatgccgtagtttgctctacggccaattacctgtgcgcttagctgaagtgaaccatgccactgaattgctggcgctgaaaaacgaagatctggaacccatagctgctcattaccgcaaactgagcattgaccgcctacagtgccgacaagccctggagcaagccaaattccgccgcgataaagatgaatggtactaccctgcagtagatcaagcgctgaacttagatactttgctggataacctgcgtactttttcgattaaagagcaagccgcaagcggcgataaaggcgcggtattactgcctctgtcaaaaggtgagtttaaatacttactcagcttgctgtatgaccacccagcgatagaatttgctgccgatgccttatggcacaagttagtgggtgaaactaccgagctggacgccagcgaagcaacgcatattggccccagtgtggcgatgttactgcgcctggatttgcgctatcgcagtgcccagcaaaactcactgatttttaaagatcccgccatgggcgatgcccatgaacaggcgatgagtgaactgagcaaacaaaatagccagaagccgctcatcaaggcattagcccgtgtaacgggctttatgagattactggataacaactggacctatgatgaaagcttactgagtaataaagcgggcagcgacgatgcacctctggccattttaaccgagccccgtggtcgccagggtggtttacttaccctggatggatttaagcttcacccagaaggtaaagccttgtttgcctgggtcagtaacctcattgagctgaacaatcttcacacctttgcggcaaaccacagccaccaaaatggtcgcacgccagtattagcgttaaccgcttctgcacatcttatggagcaatacagcagactggatgaaagaaatgagttgcgtgatgcgatactgctgcattatgtcaacccaagcgaagcagaccagttagagcgtattggcttaagtctggcagcatgccagttgcacggcgtgaatttaactgccgacagctttaccgcgaaattcaaaaacaagctgcatgccttgactacctttgccacggatgccattcacaagtggcgccagcgcttgcagaagcgcggtttaattgcctggccgttaaaggtggatggtaagttatcaccgaatgaccgcgacctgttgtttaaaggctggtatcagttggccattgctcaccctgagttaaacggcattctcgatttacagcagcaacacggcgtgccagtgaatgagctgagcagcttgttggataaacttaaagtgccgggcagctatgttgccaaaggctacacggccgatgaacatgccgggctatttactgaacttaataatgtgcagcgaagccaggtgcagatcccattatttttagcccgtattgctcaccctaataaaaagcacaagtggcaattcgaaggctttaagcagcagttttatttcgcctatgtggctgaaacgagcattaccgccaaaggcgtgtttaatgactggatgtggtggtgtggagagctgaacttactcacgttaaccaatccaacagaaaaacaggcaatttgggagcactatccgcgctcccgcttagaaaatgccattagagaagcacaaaactggttcagcggtaacgatatgggcagctacgcagccaatgtggaagtcatgagccgcgtgtatggttatgcacgcattaatgaaatgttcgcgccactgggtacaaataagctgggttttgtcaccgtggaagctaaagagcagctggaaaaagcacaatcactatttaacgtgctcaaacaccaagaagaacaactggctgatattgtcgaggccaacgacacgcaagtactggcagggcttatccacaagcgtgctgaagtgctggagttagtagcaaaggttaaaccgcttaatagttccaagcccatgctaaaagatgcccatattcttagcttagaagacaaaacgacctcgctttatcaacgcattgaacaggcctgtttatttgccgaatttgttgagcgcagtgctgagcgtatcaacaaccgactcgctgatttaatcatagatgttgaaacagagtgtgccccactgacgaatttcccgaaacgtctgtacaccaacacgctgcgcaccataggtcatattttagacggcgcgttaaaagacgataccagcagtgccactggccaaaaagagcagcaagcagacagcgataccttactgcattacctgcgtaaactcgatttaggtaaagcacatgacaagctttcagccttagcgcaagaagtgggtttaaacctgcacagtgatcaacagctgccgatagtggagatccagggacatattttgtctagctaccgcaactgcaaagaacgatttgggaagctggtaaataacctcgcagagcaaaaccaacgcgcccaacagttgcaacaatggcttagtagcgccacggctgagtatgagtacgctgatgacattgcagagctaccaaaactggtaatgaaattacagctcattaaagacgctattgccgatctccccaacgatgccgagagcaagcgtcaaagtatgcaaaacagtttgcgcaatgggcagttttcatcgttacgggatttaccagaagagcttttaaaaccggcacgcggtcaacttacaccgattcaaggtcagctacttaaaattgaagagcgtcttaaccaattcagacgcagctccatcgagcaggtaaacagctggctgccgttattaaaaccgctattggcttctcaaaagcaagcggaaccagcagcgttgactctgggggatgtgagcaatttgggtgtcagtgaacttcaactggtgtgtgaaagcacccaagccaaatggcagagccagggtgagcaaatattaaaagatacaggcttaacactggcggattggcaaccgatttatcaggctttgagccaaaaccaagaacccgcgttaacacctgagcaacagaaaggacttgtagacaaaggtattgtaaaaatgcgcctaacctttgccactggtttatag

SEQ ID NO: 224634 - DNA, 1287 bp, Klebsiella pneumoniae
atggacagcattacaaccaggcaaaataacgaccccgtaaatagcgaagcggtacttaacttctgcctgcagctttggcagcaaggcggtttaaccgccagtaaagcagcgttgttactggcggctgtgcctgccctcaggtcactgctacaaccaataatacaaccgaaaaagaacgacgctgaaacggatatcattagcgcctttagcctcactgcaccattgcttgatgcctttaacgatttaagccagtcaggtgaatggcaattagcgttgttgggcttaaacccagatgttcgccaacattggataaatttagccgccgctcgctgccaggaagcaggcacgatgagtgacacaatggtattggttaaactcattcaacaactgggcaatgccagtgaatgggtcttagcccagctggaaagcactgccaccacgccgcaaatcattgccggccctttggcacaaaccgaacgcgatttgctcggtcatagcctaaacgacaatgctgccattcccgcgctatgtcgtattttgcgcaccagccataccttgtttaccgtgagcgaacaaaatgaaccaccggcacctatacaagtggtggatgtcaccgcaaaacaactgacaaataactggtgtagtgggcggttgttagcactccctaataccttgcttgatgaacatgaccttaaccccaatgccgattggttattggtgtcccgctcgggtcatgacaacgtgccgcttaccgagctattcgcccaacaaccctggttatttttactcagtctcattatatttgtgcaagatgcctgggttgccgagcaacgtggcggcttgttgctcactttacctgtcgggcaaaatgcctttgcacccggtcaaataaatgtggcagtacaaggtcttgaaggtgatgaagtgagcctgggcagtttggctgagtttattgtgcttctgctaggtgagctcaatatcaccctctacccggcactcgatgcgaacacagaaagtatcaaccgcctaaaccgcgtcctaagctcattcattgccgaattgctggcacaaaaaatctggcaatttactgaggccggtcgtggcgagtccggccaatatcgaattcacacaagcttcagcgatgcctgttacagcctgccgttagcaccgttatttggctacaaaagccaaacgttacaacgggccgttaagcaactggcgcaaaactgctatgccaataaaaaacgcgccgccaatagaataaaccttcaaggatcttcgttatga

SEQ ID NO: 224635 - DNA, 1521 bp, Klebsiella pneumoniae
atgtttagtgataaagttgctccccaaaatttaaatactaaacgattagactctgacttctatcgcccagaatacattgagatagacaatactttatctaatttaaactgtgtaaaactgggaactattggtaagttctttacagggccatttggctctttgttacctagcaacctctatttgaatgagggtattccactatttagggttggaaatgtaggccagtttgaagccttatcggaaaatttcgcctatctagccccatctgtacatgagcaacttaaagtttcggaggtggttcctggcgatttactacttgtcaaggctagtgtgggagaaaaaatttgtaaggttcctgaatggctaccaaaagccaatattactcagcatattattggaattcggcccaaccaaagcaaagatacagattacatttccgcatttttgttttgctactacggtgttggacaattacagcgatattcgctaggcagcataattcaatatttaggcattacagatgcaaaagacgtaaacctttattcacctgacccgctagtccaaaaatacatcggggataaagttcgccaagccgagcaattgcgcgcttgggcgaagctgcttcgcacatcagttgacgctcatcttaatagtctaaatctgccgatcaacgagccccccgcactgttaaaccgagtcagcgcacaaacaatggaggatcgactcgatccacgtccttatcggactcactacctatgtttagtgcgtgaaattgaaaaattacctcatgacagtattagctctttggctgaattggcatctggctgcccagtatctagtaacgactttctgaaaaactcaggcatacctttagttcgcatccgcaatatcggttttgatgattttattggtttagatactggcattagccaagatgtttatcaggatgcgactaagtataaagctaaagaaaaaatgatcgttgtcggtatggacggtatttttcgtgcgcagtttttcatatctgacgagctacctatgctggttaatcaaagggttgctatgctctcacctcaaagtattcgtggcgaacttttaacacattggctaaatcgtcccgaaggacaaatgcagctaaatcaatgggcagttaaaacaacagtagaacatacatccctatctgatattggtcgcgtattaattcctcgactggataaaagcttagaaaacaagctttctgattatttactcaatgccaggctggcttatcgttacgccaaatttttaacacaagtagccaaaaccctggtcgaagccctcatcgaaggccaactgaccgagcaacaattaatccaggctcaacaagccctggaagatggcgacaacagcttagatcaggcgattttaagcaaactaagtgctgaggggtatgccattgaaggcgccacaccgctatttagcgatgtggatgagttatacagtttgctggaagatgcggcacaagctgaggctgaagagtaa

SEQ ID NO: 224636 - DNA, 2154 bp, Klebsiella pneumoniae
atggcaaaagaagcaaaagcaaaaaaacaagacccgcagcagcagctagaagcactgttcaacaaactggtcaaacagcataccgagtttactcaaccgttggtcgaattacccgagcatgaattcgccaaggctggtctcattcaaggcctggttgaaggcaacttaacaccaccagtcatgttgattgcgctgacagaaggccattgggaatacgccgctgatactgcaaagtttgatgatttagcctaccagctgttaagcgatatcgaaggtgactggccagtatttgccgttgtggacgatggcatgaaccaacgtattttggccttgttcggtgccgatggatctgacggtacccacggtgccgataccctgccaagtctggaagaattacgtagctttgatcgcatggagcgtgatccaacctttcgctggtcgatgcgtgtttatacacgcttaatgcagcgatttgatgccttccatgaaaatgtttaccgtgtcacaaaagacaaggtaaacgacaaaaacgacattattgaggaagtggctaagcttctgtttttagaaactttccgtgtgcatcacgatgaagaccttacctttaaagatgatgagggaaataccctgcgttttcgtgacgtctatgattggcaatatgtggccaggcacggcgataaagccgttgcacaaatcaaagcagcgtttgaggaatttaaaagccacgaaaactacgtcgtgatctcagatgatggctcacgtaatcccatctttagtaaagaaacacacctgcgcctgtctgttgcgaaaaactatcaggatttgctggaagcaatacaaaacctggggccggtaaaaaccaacgacggcaaaattgctaaagaacacggcacgttggctgatgtgtcaggagatttactcggcagagtgtttgatgtcttcctgcgtgccaactttgaatccaaaggtggccttggcgtttatttaacacctaacccagtaaaacaggccatgctagaaattgctatgcacgacatcgacgatgacgatgaaatgcgatcgcgcttagccaatggcgattttcgtttctgcgaccccacctgtggctcctttggttttggctcggtggcgttaagccagattgataaatggatcgactttaagctggtgctggccgacgataaaaaagaatcattgaaacaaaaattacgcgattgtgcatttaccggtgccgatgctgcaccgcgcatggtgatgctggcccgcgtgaatatggcattacaaggcgcccccaaagcgcagatattctataccgacaactcactcaccactaacgctctgaagccgaatagctttgaccttatttgcaccaacccgccgttcggtacgcctaaatttgataaaggcaaaaatggtcaaaactcaaaagctaattacgaggccaatatggagcaagtactcggtggttttcgtccaacccaaaaagtcgttgatagctacaacgcctggtacgaccatgtaaaaatgaagtggcaggatatcggtgatttagagctggatgacaacggcgagcctaaatgggcgggctatcgtaccgatttacgcaaaacgggcggtactgataaaaagccgttttacagcctgcagcctacaaccgcagggctcgcgctgggcagcaaacccgatagcaagggcaactggcaaccggtaagtgccaccattgatccagccgtactgtttatcgaccgctgcctacaactgcttaaacccggcggccgcctgttaatagtgctgcccgatggtattttatgtaattccggtgaccgttatgtacgtgagtacatcatggggaaaaaagacgagaaaaccggcgagtttgttggcggtaaagccatagtcaaagcggtaatttcattgccgagcgactgctttaagctctccggcacgggggccaaaacctcgatattatatttacaaaaacgccatgctaaccccaaccaaccagagcaatttttgccggagccacaaaccgaggtgtttatggcagtggctgaaacgctgggttatgtggtgaaaaacaatatcgaagactataacgccggtgttgcaaacgatctggataagattgtgtcggcttataagcggggtgagtaa

SEQ ID NO: 224637 - DNA, 1344 bp, Klebsiella pneumoniae
atgggtgaagttatctccgtttttgaatatgacctactggggagtggaaaagcggcttcaattggcgcaaagctggtgcctcaacaggtctttaattatttagaagcgcttagcctggcaagtaatcaagggagccagtttctcaaactcacctctcgctcaggcttcaaattgcttcaggtgcaaaactacgcgggaatgctttcaacacctcacggtttccagcttgagatactgcccaaggttggtaaaaacctcatagcggctaatgcgcgtcaaacattactgacgatgctaagctatctgcctgggtttcgacatattcaaacccagcaagccactcttcaggctcagcgtatgcctttgcttgagatttttatttaccagtttttgcgtagcgttagccaattacttaaacaaggtttacgctccgactatgtgagcgagcaaggtaacctggcgtttatgaaaggcaagctgattctttctgcacagctgcgacataacgcggtgaatcgccataagttttgtgtcgattatgatgactacatgcctgattgtgcagccaatcggctcttacactccgcgttagataagcttcttagtctaaagctgtcatcagagaatcaacgctggctttacgaactgcgctttgcgtttgacggtattccacttagccgggatattgaacgtgatataaacaacttacgcctcgagcgtggtatggctcattacaacgagccaatggcgtgggcgcaattgatcctgagaggaatgagcccgagcgccttgcagggaaataccaaggcgatatccctcctgttccctatggaagcggtgtttgaatcctttgttgcacaaacactctcctacgaacttcctcctcaccttaaagttttacctcaagcagcaacttattctttggtaaagcatggacttaaagattgctttaagcttcgccccgacttgctgattcaatcacacaaaccagttcaaaccaaaatggtgatggatacaaaatggaagctggtgaatagcagccagcagacaaaatcactctatggactagcacaagctgacttctatcaaatgtttgcctacggacaaaaatatcttggtgggaatggcgaaatgtatctgatttaccctgcgcatgatgactttagccaaccgataccgcagcattttgctttctcggagacattaaaattatgggttgtgccataccggataatggcaaaatgcggtgagaggatgatgtggccgaatgacgtgtcctgtacaatgagccccaaactggatcggatggctgcttcagtatcctatagtggaggcatgagatga

SEQ ID NO: 224638 - DNA, 2076 bp, Klebsiella pneumoniae
atggatcttgttgatagtattgaagctggcaagctgacgatcagtgaattgattgatgacctggcgaaagataaaaattactcagcttccaagtgggatcagcgataccgtgaatttacgaccttgctacaacaaacctcaacttttacagagcctgaaacggatgatttagttaagaggctctggtatgaacgtgataacggtattgccagtattcgtcagggcgttccatcattagcagaatatcagcaaagcctcccattgcttagagaactcaccgaacgtattcgtcagcaaccgaatgaagcaacctaccattacgtaggcagtgcgctacaacaggctaaagagaccggagagcttaagcgcatgtattggagtttaagaaatcgcgtctttgccgcgttctcgccagaaaactacaccagtactgtggatgagaatgcttttaataaagcagcagaattcctaaatcaacacttccatctcggtttggtactgaccggaaattggttacagaaaaactatgaattgaaacaagccatacacgcccaatctcctaacaaagatccttattacgtgaatatggccatctggcatctctatgaattgctccgtgaacgcgataatgaacaaaagcaggagaaagtagctagcacgacatccataaccagcagtgagcccatcgagaacgagaccattccacattcaccaactaacgtgatcttctttggccccccaggcactggtaagaccttcacgttgcagcaaaaaatgaaagagtatacttctcatgcagttcctgctgatcgtgatgcctggctggattctcgccttgaatcgttgaactggatgcaggttataacgctggtgctgctcgatcttgggaaacgagccaaagttcgccaaattattgaacatatgtggtttcaacgtaaggcattattaaacggtcgtaatggcaacctatcgaatactgcctgggcagctttgcaatcctatacagttcccgagtcgttaaccgttgattataagaatcggcgtgagcctgccgtatttaacaaaacagataacagcgaatggttgatagttgattcacagctcgagcaagtggaggatttggtagagctctacgccgaacttaaacgcggtccaaaatctgccgaagctatacagcgttttgcagtggttactttccaccaatcttacggctatgaagaatttattgaaggtatacgcgctcgctctgacgagagtggcaatatctcttatcccattgagccgggtatctttatacgcctatgtcagcgtgccaacgccgatccaggacatcgctacgccattttcattgatgagatcaatcgcggcaacatctccaagatctttggggaactgatctcactcattgaagtagacaagcgtgctggtatgtctaatgcaatgagcctgcaactatcttatagcggtgatcacttcagcgtccccgccaatgtcgacatcatcggagccatgaatacagcggaccgttctttagctctgatggacacggctttgcgccgtcgctttgactttgtcgaaatgatgcctgatctctctttactgagtggagctaaggtgaaaggcatagagcttgagtcattgttagagaaactgaatagccgcatcgaagcactttacgatcgcgaacatacactggggcatgcgttctttatgccggtaaaaaatgcactcgatgccggtgatgaagaagctgcgtttaaacaattgaagatcgcattccagaaaaagattattcccctgttgcaggaatactttttcgatgactggaacaagatcaggctagtgctggcagacaaccagaaacaagacgacagcctacaattcgtgattgagaaaaccgacgatctcgatacgctttttggtaacaaccatggtttacgacgccatgaccagcaatcaacagcttacgagcttaaagatttcgatcaagagatctggaatattccacaggcttatcgttcaatttatcagccccagcagactccccttgatgagcgggctgtaaatcatgggtga

SEQ ID NO: 224639 - DNA, 1680 bp, Klebsiella pneumoniae
atgtcacttattcaaaacccgatattacgcggctttaatgccgaccccagtattattcgcgtcgaggatacgtactatattgccaactcgacgtttgagtggtttccgggcgtgcgtttacatgagtcgaaagacctgaaaaactggaacctgctgccttcgccgctctccaccaccaccctgctggacatgaagggcaacccctcctccggcggcatttgggcgccggcgctctcctgggccgatgggcaattctggttggtgtataccgatgtgaaggtcaccgaaggcgcctttaaagacatgaccaactacctgaccacggcgaaggatattcggggcccgtggagcgacccgatcaagctgaacggcgtcgggtttgacgcctcgctgttccatgacgacgatggccggaaatatatcgtccagcaaacctgggatcaccgggagtaccatcaccccttcgatggcattaccttaacggagctggataccaagacgctgaagttaatgccggaaaccgcgcgcaccatctaccgcggcaccgccgtggcgctggtcgaggggccgcacctctataaactgaacggctactactatctgtttgccgcccagggcggcaccgtgtttacccaccaggaggtggtggcgcggtcgaaaaccctcgaggccgacagcttcgaaaccgagccgggcgacgtgttcttaaccaacgtcgataccccagacagctacatccagaaacagggccatggcgcgctggtctccaccccggaaggcgaatggtattacgcctcgctctgcgccaggccgtggaatcgcccgggggaatccatctacgacccgcgcggctggtcaaccctcggccgggaaaccgcgatccagaaagtgtactgggacgacgagggctggccgcgtattgaaggcggtcacggcgggaaaaccttcgtcgaagggccgaaagacgccatcttcaccgaaagcgccagcgataatagccagcaggatgactttacctcgccagcgctcgacccgaactggaataccctgcgggtgccgtttacggccaaaatgggcaccaccggcgacggcaaattaaccttaatcggccagggttcgttagccaatacgcatgacctgtcgctgattgcccgccgctggcaggccttctattttgacgccgcggtgaaggtgaaattcgagcccttcagctaccagcagatggccgggttaacgaattactataacgaccgccactggagcttcgtcttcctgacctggaatgaaattaacggcaaagtcatcgaagtcggcgaaaataaccgcggaaaatacacgtcgtacctgaaagataacgccatcaaggtgccggacggcgtggaatacgtctggttccggaccaaggtccgcaagcagacctacagctatgaatacagcttcgatggcgtgacgttcaccgagatcccggtccagctggatgccgcagtgctgtccgatgactatgtgttgcagagctacggcgggttctttaccggggcgttcgtcggcctggcggcagtagactacgccgggtacggcacccaggctgagttttatcagttcgagtatcaggaactgggcgataggttagcggccgatgggagctacagctgggaggctggcgagacgcgggataagtaa

SEQ ID NO: 224640 - DNA, 480 bp, Klebsiella pneumoniae
atgtacgacgcgttggtctgcggcagacgcttccggaccttcaatgtggtggatgattttaaccgtgaagcactggcgatagaaatcaaccggaatatcccggctcagcgaatcatccgggtgctggacaggatcgtggcaaaccgcggctatccgctgaaaatgcggatggacaacgggccagaactggtctcgcgggcactggcacaatgggccgaagaacatggcgtgcagctcgaatttattaaaccgggtaaacctacacaaaatgcttttatcgaacggttcaaccggacataccggacagaaattctggatttttacctgttcagaacactgaatgaagcacgggaaattaccgagcgctggctgatagaatataacaacgagcggcctcatgagtccctgaacaacctgacgccggaagagtaccggctgatggctgaaaaaccggaactctcaaaaagtgcgtggaactaa

SEQ ID NO: 224641 - DNA, 213 bp, Klebsiella pneumoniae
atgagctggcgtggcaactgctgggataatgcggtggccgaatcgttcttcagttcgctgaaaaaagaacggatcagaaaacgcatatataaaacccgggatctggcccgggcggatatcttcgattacattgaagtgttctacaaccgggccccgcgccacagtcatctcggcggcgtcagtccggaggccttcgaacaggcctcgtcgtga

SEQ ID NO: 224642 - DNA, 741 bp, Klebsiella pneumoniae
atgcatatcagcgacgacgtgaaaagcacatcgccgaatcgcctgaatggcacagacattatgaccgggatcggtgtgaccagcagcagggcacgcttcggcctggccgctttcttcggaaaggctggtatcagcaaaacggatgaacagcttgcaattcaggcgctggcgcagtttgccatcaaaaacgctcctaaaaatgtccgcaaagccgctggtgacaagctcggcgcctgcatgttgacgctggcgcaatttgcctttgcggaatactcacgttcggcggccaccagagcaacgtgtcaaagctgcagcggtaccggctttatttcccgccatgaagatgtaattaagcaccccggtattttcgatgctgacggtgtcgaagtgaaggccccaaagattagaaatgaactggtgaaaagggtctgtggagtgtgcggaggaaagaaagtgatccatgcgcgatgcaggtgtggtggtaaaggggaggtgttagatcgcaaagcgaccaaagaacttggcgcaccggttttcaaaacatgtgaacgctgctctggtaatggcttctctgttgtaccctctgcgacggtacaccgcgccattctgaagcgtctcccggatctccatcagtcttcgtggtcacgcaactggaagccgttctatgaagggctggtggatacgcttcacaaaggagagagacaggccgcggctgaatttgagaaggcgacctgttattaa

SEQ ID NO: 224643 - DNA, 324 bp, Klebsiella pneumoniae
atgccagttaactatgctgagtgtattgaagtctgctataaatgcgcgacagcctgtgattattgtgctgcttcctgtctgaaagaagaacaggtggatatgatgcgcgagtgcatcagacttgatatgcaatgtgcgaatatttgtcgacttgcagcacaatttatgacccttgacagtgaatttgctaaatcgttatgtcaggtctgtgcagaaatctgtcaaaaatgcggtgaagaatgtggtaaacacgaagcagaacactgccagaaatgttctgaagcatgccttcgctgcgcagaaacgtgccgctcaatggtttaa

SEQ ID NO: 224644 - DNA, 540 bp, Klebsiella pneumoniae; identical to SEQ ID NO: 95796

SEQ ID NO: 224645 - DNA, 345 bp, Klebsiella pneumoniae; identical to SEQ ID NO: 216364

SEQ ID NO: 224646 - DNA, 213 bp, Klebsiella pneumoniae
atgctcaccaccgttgagcttcagtaccttggcaaaaaagtcgatggctcgctgcgccgctgcaacatcccataccaacccgcgagcatggcaggattccaaatctttgagatgtcgcttacaggcattcctgatgtcaggcccggcgatttctttgccggagtctacatcccgcgcatattgcgtggcgggatcaaccgaagaactggttga

SEQ ID NO: 224647 - DNA, 522 bp, Klebsiella pneumoniae; identical to SEQ ID NO: 196304

SEQ ID NO: 224648 - DNA, 1023 bp, Klebsiella pneumoniae
atggtcacttttgagacagttatggaaattaaaatcctgcacaagcagggtatgagcagtcgggcgatagccagggaactgggtatctcccgtaacaccgtaaagcgttatctgcttgcgcagtctgaaccgccaaaatatacgccgcgttccgccgtcgcttcactcctggatgaacaccgggactatattcggcaacgcatcgccgatgcccatccttataaaatccctgcaacggtcatcgcccgcgagatcacggagcagggttatcgtggtggcatgaccatcctgagagagttcatacgttcactcgccatccctcaggaacaggagcccgtcgtgcgcttcgaaacagaaccaggacgacagatgcaggttgactggggcaccatgcgtaatggcaaatcaccacttcatgtgtttgttgccgttctggggttcagcagaatgttgtatatcgagttcactgacaatatgcgctacgacaccctggaagaatgccaccgtaatgcgttcagctccttcggtggcgtaccgcgtgaagtgctctacgacaatatgaaaacggtagtgtcacaacgcgatgcctatcggaccgggcaacaccggttcaacccttcactgtggcagttcggcaaagagatgggcttctctccacgactgtgccgccccttcagggcacagactaaaggcaaggtggagcggatggtgcagtacacccgcaacagcttctacatcccgctaatgacccgcctgcgtccgctggggatcaccgtcgatgttgaaacagccaaccgctacggcctgcgctggttgcacgatgttgctaaccagcgcaggcacgaaacaatccagacccgtccctgcgatcgctggatcgaggaacagcagtccatgctggcgctaccgccggagaaaaaacagtatgacgtgctggtagacgaaagcctggtgaccttcgacagacagccactgcatcacccgctgtccatctatgacacgttctgcagaggggccgcatga

SEQ ID NO: 224649 - DNA, 783 bp, Klebsiella pneumoniae
atgatggtggaactgcaacatcaacgactgatggtccttgccgaacagctgcagctggacagccttatcagcgccgcacccgctctgtcgcaacaggctgtggatcaggaatggagctatatggacttcctggagcatctgcttcacgaagagaaactggcccgccaccaacgtaaacaggcgatgtatacccggatggcggccttcccggcagtgaaaacgttcgaggagtatgacttcaccttcgccaccggtgtcccacagaagcaaatccagtcgctgcgttcactgagcttcatagagcgcaacgaaaacatcgtgttgctggggccatccggcgtggggaaaacccatctggctatagcgatgggctacgaagcggtacgggcgggcatcaaggttcgcttcacaacggcggcggatctgttgcttcagttgtcaacggtacagcgtcagggccgttataaaacaacgcttcaccgtggcgtgatggcaccaaagctgctcatcattgatgaaataggctatctgccgttcagtcaggaagaggcaaagctgttcttccaggtcatcgccaaacgttatgagaagagcgcgatgatcctgacctccaacctgccgttcgggcagtgggatcagacgttcgccggtgatgcggcgctgacatccgcgatgctggaccggatcttacaccactcacatgttgttcaaataaaaggagagagctatcgactgaaacagaaacgaaaggccggggttatcgcggaagctaatcctgagtaa

SEQ ID NO: 224650 - DNA, 528 bp, Klebsiella pneumoniae
atggcgctacgtccagaaaaaatgcggccacctgtcggtagttatgttgctgttgctgagttcactttgttgcggacagtcaggttactcgacctctccagtctcaaagggctggctgttaacggatttaaccgctttgatcctgagtatcttcttcgatatgaacgcagtagttttattcagaatctctccagaaaacttgttatgccggttgttcctgagcttgaagaaacaaattacctgctgacgcaagctatcgctgattatctctcaacatttgagcattgcgaactcgatgggatactgttcgcttccgcgcaaaagccaaaggaaagcacagacccttctgtcatgaatattatcctgtttcataaatcgtctggggtactgaatgcagaccgaaggttccgggaagctgaagtaaatatgtatcagcacgatgaggatatttcatactttgacccagagataaggacgactcccgatgatttccggcgtgaatttaaggtgctatcacgtaagaaatga

SEQ ID NO: 224651 - DNA, 624 bp, Klebsiella pneumoniae
gtgccgggttcaaagagaatttgcaggcagtgtctgaacgaggaccgttatctgaacaacatcatcgcaagcgatcccgatgcctcagaatcatgcgattattgtgactccgatgagatgacgatgtcgatggaaacactggctgaaaaggtcgactggttgattgaaaattattatcggggcggagaatataaccattatctggaagagtatgaaggtgaacctctcttctctgttctggagcaagaggtcacagccaatgataatatcatcgatgacttatcggaactgctcgaggagttatggtttgactggagctcacatgatagaaaatatggtgatgagcctcattttgttgaagctgtaaccatctcaggaaacctgtccagaaaatggaattcaatggaaggaaacttagagagagtaatcgattctttaatatggacgcgatggcaactttcgaagaggtttttacttaccttcacgaaaatcatccctcagcattcatcgattttgagcctaacaaaccaattttccgtggtcgtatttttcagtcagaggatgcacttgaaatcgcattacgtatgcccgagtcgagtttcggacctcctcctcctgagctga

SEQ ID NO: 224652 - DNA, 1032 bp, Klebsiella pneumoniae
atggccaagaaaccttttatgaagagactccaggcgcagcaggtaatgaaaaaaaatgctgctgttgtttctgatattgaacaggtcattgcaaataaacagccagatgaggagagccatgatatagctgcgcacaagattatggcggatattgcccgcccggatatcgaacctgatggacagataatccgcgtagatataaatctggtttatgctgaagaacaagtgcgacctgaagaagacttcgaggaagatatcatcgatggtatgtctgataccttcgaaacgatagggatgcttaccccgcctcgttgttatcctcgtgacagacgtggttaccagatatggttaggcgaaacgcgtgttcggactgctcgcaaacgtggtgatacccatattgatatttatgttggtaaaccaccacgggaaagaaaagaacgcatcatcggccagctcattgaaaacctgcagcagtctggtttgaaaccattagcgactgcaaaatcgttctatgagctcaagcatgagttcaatatgacgggtgagcaaatcgcaaaaacaatgggtaagcctacctcatttgtcagtaaacaccttcgtctccttgatgcaccagaaaatgttaccgcccttctccgggataaagtcacatccgatatcgatctggcatacacactgatacaggtaaatgaaaagtctcccgaagaggccgagaagcttgtcgcagctgcgcgagagtctggtatttcacgttcgcaggttaaagctgttcttgatgcagttaagaacaaaagcaaaggtgagatttcgcatgcgaaatctaaggctcagaacaaaaagccaaccaagcctttggacagcaattcagatgtgaaaacctggcaggttgttgtcgagatagacggtcagcaaggggtgataatgactgaccgcgcgccagacgaagcggggtatgtgtgggtgaaactggaaattggtgagatttcagtcgaggcttctgaactacgcgtcaaagggatgcgctctctgtga

SEQ ID NO: 224653 - DNA, 867 bp, Klebsiella pneumoniae
atgacactgaaaattggacctatcggaaaactgatcgttgtatgtagtcagaagggcggaatcgttaaatcgcagtcatccagtgaaattgcacatgatcttcgtaaagctggtttccgcgtgcttgaaattgatatggactggacaactggtctgacggagagagctttccccgatgacttaccttatgagatagaacgcgaacctttaagtaacagttttacacccggcgaggcgaatacatatcagcttttctttccggaaacagaggttcgaccgattgaacttcctggcgggcgtttctttataggtgcaaccagtgaacttaatgaaattaactaccgcaacagcgactgcatgttcgacttcagggaccgtattgaagaactgaagaaacagtttgattttattattgctgattcagcaccatcatattcaaatgttatgatcgcagcgcatatgtcagctgattaccttcttatccctaccctgctggagaagcaggcccgtaatgcagttggtaaacagcttacttatatgcagaaaattaagcggaactataatccttcgctgcaattcatggggacttatgtgtctcagacgcaggtaaagaattataaaaaaccccttaaagaaggatatcttgggcctattgatacactgaatctaaatctcctcatcgagattcttcaaggaaaaggctattccgaagaatacattctcgcctatatatcatttgtacctgctactgcaaaagaagcgatcgaacttggtctctcctttgatgaatatgaccctaagtgtcttcctgcaattcagtataaagaacttacccagaaaattattatgctagcaggaggtaagtaa

SEQ ID NO: 224654 - DNA, 129 bp, Klebsiella pneumoniae
atgatatgcaatagaattcgcatgcgaattctattatgtgagaaaggtgatatggctgacgataaaagctgcaccaaagaaatggacgataccgcagagagactggggtatggcaatgagccgttttaa

SEQ ID NO: 224655 - DNA, 1749 bp, Klebsiella pneumoniae
atgaaagaaattgttttaaagttaagtgaggctgaaaatgtgttgagagaatggtttgaagctggaatagccttcaatttaatttttggacctttacattttagaaaagaatctggtttggttcacttaagaaaatgtcttgccaaaatccctttagccctcaggcctcagtactatgacatattagagaaagcatttagcccacgtcataacatattagatatactttttaggaataattatgattatgattcattgatgttgagaggtcagttgtatgcatatgctgaatgccttactaaaaactaccccaaaatgccacttaaattattacttactgcagcagcaactcctcattccgtcttagaaccaaaaaaaattattcatgcttactataaagttcgtacagaattagaaaggaatagtcgccagaaactaaacattacaatcgtagatcctactctaattgcgttatgtaaattagttagtgaacggcaacttacatcaaacttggttgacatcgagtatggtaaccctcaaggaaaaatgactccatttaggattcactccttcgatttattcactaataaataccgcaggttaagtaatgaaaaatttagtcttgatcaggttcacgggcactttataagtatagctcacaagcttgctttaggtcgagaccctttaaacgaggtatcgcacccactactaaaagacaaaaaatatacgcagtgggcaccaatattacatgcattatgtcgaaagcatgaaaatagttcacaggtcgaatactacaaaaaatatagcaaaaaatttccgttgaaatacaaacatgagtttgacagcaatagtattaatcatcagattgaaaaattaaataagcgatattgttctctatttcgattcctgaaacctagccccgaaaacttctctcaaaaccaacgaaatgcactaaagaccacgccccctgaagtgatgcagaaaatgatagtatatcatatgattatgttttatttttcacttataaaaaatgctgcttggtacattaaagtaagagattttatgataagcctaaaaatgagctatcctcaagactatgcatcaaaactcttcgccttttctagtggagatgaatgtatggatgatacattatacaatagttttaacgaaatattcagtgccaatccagtcggcctttttccctggatgttttcgggtctactaccagaaccgatggagttaatgacgcattatttcagcaataaaaaaaacaaagacattgagcatatagataaaaaaaacaagtcctttagaaatattgatttagcagcttctgcgctaataatacctaaatttcttaacaatttagatcgtgcgaaagggataaatcctagtattatggttaaactaccctcaaacaattcagaaagttgtattttttacacagccacaggcataccaaaagaagaaggattatatcttgctgagctgtttagtaagggattgtatattcaaagaaatatagaagaaagtttaacgatggaactgagagaaattgaagatctactactcggaatttgtttactttggcatgaaagctttgtaggtaaaatatcactgagcaagttcgttaatatcctacaacaaaatgaaattaatgatattagtgaaagaactttaaaagcaagaaaagataaagccaaatattggcttatgcaatggcctagtcagcttcccttaatctcctga

SEQ ID NO: 224656 - DNA, 780 bp, Klebsiella pneumoniae
atgaccgggctcgttaccttgggaccgcaaccaggaactgcagcgcagctgccggtggctatcgactaccctgccgccctcgccttgcgccagatggcgctcgtgcaggatgaactcccgaaatacctgctggcgccggaagtcagcgccctgctccattacgtgccggatcttcaccgcaagatgctgctggcaacgctgtggaacaccggcgcgcgcattaatgaagcgctcgcgctgacccggggggatttttcgctggcgccgccgtatccgtttgtgcaactggccacgctcaaacaacgtgcggagaaagcggcgagaacggccgggagagcgcccgccggcaatcaagtccatcgtctggttccgctctccgatcaccagtacgtcagccagctgcagatgatggtggccacgctgaaaatacctttggaaagacgaaacaaacgaaccggcagaaccgaaaaagcgcgcatctggcagatcaccgatcggaccgtgcgcacctggtttgctgaggcggtcgaagccgcggccgccgacggtgtgacattctcagtaccggtgacaccccacacgttcaggcacagttacgccatgcatatgttgtatgccggtataccgctgaaggtgctgcagagtctcatgggacacaagtcgataagttcgacggaagtctatacgaaagtgtttgcgctcgatgtagcggcacgccaccgtgttcagttccagatgccggggaccgaggcggtggcgatgctgaaagaacggatttaa

SEQ ID NO: 224657 - DNA, 861 bp, Klebsiella pneumoniae
atgaagacgttggcgggatttctcaacaataaaggggctatggaaatcatgaaagacatgatgattgatattgaagctgaacgatttaatgagtggcttgaggaaaattacccggatgttgtccccgaatctgaagaatgggagcaggccgcgaacctgtattactgggaacaggaggcacttgctgatcaggctcagtgggatcatgaacacgggctcttcgtggtttccctgaatgatgttcaccagcgttaccggcacgcaagacaggagctgaagaagctatatgccctgctcgacagagagctgcctgaaattgtgtacaggatgtctttcgttcatgccgtaacagtcatggaggcgtacctgatgtactgcgccaaggccctgctggagcatgactggccgctcgagagatattttgaggcgtattatttaccttttgccagggccagcaagaaagagaagctggctaccagcaagatgccgctttccaggtttcgccctgttgcaaggaatgtcgttgctcgtatgactttccataacgttgaaacaattgagcgctatttcagcgccgtgctgcacatcccgccgatctggccggttaggccgctgggtatcatcgcagactggagaaacgacctagtgcaccgtaatggtgtggatgagcatgatgtgccaagagtgatatcagcgcagcagttacagaatgctctgcagagagtgtctgaccttatagaggcggcacaccagtccctgagccaagaagtagactatttcggaaactggcgtagtgaggaaaaccgggaaattattgcttcggcgctgaacatatcaacagacagcgatgtatctcgatga

SEQ ID NO: 224658 - DNA, 300 bp, Klebsiella pneumoniae; identical to SEQ ID NO: 98238

SEQ ID NO: 224659 - DNA, 327 bp, Klebsiella pneumoniae
gtgttgaacaataaaattctttccctgatacaggatgtggctggtcgcaacaatatgtctcctgcagaggcggcagagtggctcaacacgcattctgaagagatagaacacattgtggcgctgagtatgttcgagcgcatggaccaggctaaagaggacgtattaaaggagcattacgaaaatgcagacgcattcagaagcgggctatttgcaacatgggagtgtcctttaaaatggctgaatgccctaatttatggctgtactgaaatttgtcatgaggtaaacagcgagtatcgggctttgttgaataaatcagatttcgggtaa

SEQ ID NO: 224660 - DNA, 1419 bp, Klebsiella pneumoniae
atgccgcctgactacaacctgctggaatatcatcgggggacgattacggccccggccgggtgcggtaaaacacaaatcattgcggataccctggccctgcatacgggggggaggccggtacttatcctcacgcacaccaacgcgggtgtgacaacactgcgtctgcgtatgcaacgtgccggagtttctgctgcggcctatcgtatcgccaccattgatggatttgccatgcgtctggtggcgatgtttccggcgcgcagtggactcaacgttgaggttcttcaattacgcaatcgcggggctgactatcccgctatacggctggctgcctgtcagctgctgcaggcagggcatctcaatgatgttctggccgccagttacgctcacctcattgtggacgaataccaggactgcaacctggtgcaacatgcactggtaaccgcgctatcaacggcgctgcctgcctgtgttctgggtgatcccatgcaggccatttttggctttcggggtaaccagctcgtggactgggatgcacatgtactcgctcactttccactgattggtgagcttaatcatccatggcgctgggctaacgcaggggcgccggagctcggtcgctggcttctggattgccggcgaatgttgctggatggtaacgccattgaccttcgccaggtgcctgctgaggtgacctgggtgccgttacgggcagaaaccgctgttcagcagcgtcttactgccgccctgacgcgcgcggtcaccgcgagcgggcaggtgctggtgattggaaacagctacgacacccgcgggcgtcagcagatggccagccagaccccgggagcgacgaccgtcgaagccgttgatttggtcgaccttaccgactttagtgcagcgtttaacctagaggctgcggatgcgttgacgcgcctagtgcagtttgccgcaggcgtcatgacccaggttggtcccgcagcattgctgccccgcctggaaacgctacgaagagggcgagcccgcaacccgccgacggttgccgaagcagcgttagtggcatttgcagagagacccagttttactctggccgctgaggcgctgcgccttctgacccgccaggaaaatgcgcgggtctatcggccagaggttttgcgctgttgtttgcgcgccctgcagtcggctgctgccggaggctgcacttttgcagacgccacggtaaatgagcgcgaacgcaatcgccacgagagtcgaccgctggcccggcgtgtcatcggcagcacattgttgttaaaggggctggaaggggaggtggcagtcatcacatccccggaagagatggatgcgcggcacctctatgtcgccatgacgcgaggatcttcgcggctggttgtgtgctcgttgactcccgtattgacggcccgctaa

SEQ ID NO: 224661 - DNA, 1737 bp, Klebsiella pneumoniae
gtggtcagagtttgtaaagttgaaatccagaactttcgatctattcgtttactgacctggcagccttcgccagggctcaactgcctcattggcccaggggacagtggcaagaccaccattcttgacgctatagatctatgcttaggggcgcggcgtaatgtcagtttcagcgacactgatttttttggtctcgatgtgactcagcccatcagcattaccctgaccctagggtcattgccagatgcgctgaaggcaatggaaacctacggtaattacttgcaggcgtttaacagcgtgacggggcaggttcaggaagagccccagcttgggctggaaacggttttgtgcctgcggcttagtgtagacagtgaactggaacccaactggacgctggtgtctcagcgtgcggaggccctgggccaggaacgcaatctagcctggaaagatcggctgctcatcgcaccggcgagacttggcacctatgcaagctcaaatctgtcctgggcacgcggatcggtgcttaatcggctcacggaggagcgccctaatatgggggctgagctgtcaagtgctgcgcgtcaggctcggaccagtttcggtggacaggcaacggtacaactatcggcaacgctggacgtagtgactcagaaggccaatgagctgggtgtcccggtcggtggtcgggctcaggccttactggacgctcacgcggtttccatcggcgatggcgcaattgcgctgcataacgcagccggtgtgccgctgcgttctcttggtacggggtcgtcccgtcttctggtagcaggaatgcaacgtgctgccgcgcaacgggcctccgtggcactggtcgatgaagtggaatacggactggaaccgcatcggcttacccggttgctgaactcccttggtgccagggaaacacctccgccgcttcaggtttttctgaccacacactctcctgtggccgtgcgtgagcttaatggcaaccaactctttgtcgtaaggggtcacccgacagctcaccacctggttctgccggtgggcattgccgatgatattcaaagtacggtccgggccgaccccgaagcttttctggcgcgtagcgtgatcgtctgtgaaggggcgagcgaggtggggctgatccgtgggctggatcattactggaccgccctcaacggtaattccatgctgagtgcaggaaccacattcgtgaatgttggtggaggagagcctgaccgatgttttgtgcgtgggctggcactgcgtcggcttggctaccgtgtgctggttctggtggatgcggataagccgcccaccccggccacggtcgaggtcttcgaggccgcgggtggagaatacctcacctggcgagccggccgcgcgctggaggatgagctgtttatgagcctgccggatgccggcgtcgacgcgctgcttcagcggggtattgaacttatggaggaggaactggtggcggcacatatccagacgcagtccaacggtcaggtaacgcttgcccatatccggcagcagcggcagcagaacggagcaccttatcctcctgaaacgcggcaactactcggtctcaccgcgcgtaatcgacgtcatgggtggttcaaatcggtaacccggtatgagaatgtggcgcacgatatccttggtccccatctccccgcgtcggatgccgggttccaggcgctgattaaccggctttacgggtgggcacatgccgcctga

SEQ ID NO: 224662 - DNA, 435 bp, Klebsiella pneumoniae
atgcagggaagcgaagaaaaatctacgccggatgttctggactctgcccagttggtacgtattgaagccgtacaccggggattcctttatcagcacttgtatgccgttggctgcttgctgctggcacagaaagccagcatcgaggcagtgaccgttgagctggatgaggatattgagctgaactccgggcaggagcgcatttacgttcaggttaaaacccgcgtgaagcacataattcccagcgatgtgtctggcgcactggcgcggttaactggggagcagcgccaggagtttcaggaccagtcgaactatattgcgcagcttgcttacaaggcggcaaaatccgaaattgctcagtttttcggagcagtaggcagaaatgagccttgtccctgccgctcgggaaaaaagtataagaaatgccatggcacctga

SEQ ID NO: 224663 - DNA, 1179 bp, Klebsiella pneumoniae
atgacaaatattcctgattttactgcaaaagggtacctcccaaagggcagacacagctgttcggcgcaacagttcattgatcgcttctgcgcggttaacgagaaacgccaggccctgaaaaaggcgtttatcgacatactggacttcgcgaactcgcgcaacgccatatgtgtttttgtcggaggctcttacgtcaccagtaaggaagacccccacgatctggatgtggtgatcgtacttcagtgcaaggaacacatcccgtcgaggtcggaacgcctggttctcgaaggaaaacgtaccgacataatgttctgctcggcagacgatcccgtcgttaccgcctcgtttataaaactgctgtctttcgaaagatacggcagtggcgtaggtgtaatgcagatcaaccttaaccatccggatgaaccatgggtgactcatcacgaaccggatgacgatacctatgaagtcatcaaaagagcctatttcaatcgacatctggtcgatttgaacgaagctcctggcgttctggtcaccatccacgggataatgacgcacgcggaatggaacgcgaatctgatacctattgcaagcagccaaggctgggttgttgcaccttatatctacggctataccacccctgacattttgctcaacaagggaaaaagaaaagaagcagtggatgctttcagggactggatttattccatcaagagggatttttgccagaacggagaacagatttcagtgattgcacactcctttggcacctatctgatcggcgcatacctcgagggtttcaaggagtttcctccggtcaacttcaacacccttattctcaccggcagcattctgaatgagggttatgactgggaaagctgtgtcggttacaaagtcgcacgggtcagaaatgaaatagcacctaacgatcagtgggtaagctggatgcagagaaacccatcagaatggcttggcctcgacccactctttggtcaagccggaacaaaaggttttaattcaccgagcaaaattctcactcagcccacgaacaaaatattcgatcacaataatgtcattaaaaaagatgtcatcacaacaatgtggatgccgtttctgaacagcaataaacatgcggcagaggaagaagggtttaagagatttatggccacactcaacaagtag

SEQ ID NO: 224664 - DNA, 903 bp, Klebsiella pneumoniae
atgactacaaatcagttttatgaaatctatcgcaagctcgctgcattacgaaccgatgccggcaattgtccttccgttatagctgaactgaccctgctgtgccgcgaaaccatcaggacctcgtcccctgaagagtgtcttcgcgccgcagataactgcctgtatgaaatcggtcattctgctccgcttttcgcactcgccctctcctgctggctgaccgataaagagtgtattggactggcaaaagccctcgcgcatgaggcaagcgtgtgccaccttcaggcagaaaccccacaggcgtacgacctgtcctccatcgatgaggcacgcgccatactggcggcgtcccggctctgcgccctgcatgtctcccccgccgtctcactcggctgggctttaagcctggcaaccacttaccctgccagcgtcacggcaataaatgcggccagcgcactcctgcagcatcacatagaagaatatccgcggaccacgcagcggctgcttgccagccctgaatcgccgtttacctcgcttgagctggcgaataccgcgctggcgcagctggaacaacaggaaaaccatctgaacgggctaccggtgcttcgagagcttgcgatgacgcctgagatgcgactgatgtatgccagtctgaaacgcagtgagaatcgggagattcagcgacactcggaagagcactccatttttggccagttcttcacaaagcaacatttcaaatacgccaacaaaaccgcagtcgagttttctgtgggtgacgatgtcaaagaaaccacactggaaatgacgccctttcagattgaagttgaattgcctatcacctggcacaccgatcctctttccggtgatctcaccagaaacagactgtggaaaggagagctggaatga

SEQ ID NO: 224665 - DNA, 1692 bp, Klebsiella pneumoniae
atgagtattcagctggttctctcccattacctagcgggcctgcgtgagcgcaacgagctcgatgttctgctgccagaactgcttaaggccatggggcacaatgtgctcagtcgcccacagattggccccgcccaggcgggtgttgacgtgctgtcgacccaaacgggtaccgacggggttgatgaggtttttgtctttatcatcaaattcggtaacgtcggacgggtcgatttttacggtgggccgcagtctattgatccctctatccgggaggcctgcaatgacttcctcagaaaccgtttaccggaaccgctcaaaccgctgcgcaagcggattgttctggtctccaatggcgaactgctgcaggaagcccaggccggtttttcagccctgacggcagacatcgcaacacgtccgctttgcagccttgagttctggggcaccgatcagctcacaccgttggtagagcagtacctcttcgatgaaacattactgctggcacggggaaaatctgacctgcgcgcggccttggccggccttgaggagtcaggctcggcgataaaccggtttatccgctttgttgatgcctgttttgaaatacaggccggggagtcagaacagagtgaggaaacacgaaagaaaaagtttttaaggcgatgtgccgcagcgtcaatgggctgggcggtcctgctggtctggggaaaaagcgaaggcaatttaaagcctggggtcgtaaccggcgaatacctgatactgcgtatgtgggccgaggcagtaaaactggaattgtacgccgaccacgcctttaacgaccgctttgaaaccctggttacgctgcatatacaggctctgatggactactttgaaaaagtaatgcccaccctggagtcgccgcgagccgtcctgcgctggcgcccggatcgcgtcttctacctggagctaatgtttgaggagctgggacgcctgtcgaccctgctgctattactccagcaaaaaccaggagaggaggcgcttcgcaggacgatccgcaacgccatcattcatctggtcaatcagcattcgggggtgcgacttcccctttatgacgggcacaccatcgacctcaccctgctcttctgcgcgctgatgggcgagtcagactgggacaatacgcggattatcgcaggagaagttgtggcccgacttcaccatgcgctgagaacagaatgttatctgccggtcgacaccgactcgctggaagatgctatcgccctcgacagtaacaaggctgagagtcgtgatttcttccagacctcaactctggtgccagcactcgcgacggtgacgtcattgctcggtgatgaagaagcccttcaggcgctgcgcgataagctcctgcctctgatgatgggggtaacgcttgagcgctggttccctaccacatcacttgaaacactcagcggctcggtacaggggatccacagcgtcggcatttccagagcattgtctggcctcaagccctcagcaagggaggaagccgaggcgtcaattaaaacctttgacggtgccgctgccccctcagacttcaggtggtacggtaactggcaagtcatgatcgcattgtcagcccgactgtaccggcatcccttacccacctggtttatcggtgagtattgccccctgaacatccggcacagtaattatccggagtga

SEQ ID NO: 224666 - DNA, 426 bp, Klebsiella pneumoniae
ttgctcggctggttccattacgcggagcgttttcgtcagttgcatcagtgccagcttgaatgcgtgatgggccaggaaattaatgacctgcttgctccgcaataccccgacattactttttccacaaacgcgtccgttcagactgaaaatccttatgcctcttaccgcatcgggcttttttttggcggtgacaccacctgccagcccattgatttccgcaaggtcgggttccaccgtaatgcgggctacatcctgggcgtggccccccgggaaccccctccccgcctgaagctggatgcggcgcgaaaaatagctgagccctatgcccgtgggacaatcggtctgcgtgcaggttataaggagtcggtgcaggggaatgaaaccagtgagtattacaggcagatgaaccttaaaatccgattttga

SEQ ID NO: 224667 - DNA, 1845 bp, Klebsiella pneumoniae
atggccgaacttaacccgccactgggcacgacgacgccggaaatattcatggacaacgttaagcgcgctgacgagctggttaacggtccggccgggacggttaacgaccgcggtggtgaacccctcgatacatggcgccagatgatggcgaaaaacgatgaagtcaggcagaacatcattccactcggtaagcagtaccagacgctggcggcggcgcaggcagatgtcgcgaatatcccggagggctccacaaccttcgtacgcagtattgacgatgcctttctggctatcgaatacaggaatgtagacgggacgttgacggcaacaggccgaacaatggacgcaggcggcaatatccggcaggcaccactatctgtcaacctcgtcgaatttactgatccgctgggtttttctcattcgcgtattcgtgccgatggcggtttcgaaacaccgatgtcgttactggatgaagatgaaatatcctccggcaatctctctcttgttcacgatccgcattttgatggtggaaagttaatgctgtctgatgagctggggttttccgttccggcgacagaagacagtgaaaacggtaatgtcgatcccggtgaggtcacggttgatttgcctccgcaaacagctgcatatgcactgctgtcaaaaatgcgggctgcgctggaagatgtctgcatcatcattaattccgattccaccggcattactcaggataccgatccggttaacggtgtattcaaaaaatggacccgtaagctggcggagttcctggccgggaactatccagcctataccgttaattattattcctggatttccggtgcctacagcagcccggagacaattcaggtcggcactgcggggaaaaccctgcatttttacaacgcagcggtcgccggtacgcaaccgctttatctgatgggacagtattttgagaccgcgtacgtgcctcggcaggccgacctgattattttcaaccacgggcacaacacagataacaatgtgccagccagcacccacatggggatggatttagccattctctacaccatgctgcaacgacaccccaatgccggggcgataatagtttcgcaaaatccgctgagggacagcgataacgggactgtccggagcaacggtgcgcgtcaggctgcaatcacggcaggcttcagtctggttgacgtattccagttgttccagaacgcgggcaaaccatcagcctggtatatggacaatattcatccgaatgctaccggtgacgcgaaaattttcgacctggttaaaaatctgttcgtctggccagccagtccttcccggttcattcccggactggcagcaggaaccagcttactcatgaatggtgatttcaccacctggtcagaaggactgaatgcgcctgacggctggacgcttacaggatgtacggcagagcgggacttctcaaacgtggaaagtggagcgtatggtttacgcctcacccagaccgatactgtcgaaacttacgccgccacgacattacccgccgcccttgtgaaacgcctgcgtggaaaaaccgttgtactggcggccagggtatttgttccgtcgacatcaacccggggtaactgtggaacggtccagatacctgagatttcaaacaaccggccctatggtaccccgagcgggggacgtggtggttttatctggaaagccaccgttattaccgtacctacaacggcaacggccctcacggttcgggcagtactggatacagcaggcggagctgcgggtaactggtgcaccttcgaccggctgacgcttactgccgggactatcccgcaggatttttattaa

SEQ ID NO: 224668 - DNA, 756 bp, Klebsiella pneumoniae
atggcaacccgaattattaacagaaatgccagcctgtgggcttcacctaaagcgaaactgtccgttcctttcgctggtccctgggaggggttcttttcatttggtattgatgcagcgacatctgttcgtaacctgattgaggataagccggcgctctccgtcatcggcagcccgatatatggtggaaactacattgagctgactggtgcacaggtggcctacctggcgacgtcaatcaaaaactccgaggatatgacccttgtagcctcggtaatgccgatgaatgatgccagctctgctgtcgtctctaactatcagtcgcagcgcgccgatggtaccggtctgtgcattggtactcagttggggtttgatatcaacacacccgcagacggaaacgttcagaccacgtttaaccatggtgtactggtaaacggtatttcgactggcgcgagagcaaatactcctgatgcgcccattaacacatggagtcttattagcgggagggtaaaaaattcagctcgtaccagaacggtaaataacctgacgacgggaacaaccggtgtgaacagcccggcactgaatccagcggatttgggagatttcctgcgtataggatcggcgtataacagccagtttggtggggtggtgagagtttgcgaggtcgcaatcctgagcgggtatctggctgacgccgattttgcattactggtacagctgatgcgcgccagtgcggcaaaaaaagggattgtggtatag

SEQ ID NO: 224669 - DNA, 2154 bp, Klebsiella pneumoniae
atgccttcactaacaaataaaccacaagcaaaagataatgatgaaattgatttgggccggcttgtcggcgaatttattgatcatcgtaagctaatagtatcggttacatcactttttactttagtcgctttgatttacgcatttctagcaactccgatttatcagtcggatgccttaattcaagttgaacaaaagcaaggcaatgctattttaagcaatctgagtcaaatgctacctgacagtcagccacaatctgccccagaaatagctttgatacagtcaagaatgatacttggaaagacagttgatgatttaactttacaagctaaagttaagcaagattactttccgattattgggaaaggcttggctcgcctacttggtaacaaaagtggttcacttgatataactcatttatatatttctgatgcaaatagtgaattatacttaactgtaaaagagaatgggaactatgaactcacgtacaatggtgtgacttataaaagcgctgttggtattttgtttgataatgataagttttcaattaaagtagataaaatagatgccgaaccaggtgctaaatttaaaattaattatatatctcggttggaagctattacagaccttcaagaaagattaattgtagcagatcaaggtaaagatacgggtatgttaaccatctccttaacaggggataatccagaccaaattgagaaaatagtaaacagtgtaagtgaaaattatctagcacaaaatatagcacgtcaagctgcacaagacgccaaaagtttagaatttctaaataatcaacttccacaagtgcgtagtgatttagatatcgctgaaggtaaacttaaccaatatcgtagaaagagcgattcagttgatttatcattggaagctaagtctgtacttgatcagattgtaaatgttgacaatcaactcaatgagttaacattccgcgagtcagaaatatctcagttatatacaaaagagcatccaacttataaagctcttatggaaaaacggaagactttgcaagaagaaaaagggaagttgaataaacgcgtttcgtcaatgcccgaaacgcagcaagaaatattacgtcttagcagagatgttgaatctggtcgtgctgtatatatgcagttacttaatcgccagcaagagctcaatatagcaaaatcaagtgcgatcggaaatgtacgtattattgataatgctgtgacgcagccaaaacctgttaaacccaaaaaggctatcgtcttaataattggaattttacttggtttgatggtttctagcggcattgtattacttcgtgtatttttgcggagaggcattgaaactcctgagcaacttgaagaactcggaattaatgtatatgcaagtattcctgtagcagaaacgtttacagctaacgtaattcaaggcaaaactcagagaaataagaaaaatcatgaaagccaaggtttcttggcaattgaaaatcctgcagatctcgcaatagaatctattaggggtttacgaaccagcctccattttgcaatgatggaagcaagaaacaggattttgatgatttctggggccagccctaatgcaggtaaaactttcgtcagttctaatttagcagcggtaatagctcaaacaggaaaaaaggtattatttattgatacagatatgcgcaaggggtatacgcataaactattcaatgaaaataatgcaaatgggttgtccgatatcctttctgggaaaacaaatgtcgaggatgctattaaaagagttactgttgcagggtttgattatatatcccgtggtatggtaccaccaaatccagcagaacttttgatgaataaacggttcggtaatcttcttgaatgggcgaatgagcattacgacattgtagttgttgatactccgccaattttggctgtaacagatgctgcaataattggcaattatgttggaacaacactgctagtagctagattcgaattaaacaccgcaaaagaaatagaagtgagtataaaacgctttgagcaaagcggtgtaatagtaaaaggttgtatactgaacggtattattaaaaaagcaagtagttattatggctatggctataatcactacggttataaatatactgacaaaaagtaa

SEQ ID NO: 224670 - DNA, 219 bp, Klebsiella pneumoniae
gtggcactgacagcaatacgcattcctgagcgggtacacctgcaggcgctgcaggtcctgctgcggtatcggcgccggcggatattcccgcggcgaatgcgccgcaccggctacctcagcctgaaggttaacccacgctggcgcctgttatcgaaagacgacggccggaactgggaagttatgagtcatgaaacctataaccgggagaaagacaaatga

SEQ ID NO: 224671 - DNA, 210 bp, Klebsiella pneumoniae
atgtgggacccggaaaaagatacctgtattgaagaggtattaactcaagccaataacctgaacgagctgctggatttaatgcatatttgctttagcaaaatgaattcatgccaagccgaagcattaatcggccttgcaatgaatatatcgtgtgacatttttacctggattagcgaagaggcaaagcgccgtgaaaacaaatctgattga

SEQ ID NO: 224672 - DNA, 207 bp, Klebsiella pneumoniae
atgaaaactaacaccaccagccacccgaacctcattagcgcaatggagttcactaataacgtatgcgccctgctcgtggcgattgagttaagcgctgaacagcttgatgcggacacaattaaggacgcatccaacggcattcgttacctggcttcgcgcgcatatgaagaactcgaacgtgttaagaacgcagaggccggaaaatga

SEQ ID NO: 224673 - DNA, 702 bp, Klebsiella pneumoniae
atgagttcgttagcagaccgtttgataagcagacgtgaattgttgggtttaacgcaagaagcgctcgccaagaaggccggcgttacgagagtggccatcagcaaggctgagctgggactaacaaaaaattttaacagtaatactctcttcaagatctcgtcagcacttggatgcgaaccagagtggctttcgacaggtaagggaacgcaggagaagctgccaaaaacccagcaacaacagaagcctgttagtgatacgtcttggattaacaatgttgctgagaccgtgcagccacagcgcagatatagctatccgaagttgaattgggttcaggccggacagtttgcgcaatgcggtgataactataatatgtatgatattgaaaattggattgattctgtaaaatacgctggcgagagaggcttttggctggaggtaaaaggtgattcaatgacctctcatacaggaattaccttccctgaaggtatgtccatactcatcgatccagaaaaagaaccataccctaactgctatgtcatcgcacaaaagagaagcagtaaggatgtcacatttaaaaaatacgtaaccgacatggggtctggttatctgaaaccactaaacccccaatacccaatgatccccctcgacgatgaatgcgaaatcatcggtgtggtggtcgatgcgagatgggatatattttaa

SEQ ID NO: 224674 - DNA, 747 bp, Klebsiella pneumoniae
atgtcacaacagtcaacgatgtcgcgcgtatcggagaagcctttccactgcatcaatggcagcagggatgtcgttaatccagaccacagcccctgttgtcttgttttgctcaaatttggagtgaagggccgaaaggtagtcattaacagcctgtttatagcgttggcgctcgcgccctcgaagatgaaggctcagtgcatcgaagtcaagttgccgctgtatacgaacaacttttcccttccgcaagcgctccagttcggcggtaagaaacagctctatggggtcggaaacagcattgaatttatcaagccggtaccgggagagcgcacgcttatcgccgtaccacagtccgaaaccaaaggaaatcagggtccagatgaacacaatcagcgggggattggtattgaacagaataacaaactcactccagatgatacccataaattctggcgactccttttgacccagttgtcagcttttgcagctgcgttttccgtcgggatttatctcagtatgcgcgcgaatattcgccgcgactggcgccagcatatcccgaaaggacggctcccgaaagtgcccgccgtggcgatgctctccatgttttgtataccacggaagatcaagccttttcggtggcggttgtgggagcagcgttcgtggttcctggatatgaagattcgtcatggctttgaggtcgcgtaccgggacgcctggtactggaaaaagcttgtcgcggagaagtggtga

SEQ ID NO: 224675 - DNA, 879 bp, Klebsiella pneumoniae
atgttgaatttgaatcagctcaaagagcgtgaagacctgagagcgcaacaggaaaaactcggcgatgaactgactttcgctgaagagcataaacttccatggggcttcgagggctggaactcgaattacacctgcacgatatcctgtccggagcatggagactacgaacagttcacgctggtgggcaaagattttcgcggagcggagactttcaaacattcccgctgtccggcctgcatccgggcggagcagaccagagtcaaatccagcctgcgtaaacttcacgtggccagcctgctgaacgacgcgggtattactcgccgctttggtgactgcgagtttgaaaattatctggaactcaaccctgaagcctcccgcaacctcgcagcctgcaggcgctacgcaaacaactggcctgacgttctggacgccgggaaaagtctggtgctgacaggcagctgcggaacgggaaaaaatcatctggcggtctctctggcgaaaaacatcatccgcaaccatctcgccaccgtggaactgaccgatgtgatgcgtctgactcgtgccgttaaaagcacctggcgccacaatgctgacacaaccgaagagagcgtactggatcactacgcttcgctggatctgctgattatcgatgaggtaggcgtgcagttcggaagcccggcagagatgactatcctgcacgaagtgattaacgcccgctatgaaagcgttctgccaaccatcctgatcagcaatctgccacctgagcagctgaaagagtttatcagcgaccgtatttttgatcgtgtgactgacggtgggcgcaactacctggtattcaactgggcaagttttcgtgggaataacggggggcatgcatga

SEQ ID NO: 224676 - DNA, 936 bp, Klebsiella pneumoniae
atgctggcatggatgacctcgtttgggacattaaagcgaattggtgttgagtgcacaggtacctatggttccggtttgcttcgttattttcagaacgccgggttagaagttcttgaggtgactgctccagaccggatggagcgacgcaaacggggtaaaagtgacacaattgatgctgaatgtgccgctcatgcagcattctcaggcatcaggacagttactcccaaaacgcgtgatggcatgattgagtccctgcgggtattaaaaacttgccgaaaaacagcaatatcagcccgcagagtcgctctccagattatccattcaaatattatctctgccccggatgaattacgtgaacagctcagaaatatgacgcgcatgcagctcatcaggaccctgggttcctggagacctgatgccagtgaataccgcaatgtaaccaacgtttatcgcatttcattaaagtcccttgcccgacgctatctcgagttacatgacgaaatcgctgatctggatgtcatgattgcggcaattgtcgacgagttggcacctgagctgattaaacgtaatgctatcggatacgaaagcgcttcacagttgctgatcactgccggagacaatcctcaacggttaagatcagaatcaggatttgcggcactgtgtggtgtcagcccggtccccgtttcttctggaaaaacgaaccgttaccgacttaatcgtggtggagatcgtgctgcaaatagtgcacttcacatcatcgccatcggacgcttacgaactgacgcaaaaacaaaggaatatgtcgccaggcgtgtagccgaaggacatacaaaaatggaagcgatacgctgtctaaagcgatatatctcccgcgaagtttacacgttactgcgcaatcaaaacaggcggatcaacagtatcccgataacagcttga

SEQ ID NO: 224677 - DNA, 204 bp, Klebsiella pneumoniae; identical to SEQ ID NO: 104143

SEQ ID NO: 224678 - DNA, 171 bp, Klebsiella pneumoniae
atggtaagcaagtatgcagtccttaaagaaggcgtggtagaaaacattattgttgctgatgataattactctcctgatgatttcgaagtcgtaaaatatagtgacgaaacattttgccagccaggcatgttgtacaataaagaggatggtttattttatgatgataaataa

SEQ ID NO: 224679 - DNA, 579 bp, Klebsiella pneumoniae
atgcttcagaacatgcttaacccggaaccaacctcaacagggatccggtctggaaaccgggtgattggctactccgctgctattcgcctgctggataacggtcgctatgacaaacaccttgccgatggaatggaaattctggcctgcatcatggaagcggtagaaagcaactggatcacgctcaatatcgaaaaagagttgatcctctggcgctggttactggctgccgtgttcatcactgaggagctggagaaaaacggaactgtcgacgttccgaatgatactggcggtgttgatactgctgttatctattccagcaagcatggcgccattagcgtctatccgggacctgaacgctttgcactcgccaaccatattgagctgggggcaatcgagaaatatgggccagaggttggccagcagctggcgctgcggatgtatcaggacatggttattgctgacgaagaatttgggttcaggttatcagcacttggccgggaggggtttaacctcctccacgacagctttatcgaacacatccagatcgaaggtgtgccagaagcaccgattatgcattga

SEQ ID NO: 224680 - DNA, 495 bp, Klebsiella pneumoniae
atgcgaaattttatttgggaaatttgtcataatccgggtattaaatctaaaatggttgtgttactctaccggctcgcgacattgcataccaagcactatgttatattctatcctataacattttgctttgttattctcaataagattattaatgaggtaattattggggttgaaataccttatcagacgagaatcggtaaatgttttagaatttggcatgctcatgcgatagttattaataaagattgtatcataggtgatttttttaatattcgacaatcttgcacattaggtgcgaataagaaaagttacccagaccgttttgtaattggcaataatgtcacaatgggagctcattcttgtattttaggtgatgacatcactattggtaatgacgtaataataggagctggagtaatactaatggaaaatataccagcgggacattatgtaatcggctctaaaccgattgtaaaaaaattaaaaaacttttaa

SEQ ID NO: 224681 - DNA, 801 bp, Klebsiella pneumoniae
atgagactgatttacacactaactggactgaataaccccttactccctgtgtactcacaaacagcggcagagaaagcgatctcagaactatccccatcagtatggacaccagtgaagacagagtttctaaaaatggggtctggtgcaaaagtagtagctatctctaaccgattagatggcggacttttcaagtcactggagaccctcgagccatccacaaagctgaatggttctgttttgcaggggcttaatttctccggtgcatccggcatggctggtgatacggcggtggttatggacgcaaacatcaatacttttgcattcatctatcagctgccaggtggggcgcttccggctacgccacaggacagagcggttatcgcaacccaggaaacaacccctcatggcgtcggcattcgtacaacgtcagcaggttcattcccgatttttctgaatggagggatcgaggccgatctggcatttactcctaacaatatggggcaatctgtattctgcgctgtagttatgtgctctaacaaggctgcaggaacctatgcagttgcataccagcggtcagatcagtctgccgtgaccagccgacaagttacaggctatacaatcccagcgtatagcccgtctcaaaaaatgagtattggcggagcaggcaatggttcagtgtctccgttaacatccgttttgtcagaatgtttggttttccccggcaaatatgcatatgggaccggcacactggatgtcatcctggcatatctgatggagaggattggaaaaatcacggcctag

SEQ ID NO: 224682 - DNA, 1962 bp, Klebsiella pneumoniae
atggccgaacttaacccgcctttgggaacaacgacgcctgaaatattcctggataacgtcaagcgcgctgacgagctggttaacggccctgccggaacggttaacgaccgagcaggtgaaccgctggatacgtggcgtcagatgatggcgaaaaacgatgagatcaggcagaacctgatccctctcagtaagcaatatatgacgctggaagcggcgcaagcggatatcgcgaatattccggcaggttcaacaacttatgtccgcagtcaggacggaagctctctggccgatgagtatatcaacctcgctggaacgctgcagccaaccggacggcggatggttcgtgacgactacggataccaggtatcgccagacagcgtgaccctggcagcatatgatccggagactgcccgcgtggctccatttttaaatacaagcggcagattaattcaaatcggtcctgacggaaaatattacgaacttttaacccaacaagaatccgaactctatgcgctgggccgggagggttctgtaccgcagtttattggcggtgaaaaagtgtggcggatgacggttgattcaaccacaaaccagatcgttgaagcttatacggttggtgggaagcactggatttactcagacggtggcctggtagctgttaataacggaaatggcggtggtggtggcgacgatgatgccaaccagctccctgagtatggacttcatttgtcagggtctactgtgtacccctactcagagacagtgcctgtatgttttatctttgtgactgctgggcaatccaacgctcgaggatattgtcctgacgccgatcaaaccattgtcgcagcaacgccgatatatcctgataacgctttcatgctcagcggcggggttaggcgtacagggacacgcagcactactctggtgccgctggttgaggctgtaagcgggacagataaagaaacggccgcaagcggcctagcgaacaccttcattcgcgatatggctgcagctaccggcgtcatgccgcgcacgctatcaatcgtctgtgctcagtctggacaggcttacgagtaccagaaacggggaaaccaggtttatcagtatctgctcgattcaatcgaagactgcgtaacggcctgtagagcgcgtggctggctgccgattgttctctgcgttgactggatgcagggagagtccgacgaggactggtcaggattacgagaaggaatgtatgaatcacggatgaggcagtaccagagacaaatcaccagcgacatcatcgcaagaacgggtcaaaacgaaccgccgattatcgccattacccagctggggtatgtcaatgacgggcatggtgcatttacaggccagtacgcgcgactggcgtcgacgcgattgcacggaaaagagcaattcaggctggtcaatagtttgtaccagtacgattttatttcagacggtctgcacttgacgtgtgcgggccagaaccggcgtggagcagctgtggcgagagcgcttatccaggagtggtttacgagcggctggtacggcatggttccgacaagtttcgtgtggaactcaccaacgcagatacagatcaatgtcccagcgtatacgaacctggtgctggacacgactacgatcaacacctccggtctggccaattacggctttagctacacggatgaatcggcgtcaccccctgccatttcgagcgtcgcgattagctctgacggcaagggagtattgattaacctggcgtctgctcctactggccgttttggatgggtttcctacgcaaccgtcgaaaatgcaatccagagtggggctactgtgaaaccgtctggtaggaccttgggcgcacgagggtgtgtaagatcttctgccggaatcacgtgggtatacgatacatctgtaaccctctacgactggctccccgcttttcggattaacgttttctga

SEQ ID NO: 224683 - DNA, 522 bp, Klebsiella pneumoniae; identical to SEQ ID NO: 185784

SEQ ID NO: 224684 - DNA, 870 bp, Klebsiella pneumoniae
atgagcctttttgcaatgatgaataaaaactctgctgtgaaagtgtatcgtattgataccgacagacaaacagacatcaaaatcaaaaaaatatttgatgaccaattatctctttttgaaagtcatcacaatacggaacttgttttcgaagccggatatacccctagctataatgaatgtagttatatagataactttgatgaaggaaaaatacttcttgatgcagttcagcgtagcaccgcaatgcctttgtggacaaaaaatgttgggcttaatgatataacagctttttttatggctcctgcgtatcctcaagtgaaagacaaaatagcaatccaaaccttttcaaaaaaacagatacttaacgagtcaagatacttatggctcagtaaaaattcatttacgatgtcagatcttttgggtttcaatctagacgataaattagttgcaatccttgaaggagataaaataaagttcaggaacttcaacaacctaagaagcatatttgatatgagttcttattttgctgaagcaacaaagcaagagatttctgactttgtaaaccaaccagtttttaatatacccgtggggtttgatcttccagcccttgcagataacgtcataagaaaaaaagtcacattaataaacaaatctaaaatattggtaaatcatactgtaaccgaaataaaaaacgcagcgctaactttgaacttccctataaaaacgaccggctcaggaaactccgagaaaatagaaatgccaacaaataaaaaagaaataaaagagttacttaacttcttggatgaagactatttcaactctgaaataactaagcaaaggtttcgatcaaattcaaaacgtaaagcataa

SEQ ID NO: 224685 - DNA, 690 bp, Klebsiella pneumoniae
atgactagaacagaaagacttctcgaactactacagatattaagggcacaaagatatccgatcactgcatccaccctctcagaaagactgggaataagtgtgcgatccctttacagggatataaaaacgctgcagtatcaaggagtaagcattgaaggtggtgctggaattggttacatcgttaagtctgactttcatttgccacccttaaacctttctcatgaagaaatcaatgccattacacttgggttaaattgggtatctcataatactgaccgtgatttcaaaattaccgcaaagagtgcacttgccaaaatacacgccgtcattcctgatgaattaaaaaaccttattgagagtcaatcctatctgatcggtccttcagaaaacaatgagatatattttgaatgtgttcgcaatgctattaaaaagcgcatgagaataaaactaaagtattgtgataagaaggattgttactcttctcgaatcatatggccaatcggattggtatacatggagtcatgctggcttttggttgcatggtgtgaaatgagaaatgattttcgtcattttagaacggacagaattcaagatatcgtgcaactggattctacatatagtgaaagcagagaagttttattgaaaaaatggaggcttaaagaagggatctgcgaggagaaagagtactga

SEQ ID NO: 224686 - DNA, 747 bp, Klebsiella pneumoniae
atgaatttcaagaataaagttgctgtcataacaggaagcactacaggtataggtgaggcagtcgcagaccaattacataagcatggatctaaggtcgttattgtatcccgttcgtcagaacaggctaaacaaaaagcgaaacaattatcttcacagggacaaaaagccgtggggatcggttgtgatgtgtcacagcctgaacaagtacggcaaatgatagatgatgttatcaaacatttcggcagacttgattatgcagtaaataatgcaggcttaacaggtgaacatggtataaatataactgagcagacaattgaaaactgggataaggttattgcaacttcattgagcggtgttttttactgcctaaaatatgaaatacctcagatgatgaaatctggtggctctatagttaatttatctgcagtaaatggactggttggcattcctgggttagcaccttacaccgtggctaaacatggcataatcggtttaacccaaaccgcagcgctagagtttgcatgtgaaggcattcgaatcaatgcagtagctccgggctatgtccaaaccccacgaatgagtgagttcccagaaaatatcgtacgtagtttcgcaaatagccaccctatgaaaaggatggcaaaaatgcaagaagtagcagacttcatactgtttttactgtcagataattcagcattctgtaccggaggagtttatccaatcgatggcggttatttagctgagtaa

SEQ ID NO: 224687 - DNA, 228 bp, Klebsiella pneumoniae
atgagcaatccagaaataaaaaataagggccatgaacctccggatggtcttcctcgttatcgtctcctgacaggtaaggatgacgctaaattttgtcatcgggtttcagaagcactggcgcttggttatcaactgtatggctcccccgccgcgacgtttaatgggcaggatgtgattgttgcgcaggctatcatatggcctgaggtaccgcagaatcaggcttcgtag

SEQ ID NO: 224688 - DNA, 897 bp, Klebsiella pneumoniae
atgcaaatgaatctgtttgaaaatattaaaatttttattgaaatcgtcgatgccggcagctttgcccaggcggcggaaaatttgcagatccaccgaccggcggtgaccaaagcactgcagcagctggagcaggagagcggggtccggctgctgcagcgcaccacccggcgtctgtatcttacgccggagggggaagagttttatcgtcgcagtaaaccgttgctctcccaggccgacgatctgctggagtcgttcgcgccggaccggccgatccgcggtcagctgcgcgttgatatgccgatcgcctttgcccggctgctggtgatcccgcacctgccggatttttatcaggcccatccggaggtggagattgtcctcagcagctccgacgtacgccgggatatgctgcgcgatggtctggattgcctgctgcgggtgggggatcttgaggatggcgactatgtggcgcgttcactgggggaggtggcgttaaccacctgcgccagtccgggctatctggcgcgctatggggcgcccgcgacgctggaggacctgcagtcgcatctggcggtgaactgggtgaacagcagcagccggcagattatgccctggcgattccagaccccggagggcatcaggcagatcgccattcccggtaaactggtgctggacaactctgaagtctttactgctgccgggctggcggggctggggatgctgcaggggatgcgtttctttttgcaaccttatatcgacagcgggcaactggtggaagttttgccggactttccggcgccgcgtcgaccgttgtcgctgctctatccgcaccggcatctctcgcataaggttcgggtctttgccgactggctgcaggggctggtagcgaccctggactga

SEQ ID NO: 224689 - DNA, 879 bp, Klebsiella pneumoniae
atgacccttgttctcagcgcttttgccatgagcgctcacgcggcgctggatctgcgcgccaatgagcagccattgccggtcacccgcgacccgcaggcgatagcgaaaattccgccgggctatcgcttcgtcgagccggggacgctaacggtggcgatctcggcgctcaattcgccgccgctggccctgctggctagcgacaaccgcacgcggatcggcagcgacccggatatagcccgcctgctggccggaagccttggcctgaagctcaggctggtgcccaccgcgtgggaggactggccgctgggcatcgcctccggccgctacgatgtggcgctgatcaatatcgcggtgaccgagaagcgcaaagagaagttcgattttgcgacttaccgggtggactccctggccttctcggtgaaatccaccagcgatatcgccgcggtaaacggacccgccgatctcgcggggcgcaaagtgatcgtcgggtccggcaccaatcaggagcggatcctgctgggctggaacgaggacaaccgcgccgccggacggccgcaggcccagccggtctacctgaccgatgatgcctccggcaatctctatatccagtccgggcgggcggatatctttttcggcccgcagtcggtggcagcctataaagcggcgcttaacggccagacccgggtggtgggcctggggccgaaaaaagcgtgggtggcgacaaccaccaaaaaaggcaacggcctggtctatgccctgcaggcagccctcgacggggcgattgcccgcggtgaatatcagcaggtgctggcgcgttggggggagcagggcgaagcggtggcgcagtcggtggtcaacccgccggggataacctactaa

SEQ ID NO: 224690 - DNA, 1314 bp, Klebsiella pneumoniae
atgtctgaaaatcgacaattgcgtctgggaaccatattgcatggcgcatcgggaaatatgtccgcctggcgtcatccggcggcccaggcggacgccagtattaattttgatttcgtcacccagacggcgctaaaagcagaagcggggaagctggattttatttttgtcgccgacggtttatatattaacgaaaaatcgattccccattttttaaatcgcttcgaacccttaacggtactttccgcgctggccgcgatcacccggcgactggggctggtggggacgttatcgacttcttacagcgagccgtttaccgccgcccgccagttcgccagccttgaccatttaagccagggacgggcggggtggaacgtggtcacttccccgctggaggggtcggcgaaaaacttctcccgggcccaacatccggatcatgcgctgcgctatcgcattgccgatgaatatctgcaggtggtgaaaggcttatgggattcatgggaagaagatgcctttgtgcgcaataaggagactggccagttctttgataaaaataaactgcatacgctcgatcaccacggcgatttctttaaagttgccgggccgctaaatattgcccgcacgccgcagggccgaccgattattttccaggccggcgcatcggacgacggcaagaaattagccgcacgccacgccgatgccatttttacccatcaggactcgctggccgaggcgcaggcattttatcgggatgtcaaaagccaactcgccgcatatcagcgcagtccggaccaactgcatattttccagggcgtcagcgtcatcgtcggggatgacgccgaggacgcggagcggcagtaccagaccaccgcggcgttggtctccatcgaggatgccctgaattatctcgggcgctatttcgaacaccatgacttttcgcagtacccgcttgatgaaccgttcccggatattggcgacctcggacaaaacagcttccgcagcaccaccgacgagattaaacgtcacgcccgcgagcggggcttaaccctgcgccaggtggccctggaggcagccagcccgcgtccgcgctttaccggcaccgccagcgatgtcgctgatggcctgcaactgtggttcgagcagcacgcggcggacggcttcattattcagggcggcacgccggaaaccttcccgcgctttgtggatgaggtggttccgctgttacaggcgcgcggactgttccgtcgcgactatccgggcaccaccctgcgggaaagtctgggtctggcgctacccgctaatcaattccaaaaataa

SEQ ID NO: 224691 - DNA, 1122 bp, Klebsiella pneumoniae
atgtcctttgaacaacaactgattagctggcggcgcgagctgcaccagaacccggagctctcactgcaggaggtggccaccaccgcgcggatccgcgactggctgcagagcggcgggctgaccctgctgccctacgatctgaaaaccgggctggtcgccgaagtcggcagcggcgacaaggtgattgccctgcgggcggacatcgacgcgttgcccatcgaggaggcgaccggtctgccttaccgctcgcagaatcaaggggtaatgcatgcctgcggccacgatattcacaccagcgtgatgctgggggcggcgctgctgctgaaggagcgggaagcggaactcccggggcgggtgcggatcctgtttcagccggcggaggaaaattttggcggggcgaaaaccctgatccgcgccggggcgctggaggaggtgtcggcgatcttcggcatgcacaatgagcccggcctgccggtgggcgaatttgccacccgcggcggcgcgttctacgccaacgtcgaccgcttcgtcttcaaagtgaccgggaagggggcgcatgccgcccgcccacatgaaggaagggatgcgatcctgctggccagccagctggtgacggtgctgcagagcgtggccagccgggaggtgaacaccctcgactcggtggtgctcagcgtgacgcggatccagggaggcaatacctggaacgtgctgccggagagcgtcgagctggaggggacgctgcgcacccacagcagtgaagtgcagcagcgggtcaaggcccgggtcagcgagattgcggccggtttcgccagcgcctttggcgcgcagattgacgtcttctggtacgccggcccgacggcgctggtcaacgacgcccgctgggccgacttcgccagcgaggtggcagcccaggccgggtatcgcacccaccatgccgatctgcatctcggcggcgaagattttgcggtctatcttcagcatattcccggggcgttcgtcagcatcggcagcgccagcgaatatggtttgcaccatccggcatttaatccggatgaacggctgattgcgcccgcggcgcactatttcgcccgtctcgcggaagaagcgttacaacacatttaa

SEQ ID NO: 224692 - DNA, 1344 bp, Klebsiella pneumoniae
atgtctgctaaccatgctgcgtttaatttgatatttcgctttgtagaaaattacataagccccatagcagggcggatctcgtcgcagcgccacgtcatggctatccgtgacggatttatctcagcgatgccgtttatgatcgtcggatcgttcctgttagtgtttgcttatccaccgttctcaccggataccacctggggttttgcccgcgcctggctggatctggcgaaagagtttgaggggcgtattctgaccccctttgatatgacgatggggatcatgtcgatctacatttgcgcggcaatctcctataacctcggtaagcattacgagaaatccaatcagctcgatccctttatgtgcgcaatgctgtcgatcatggcctttttgctgattgccgcgccgaagaccaatggcacgctgccggtggatagcctcggggggaccgggatctttaccgccatcctggtggcgatctactgcgtggagatgatgcgtttcttgaaagcgcacaacattgggatccgcttgccggaccaggttccgccgatgatcaaaaactcgtttgatctgttgatcccggtgctggtggtcgtgctgacgctctatccgctgagcctgtttatccagcaccattttgacatgctgatcccgcaggccattatggccattttcaagccgctggtttcggcagccgactctctgccggcaattctgttggcggtgctgatcggccacctgctgtggtttgccgggatccacggtgcggcgatcgtgtccgggatgctgcagatgttctggctgactaacctcggtatgaaccagcaggcgctggcccagggcgcgcctctgccgcatatctttatggaggcgttctggaccttctttatcgtggtcggaggttccggggcgaccatgggactggtgttctgttatctgcgcagccgttcagcgcatttgcgctccattggtcgtttgagcgtggtgccaagcctgttcaatatcaacgagccggtgatctttgggacgcctatcgtcatgaacccagtgttctttattccgttcctgctggcgccgatggtgaacgcggtgctggcctgggcggcaatgaagctggatctgattggccgcgtcatctccgtcgtaccatggacggcgccagcgccaattggcggcgcctgggcgctgggctgggatttccgggcggcgattctggtcattgttctggcctgcgtgtcggcaatcatctacttcccattctttaaggtatatgagaaacagctgcttgctcaggaagcggaagaggccgagcgggcggagcaggagagtcaacagaccgcataa

SEQ ID NO: 224693 - DNA, 141 bp, Klebsiella pneumoniae
atgagccgtgacgttatcgaacgcatccgggatcgctggcaaaagctccgcctctgccggcaccgcggcaccgtactggttgactaccgcatactgagaaatttcgttcgcatctatcagaccccgggagagacagcatga

SEQ ID NO: 224694 - DNA, 384 bp, Klebsiella pneumoniae
atgagcacagaaaccgaaattgaactgggaaaggttgtggctttcccagcgaagaataacgacctgcaggatgggctcgttattcagcgcgaaggtaagaaggtgatgtgtctgcactccaccgttttggttaacgaaaaggaccggaccttacgctgcaggaagtgcgaaacattgatcgaaccttttgacttcttgatgacgctctgtgaccaggagtctcgctacatggagagcgtgaaatatctccgacgggaagaaaagcagcgccgccagaacatcgagaaactcattcagattgagaagaacgcaaagtcccgaattcgccgcgtcggggataagtccccacttcctctctggcagaacgagagggttgatgaatga

SEQ ID NO: 224695 - DNA, 597 bp, Klebsiella pneumoniae
atggcgcaaacactgcaatttgagaagagttatcaaaacgtactgattcccgcagagccgggaaccagcgaatacctgcaacttatccccgtagggcaactgctttgcggtgagttccgcaagccccggaattacgcattccacaagaagttcttcaagcttttgaccctcggctatcactactggacgccttcgggtggtctcattgagcccgcagagcgcaacctcatatccgggtttatcgacttcctttcatctgacttcgatcagcgcgctgcgctccagaacgccgcggagatgtatctctcctctgtcggtatttctcgttcccgcgatatggcgctgctgaaacacttcgaatccttccgcgagtgggcaaccattcaggctggcttttacgacgaataccagatgcctgacggcagccgtcgtcgtgtcgcaaagtcgatctccttcgccagcatggacgacagccagtttaacggcgtctacaaatcagtgctgaatgtgctctggaactacattctgcgtcgcaaattccactcgccggctgaggctgaaaacgccgccagtcagctgctgagctttgcggggtga

SEQ ID NO: 224696 - DNA, 237 bp, Klebsiella pneumoniae
atgagaaactcactgcaaattctttgcattaaggataccgaaggatattggactgagggtgaaatgtatccggcccgtgtagttgctggcggttttgttcaagttggcgacgatgacgatcctaatggcgaaggttggagcgctgcaccaatggaatatcgtgaagatggctcgatcgtttatcaggtcggcggtattgagggtgatgtgttattcgaggaggccagccatgactga

SEQ ID NO: 224697 - DNA, 456 bp, Klebsiella pneumoniae
atgactatcacactacaggcagtaaacgagctcatcgcttctctggagagcgcaggcgagctgtcgatcagagagcagaagttcctgaagctggctaaagagtttcgcatttgcagcgcttcactggataccgtcataaaaaccgggaatgtgctggcagaccaaaattctcagctggctgcggagaatgtggcgctgaaggaaagccgaaataatttggctgaattcatccatgaagaacttgatgctgattacccgctgaatatgaatctggaaacacatgccaccgatcgcttcgtagccgggattaaggctgatggggtgggggagttcattggtcgcctgcagcagtgtgtcgatgagggtgattttgtaggcgatgaagttgccgtaattgttggcgctatcgactgcggcaaggaattttgcgagcaactgcgcgaggtggccaaatga

SEQ ID NO: 224698 - DNA, 222 bp, Klebsiella pneumoniae
atggagagttcaacgacacgcaacaaagtggaggctcgcaggatagaaagctggttacacagccagatagctgaactgggaaccacgaatatcgccaaagtggccggagtgaataaatcgacggtgagtcgttggcgggaaagcctgctgccgaacatgtcgctactgctggccatcctgatttctaacaggccgggagagaaaggtgattttgaagcatga

SEQ ID NO: 224699 - DNA, 219 bp, Klebsiella pneumoniae
atgaacaatctaagcaagatcagacgtcgagcagggcttacacagcgccagatagcgacggagcttaatctgacggccggcgctatctgccattacgaaaacgggaaacgggatctcagtattgagcaatgcagaaagattgttgctgcgctcaacaaatacggagcttgcgtcagcattgacgacgttttccccccatcaaaagccagtgccgcctaa

SEQ ID NO: 224700 - DNA, 660 bp, Klebsiella pneumoniae
atgagcatgaaatggtatgacctagcaaagtccctcatgaaaacgaagggcataaaccaggaagagctggcagagcatctcgggatcaccaaaggtgccgttagtcattggctaaacacaaggagagagcccagcctggaggacatagctaaaattcttcgcttcctcggcaagaataatttttctgtgggtgctggcggcatgataattgatgaaaacatcaagggtgatgttgagtacgttgggccctataagcgcggcaacgaatatccagtgcttagtagtgttcaggctggatcgtggcgagaggctatagaaccgtattccatcaaagatgttgatttgtggcttgagtccaatgcacatatccaaggggaagcgttctggctgctggttgaaggagattccatgacttcaccagtcggacttagcattcccgagggtacctacgttttgtttgataccggccgtgagccagttaatggcagccttgtgatcgctaagctatcagaatcaaacgaagcaacattcaaaaagctgattattgacgggggccagaaatacctgaagggcctcaatccccaatggccactagtcccagttaatggtaactgccgcattatcggtgtagccgtagaaaccaagcttcgccttatctaa

SEQ ID NO: 224701 - DNA, 285 bp, Klebsiella pneumoniae
atgaacgcataccgcgcatatgacgtgatcgaagagcgtaagtgggccgagcaaacgctcaccgaagagaagcaaaagtggattgacgatcgggcgaaggaaattatcgacgcccttccgaaagaaccgtcaggcctgttccgcttctctgtgccgatggacaaaagcccatacgaaggcctccgcagcgatgcagctggcgaggcatataacgatctcatctcggcagtagcttacgcccaggcggaatacgactgggatcaccgcactggctgcccgttttaa

SEQ ID NO: 224702 - DNA, 141 bp, Klebsiella pneumoniae
atgctggcaaatatcggcatccgctttgtgccgatcccggtagcgacagaggaagagttccaggcactgtctgccgagctttcacgaaagcttgagcagatggcggttgaagcggaaaaaagcgaaggcggtgcagcatga

SEQ ID NO: 224703 - DNA, 423 bp, Klebsiella pneumoniae; identical to SEQ ID NO: 223368

SEQ ID NO: 224704 - DNA, 303 bp, Klebsiella pneumoniae
atgaaaaagaactctggcaaacaagccgttattaacttcatcggccagcatcctggctgcagctttcaggatatccgccgcggtaccggtcttgactcttcagtggtcaattcctccctgtggcagatgcaccgtgacggccaggttaagcgtgaaggtgagtgcaggagctaccgctacaccctgatcgacacaacagccgtaaccgaaagcgatccgtctgttcagtatcgccagcgtcctggcggcgtaaacccaatgaccaatctttttaaccagtgcctggcgggagtaagaaaatga

SEQ ID NO: 224705 - DNA, 486 bp, Klebsiella pneumoniae
atgagggctgatggtgaagatgacaagaagccttcacacataaatcatgatgtgttcagggtcgacattttggatctggccgtcagtgccggcccgggcattgtgaatcaggagttcgtggagattctccactccgttgaatatgcgccagcggaagcgcgccacatgttcgatgggcgtaaggctgagaacatccggatcatcaacgtccggggtgacagcatgtccggcacgattgagccgggtgatctgctgttcgtcgacatcagcgttaagagcttcgacggcgacgggatatacgcgttcctgtacgacgacactgctcacgtgaagcgcctgcagaagatgaaggacaagctgctggttatctcagataacaagagctatgcagcctgggacccgatcgagaaagacgagatgaacagggtgttcgtgttcggcaaggtgatcggcagcatgccgcagacgtacaggaagcatgggtaa

SEQ ID NO: 224706 - DNA, 951 bp, Klebsiella pneumoniae
atgagccagttagacgaactgaaaaaatacaccacggttgttgctgataccggcgatattgaatcgattaaaaagtttgcaccccaggatgcgaccaccaacccctcgctggtgctgaaggccgcgcagctgccgcagtatcagccgctgattgccgatgcgattggcaaggcacgccgccagggaggcagcgcagaaacgcaattgattaacgcctgcgatcaggtggcagtggatatcggcagcgaggcgctgcgccatgtgcccgggcgtatctccaccgaagtggatgctcgctttgcctgggatcgcgggatgtgcgtcgcgaaggcgcgcaagctcatccagttatatgaaaaaaatggcattggtcccgagcggattctaattaaactcgccgccacctgggagggcattcgcgctgccgaagagttggagcagagcggtataaactgcaacctgacgctgctgttctctttcgctcaggcccgggcgtgcgccgaagcgggcgtctttctcatctcgccctttgtgggccgcatctacgactggtatcagaagcaccagccgcagtcagcctatcaggtggacagcgatccgggcgtggtctctgtgcgccagatttatcagtattacaaatcccatggctatgacacggtggtaatgggtgccagcttccgtcgaattgagcagatccaggcgctggcgggctgcgatcgcctgactatctctccggcactgctggacgagctggcggccagcgaaggagtgttgacccgccagttgacccccggctgcgtgacggaaacccgtcccagcccgatgacgcaggcggagttcctctggcagcatcatcaggatcctatggcagtggaaaaactagcggaagggatccgactgtttgctgtcgatcaggtgaaactggaacaacagattcagcagatgttgtaa

SEQ ID NO: 224707 - DNA, 1179 bp, Klebsiella pneumoniae
atgaaggatgtcgtgatcgtcggcgcgctgcgaacgccgattggctgctttcagggcgcattatcgcgccattcagccgtcgagctggggagcgtggtggtgaaggcgctggtggagaagacgggaatcgatccgcacagcgtggatgaggtgatcctcggccaggtgctgaccgcggggaccggacaaaatccggcgcgtcagtccgctattcgcggtgggctgcctaacaccgtatcggctatcaccattaacgatgtctgcggttccggcctgaaggctctgcacctcgctacccaggcgatccagtgcggggaagcggacgtggtgattgctggcggccaggagaatatgagccgcgctccgcatgtgcttaccgacagccgcaccggcgcccagctgggcaacagccagctgattgacagtctggtgcatgatgggctgtgggatgctttcaacgattatcatatgggcgtcacggcggaaaacctggcccgggaatttggcatcagtcgcgagctgcaggacgcctgggcgctcagctcacagcataaggcgcgcaaggcgattgattccggtcgctttcgcgatgagatcgtcccggttgtcaccgagcataacggcgcggcgcgcaccgtggataccgatgaacaaccgcgggtggatgccagcgcggaagggctggccagcctgcagcccaccttcgatcgccttggatcggtaaccgccggcaacgcctcaagcatcaatgacggcgcggcggcggtaatgatgatgagcgaggctaaagcgctggagctggggctgccgatccttgcgcggatccgcgccttcgccagcgtcggcgtcgatccggcgctgatgggcattgccccggtgcatgccacccgtcgctgtctggagcgggccggctggcggctggacgacgtcgatctgatcgaagccaatgaagcctttgccgctcaggcgatctcggttggccgggtactggagtgggatgagcgccgggtcaacgtcaacggcggcgcgatcgccctcggccaccccatcggcgcctccggctgccggattctggtgtcgctggtgcatgaaatgatcaagcgcgatgcccgcaaaggtctggcgacgctgtgcattggcggcggtcagggcgtggcgctggcggtagaacgcgcatag

SEQ ID NO: 224708 - DNA, 696 bp, Klebsiella pneumoniae
atgttaaaacgctctctggttctcgccgccctctgcggtatgtcttttgcagcaaccgcggtaacgatagatttacgtcatgaatttattgatggcggaaagagtgataaaagtaatgctgaccgcgtctccgtttctcaccgctttgccaacggcttaggctttaccgtcgaggccaaatggcgttcgggtggcgacaacggttcgcaaccctattcggacgtggtgggcaatggtcatgaagacaccatcagctggcgttggaaagcgacgtcgaactttttcctcacccccgggtttaccattgagagcaacgacagccgctccatctacaagccgcacctgcacgcgcagtacagcttcgacaacggcttctatgtcgccgctcgctatcgctatgaatacacccgctatccgaacaacgccggcaaagatgatgacaaagttaaccgcggcgacgcgtgggccggatttgtcctcggcgactggcgtacagagctgaactatgtctatgcccgcagctcggaaggggtcagccgcaacgacaataaaccctactcgcaggaatataacgtgaaggtggcctataagctggataataactggtcgccgtatggcgaaattggcaacgtcggggtgaacgaccgcagcgatcgccagacccgcttccgcgttggggtggcttactcgttctga

SEQ ID NO: 224709 - DNA, 336 bp, Klebsiella pneumoniae
atgattcttgatgcattctccctgcagggaaaagtggccgtcgtgagcggatgcgataccggtttaggtcaggggatggccctcgggctggcggaagcgggctgcgatattgtcggtatcaatatcgtcgaaccggtggagactatcgagcgggtaaccgcgctgggacgccgttttctcagcctgaccgccgacctgcgccagatcgacggtattcctcagcttctggagcgggcggtggcggagttcggccatattgatattctggtcaacaatgccggcctgattcgccgcgaggacgcgctgcgttcagcgaaaaagactgggacgacgtga

SEQ ID NO: 224710 - DNA, 657 bp, Klebsiella pneumoniae
atggctgtatctgacaaaacccgcagtggcgcgctggcggaggtactggcatctgaacggaagacactcaacgagcaaatgcgtgttgcgctgcctggcattatccagtctttcgaccctgagtctgtgacggctgttgttcagccggctatccgctacatcgagcgcgacaacgacggtaaccagtcaactcaggattacccgctgctggtggatgtccctgtcattttcccccgcggcggaggctgcacgctgacattccccgtcagcgccggcgatgaatgcctggttatctttgccgaccgctgcattgatttctggtggcagagcgggggcatacaggaaccggtagacgggcgtatgcacgatctctcggatgcgttctgtatcgtcggcccgcagtcgcaggcaaagaaaatcggcggtatcagcactacagccgcgcagttgcgtaccgatgatggctccgcaatcattgaactggccgccggcggtgcagtgaccatcaccagcccgcagataaccatcaacgggcctctgcaggtcaatggcgaaatcacatcaaccggcgatcagctcgctggcggtattagccagatcggacatacccacggcggcgttgagcctggcggtggtagcacgggggcgccgcaatga

SEQ ID NO: 224711 - DNA, 162 bp, Klebsiella pneumoniae
atggaagtatcagattttggcattaaggtttccggcccttatttggagaaactaaaaatagccttccggcttttcctcagcagtttcctgcttgcaactaatcacgatgtaacggtcgttttgagcaaggtttacatcaaaaactgcaaagaggatcagtaa

SEQ ID NO: 224712 - DNA, 309 bp, Klebsiella pneumoniae
atgtcatttggcgcatcggcaagcggctatacggcttattgcgggccatacaccattgtagcgaagattggtgaaatggacgttatcaacggagagcgggtcacctctcagaagattacaaatttaggagcggatggcatcaaaattgatatgggcctgatgcctgccaaagacggcaataactacgggtttcagtacatccaccgtccaggtagtgaatctcgcttcctgaacgtccagcttctgcaaaacagcatggatgccccgaaaatcatcggctcttttccatgcaagaaggtgccggattga

SEQ ID NO: 224713 - DNA, 1062 bp, Klebsiella pneumoniae
atgtcccaaaactggatgcggcattttgagctgcagcttgtcgactcgaaaggcaatgctactgacttcggcaccttcaaggtcacgtttaccattgactggtttaacctcagtagcgaaacccgcgtaggcaccttcaagatttataacctcgccgcagataccgttaaccgcatcgttggtgatgagttttcccggatcagagtgattgccgggtacgacgggattgcggctgatgtttccgccagccaggttggcgtagcgcgaacggtaaaccccgacgaagtgggccaactggacgggcgcaattacgggttaatatttgacggcgagatccgctataccatcaccggtaaagataaccccatcgacagctttgtgcttatccaggctgctgattctgaccgcgcatttgccacctctatcacgacccagacgctggcggccgggtatacggttgccgacgtcaatgcggcgctgatgaaggacttcaacgccaaaggcgcaactgaagggaatacgcctgccatgccggctacggtattcccgcgcggacgggtgctgttcggtatgacgcgtcatctgatggataacgtcgccgagcaatgcaaggctgactggatgtttgtcgacggcaagcgggaaatggtggcgaaaaatgaggttgttcacgaagccattaaactgaacagcgccaccggccttgtcggcatgcctcagcagaccattggtagcggcgttaacgtccgttgcctgattaaccctaacatccgcgttaatggactgatcgagctgaatcaggcttctgtgttccgtaccgtgctggggaataatgatatcgccatgacgcaagggcgtatcactgaccagaacaacaacggaaacatcaccattgaaggcacaactgcgcagcctgccagtattgcgactgacggcgtttatattgtccgtggcattatgtacactggcgatacaaggggccaggcgtggtacatggatatgatgtgtgaagctcgcggagctcaagacctgaggactcaggattcacttaatcgggggtaa

SEQ ID NO: 224714 - DNA, 303 bp, Klebsiella pneumoniae
atggccgtatcagaaatcccgctctcacctgaaaaccaggcgttttctatatcactggcgggtcagagctttcagatggcgataacctggcgggcggcgttctggtgtctggatattatggacagtaccggagccgacctgattaagggtataccgctaatcaccggcgccgacctgctggcgcagtatcgctttctcggcctggggttttcgctctatgtcggttgtgataacccggcgaatgacaaccccaccgaaagcgatcttggaattaacagccatctttacgcggtaacggagtaa

SEQ ID NO: 224715 - DNA, 576 bp, Klebsiella pneumoniae
atggatattctttctactctttttcagcagcagagccggcgaatcgggctgatagttcccagtgtcgtcatttctgaaaagcacaatgacatgctggaaattaccgaacacccggtagaggtcggtgctgcgatttctgaccacgcctaccgccggccgtctgaagtggttatgcaggtcggttttgccggcggcgggtctctgctcgattttcttgataccacttctatcgggttgagcgcagggcttagcccaaaagaaacgtaccaggaactgctggacctgcaaagcagcagggtgccttttgatgtggttacaggcaagcgactgtacaccaacatgttgatccgcgcgctggaggtcactaccgaccagacttcagaaaatgttctttccgcagtgctgacgcttcgcgaggtcattattaccagcacgactacaacgcaggtagcggcaaaggccgacatgaaactgggggctgatacctcagcggttcagaactcagggataaaaacaccaacgcccaaaaatgaatcacttttgagtcgactggctggctttgcttccggagggtaa

SEQ ID NO: 224716 - DNA, 1998 bp, Klebsiella pneumoniae
atgaacgctgaaacgctcaaggactttctgatctcgcttgggttcaaagttgatgaggctggcgccagaaaattcgatgccgtcgttgcagggacaacgcttaaagcgattgaactgggcgtcaaagttgaggcggcggcactttccgtcgtggcattcaccgcgaaaattgccagcggtctcgacgacctgtactgggcctctcagcgcacaggcgcgacggtggagggcattaagcagattgggtatgcggttagtcaggttggcggcagtgtcgacggggcccgcggctctctcgaaaatcttgcccggttcatgcgtaacaatcccggcgctgagggtttcctgaaccggcttggggttcaaacgcgtgatgccagcggcaacgtgcgggatatggcgacgatctttaccggcgtcggccagcgtcttagcagcatgccgtattaccgcgcgaaccagtacgctcagatgctgggtctggatgaaaacaccctgatggcaatgcgtcgcggtatcggccagtttagtggcgaatacaccgcgatggctaaggcgatcggctataacgctgatgtggccgccgtcagctccaataaattcatgacctcgctgcgctcctttgggctgatggcaggcatggcgcgggataaaatcggctccagtctcgctgatggacttgctggctctctcgacaggctgcgccgccagatactggaaaacttcccgaaaattgaaggggctatcactgctggtgtcaaaggtgtcctgtggtttggtgaaatcattggccgggtggtttatcggttgatacagctcaccggggacattatcaactggtggaaatcactcggtaccgaaaccagacaagttatcgaggtgtttggggcgctaatgattgcctggcgtctcctgaatagtgcctttgcgatgtcgcctattgggcgcgtcattatgctgggtgctgcgctgataggtctttacgacgattaccgtacatggaaagaaggcggccagtcgcttatagactggggaaaatgggagccgggtatcaaatatgcccaaaaggcttttgctagtctcagtaaggatttcggcggcatctatgtgaaggttaaagaccttggctctgccatcgtcgatctgggtaagcgattccttgaattcattaacatcgatacatcgaaatttaatggcaaatggctgtttgaccagattatcgaaagcgtccgcagttcaatcaaaatccttggttcgctggtggatgcgctgcgaaaggttattagtggtgatttctccggcgcatgggattcgcttaaaggcgcagccgcagcgtggagtgacagtccagttattcggggtgccgcctctgtcgggcaggggttatgggataaggctgttgactggtggaatggtgatgccacgcagtacgggcaatcagttaaacgaccgtcaccttcaaaagcaggggctcagttgcttggatggatggctccaatgatgggtaaactggaggctatgtataacctgccttctggtcttctgcgaagtgtcgctatcactgaatcaggggggaatcagttcgctgtatccggtgctggcgcacagggaatgttccagtttatgcctggtaccgctcgggatatggggctacgcgggaatgatgtcttcgacccgatcaagtcagcggaagcggcggcgcgatatctatcgatgctcctgcagaagaacggcggagatctgggtaaagctctggcctcgtataactgggggatcggcaacgtgcaaaagtacggcatggcactgatgccgcaggaaacccgtcaatatatcccgaaagtgctaagcaatatgcctggcgcaggcgctcaggttcagcagcagaatacctatcacatctacggcggtaatgctcaggaaattgggcaggaagtcagtcgccgccagcttgatgctaatgccagggtgctgagaaataaccaaactggagcaggatga

SEQ ID NO: 224717 - DNA, 153 bp, Klebsiella pneumoniae
atgcgcccggtggatgccgggctcatccattacaccgacctgaaagatggatcattagacctggctgatattgcccgtttgaatgactggctggaactgaaagccgataacgaaaaccgcatagcgaaatggagagaggctaatgaacgctga

SEQ ID NO: 224718 - DNA, 615 bp, Klebsiella pneumoniae
atgaaaagcgggttaacggttcgcgaggacaattacgccagtgttctcgatgcgctgaaacagttatccggtactgatgtgttggtgggaattcctgcggataaggccgagagggaggatggggcaccatataacaacgctgagttgggttatttgcactcgacaggggccaccatcacaatccctgagcacacaacaaccatttatcgccaagtggatgcgcatggtgatttaaagcggaatggtcgatttgttaaggcatcaaaaagcaatttttctaccacgcacacggttcctgcgcaggtggtcacgatcccgccacgacctttccttgatatcggcattgaggattctcgcgataagacgacggccaagctaaaactcgctgcgcaggcggcgcttgacggtaacgccgtgttggctgagaaacaccttgagtccgctggacaggttgcccgcgatgcggcaaaggcggttattggcgatggtgaccgactgacgccactttcggaaaaaacgaaagccagacgccgtagtaatggtcaggacgtaaaaccgctttatgaccatgggttccttttgcgggcgattaactacgtggtgaggaaaaaataa

SEQ ID NO: 224719 - DNA, 468 bp, Klebsiella pneumoniae
atgagccggttaaccgccattatcagcgccattgtgatctgcctgatggtttgccttgggtggctggccagtcactaccacagcaatgccaccgagttcaaaaggcagcgggacaaagtgactgagcaactcagcctggcaaatgacacgatcgcggacatgcagacccgccagcgtgacgtagccgcactcgatgccaaatacacgaaggaattagccgatgcaaacgctgaaaatgatgctctgcagcgcaagcttgataatggtggtcgggtgctcgtcaaaggcaagtgtccagtgtcagccgcaacccaaaccgccggcgccgccagcgtgggcgatgatgccaccgtcgaactctctgcagttgctggacgaaacgttctcggtatcagagccggcatccagcgagatcagacggccctgaagacgctgcaggaatacatcaccacgcagtgcctgaggtaa

SEQ ID NO: 224720 - DNA, 504 bp, Klebsiella pneumoniae
atgacgccatcaatgaggaataaactgattggcgtgatcgccggcggcggtggcgccatagccattgcctctgcgctcatcactggcccaaccgggaacgatggtcttgaaggtgtgcgatacaacccttatcaggatgtggtaggcgtctggactgtctgctatggccatactggcaaagacatcatgctcggcaagaagtacaccgaggccgaatgccgtgcccttctcagtaaagacctgaacgccgtcgcccgccagattaacccatacatccagaagccgatccccgaaacaatgcgcggggctctgtactcgttcgcctataacgtcggcgctggcaacttccagacctccacgctgctgcgcaaaatcaaccagggcgaccagaaaggtgcatgtgatcagctgcgccgctggacctacgccaagggtaagcagtggaagggtctggtaactcgccgcgagattgagcgcgaagtttgtctttgggggcagaaatga

SEQ ID NO: 224721 - DNA, 648 bp, Klebsiella pneumoniae
gtggccaccgccgatctgagcggtgcgacgaaagggcaactggtggctttcgcagaaaacgcgcaattcaccgctacggcgcgcagccgtggccggaagaaggtatatagcgaggtgaagcaaaaaatggttaacccggacgggccgccgatgagcggcagccagtcacgtgctaaggggtcctcaatcgctctcgttctgcccgttgaatactcgacagccagctggcgccgcgccctcctatcgctggaagaccaccagaaatcctggttgctgtggaactacagcgacaatatccgctgggagcaccaggagacgatcacccggtgggtatgggagcaattcagcaagaagctggccggcgtacgcattgcgaagaagactgtcgatcgcctccgtcaacttatctggctggcggcgcaggacgtcaaagccgaactggcagggcgggagacgtatgaataccagtcgctggcggagctggttggtgtagcaaagtcaacatggacagaaacctacctccctcattggctggcgctgcgcagcagttttgtgaagcttgatagcgactctctcatatcggtaacgcgatcacgttcacaacaaaaggcgacaaatttagatgtaagtcttgcaaaaccgaactga

SEQ ID NO: 224722 - DNA, 1242 bp, Klebsiella pneumoniae
atgacgtccggtaaaagaaactaccttctgttgagtcttttcgatttcctctacctgttcgcctggtcgtcgaccatggctttcttcgttatctggaccacccagcatcttggcatcagcgccacgaagaccgggctgctttactcggtcaacgcctttatcgccctgctgatgcagcctttcttcggctttatctctgacaagttcggcctgaaaaaacggcttatctggctgctggtcgccctgctcctgccggtgggccccttctttatctacgtttacgcgccgctgctggtgcacaacttttggtttggcgccttgctgggagggatctatctggggatcatctttaactccggctgcggagtaatcgactcttatatcgataagatttcccggcgctatcagttcgaatatggtcgtgtacggatgtggggctcgttaggctgggcagcggcggcctggattgtgggtaaatatatcgacagcaatcctaatctggccttctggctcgccagcctcgccattgtcatcgccgccatctgctttatgctaaccaaaattgaattaaccgacgccgatgtggcgcgaagcgaatcgctgaaggtctctcatgcccttgagctggcgaagaatggtcagttctggatgctgctgctctttaccctgttcgtcacgcagatttacgacacctacgatcagcagtttgcccagtacttctcgctacagttcccgacgccggaggaaggcaaccgctggtacgggatcctcgcgtctattcaggtctgcggtgaaaccctgttcctctgcctgatgccatggtttgttaaccggaccggcgccaaatgggcgctgatcatcgccgggctgatcatgtcggtacgtattgtcggctcagccgtgcccctcggcccggtgtggattggggcggtgaaaatgatgcatgctctggagaagccgttgattctggtatcggtctttaaattcatcgccgccaacttcgaccacaagctctcttcgacggtctatttgctggtgctgttcgtcgcctcgatcgccaccgctatttactctccgctggcaggctatctgtacgataccattggcttcgccaacacctatctgattctcggcagcgtcgccgggctctttaccctgatctctattttcacgctgcaggataagcgcgagccgaaaaaaaccggcgccaccccctccgcagccattaacccggcgcaataa

SEQ ID NO: 224723 - DNA, 621 bp, Klebsiella pneumoniae; identical to SEQ ID NO: 138610

SEQ ID NO: 224724 - DNA, 642 bp, Klebsiella pneumoniae; identical to SEQ ID NO: 138611

SEQ ID NO: 224725 - DNA, 324 bp, Klebsiella pneumoniae; identical to SEQ ID NO: 138612

SEQ ID NO: 224726 - DNA, 1272 bp, Klebsiella pneumoniae; identical to SEQ ID NO: 138613

SEQ ID NO: 224727 - DNA, 426 bp, Klebsiella pneumoniae; identical to SEQ ID NO: 138614

SEQ ID NO: 224728 - DNA, 231 bp, Klebsiella pneumoniae; identical to SEQ ID NO: 136900

SEQ ID NO: 224729 - DNA, 876 bp, Klebsiella pneumoniae; identical to SEQ ID NO: 136888

SEQ ID NO: 224730 - DNA, 339 bp, Klebsiella pneumoniae; identical to SEQ ID NO: 136887

SEQ ID NO: 224731 - DNA, 348 bp, Klebsiella pneumoniae; identical to SEQ ID NO: 136886

SEQ ID NO: 224732 - DNA, 231 bp, Klebsiella pneumoniae; identical to SEQ ID NO: 136885

SEQ ID NO: 224733 - DNA, 834 bp, Klebsiella pneumoniae
atgtcgcagctgagttttgccgatgtgttcaacatggccagagaaaccgctgagaatagccctgtgatccaggtcagggcgcaggtcgcggaagtggtgccttctgttcagcgtttgatgagtgagcagcacagccggagccggtttatccacgtgtttaaagacacgggtcgccatctgggacgctgggaggtgttcagtgattttctgtcactggccgccagtgaactggatatggcccggataagagcgccggaaagcattgagcactgccggaaaatctgcgcgcgttatgaggcgtcagatatcgcgaagatgcaggagatgttctgcatgatggtgtgcgcactggaggctaaatttcatgatttcctcggcgccattttcatggtgcttgagctgggcgttaactttcgcgggcagtattttaccccatatccggtccagtccctcatggcccggatgctgatgccgggcgtcagggacactatccgccgggaagggatagccacggtcagcgacccggcctgtggtgccgccgggatgctgattgcatatgccgaatgcctgctcgaagcggatatcaatccttccatgcacatgttcggcagctgcatcgatatcgatccggtggcggcagatatggctttcatccagctgtctctgctggggattgccgccgaagtggtcacgggtaacaccctgacaatgcagttccggcgggtaagatacactcccgtgtactacctcaatgactttgaaaaacggctggctgacctgacccggttcagggcgatgcgggactttatgcgcgggatacaggaggctgcgtaa

SEQ ID NO: 224734 - DNA, 399 bp, Klebsiella pneumoniae; identical to SEQ ID NO: 111119

SEQ ID NO: 224735 - DNA, 687 bp, Klebsiella pneumoniae; identical to SEQ ID NO: 111120

SEQ ID NO: 224736 - DNA, 369 bp, Klebsiella pneumoniae
atgaatgctgtattaagtgttcagggctctgctgtccctgaaaaaaccaaaccgtcttttctgtctcgcgttttcaataaaaagaaagccctgaaagtcgctaaagttgcgctgccggttgctgctgtggcggcgttcttcccggatgctgcgatggccaccaccacggcaaccgacctgatgaagtccggggatgcgaccgttaaaggcacgtttggtaagcagtccagtgtcgtcaaatgggtggttctggcagaagttgtcgccggcggcatcatgtacatgatgaccaaaaacgtgaagttcctgtttggcttcgcgattatttccacctttatcaccatcggtatgtcggtcgccggttactga

SEQ ID NO: 224737 - DNA, 309 bp, Klebsiella pneumoniae
atgattatcgccgctgaagtgaaacgtgatgaacaggggtactggacacatcctgcgctggtacgaagtggctgtgaaacttccgcagaattaagttactggctcagaacccataaactccagtgctttgtgatgacaatgcgcgatgaagcgcctgaagctttcgctgccggatttacggatgaagccccggatgcccgtggctggataccggagccaccggatgatgatggctggtctctgggatctgtccacgataccggcgacggacccgtctgctactggtttcgtcataccacaaaatcctga

SEQ ID NO: 224738 - DNA, 552 bp, Klebsiella pneumoniae
gtgaaaaaaatgaaccgtacgctccgcagatgttgtctgtccgggcttatcagcctgtctttgtttgcaccagttccggccgtgtatgccgccagcatcgagacggggtattcgccggaaggaacggctctgcagctggtcctgaagactattaattctgcacagcaggaaatccggctgatgggctattcctttacgtctccggaggtggtgagcgcgcttgtcagggcaaaacaccggggtgtggatgtgaaaatagtgcttgatgagaagggaaacagaagcaaagccagccaggcggcgatgaatgttgtggtgaatgccggtatcccactgcgcaccaacggccactacgccatcatgcatgacaaagttattattgttgataatcatacggttgagtcaggcagctttaatatgacccgctctgcgtcctcgagaaatagtgagaacgtgctggtgattaatgacgtgccggaagtggcgcaaacctaccttcagcactggcagtcgcgctgggacgggggaacggagtggcattcttcatactaa

SEQ ID NO: 224739 - DNA, 564 bp, Klebsiella pneumoniae
atgaccgagaaaaaagcccctgtgattgtggtcagaaaatcacgtctgaaagaccctgaatccggacagacacatcctgccccccctctccgggagataaccaccggagccccggcggctcttgccgcgcctgataccccggatgcgaaaaacacgacggcccgctctccggataaacggaaccggcatgcgcagaaaagccgcgacagaatggcgctctttgccagaacctttccggcactgtggccggagtttgagaaggggaaattccggcccatgaaggtggggattaaagagcaggtgaaggcgtacatcgatgcgcatcctgactgcggcatgacattcgggacgtggatacaggccatccggactgttaccagccgcattgagtaccagcgctgcctgaaggaaggaaccccccgctatgacattcacggtgagcccgtgggcacggtaaccgcgccggaggcggagtatgcccgcctccaggtctcccgaatcagggcgaaaatggacctctcccgggcggccagggagaaaaaaaaccatgacgcaactgaataa

SEQ ID NO: 224740 - DNA, 612 bp, Klebsiella pneumoniae
atgacgcaactgaataagtccgggcaccttgcctggtgcggcctgattgccctggcgctggcccggcaggacggcggcgtccggtcggctgctcaggcaaacctctttctcacccgctggctggccacggccctgaagcagcggcgttttccgcgggaggtctcgcaggacatcagctggctgctggctcaggggcgacggcatggcatcaaggccagactgcccgaaaaaatggattacctctggcgctcctgctccggcgagctgtctgaacagaacgacctgttccggctgacgtatgccctggaaactgcgaaggatatgctctggaactaccgcctgctgaacgacagggaatgggccggccggtatgccgtcaccctgaatgccggcgtgaacggcatttatctctcccggactcacctcgatgcggcctttgacgacaatggccgacagataaatccgctgctgacgcgtctgaccgggaatgtggcagacctgatgccgctgttcagccgctgtggctggctggcagcgcctgaaaggaatacctccctgccccacctgtttacgctgatggccggacagggagtgccaggaaagggggattag

SEQ ID NO: 224741 - DNA, 162 bp, Klebsiella pneumoniae; identical to SEQ ID NO: 183208

SEQ ID NO: 224742 - DNA, 1536 bp, Klebsiella pneumoniae
atgatcaccgagaatctggtcgatcagccgttcctcgataaatactgcgtgggatacgacgagaaaacgctgcccgccggtgcgccagccaatggtcattacaaagcttacattcttggccagggcactgacggtatcgccaaaacgccggagtgggcctcgacgattaccggtattccgcgcgaacgcattgttaaactggcgcgcgaaattgccaccgccaaaccggcctatattagccagggctggggtccgcagcgtcacgccaacggtgagatcgccacccgcgccatctcaatgctcgccattctgacgggtaacgtcgggatcaacggcggcaatagcggggcgcgcgagggctcgtatagtttgccttttgagcgtatgccgacgctggagaatccggttgagaccagtatctcgatgtttatgtggaccgatgcgattgagcgcggcccggaaatgaccgctctgcgcgacggcgtacgcggtaaagataagctcgacgtgccgatcaaaatgatctggaactatgcgggcaactgtctgattaaccagcattctgagatcaaccggacccacgaaatcctgcaggacgacaagaaatgcgagatgattgtggtcattgactgccatatgacctcctcggcgaaatacgctgatattctgctgccggactgtaccgcctccgagcagatggatttcgcgctggatgcctcctgcggcaacatgtcctacgttatctttgccgatcaggccatcaagccgcgctttgaatgcaaaaccatctatgagatgaccagcgaactggcaaagcgtctgggcgtcgaagagcagtttaccgagggccgtacccaggaaggctggatgcgctatctgtatgagcagtcgcgcaaagcgattcccgacctgccggatttcgacaccttccgtcagcagggcatctataagcagcgcgatccgcaaggtcatcatgtggcctacaaagccttccgtgaggatccgcaggctaatccgctgaccacgccttcgggcaagatcgaaatttactcgcaggatctggcgaaaatcgcggccacctgggagctgccggaaggggatgttatcgatccgttgccgatctacaccccgggtttcgaaaactacaacgatccgctgacagcgaaatacccgctacagctcaccggcttccactataaatctcgcgtccactcgacctacggcaacgtcgatgtgctgaaggccgcttgtcggcaggagatgtggattaacccgatcgatgcccgcaagcgcggcattgccaacggcgatcgtattcgcatcttcaacgatcggggtgaagtgcatatcgaagcgaaggtgacgccgcgcatgatgccgggcgtcgtcgcgctgggggaaggggcctggtacaacccggacgcctcgcgtgtggatcaggcgggcagcatcaacgtgctgaccacccagcgtccgtcgccgctggcgaagggaaacccgtcgcataccaacctcgttcaggttgagaagctgtaa

SEQ ID NO: 224743 - DNA, 426 bp, Klebsiella pneumoniae
ttgatcttcctgcccttaacggtagctgaagatgactgggctggatggaaaatcctgcatggtgcattgggagagcagatagaattggttggcgacgatctgtttgtgaccaacgtaaagtatattcagcgcggcattgacgaaaaccttgccaattcagcattgattaaactcaaccagattggttccctgagtgaaacctttgatgcggtacaactttgccatgacaacaactggggcacctttatctcacaccgcagtggtgagacagtggacagctttatcgccgatatgacagttgcaatgcgcgcaggtcatctcaaaacgggagctccatgccggggtgagcgtattgaaaaatataaccagcttatgagaattgaggatgagctgggttcatcggcgcaatttgccggaaagtcgtaa

SEQ ID NO: 224744 - DNA, 858 bp, Klebsiella pneumoniae
atgatggcattattactggagccactgcagttcacctttatgagtcacgcactgctgatttcactggtagtttccataccctgtgcgctgctgtcggtctttctggtcctgaaaagttgggcactgatgggtgacgcgatgagtcatgcggtttttcctggcatcgtgcttgcctggattctggggttacctctggctacaggggcattcgtcgccggagtattctgtgcggtggcgacgggatacctgaaagacaacagccgaatcaagcaagatacagtgatggggattgttttttctggcatgtttgccgcaggtctgatcttgtatattgcagtcaaaccagacgtacatcttgatcatattcttttcggcgacatgctcgggataaccatcggcgatataatccagacggtgattattgccggactggttacacttgttattagcgtaaaatggcgggattttttgctgttcagctttgattatcaacaggcgcaggcaagcggtttgcatacgagatggctgcattatgggctgctgtgcatggtctccctgaccattgtggcgacgctgaaagcggttggtatcattctctctatttctcttctcattgcgcctggtgccattgcggtactcctgacacaacgctttcatattgcgctcctgctggcgactggcatatcgatattggtctcaatgactggtgtctggctgtccttttttatcgacagcgcgccagctccgacaattgttgtcttattcgcggtcatgttcatcatgacgtttaccgttaccagcatcaacgcacgcacaaaggaaaatgccgaaccacgggatttgttatcatccgattag

SEQ ID NO: 224745 - DNA, 858 bp, Klebsiella pneumoniae
atgaacgtgctactggaacccttcagctatgaatatatgctcaatgcgatgtgggtctcggcgatggtcggcggtctctgcgctttcctgtcatgctatctgatgctaaaaggctggtcgctgattggcgatgcgctgtcgcactctattgtcccgggtgttgcgggggcatatatgctggggcttccgttttctctgggagccttcttttccggcggactggcagcgggcagcatgctgtttcttaaccaactcactcgcttaaaagaagatgccatcatcggcctgatcttctcgtccttttttggcctggggctgtttatggtgtcattgaacccgacatccgtgaacattcagaccatcgtcctgggcaatattctggcaatcgatccggcggatatcctgcaactcactatcattggcattctctcgatcatcgtgctttttttcaaatggaaagatcttatggtgacctctttcgacgagaatcacgcccgtgctattggattgcatccgggcagattaaaaatcctcttcttcaccctgctgtcggtttcgaccgttgcggcgctgcaaacggttggtgcctttctggtgatctgtctggtggtgactcccggtgcaacagcatggttgttaaccgatcgttttccccgcctgctcatgattgctgtaactattggcagtgtgaccagtttcctcggcgcgtgggtcagttactttctggacggcgcgacaggtggaatcatcgtggtggcgcagacactgctgtttcttttagcatttgtctttgcgcccacccatgggcttttggcaaatcgtcggcgtgcgcataaagcgctggaggatcgctcatga

SEQ ID NO: 224746 - DNA, 828 bp, Klebsiella pneumoniae; identical to SEQ ID NO: 107019

SEQ ID NO: 224747 - DNA, 915 bp, Klebsiella pneumoniae
atgctctcaataaaaaaagtaaccatgctcttggggtgcctagtcctcacctgctcgatagcatttcaggcgagtgcagctgaaaaattcaaggtcattacaacttttaccatcatcgcagatatggccaaaaacgtggctggagatgctgcagaagtctcatccataaccaagcctggtgcagaaattcatgagtatcagcctacccctggcgatattaaacgtgcgcagggggcacaactgattctcgccaatggtatgaatctggaattgtggttccaacgcttttaccagcatctcaatggggttccagaagtaattgtctcttcgggtgtgacgccagtagggatcaccgaagggccctatgagggcaaacctaacccccatgcctggatgtcgccagataatgctctgatttacgtcgataatattcgtgatgcgtttataaaatacgatccgataaatgcacaaacctaccaacgtaatgccgatacttataaagccaagattacccaaacccttgcccccctgcgtaagcagattgcggaactccctgagaatcagcgatggatggtcaccagtgaaggggctttttcttatctcgcacgcgatttggggctaaaagagctttatctgtggccgattaatgccgatcaacaaggaacaccgcagcaggtacgtaaggttgttgatatagttaagaaaaatcatatcccggcagtctttagcgagagtacgatttccgataaaccagcgcgtcaggttgcgcgtgaaaccggcgcgcactacggtggtgtgctctatgtcgattccctgagcacagaaaacggcccggtacctacgtatatcgaccttctgaaggttactaccagtacgctggtacagggaattaaagccggaaaaagggagaaataa

SEQ ID NO: 224748 - DNA, 975 bp, Klebsiella pneumoniae; identical to SEQ ID NO: 94106

SEQ ID NO: 224749 - DNA, 726 bp, Klebsiella pneumoniae; identical to SEQ ID NO: 94105

SEQ ID NO: 224750 - DNA, 834 bp, Klebsiella pneumoniae; identical to SEQ ID NO: 94104

SEQ ID NO: 224751 - DNA, 1374 bp, Klebsiella pneumoniae; identical to SEQ ID NO: 94103

SEQ ID NO: 224752 - DNA, 687 bp, Klebsiella pneumoniae; identical to SEQ ID NO: 94100

SEQ ID NO: 224753 - DNA, 240 bp, Klebsiella pneumoniae; identical to SEQ ID NO: 94098

SEQ ID NO: 224754 - DNA, 612 bp, Klebsiella pneumoniae; identical to SEQ ID NO: 94096

SEQ ID NO: 224755 - DNA, 450 bp, Klebsiella pneumoniae; identical to SEQ ID NO: 94095

SEQ ID NO: 224756 - DNA, 909 bp, Klebsiella pneumoniae; identical to SEQ ID NO: 94086

SEQ ID NO: 224757 - DNA, 558 bp, Klebsiella pneumoniae; identical to SEQ ID NO: 25303

SEQ ID NO: 224758 - DNA, 861 bp, Klebsiella pneumoniae; identical to SEQ ID NO: 25304

SEQ ID NO: 224759 - DNA, 162 bp, Klebsiella pneumoniae; identical to SEQ ID NO: 94085

SEQ ID NO: 224760 - DNA, 252 bp, Klebsiella pneumoniae; identical to SEQ ID NO: 94084

SEQ ID NO: 224761 - DNA, 684 bp, Klebsiella pneumoniae; identical to SEQ ID NO: 94083

SEQ ID NO: 224762 - DNA, 444 bp, Klebsiella pneumoniae; identical to SEQ ID NO: 94082

SEQ ID NO: 224763 - DNA, 768 bp, Klebsiella pneumoniae; identical to SEQ ID NO: 94081

SEQ ID NO: 224764 - DNA, 390 bp, Klebsiella pneumoniae; identical to SEQ ID NO: 94079

SEQ ID NO: 224765 - DNA, 192 bp, Klebsiella pneumoniae; identical to SEQ ID NO: 94078

SEQ ID NO: 224766 - DNA, 324 bp, Klebsiella pneumoniae; identical to SEQ ID NO: 94077

SEQ ID NO: 224767 - DNA, 249 bp, Klebsiella pneumoniae; identical to SEQ ID NO: 94076

SEQ ID NO: 224768 - DNA, 369 bp, Klebsiella pneumoniae; identical to SEQ ID NO: 94074

SEQ ID NO: 224769 - DNA, 429 bp, Klebsiella pneumoniae; identical to SEQ ID NO: 94073

SEQ ID NO: 224770 - DNA, 591 bp, Klebsiella pneumoniae; identical to SEQ ID NO: 94072

SEQ ID NO: 224771 - DNA, 828 bp, Klebsiella pneumoniae; identical to SEQ ID NO: 94071

SEQ ID NO: 224772 - DNA, 1986 bp, Klebsiella pneumoniae; identical to SEQ ID NO: 94070

SEQ ID NO: 224773 - DNA, 714 bp, Klebsiella pneumoniae; identical to SEQ ID NO: 94113

SEQ ID NO: 224774 - DNA, 1023 bp, Klebsiella pneumoniae; identical to SEQ ID NO: 94112

SEQ ID NO: 224775 - DNA, 354 bp, Klebsiella pneumoniae; identical to SEQ ID NO: 94111

SEQ ID NO: 224776 - DNA, 360 bp, Klebsiella pneumoniae; identical to SEQ ID NO: 94110

SEQ ID NO: 224777 - DNA, 2580 bp, Klebsiella pneumoniae; identical to SEQ ID NO: 94109

SEQ ID NO: 224778 - DNA, 384 bp, Klebsiella pneumoniae; identical to SEQ ID NO: 5266

SEQ ID NO: 224779 - DNA, 690 bp, Klebsiella pneumoniae; identical to SEQ ID NO: 106984

SEQ ID NO: 224780 - DNA, 366 bp, Klebsiella pneumoniae; identical to SEQ ID NO: 106983

SEQ ID NO: 224781 - DNA, 312 bp, Klebsiella pneumoniae; identical to SEQ ID NO: 5263

SEQ ID NO: 224782 - DNA, 567 bp, Klebsiella pneumoniae
atggaacacggtgcccgtttaagtaccagtcgtgtaatggccatcgcctttatatttatgtcagtgcttattgttctcagcctctctgttaacgtcattcagggggtgaataactaccgtcttcagaatgagcaacgcactgccgtgacgccaatggcatttaatgccccctttgccgtgtcacagaacagtgccgacgcctcttatttacagcagatggcgctgtcatttattgccctccgtctgaatgtttcatcagaaaccgtcgatgcctcacatcaggcgcttctgcaatatatccgcccgggcgcacagaaccagatgaaagttattctggctgaagaagcgaagcgtattaaaaacgataacgtgaactcagcctttttccagaccagtgttcgtgtctggcctcagtatggccgtgtggaaattcgaggtgtgcttaaaacctggattggtgattcaaaacctttcactgatatcaaacattacatccttattctgaagcgggaaaacggggtgacctggctggataatttcggggaaacagacgatgagaaaaaataa

SEQ ID NO: 224783 - DNA, 729 bp, Klebsiella pneumoniae
atgagaaaaaataatacggcaataatattcggcagcctgtttttttcctgcagcgtgatggccgcaaacggtacgctggcccccaccgtggtgccaatggtgaacggtggtcaggccagtattgccatcagcaataccagcccgaatctgtttaccgttcccggtgaccggattatcgccgtgaacagtctggatggtgccctgaccaataatgagcagaccgcctccggcggtgtggtggttgccaccgtcaacaaaaagccctttacgttcattctggaaacagaacgtggtctgaatctttccattcaggccgttccccgtgaaggcgcggggcgtaccattcagctggtcagtgacctgcgcggaaccggagaagaagccggtgcgtgggaaacgtccacgccttacgaatccctgcttgtgaccatcagccaggccgtccgtggcggaaaattacccgcaggctggtatcaggtcccagtgacaaaggaaaccctgcaggccccggcggggctgtcttcagtggcagatgccgtatggacggggaatcacctgaagatggtccgctttgccgtggaaaataaaacgctgtctgccctgaatatccgggaaagtgacttctggcagccgggaacccgtgccgtgatgttcagccagcctgccagccagttactggcaggtgcgcgcatggatgtgtatgtcatccgtgacggggagggcaactga

SEQ ID NO: 224784 - DNA, 1428 bp, Klebsiella pneumoniae
atggccagtatcaataccattgtgaaacgcaagcagtacctgtggctggggattgtggttgtcggtacagcctccgcgattggtggggcactgtatctgtctgatgtggacatgtccggtaacggtgaaaccgtggctgaacaggagcctgtgccggatatgaccggtgtggtggatacgacctttgatgacaaggtgcgtcagcatgccaccaccgagatgcaggtgacggcagcgcagatgcagaagcagtatgaggaaatccgtcgtgagctggatgttctgaacaaacagcgcggtgatgaccagcgtcgtattgaaaagttgggacaggacaatgccgccctggcagagcaggtaaaagccctgggtgctaatcccgtcacggcgaccggtgagcctgtaccgcagatgcctgcctcaccgcccggcccggaaggcgaaccacagccaggaaacacccccgtatccttcccgccgcagggcagcgttgctgttccaccgccgacggcgttttatcccgggaatggtgtcacgccaccaccacaggtgacgtaccagtctgtgccggtgcctaaccggatacagcgtaaggtgtttacccgtaatgagggaaaacagggaccatcactgccgtacattccgtcaggaagttttgcgaaagccatgctgattgaaggggcggatgccaatgcctctgtcaccggtaatgaatccacggtgccgatgcagctgcgtatcaccggcctggtggaaatgccgaacagcaagacgtatgacgcaacgggatgttttgtgggtctggaagcctggggggatgtgtccagtgagcgtgccattgtacgcacccgcaatatcagttgcctgaaggacggcaaaactattgatatgccgattaaggggcatgtcagcttccggggtaaaaacggtatcaagggcgaagtggtgatgcgtaacggcaaaatcctcggctgggcatggggcgcgggatttgttgacggtatcggtcagggaatggagcgcgcctcccagccggctgtcgggctgggtgccacagccgcttacggggctggtgatgtcctgaaaatgggtatcggtggcggcgcatcgaaagccgcacagacgctcagtgactactacatcaaacgtgccgaacagtatcacccggtgataccgattggtgcgggcaacgaagtgaccgtggtgttccaggacggcttccagctgaaaaccgtggaagagatggcgctggaacgcacgcagagcagagcggaagaagacaatccggaaagtccggttcctgttccgccatcggctgaaagtcatcttaacggctttaatactgaccagatgctgaagcagctgggcaacctgaatccgcagcagtttatgtccggcagccagggagggggcaacgatggcaaataa

SEQ ID NO: 224785 - DNA, 591 bp, Klebsiella pneumoniae; identical to SEQ ID NO: 7948

SEQ ID NO: 224786 - DNA, 198 bp, Klebsiella pneumoniae; identical to SEQ ID NO: 5330

SEQ ID NO: 224787 - DNA, 252 bp, Klebsiella pneumoniae; identical to SEQ ID NO: 5331

SEQ ID NO: 224788 - DNA, 516 bp, Klebsiella pneumoniae; identical to SEQ ID NO: 7946

SEQ ID NO: 224789 - DNA, 2628 bp, Klebsiella pneumoniae
gtgaataacccacttgaggccgtcactcaggcggttaactccctcgtcacagcactgaaactgcctgacgaatccgcaaaggccaatgaagttctgggcgaaatgagcttcccgcagttcagccgtctgctgccgtaccgtgattacaaccaggaatccggtctgttcatgaatgacaccacgatgggctttatgctggaagccatccccatcaatggggcgaatgagtccattgtggaggccctcgatcacatgctgcgcaccaaactgccgcgcggtattccgttgtgtatccatctgatgtccagtcagctggttggtgacaggattgaatacgggctgcgtgagttctcctggtcaggtgaacaggctgaacggtttaacgccattacccgggcctattatatgaaagcggcagcgacacagtttccgctgccggaggggatgaatctgcccctgaccctgcgccattaccgggtgtttatctcgtactgttctccttcgaagaaaaaaagccgggccgacattctggaaatggaaaacctggtgaaaatcatccgggcgtcgttacagggggccagtatcaccacacagacggtggatgcacaggcctttatcgatattgtcggggagatgattaaccataacccggactccctgtacccgaaaagacgtcagctggacccgtattctgatctgaattatcagtgtgtggaggacagttttgatctgaaagtccgggctgattacctgacgctgggcctgcgtgagaacggcaggaacagcacggcccgcatcctgaatttccatctggcccgtaacccggaaatcgccttcctgtggaacgtggccgacaactacagcaacctgctgaacccggaactgtccatctcctgtccgttcatcctgacgctgactctggtggtggaagaccaggtgaaaacccacagcgaagccaacctgaagtacatggacctggagaaaaagtcgaagacctcctatgccaaatggtttccgtccgtggagaaagaggcgaaggagtggggggaactgcgtcagcggctgggctccggtcagtcctccgtggtgtcctacttcctcaacatcacagcattctgcaaggacaataatgaaacggcgctggaagtggagcaggacatcctgaacagctttcgtaaaaacggttttgagctgatttcaccgcgctttaaccacatgcgcaatttcctgacctgcctgccctttatggccgggaaagggctgtttaaacagttgaaagaggccggagtggttcagcgcgcagagagctttaatgttgccaacctgatgccgttagtggcggataaccccctgacaccggcaggtctgctggcacccacctaccgtaaccagctggcgtttatcgatattttcttccgggggatgaataacaccaactacaacatggcggtctgtggcacctccggggccggtaaaaccgggctgatacagccacttatccgcagcgtgctggactccggaggctttgccgtggtgttcgacatgggggatggatacaagtccctgtgtgagaacatgggcggggtgtatctggacggtgaaaccctgcgttttaacccgtttgcgaacatcaccgatattgaccagtcagcggagcgtgtccgtgaccagttgtcagtgatggccagccccaacggtaacctggatgaagtgcatgaaggtctgctgttgcaggcggtcagagcctcctggctggccaaagagaacagagcacgtattgatgacgtggtggatttcctgaaaaacgccagtgacagcgagcagtatgccgagtcaccgactatccgcagccgtctggacgaaatgattgtgctgcttgaccagtacactgccaacggcacttacggccagtattttaactctgatgagccgtccctgcgggatgacgcaaaaatggtggtgctggagctgggcggactggaagaccgtccgtcactgctggttgcggtgatgttctccctgattatctacatcgagaacaggatgtaccgcacgccgcgtaacctcaagaaactgaacgttattgatgaaggctggcgtctgctggacttcaaaaatcacaaggtcggtgaatttattgagaaaggctaccgtacggcccgccgtcataccggtgcctatatcaccatcacacagaacatcgtcgactttgactctgataaggcctccagtgctgcccgcgcggcatggggtaactcctcctacaaaattatcctcaaacagagtgcgaaggagttcgcgaaatacaaccaactgtatccggaccagttcctgccactgcagcgcgacatgattggtaagtttggtgcggccaaagaccagtggttcagttccttcctgctgcaggtggaaaaccattcctcctggcaccgtctgtttgtggacccgttaagccgcgccatgtacagctctgacggcccggattttgagtttgtgcagcagaagcgtaaagaggggctgagtattcatgaggcagtgtggcagctggcgtggaagaagtcagggccggaaatggcttcgctggaagcctggctggaagaacatgagaaatacaggagtgtggcatga

SEQ ID NO: 224790 - DNA, 387 bp, Klebsiella pneumoniae
atgagttcaacgcagaaacccgccgacgtcatggcagaacgacgcagccactggtggtggacggtgccgggatgcctggcaatggtgttactgaacgcagccgtcagttacggcattgtcagactgaacgcaccggtgactgtcgccttcaacatgaaacagaccgtggatgcgttttttgacagagccagtcagaaacaactgtcagaagcgcagtcaaaagccctttcagcgcgttttaacacggcactggaagccagcctgcaggcgtggcagcagaaacaccacgcggtcattctggtgtcgcctgctgtggtacagggggcaccggatatcacccgggaaatccagcaggatattgcccggcgaatgagggcggaaccatga

SEQ ID NO: 224791 - DNA, 633 bp, Klebsiella pneumoniae; identical to SEQ ID NO: 39436

SEQ ID NO: 224792 - DNA, 993 bp, Klebsiella pneumoniae
atgaagcgaaggctgtggctgctgatgttattccttttcgccggtcatgtccctgcggcgtctgcggattctgcctgtgaggggcgttttgtaaacccgatcacagatatctgctggagctgtattttcccgctctcgctgggcagtatcaaagtcagtcaggggaaggtccccgacacggcgaacccgtcgatgcccattcagatttgtccggcactgccgccgctgttcaggcgtatcgggctggccattggttactgggagccgatggcgttgacggacgtcacccggtcaccgggatgcatggtgaacctgggcttcagcctgccggcttttggtaaaacggcacagggaacggcgaaaaaggatgagaagcaggtaaatggggcgttctatcacgttcactggtacaaatacccgctgacgtactggctgaacatcatcacatcgctgggctgtctggaaggtggtgacctggatatcgcttatctttctgaaatcgaccccacctggacggacagcagcctgaccaccattctcaatccggaagctgtcatctttgccaatccgatagcacagggagcctgcgcagcagatgcgattgccagcgcctttaatatgcctctcgatgttctgttctggtgtgccggttcgcagggaagtatgtacccgttcaatggctgggtgagtaatgagtccagtccgttgcagtcctccctgctggtcagtgaacgcatggcgttcaagctgcaccgtcagggcatgattatggaaaccatcgggaaaaataacgccgtctgtaatgaatatccatccccaatcctgcccaaagaacgctggcgttaccagatggtgaatatgtacccggacagcggacagtgccacccgttcgggcgcagtgtgacccgctgggaaaccgggaaaaatccgcccaatacaaagaaaaacttcggctacctgatgtggcgtaaacgtaactgtgtcttcctgtga

SEQ ID NO: 224793 - DNA, 639 bp, Klebsiella pneumoniae; identical to SEQ ID NO: 39435

SEQ ID NO: 224794 - DNA, 1809 bp, Klebsiella pneumoniae
atgaaacgtattttacctctgatactggctctggttgccggcatggcacaggctgacagcaacagtgattaccgggccggctctgattttgctcaccagatcaaagggcagggaagcagcagtattcagggctttaagccacaggagagtatccccggctataacgcgaatccggacgagacaaaatattacggtggcgtgactgccggcggggatggcggcctgaaaaatgacggcaccacggaatgggcgaccggtgaaaccggaaaaaccatcacagagtcattcatgaacaagccgaaagacattctttcaccggatgcaccgtttatccagaccggcagggatgtggtgaaccgggctgacagcattgtgggaaacaccgggcagcagtgcagtgcgcaggagattagccggagtgaatacacgaattacacctgtgagagggatttacaggtggagcagtactgcacacgaactgcccgtatggagctgcaggggagtaccacatgggaaacccggacgctggagtatgaaatgagtcagctacctgcacgtgaagtgaatggtcagtatgttgtctccattacctctcccgttaccggtgaaattgtcgatgcgcattacagctggagtcgtacttacctgcagaagagtgtacctatgacaattacagtactgggaaccccactgagctggaatgccaaatactcagcagatgcctcatttacaccagtacagaaaacactgactgccggtgttgcttttacgtcatctcaccccgtccgggtcgggaatacaaaattcaaacgtcatacggcaatgaagctgcgtctggttgtcagggtaaaaaaagcctcgtacaccccgtatgttgtctggtctgaaagctgcccgttcagcaaggagctggggaaactgacaaaaacagaatgtacggaggctggcgggaacaggacgctggtgaaagacggtcagtcatacagcatgtaccagagctgctgggcataccgggacacgtatgtcacgcagtcagcagacaagggaacctgtcagacctacaccgacaatcctgcctgtaccctggtgtcacaccagtgtgccttttactccgaagaaggtgcctgtctgcatgaatatgccacgtactcctgtgagtcaaaaacatccgggaaagtgatggtctgtgggggagacgtcttctgtctcgatggcgaatgcgataaggctcagagcgggcagagtaatgattttgccgaagccgtttctcagctggcggcactggccgcagcaggtaaggatgttgcggcgctgaacggggtggatgtccgtgctttcaccggtcaggcgaaattttgtaagaaggctgcagccggatacagcaactgctgtaaggacagcggctggggacaggatatcgggctggccaaatgcagcagtgatgaaaaggccctggctaaagcaaaatcaaacaaactgaccgtcagcgtcggggagttctgttcgaagaaagtgctgggtgtctgtctggagaaaaaacgcagctactgtcagtttgattcgaagctggcgcagatagtccagcagcaggggcgcaacggtcagttgcgtatcagttttggtagtgcgaagcatcctgactgtcgggggattacggttgatgagctgcagaaaattcagttcaacagactggatttcactaacttctacgaagacctgatgaataaccagaaaatcccggacagtggcgttctgacgcagaaagtgaaagagcagattgctgaccagctgaaacaggcaggacagtaa

SEQ ID NO: 224795 - DNA, 258 bp, Klebsiella pneumoniae
atgaaagtcatattcacgtcgaaccgttttattgattttcttatccggcttttgattacagcgattgtcatttctctggtaattatctggtcgtgggatacggtaaaagaaaccacggcagacgggatgcttgccgctgctttcgttatcctttactccggtgtgctcctgtttattctgtatttttgtttttctgccctgactgacctgcagaaacctgatgaaagaaaaagtgatgaaaggaatgaagatgaataa

SEQ ID NO: 224796 - DNA, 744 bp, Klebsiella pneumoniae; identical to SEQ ID NO: 7944

SEQ ID NO: 224797 - DNA, 342 bp, Klebsiella pneumoniae; identical to SEQ ID NO: 39432

SEQ ID NO: 224798 - DNA, 336 bp, Klebsiella pneumoniae
atggaaaagcgatcttttaaagaaaaactggaaatagtgagaaacatcataagagagtcattatcaggtaatgcggcttttgctttactggtgtattcattattgcacactctccccattaaaacctttgctgatttatttgtgacgatactgttatttatagcaattatcgctgttgtgatatggctatttctaatcatctatgtttatttttgtgatttattcagaagtcactggatagcagtctggtttatcctctggtctgtggtaatcaacctcactattggatttggcatttatgacaaattagcaccagtcatttcactaatgaaataa

SEQ ID NO: 224799 - DNA, 285 bp, Klebsiella pneumoniae; identical to SEQ ID NO: 39430

SEQ ID NO: 224800 - DNA, 555 bp, Klebsiella pneumoniae
atgtctctcactaaattactgccggttattctgttgatgatggccacaggtgtgcaggcctccacccgggatgaaattgaacgactctggcatccgcagggtatggctgcgcagcctgcacaaccggcagcagacacgccagccaggacagacaagacagaaaagccggctccccgctggttccgcctcagcaacggcaggcaggttaacctggccgactggaaggtggtgctgtttatgcaggggcattgcccttactgtcaccagtttgacccggtactgaagcagctggcacagcagtacggcttttccgtttttccctacactctggatggtcagggggatatggcctttccggaagcattaccggtgccaccggacgtgatgcagaccttcttcccgaatatcccggtggccacaccgaccaccttcctggtcaacgtcaacacgcttgaggcattaccgcttttacagggggcaacggatgccgccggttttatggcgcggatggataccgttctgcagatgtacggagggaaaaaaggtgcgaaataa

SEQ ID NO: 224801 - DNA, 315 bp, Klebsiella pneumoniae
gtgcgaaataagcaggtggtgttactcattgccggaatatccggcatcgcgacgggaataatcgtcagcctgaatattccctttatccgtcaggggcttttttatcccgccagtcctgtagaaatagtcgtttcgctgtgtcttaccttttctgtttctgttgtgttttttgtgggggcaattgtgggatggatttcggtgtctgaaatatattacagccgcatgaccggtctgaatgaatcatcagtaatatcagaggaaacttataatgacaaaaaacaaaaagaatcaggaattcaaaatcagaaaaattag

SEQ ID NO: 224802 - DNA, 393 bp, Klebsiella pneumoniae; identical to SEQ ID NO: 7903

SEQ ID NO: 224803 - DNA, 1374 bp, Klebsiella pneumoniae; identical to SEQ ID NO: 38626

SEQ ID NO: 224804 - DNA, 2826 bp, Klebsiella pneumoniae
gtgaatgaagtttatgtgattgccggtggtgaatggttgcggaataacctgaacgccattgccgcctttatgggaaccaggacgtgggattccattgaaaaaattgctctcaccctgtctgttgttgcggtggcctttatgtgggtacagcgccataacgtgatggatttgctgggctgggcggcggtgtttgtacttatcagcctgctggttaatatccgtacgtcggtgcagattattgataacagtgacctggtcaaagtccatcgggtggataatgtgccggtcggactggcgatgccactttcactgacgacccgtatcgggcatgcaatggtggccagttacgagatgatctacacgcaaccggacagtttcacctacagcaaaacggggatgctgtttggcgcagaactggtatcaaaaagcaccgactttttgtcccgcaatccggaaatcgccaatctttttcaggattatgtgcagaactgtgtgatgggggatatttacctgaaccacaaatacacgctggaggagctgatggcctccaatgatccctacacgctgattttttcccgccccagtccgctgcggggcgtttatgacagcaataataatttcgtgacctgtaaggacgcgtcggtttcgctgaaagacaagctgaatctggacacacagagtggcggaaaaacctggcattattatgcccagcagttatttggtggtcgccctgatccgaacctgttgttcagtacgctgattggcgacagttaccgttacttctatgactcaagtaaatcagccagccagatcatccgccagaatgtcaccattaatgcgctgaaggaggggatcaccagttatgcagcacgtaatggtgactcagccagcctggtgaatctggccaccacgtcatcgatggagaagcaacgtctggcacatgtctccatcggtcatgtggcgatgcggacactgcccatgacgcagaccatcctgacggggatcgccatcggtattttcccgctcctggtactggcggctgtcttcaacaaactgacgctgtctgtcctgaaaggctatgtgtttgccctgatgtggttgcagtcatggccaatgttgtatgccattctgaacagcgccatgacattttatgcgaagcagaatggtgcaccggtggtgctctcggaaatttcacagatacagctgaaatactccgatctggcttccactgccgggtatctttccatgatgatcccgccattatcctggatgatggtcaggggactcggggccggattttccagtgtgtacagccatttcgcttcctctgctatcagcccgaccgccagtgcggcaggcagtgtggttgacggtaattactcctacggcaacatgcagacggaaaacgtgaacggcttcagctggagcaccaacagcaccacgtcgtttggtcagatgatgtaccagaccggcagtggtgcaaccaccacacagacccgtgacggtaatatggtgatggatgcaagcggagcgatgtcccggttaccggttggtatcaatgcaacgcgtcagattgcagcggcacaacaggaaatggcccgggaggcatcgaacagagcagaaagcgccctgcatgggttcagcagcagtattgccagtgcctggaactcgctcagtcagtttggttctaaccgggggagcagtgattctgtcacaggtggtgctgacagcacgatgagcgcacaggattccatgatggccagccgtatgcgcagtgcagtggaaagctatgcgaaggcgcataatatcagtaatgagcaggcgactcaggaactggcatcaacaagtaccaggctatctggtggaatgtatgctgatgctcatgctgaatggggggttaaacctaaaattcttggtgttggtggtggggtaggcatcagaggtggatttaaggggagcttggatgcaacggatgatgactcacattcagcaagtagtggcagcagggctacccatgatgctcgccatgatatcgatgccagagctacacaagactttaaagaggccagcgattactttaccagtcgcaaagtcagtgaatccggcagccatactgacaataatgctgattcccgtgtggaccagctgtctgcagccctgaattcagcgaaacagagttacgatcagtacacgacgaatatgacccgcagccatgaatatgctgaaatggcatcccgtactgaaagcatgagtgggcagatgagtgaagatctgtcgcaacagtttgcacagtatgtgatgaaacacgcaccgcaggatgccgaagctattctgacaaacaccagttcaccggagattgcagaacgccgtcgggcgatggcatggtcttttgttcaggaacaggtgcagcctggtgttgataatgcctggcgtgaatcccgtggggatattggtaaaggaatggagagcgtaccttcgggtggtggcagccaggatattattgctgaccatcaggggcatcaggccattattgatcaaagaacgcaggacagtaatatccgtaatgatgtaaaacatcaggttgataatatggtcacagaatataaagggaatatcggagatactcagaatagtattcatggcgaagaaaatattgtagacagacaatattcagagttaaaaaataatcacaaacaggaagaaattcaacaaaacaacagatataatgaagaaaataaacgacagaaattaataccaacaccgtctgaagatgcgttaaaacagatggtggatgataagaaagaacgattgaaggggccattatga

SEQ ID NO: 224805 - DNA, 510 bp, Klebsiella pneumoniae; identical to SEQ ID NO: 7902

SEQ ID NO: 224806 - DNA, 732 bp, Klebsiella pneumoniae; identical to SEQ ID NO: 39424

SEQ ID NO: 224807 - DNA, 2199 bp, Klebsiella pneumoniae
atgagttttaacgcaaaggatatgacccagggcggtcagattgcgtccatgcgtatccgcatgttcagccagatcgccaatatcatgctttactgcctgtttatttttttctggatactcgttggtctggttttatgggtaaaaataagctggcagacgtttgtgaacggctgtatttactggtggtgtaccacgctggaaggcatgcgggatttaatcaagtcccagccggtatatgagatccagtattacggcaaaaccttccggatgaacgctgctcaggtactgcatgataaatatatgatttggtgcggagagcagctatggtccgcattcgttctggccacagttgtggcactggttatttgcctgattaccttctttgttgtctcctggattctggggcgtcagggtaaacaacagagcgaaaatgaagtcacaggtggtcgtcagctgacagacaatccgaaagacgttgcccggatgctgaaaaaagacgacaaggactccgatatccggattggcgacctgccgattatccgggattctgaaatccagaacttctgtctgcacggcacggtcggggccggtaagtcggaagttatccgtcgtctggccaactacgcccgtaagcgcggtgatatggtggtgatttatgaccgttcaggggaatttgttaaaagttactatgatccctccatcgataaaatcctgaatccgctggatgcccgctgtgccgcatgggatttatggaaggagtgtctgacacagccggattttgataatacggcaaataccctgatcccgatgggcacaaaagaggacccgttctggcagggttcaggacgtaccatttttgcggaagcggcgtacctgatgcgtaatgaccccaaccgcagctacagcaaactggtggacactctgctttccatcaaaatcgaaaaactgcgtaccttcctgcgtaattcaccggcggccaacctggtggaagagaaaatcgagaaaacggcgatttccatccgtgctgtgctgaccaactacgtgaaagccatccgttacctgcaggggattgagcataacggtgagcccttcaccatccgtgactggatgcgtggtgtccgggaagatcagaaaaacggctggctgtttatctcatcgaacgccgacacccatgcctccctgaagccggtgatctccatgtggctgtccattgccattcgtggtctgctggcaatgggagaaaaccgtaaacgtcgtgtgtggtttttctgtgacgagttacccacgttacacaaactgcctgacctggtggagatcctgccggaagcccgtaagttcggtggctgttatgtgtttggtatccagtcctatgcccagctggaagatatctacggtgagaaagcggctgccacgttgtttgacgtcatgaacacccgtgcctttttccgttctcccagccataagattgcagagttcgctgccggtgagattggtgagaaagagcacctgaaagccagcgagcagtattcctacggtgctgatccggtacgtgacggggtatcgaccggtaaggatatggagcgccagacgctggtcagttattccgacattcagtctctgccggatctgacctgttatgtcaccctgcccggaccgtatccggcagtaaaactctctctgaaatatcagacacgaccgaaggtcgctccggagtttattccgcgtgacatcaacccggaaatggagaaccgcctgagtgccgtacttgccgcaagggaagcagaaggtcgtcagatagccagcctcttcgaaccggatgtcccggaggttgtttccggagaagacgtgactcaggctgaacagccgcaacagccgcaacagccgcaacagccgcaacagccgcaacagccgcaacagccggtgtctcctgccatcaacgataagaagtcagattcaggtgtgaatgttccggcaggggggatcgagcaggagctgaaaatgaaaccggaagaagagatggaacagcaactgccacccgggatcagtgaatccggtgaagtggtggatatggccgcttatgaggcatggcaacaggaaaatcatccggacacccagcagcagatgcagcgtcgtgaagaggtgaacattaatgtgcaccgggagcgcggggaggatgttgagccgggagatgatttctga

SEQ ID NO: 224808 - DNA, 5121 bp, Klebsiella pneumoniae
atgatgagtatcgcacaggtcagatcggccggaagtgccggtaactattataccgacaaggataattactatgtactgggcagcatgggagaacgctgggccggcaggggggctgaacagctgggactgcagggcagtgtcgataaggatgtttttacccgtcttctggagggaaggctgccggacggagcggatctaagccgcatgcaggatggcagtaataagcatcgtcccggctacgacctgaccttctccgcccccaaaagtgtctccatgatggccatgttaggtggcgataagcgcctgattgatgcacataaccaggccgtggactttgctgttcgtcaggtggaggcgctggcctccacacgggtgatgacggacggacagtcagaaacggtactgaccggtaatctggtgatggcactgtttaaccacgacaccagtcgcgatcaggaaccacagttacacacgcatgcggtggtagctaatgtcacgcagcataacggtgagtggaagacactgagcagtgacaaagtggggaaaacggggttcattgagaatgtgtacgctaatcagattgcctttggcaggctctaccgggaaaaactgaaagagcaggttgaggcgctgggctatgaaacggaagtggtgggtaagcacggtatgtgggaaatgccgggcgtaccggtggaggccttttccggacgctcacagactatccgggagaccgtcggggaggacgcctcgctgaaatcccgggatgtggcggcgctggatacgcgtaaatccaaacagcacgtcgatcctgaaatcaaaatgaccgagtggatgcagacgctgaaggaaaccgggttcgatatccgggcgtatcgtgacgcagcggaacaacgggcatatacccgcacgcagacacccggaccagcttcacaggacgggccggatgtgcagcaggcggtgacacaggcgattgccggattaagtgaacgcaaagtgcagtttacgtacacggacgtgctggccaggacggtcggcatactgccgccggaagccggtgtgattgagcgggcacgcgccggtatcgatgaggccatcagccgtgagcagcttatccccctcgatcgtgagaaggggatgttcacgtccgggattcatgtgctcgatgagctgtcagtccgggcactcagtcgtgacatcatgaaacagaaccgggtgaccgtacatccggagaaaagtgtcccccggacggccggttacagcgatgccgtcagtgttctggcacaggatcgcccgtcgctggccattgtgtccgggcagggcggtgcagccgggcagcgtgagcgggtggctgaactggcaatgatggcccgggagcaggggcgggaggtgcagattatcgccgctgaccgtcgctcgcagatgaacctgaagcaggatgaacggctgtccggtgagctgataaccggacgtcgtcagctgcaggagggcatggccttcacgccgggcagtaccgttatcgtcgaccagggcgaaaaactctccctgaaagagacgttaaccctgctggacggtgccgcacgtcataacgtacaggtcctgataaccgacagcgggcagcgaaccggtacaggcagtgcgctgatggccatgaagtatgccggggtgaacacgtatcgctggcagggcggagaacagcgaccggcaaccatcatcagtgaaccggaccggaatgtccgctatgaccggctggccggagattttgcggccagcgtgaaagccggagaagagagcgtggcacaggtcagcggggtacgggaacaggccatactgacacaggccattcgcagtgagctgaaaacacagggcgtgctcggacacccggaggtgaccatgaccgccctgtcaccggtctggctggacagccggagccgttatctgcgggatatgtaccgaccggggatggtgatggagcagtggaacccggagacacgcagtcatgaccgctatgttatcgaccgggtgacggcgcagagtcacagcctgaccctgcgggatgcgcagggcgaaacgcaggtggtgcgtatttcctccctggacagcagctggtcgctgttccggccggaaaaaatgccggtggcagacggcgagcgactgagggtgacagggaaaattcccggactccgcgtctccggcggtgaccgcctgcaggtggcatccgtcagtgaagatgcgatgacggttgttgtgccggggcgggctgaaccggccaccctgcctgtggctgattcaccgttcacggcactgaagctggagaacggctgggtggaaacgcccgggcattccgtcagtgacagtgcgacggtgtttgcctccgtcacacagatggcaatggacaacgccaccctgaacggtctggcccgcagcggtcgtgatgtccggctgtattcctcactggatgaaacccgtactgcggaaaaacttgcccgccatccctcctttacggtggtttctgagcagataaaggcgcgggccggtgagacatcgctggaaaccgctatcagtctgcagaaaaccgggctgcacacgccggcacagcaggccattcatctggcccttcctgtgctggaaagtaaaaacctggccttcagcatggtggacctgctgacagaggcgaagtcgtttgctgcagaaggaaccggttttactgaactgggaggggaaatcaatgcgcagataaaacgcggtgacttactgtatgtggatgtggcaaaaggctatggcacaggcctgctggtttcccgtgcgtcgtatgaggcagaaaaaagtattcttcgccatattctcgaaggtaaggaggcggtcacgccgctgatggagagagtacccggcgaactcatggagacgttaacgtcgggacagcgtgccgccacccgtatgatactggaaacgtccgaccgtttcacggtggtacagggttatgccggggtgggtaagaccacacagttccgggcggtgatgtcagccgtgaacatgctgccggagagtgagcgtccccgtgtcgttgggctggggcccacgcaccgtgcggtcggggagatgcgcagcgccggcgtggatgcacagacactggcgtcctttctgcatgacacgcagctgcagcagcgcagcggagaaacgccggatttcagcaacacgctgttcctgctcgatgagagctcaatggtgggcaataccgacatggcacgggcatacgccctgattgcggccggtggcggtcgtgctgtggccagcggtgacacggaccagctgcaggccatcgcgcccggtcagcctttccgtctccagcagacgcgcagtgctgccgatgtggccatcatgaaggagattgtgcgtcagacgccggaactgcgggaggcggtatacagcctgattaaccgggatgtggaaaaggcactgtccgggcttgagagtgtgaaaccgtctcaggtgccacgtctggagggcgcatgggcaccggagcactccgtgacggagttcagtcacagccaggaagcgaaactggcagaagcgcagcagaaggcgatgctgaaaggcgaggctttcccggatatccccatgacactgtatgaagccattgtccgcgactataccggcaggacaccggaagcacgggagcagacgctgattgtcacgcacctgaatgaggaccggcgcgtactgaacagcatgattcatgatgcacgggaaaaggccggtgagctggggaaagagcaggtcatggtgcctgtcctgaacacagcgaatatacgtgacggggagctgcgtcgtctctccacctgggagaataacccggatgcccttgccctggtggatagtgtgtatcaccggattgccggtatcagcaaggatgacgggctgataaccctggaggatgcggaaggtaacacgcggctgatttcgccccgggaggcggtggctgaaggtgtcacactgtacaccccggacaaaatccgggtggggaccggcgaccggatgcgcttcacgaagagtgaccgggagcgcggttatgtggccaacagcgtctggacggtgacagcggtttccggtgacagtgtcacgctgtcagacggacagcagacccgggtgattcgccccggccaggagcgggcagagcaacatattgacctggcttatgccatcaccgcccacggtgcgcagggggcgagtgaaacctttgccatcgcgcttgaaggcacggaaggtaaccggaaactgatggccggctttgagtcagcctacgtggccctgtcgcgtatgaagcagcatgtgcaggtgtacaccgataaccgtcagggctggacggatgccattaacaatgccgtacagaaaggaactgcccacgatgtgctggagccgaaaccggaccgggaggtcatgaatgcgcagcggctgttcagtacggcacgggaactgcgggacgtggcggcaggccgtgccgttctccgtcaggcggggctggccgggggagacagtcctgcacggtttattgctccgggacgtaaatatccgcaaccgtatgtggcactgccggcttttgaccgtaacggcaggtccgccggtatctggctgaacccactgaccacggatgacggaaacgggctgcggggattcagcggtgaaggccgtccgtggaatcccggtgccatcaccggtggccgcgtgtggggggatattccggataacagcgtccagccgggagccggaaatggtgaaccggtcacggcagaggtactggcacagcggcaggctgaagaggccatccgccgtgaaacggaacgccgcgcagatgaaattgtcaggaaaatggcagagaacaaacctgacttgccggacggcaaaacagagctggctgtcagggatattgccgggcaggaacgtgaccggactgccacttctgaacgggaaaccgcactgccggagagtgtgctgcgtgaatcacaacgggaacgggaagcggtccgggaggttgcccgggaaaatctgctgcagaggcttctgcagcagatggagcgggatatggttcgtgacctgcagaaagagaaaaccctgggcggagactga

SEQ ID NO: 224809 - DNA, 747 bp, Klebsiella pneumoniae; identical to SEQ ID NO: 7901

SEQ ID NO: 224810 - DNA, 561 bp, Klebsiella pneumoniae; identical to SEQ ID NO: 39420

SEQ ID NO: 224811 - DNA, 648 bp, Klebsiella pneumoniae; identical to SEQ ID NO: 7899

SEQ ID NO: 224812 - DNA, 2019 bp, Klebsiella pneumoniae
gtgcgccttttacatagggcgacatgcacaatggcagaagtaccgttaccaactcccacagataacgctgttccgagcacggatatccgggatgcagtttatgccggcgccatgctggataaggttgtcaccagtaccgagttgacatataccgatcgcctcggcggagagcattacaccgtagatggaattaaggcagaaggggataaagttgtcgaagagacgcggcagaatctgatccctctaagtcgccagtatatgacattggctgatgcacaggcagacatcgctaatattccttcaggttcaacaacttatgtccgcagtcaggacggcagtacgcttgcggatgagtacataaacgtcagtggaactttgcagcctaccgggcggcggatgctccgtgacgactacggataccaggtatcaccagacagtgtggccctggctggttatgacccggagacaaaaagagtggccccatttttaaatacggatggtcgacttatccaaatcggtcctgatgggaaatattatgagctcctcacgccgcaggaggcggagttatacgcactgggaagcgagggacaggtgacgcagtttatcggcggtgaaaaggtgtggcgtatgatcgttgacgccgctaccaaccaaatcgttgaggcttacacggttggcggacatcactggatctattccgatagcggcctggttctggttaaccaggagagtgggggaggtggcgacgatgatgccaaccagctccctgagtatggacttcatttgtcagggtctacggtatatccatactcagaagatgtaccggtctgtttcatttttgtaactgctgggcagtccaacgcacgtggttattgccctgacgccgatcaaactattgtcgcggcaacgccagtttatcccgataacgcgtttatgttatctggtggggtcaggagaacggggacgcgcagcactactctggtgccactggttgaggcagtaagcggcactgataaggagactgcagcgtctggcttggcaaacaccttcattcgcgatatggctgcagctaccggaatcatgccgcgcacgctatcaatcgtatgtgcgcagtctggtcaggcttacgagtaccagaaacggggtaaccaggtatatcagtatctgctcgattcaatcgaagactgcgtaacggcctgtaaggctaagggctggctgccgattgttctgtgcgttgactggatgcagggggagtccgacgaggactggagtgggcttcgagaggggatgtatgagtcgcgacttcatcaataccagcgccaggccatcagtgacatcatggcaagaacgggccaaaacgaaccgccgattatagcgcaaacgcagatcggatacgttaacgataaccacggagcatttacaggacaatatgtcaggatgtcagtaaataaacttcatggtcatgagcagttcaggtgtgtaaatactctttatcagtatgattttatttctgacggtttgcacctcacctgtgcagcacaaaataaacgtggcgcggctgtggcaagagcaattgtccaggagtggtttgccagcggatggtacggaatggttccgtctggtttcgtgtggaactcacccacacaaatacaaattaatgtcccttcgtataccaacctgacgatagacacgaccaatattagtactgatggcctggcaaattacggttttaactacacagatgaaactggtgctccacctgctatatctagcgtcgcgatcagctcggacggcaagggggtactgattaacctggcgaccgccccatctggccgttttgggcgcgtttcctatgcgacagtagaaaacccacttcagagcggcgcatctgtaaaaccttccgggcggactcttggtgcgagagggtgtgtacgatcttccgctggaatcacctgggtgtatgacacatccgtaactctctacgactggctccctgcttttcgaatcaacgttttctga

SEQ ID NO: 224813 - DNA, 510 bp, Klebsiella pneumoniae
atgaaaaaatggatgttaaccatctgcctgatgtttataaatgagatctgccaggccactgattgctttgatcttgcaggccgggattacaaaatagatcctgatttactgagagcaatatcatggcaagaatcccgttaccgggttaatgccatcggtattaatccggtaacgggatatggcagcggactgatgcaggtagattcccagcattttaacgaactggcccgctacggaattaagccagaacatctgacaacagatccctgcatgaacatttataccggtgcttattatctggcaatagcatttaaaaaatggggcgtcacctgggaggccgttggtgcatacaatgccggattcaggaaaaccgaacgccagaaccagagacgtcttgcctacgcatcagatgtttaccggatttatactgggataaaaagcagtaaaggtatccggcttccggccacgaagaaatcacttccggaaattaacagcgtgcagaacaattaa

SEQ ID NO: 224814 - DNA, 822 bp, Klebsiella pneumoniae
atgcgattagcttcccgttttggtcggtataattccatccgccgtgaacgtcctttaacggatgatgaattaatgcagttcgtgccttcggtattttccggtgataaacatgagtcccggagtgaacgttatacgtatattccaacaatcaatatcatcaataagttacgtgatgaaggtttccagccattctttgcctgtcagagtcggattcgtgatttgggacgtcgcgaatacagtaaacatatgttacgtcttcgcagggaagggcatattaacggacaggaagttcctgaaattatcctgcttaattcacatgatggttcatccagttatcagatgatccccggaatttttcgttttgtctgcacaaatggcctggtgtgcggaaataattttggcgaaatccgcgttccacataaaggtgatattgtcgggcaggttatcgagggagcgtatgaagtgctcggtgtctttgataaggtcactgataatatggaggcgatgaaagaaattcatcttaacagtgacgagcaacatttatttggcagagctgcactgatggtcaggtatgaagatgaaaataaaacgccagtgacacctgaacagataattactccccgtcgtcgggaagacaaacagaacgatctctggacaacctggcagcgggttcaggagaatatgataaaaggtggattatcggggcgaagtgcctccgggaaaaataccaggacaagagccattacaggtattgatggtgatataagaatcaacaaggcgttatgggtgattgccgaacagttcagaaagtggaagtcatga

SEQ ID NO: 224815 - DNA, 288 bp, Klebsiella pneumoniae; identical to SEQ ID NO: 16124

SEQ ID NO: 224816 - DNA, 213 bp, Klebsiella pneumoniae; identical to SEQ ID NO: 39582

SEQ ID NO: 224817 - DNA, 252 bp, Klebsiella pneumoniae
atggaatggcagccggtgcagtattacagccgggttatcatgaatccgccgttcagccacgggcaggatatccggcatatcctgcgggccttttccctgttgcgtccgggtggcgtgctggtcgccgtctgtctcaacggaccacgccagcaggagaagctgttaccgttttctgacgtccgcgaggagctgccgcgcggcacgtttgcttataccgatgtcccgacgatgattattcgtctgcgtgcctga

SEQ ID NO: 224818 - DNA, 357 bp, Klebsiella pneumoniae; identical to SEQ ID NO: 7906

SEQ ID NO: 224819 - DNA, 1362 bp, Klebsiella pneumoniae
atgacatcagcagcaatcaccatgaccgccccggaagccgccagccctgtgcagatgtaccgcgcgacctactcaccggatgacaacaaactgcgcctgtatgccgtgtcacgtcttgacccggagacgtataaaaaagtgcatgatgccggtttccgctgggcaccaaaacaggcgctgtttgtcgcgccagcctggacaccgggccgggaagacgtgctcctctcacttgccggagagattgaggatgaagacagcacgctcgctgaacgtcaggaagcacgggcggagcggtttaccggatacagcggaaagcgggccagtgaatccgcacaggcacttgatgaagtggaaagactggccgcgatgatcccgcccggtcagcccattcttgtggggcatcacagcgaacgccgcgcccgtcgtgatgcgcagcgtattgaaaacggcatgaaacgagccgtgatgctctttgaacgtgcggaatactgggaagagcgggcgcggtcggcactgcttcacgcgaagtataaagaacgtccggacgttcgctggcgtcgtatcaaaaaaatcgaagctgatttgcgcaaggctgaaaagaccatcgcgcagtcgcagaaatatctgacgatgtggcgggctgaatcgctggatctgaatatggcaaaactcatcagcagtcatgaccatatcagcgcctgtttcccgctggatacgtatccgcgcccggcagaaaaaagccagtatgaaggaagtcgatcgttatggtcggccctggatgatgacatcatcaccacggagcaggcccgcgaaattgcgatccgctgtcatgagcggcagattcagcatcaacaacgctgggttaaccactatcagaaccgcctgatctatgagcgtgccatgctggacgaaagcggcggcgtggttacccggacacaggattttgagccgggcggacaggttttcagccggggcgagtggctgaccatcatccgtgtgaacaaaagcaacggggcggtgagttcagtcacaacgccaaattacagttttcttgggtacagcggcacgatgaaagtgacgcccgatcgcatcacggactacaaagcaccatcggcagaagaggctgccgtcgccagtcaggccgcgaagcgtccgccggtagtcaactatccgggggaaggtttccgggaaatgacaaaggcacagtgggccgccctgccccgggactgtaaggccgtgcgtagtgtggcagaagcagaagaccacggggcataccggtaccgccgcacaatggacaataatttccgcctggtgaatgtgtatatcaccgacatgaaaatcacggaaatcccacagaaataa

SEQ ID NO: 224820 - DNA, 231 bp, Klebsiella pneumoniae; identical to SEQ ID NO: 7907

SEQ ID NO: 224821 - DNA, 192 bp, Klebsiella pneumoniae; identical to SEQ ID NO: 7908

SEQ ID NO: 224822 - DNA, 423 bp, Klebsiella pneumoniae; identical to SEQ ID NO: 7909

SEQ ID NO: 224823 - DNA, 426 bp, Klebsiella pneumoniae
atgcagtatgcgaaacctgtcactctgaacgttgaagagtgcgaccgtctgtcttttctgccttacctgtttggcctggattttctgtatgccgaagcgtctgtatacgcgctggcgaaaaaaatgatgccggaatatgaaggcggattctggcacttcatccgcctgccggacggtggcggttacatgatgccggatggcgaccgttttcatctggtcaacggtgaaaactggtttgaccgtaccgtgagtgctgatgccgcaggcatcattctgacttcccttgtgattaaccgccagttgtggctgtaccacgacagcggggatgcagggttgacacacctgtacaggatgcgcgatgcgcagttgtggagccacatcgaatttcaccccgaatgcaacgcgatttacgcggcactggactga

SEQ ID NO: 224824 - DNA, 771 bp, Klebsiella pneumoniae; identical to SEQ ID NO: 7910

SEQ ID NO: 224825 - DNA, 435 bp, Klebsiella pneumoniae; identical to SEQ ID NO: 32766

SEQ ID NO: 224826 - DNA, 222 bp, Klebsiella pneumoniae; identical to SEQ ID NO: 5758

SEQ ID NO: 224827 - DNA, 684 bp, Klebsiella pneumoniae
atgtcccgttttgtcctcggtaactgcatcgatgttatggcccgtattcctgataacgccattgatttcatactgactgacccgccgtacctcgtcggttttcgtgaccgtttcgggcgcaccatcgccggcgataaaaccgatgaatggctgcaaccggcctgtaatgaaatgtaccgcgtactcaaaaaagacgcgctgatggtgagcttctacggctggaaccgcgtcgatcgctttatggccgcctggaaaaatgcgggattcagcgttgttggtcacctggtcttcaccaaaaactacacatcgaaggccgcatatgtgggctatcgccacgaatgcgcctacatcctggcaaaaggccgtccacgtctgccacaaaacccgctgccggacgtgctgggctggaaatattcgggcaatcgtcatcacccgacggaaaagcccgttaccagcctgcaaccgctgattgagagcttcacacacccgaacgcaattgtgctggacccgtttgcaggcagcggctcaacctgcgtcgttgccctccagtccggacgccggtatatcggtatcgagctgcttgaacagtatcaccgtgccggacagcaacgactggccgccgtgcaacgggccatgcagcagggggccgcgaatgataactggtttgaaccggaggctgcgtaa

SEQ ID NO: 224828 - DNA, 927 bp, Klebsiella pneumoniae; identical to SEQ ID NO: 7911

SEQ ID NO: 224829 - DNA, 972 bp, Klebsiella pneumoniae
atgaagcgtgcgcctgttattccaaaacatacgctcaatactcaaccggttgaagatacttcgttatcgacaccagctgccccgatggtggattcgttaattgcgcgcgtaggagtaatggctcgcggtaatgccattactttgcctgtatgtggtcgggatgtgaagtttactcttgaagtgctccggggtgatagtgttgagaagacctctcgggtatggtcaggtaatgaacgtgaccaggagctgcttactgaggacgcactggatgatctcatcccttcttttctactgactggtcaacagacaccggcgttcggtcgaagagtatctggtgtcatagaaattgccgatgggagtcgccgtcgtaaagctgctgcacttaccgaaagtgattatcgtgttctggttggcgagctggatgatgagcagatggctgcattatccagattgggtaacgattatcgcccaacaagtgcttatgaacgtggtcagcgttatgcaagccgattgcagaatgaatttgctggaaatatttctgcgctggctgatgcggaaaatatttcacgtaagattattacccgctgtatcaacacagccaaattgcctaaatcagttgttgctcttttttctcaccccggtgaactatctgcccggtcaggtgatgcacttcaaaaagcctttacagataaagaggaattacttaagcagcaggcatctaaccttcatgagcagaaaaaagctggggtgatatttgaagctgaagaagttatcactcttttaacttctgtgcttaaaacgtcatctgcatcaagaactagtttaagctcacgacatcagtttgctcctggagcgacagtattgtataagggcgataaaatggtgcttaacctggacaggtctcgtgttccaactgagtgtatagagaaaattgaggccattcttaaggaacttgaaaagccagcaccctga

SEQ ID NO: 224830 - DNA, 1167 bp, Klebsiella pneumoniae
atgaaactcatggaaacacttaaccagtgcataaacgctggtcatgaaatgacgaaggctatcgccattgcacagtttaatgatgacagcccggaagcgaggaaaataacccggcgctggagaataggtgaagcagcggatttagttggggtttcttctcaggctatcagagatgccgagaaagcagggcgactaccgcacccggatatggaaattcgaggacgggttgagcaacgtgttggttatacaattgaacaaattaatcatatgcgtgatgtgtttggtacgcgattgcgacgtgctgaagacgtatttccaccggtgatcggggttgctgcccataaaggtggcgtttacaaaacctcagtttctgttcatcttgctcaggatctggctctgaaggggctacgtgttttgctcgtggaaggtaacgacccccagggaacagcctcaatgtatcacggatgggtaccagatcttcatattcatgcagaagacactctcctgcctttctatcttggggaaaaggacgatgtcacttatgcaataaagcccacttgctggccggggcttgacattattccttcctgtctggctctgcaccgtattgaaactgagttaatgggcaaatttgatgaaggtaaactgcccaccgatccacacctgatgctccgactggccattgaaactgttgctcatgactatgatgtcatagttattgacagcgcgcctaacctgggtatcggcacgattaatgtcgtatgtgctgctgatgtgctgattgttcccacgcctgctgagttgtttgactacacctccgcactgcagtttttcgatatgcttcgtgatctgctcaagaacgttgatcttaaagggttcgagcctgatgtacgtattttgcttaccaaatacagcaatagtaatggctctcagtccccgtggatggaggagcaaattcgggatgcctggggaagcatggttctaaaaaatgttgtacgtgaaacggatgaagttggtaaaggtcagatccggatgagaactgtttttgaacaggccattgatcaacgctcttcaactggtgcctggagaaatgctctttctatttgggaacctgtctgcaatgaaattttcgatcgtctgattaaaccacgctgggagattagataa

SEQ ID NO: 224831 - DNA, 807 bp, Klebsiella pneumoniae
atgtcaggctccgttatacacagccagtctgcagccatggtaccggcagtgtattctgccggacagtctgcacaacttcctgttgccattgattatccggcagctctggcactccgccagatgtcgatggttcatgatgaactgccgaaatatctgctggctcccgaggtgagtgccctgcttcattatgtcccggatctgcgccgcaagatgctgctggccactctgtggaacaccggcgcgcgtattaatgaagcactagcgctgacgcggggggatttttcgctcacgcctccgtatccgtttgtgcagcttgcgaccctgaaacaacggaccgaaaaagctgccaggacggcggggagaatgcccgccggtcagcagactcaccggctggttccgctctctgactcctggtacgtcagccagctgcagacgatggtggcaacactgaaaatacccatggagcggcgtaaccgtcgcacaggaaggacagagaaagcgcggatctgggaagtgacggacagaacggtcaggacctggattggggaggcggttgccgccgctgctgctgacggtgtgacgttctctgttccggtcacaccacatacgttccgccattcctatgcgatgcacatgctgtatgccggtataccgctgaaagttctgcaaagcctgatgggacataagtccatcagttcaacggaagtctacacgaaggtttttgcgctggatgtggctgcccggcaccgggtgcagtttgcgatgccggagtctgatgcggttgcgatgctgaaacaattatcctga

SEQ ID NO: 224832 - DNA, 306 bp, Klebsiella pneumoniae
atgcagtttaaggtttacacctataaaagagagagccgttatcgtctgtttgtggatgtccagagtgacattattgacacgcctgggcgacggatggtgatccccctggccagtgcacgtctgttgtcagataaggtctcccgtgagctttacccggtggtgcatgtcggggatgaaagctggcgcatgatgaccaccgatatggccagtgtgccggtctccgttatcggggaggaagtggctgatctcagccaccgagaaaatgacatcaaaaatgccattaacctgatgttctggggaatataa

SEQ ID NO: 224833 - DNA, 219 bp, Klebsiella pneumoniae
atgaagcagcgcattacagtcaccgtcgacagtgacagctatcagttgctcaaggcatatgatgtcaatatctccgggctggtaagcaccaccctgcagaatgaagcccgtcgtctgcgtgccgaacgctggcaggcagaaaatcaggaagggatggctgaggtcgcccggtttattgaaatgaacggctcttttgccgacgagaacagggactggtga

SEQ ID NO: 224834 - DNA, 1023 bp, Klebsiella pneumoniae; identical to SEQ ID NO: 7665

SEQ ID NO: 224835 - DNA, 252 bp, Klebsiella pneumoniae; identical to SEQ ID NO: 5211

SEQ ID NO: 224836 - DNA, 357 bp, Klebsiella pneumoniae; identical to SEQ ID NO: 5210

SEQ ID NO: 224837 - DNA, 978 bp, Klebsiella pneumoniae; identical to SEQ ID NO: 5208

SEQ ID NO: 224838 - DNA, 741 bp, Klebsiella pneumoniae
atgaacagcatcattcccttgcagaattcaccagaacgcgtctctctgctgccgatcgccccgggcgttgattttgcgaccgcggtggcactccggcggatggccacctcaacaggtgccacgccggcttacctcctggcgccggaagtgagcgccctcctctggtatatgcctgaccagcgtcaccacatgttgttcgccaccatgtggaataccgggatccgtatcggtgaagcccggacgctcaccccggaatcgttcgacctggatggtctgcgcccttttgttcgggtgctgtcggaaaaagtgcgggcacgtcgtggccggccgccaaaagatgaagtgcgtctggtaccgctgacggatgccagttttgtgcgtcagatggagagctggatggtgaccacccgcccccgccggcgggagccgttatggccggtcacggatgagacaatgcgcaactggctgaagcaggctgtcagacgggccgaagctgacggggtacacttttcgattccggtcacaccacacaccttccggcacagctatatcatgcacatgctctatcaccgccagccccggaaagtcatccaggcactggctggtcacagggatccacgttcgatggaggtttataccagagtgtttgcactggatatggctgccacgctggcagtgcctttcacaggtgacgggcgggatgctgcggagatcctgcgtacactgcctcccctgaggtga

SEQ ID NO: 224839 - DNA, 1170 bp, Klebsiella pneumoniae; identical to SEQ ID NO: 91067

SEQ ID NO: 224840 - DNA, 1965 bp, Klebsiella pneumoniae
atgaacgtaatcagaaacgtcatttgtacattaatcatactcccgatagggttacaggcagagaccagtcattcttctatggctaaagatacaatcaccgttgtcgcgacaggaaatcagaacacggtatttgaaacgccgtcaatggtcagtgtcgtcacgaatgacacgccatggagtcagaatgcggtcacatcagccggcatgctgaaaggtgttgccggtctcagccagactggtgcaggacggaccaatgggcagacctttaatctacgcggctatgacaaaagcggggtacttgttcttgttgacggcatccgtcaactcagtgacatggcaaaaagcagtggcacttatctggatccggcactcgtcaaacgtatcgaagttgtccgcggaccaaactccagtctgtacggcagtggcgggctgggaggtgttgtggacttcagaactgccgatgcagcagatttccttccccccggagagacaaacggtttaagtctgtggggaaatatcgccagtggtgaccacagcacaggctcggggctcacctggttcggtaaaaccggaaaaacagatgcgctcctttctgtcattatgcgtaaaagaggtaatatctatcaaagtgatggtgagcgcgcacctaacaaggaaaaacctgcagccctgtttgcgaaaggctctgtcggtataacagacagtaacaaagcaggtgccagcttgcgtctctaccggaataacaccactgaaccgggcaatcccactcagacacatggtgacagcggcctgcgtgacagaaaaacagtacaaaatgacgtacagttctggtaccagtacgctcctgtggataacagcctcatcaatgtaaagtcaactttatatctcagtgatatcactatcaagacaaacggtcacaacaaaacggcagaatggagaaacaacagaacctccggtgttaatgttgtcaacaggagtcatactctgatttttccgggagcccatcagttaagttatggcgctgaatattaccgtcagcagcagaagccagaaggctctgccacactatatccggaaggaaacattgactttacatcgttgtatttccaggatgaaatgacaatgaaaagctacccggttaacattatcgtcggttcccgctatgaccggtacaagagcttcaatccccgtgccggagaactgaaagccgaacgcctgtccccaagggcggcgatttcagtctcaccgacagactggctgatgatgtacggctccatatcctctgcattccgtgcccccacaatggcagaaatgtacagggatgatgtacatttttaccgcaagggtaaacccaattactgggtacctaaccttaatctgaaaccagaaaataacattacccgtgagattggcgcaggtattcaactggacggcctgcttacaggcaatgatcggctgcagttgaaaggcggatatttcggaacggatgccagaaactatattgccacgcgcgtggatatgaaacggatgcgttcttattcttataatgtatcccgggcccgtatctggggatgggatatgcagggaaattaccagtctgattattttgactggatgctttcttataaccgcacggaaagtatggatgccagcagcagggaatggctgggctccggcaatcctgacacactcatcagtgacataagtatacctgttggtcatggaggagtttctgccggatggcgtgctgaactttcggcagcagccacgcatgtgaaaaaaggcgatccccatcaggctggctatgccgtacattccttttcactgtcttataagcctgtaagtgttaaaggctttgaggcatcagtggctctggataatgccttcaacaagcttgccatgaatggcaaaggagtgccgctttcaggcagaactgtcagtctttatacccgttatcagtggtaa

SEQ ID NO: 224841 - DNA, 792 bp, Klebsiella pneumoniae; identical to SEQ ID NO: 9265

SEQ ID NO: 224842 - DNA, 294 bp, Klebsiella pneumoniae; identical to SEQ ID NO: 8158

SEQ ID NO: 224843 - DNA, 1194 bp, Klebsiella pneumoniae; identical to SEQ ID NO: 5190

SEQ ID NO: 224844 - DNA, 1725 bp, Klebsiella pneumoniae; identical to SEQ ID NO: 5191

SEQ ID NO: 224845 - DNA, 948 bp, Klebsiella pneumoniae
atgtctggggcaaacattgttcacagcggatatggactgcgctgtgaaaaactcgacaagcctctgaatcttggctgggggctggacaatagcgcggtgttgcactggcccggggagctgccaacagggtggctgtgcgacgcgctggatcagatatttatcgccgcaccacaactttcagcagtggttcttccctggtccgaatggtgtgaggagccacaggcgctgacgcttttcggacaggtacaaagcgacattatccatcgttccgctttctggcagttaccgttatggctgagttctccggcaaaccgggcctccggtgaaatggtttttgatgcagagcgtgagatttatttcccgcagcgccccccccgtccgcagggtgaagtttatcgtcgttacgatccacgcattcgcaggatgctgagtttccgcattgccgatcccgtttctgatgcagaacgtttcactcgctggatgaacgatccgcgcgttgagtatttctgggagcaaagtggctcactggaggttcagatcgcctatctggaacgccagctcaccagtaaacatgcattcccgctgattggttgtttcgacgatcggccgttcagttatttcgaaatctactgggcggcggaagaccgcattggtcgccactattcgtggcagccctttgaccgtggcctgcatctgctggttggtgaacagcaatggcgcggagcccactatgtgcaaagctggctgcgcggggtgacacattacctgctgctgaatgagccacgtacgcagcgcacagtactggagccacgcaccgataaccagcgcctgttccgccatcttgagcctgcgggataccggacaattaaagagttcgacttcccacataaacgctcgcgcatggtgatggcggatcgtcatcacttcttcacggaggtcggtctgtaa

SEQ ID NO: 224846 - DNA, 1743 bp, Klebsiella pneumoniae; identical to SEQ ID NO: 5193

SEQ ID NO: 224847 - DNA, 1278 bp, Klebsiella pneumoniae; identical to SEQ ID NO: 5194

SEQ ID NO: 224848 - DNA, 2202 bp, Klebsiella pneumoniae
atgatgataagcaaaaagtatacgctttgggctctcaacccactgcttcttaccatgatggcgccagcagtcgctcaacaaaccgatgatgaaacgttcgtggtgtctgccaaccgcagcaatcgcaccgtagcggagatggcgcaaaccacctgggttatcgaaaacgccgaactggaacagcagattcagggcggcaaagagcttaaagacgcactggctcagctgatccctggccttgacgtcagcagccggagccgcaccaactacggtatgaatgtgcgtggccgcccgctggtcgtgctggttgacggcgtgcgtctcaactcttcacgtaccgacagccgacaactggactctatagatccttttaatatcgaccatattgaagtgatctccggtgcgacgtccctgtacggcggcggcagtaccggtggcctgatcaacatcgtgaccaaaaaaggccagccggaaaccatgatggagtttgaggctggcaccaaaagtggctttagcagcagtaaagatcacgatgaacgcattgccggagctgtctccggcggaaatgagcatatctccggacgtctttccgtggcatatcagaaatttggcggctggtttgacggtaacggcgatgccaccttgcttgataacacccagaccggcctgcagtactccgatcggctggacatcatgggaactggtacgctgaacatcgatgaatcccggcagcttcagttgatcacacagtactataaaagccagggcgacgacgattacgggcttaatctcgggaaaggcttctctgccatcagagggaccagcacgccattcgtcagtaacgggctgaattccgaccgtattcccggcactgagcggcatttgatcagcctgcagtactctgacagcgcttttctgggacaggagctggtcggtcaggtttactaccgcgatgagtcgttgcgattctacccgttcccgacggtaaatgcgaacaaacaggtgacggctttctcttcgtcacagcaggacaccgaccagtacggcatgaaactgactctgaacagcaaaccgatggacggctggcaaatcacctgggggctggatgctgatcatgagcgctttacctccaaccagatgttcttcgacctggctcaggcaagcgcttccggagggctgaacaacaagaagatttacaccaccgggcgctatccgtcgtatgacatcaccaacctggcggccttcctgcaatcaggctatgacatcaataatctctttaccctcaacggtggcgtacgctatcagtacactgaaaacaagattgatgatttcatcggctacgcgcagcaacggcagattgccgccgggaaggctacatccgccgacgccattcctggcggctcagtcgattacgacaacttcctgttcaacgccggtctgctgatgcacatcaccgaacgccagcaggcatggctcaacttctcccagggcgtggagctgccggacccgggtaaatactatggtcgcggcatctatggtgctgcagtgaacggccatcttcctctaacaaagagtgtgaacgtcagcgacagcaagctggaaggcgtgaaagtcgattcttatgagctgggctggcgctttactggcaataatctgcgtacccaaatcgcggcctactattcgatttctgataagagcgtggtggcgaataaagatctgaccatcagcgtggtggacgacaaacgccgtatttacggcgtggaaggtgcggtggactacctgattcctgatactgactggagtaccggagtgaacttcaacgtgctgaaaactgagtcgaaagtgaacggtacctggcagaaatacgatgtgaagacagcaagcccatcaaaagcgacagcctacattggctgggcaccggacccgtggagtctgcgcgtgcagagcaccacctcctttgacgtgagcgacgcgcagggctacaaggtcgatggctataccaccgtggatctgctcggcagttatcagcttccggtgggtacactcagcttcagcattgaaaacctcttcgaccgtgactacaccactgtctgggggcagcgtgcaccactgtactacagcccgggttacggcccagcgtcactgtacgactacaaaggcaggggccgaacctttggtctgaactactctgtgctgttctga

SEQ ID NO: 224849 - DNA, 789 bp, Klebsiella pneumoniae; identical to SEQ ID NO: 6025

SEQ ID NO: 224850 - DNA, 600 bp, Klebsiella pneumoniae; identical to SEQ ID NO: 91854

SEQ ID NO: 224851 - DNA, 1221 bp, Klebsiella pneumoniae; identical to SEQ ID NO: 8034

SEQ ID NO: 224852 - DNA, 912 bp, Klebsiella pneumoniae; identical to SEQ ID NO: 8033

SEQ ID NO: 224853 - DNA, 1005 bp, Klebsiella pneumoniae; identical to SEQ ID NO: 8032

SEQ ID NO: 224854 - DNA, 1404 bp, Klebsiella pneumoniae; identical to SEQ ID NO: 8031

SEQ ID NO: 224855 - DNA, 477 bp, Klebsiella pneumoniae; identical to SEQ ID NO: 8030

SEQ ID NO: 224856 - DNA, 186 bp, Klebsiella pneumoniae
gtgttcttcggtagcgatcacggcggcgagtgtggtgcactgctgtacgggctgatcggcacctgccgtctgaacggtatcgatccggaagcgtatctgcgccatattctgagcgtactgccggaatggccctccaaccgtgttgacgaactcctgccatggaacgtagttctcaccaataaataa

SEQ ID NO: 224857 - DNA, 351 bp, Klebsiella pneumoniae
atgatctcactcccatcaggtacccgtatctggctcgttgccggcgttaccgatatgcgtaaatccttcaacggactgggagaacaggtacaacatgtgctgaatgataatcccttctccggtcacctgtttatcttccgtggccgacggggtgacaccgttaaaattctttgggctgatgctgatggtctgtgcctgttcaccaaacgcctggaggaaggccagtttatctggcctgtggtacgtgacggcaaggtatccattacccgctcgcaactggcaatgctcctcgataagctggactggcgtcagccaaaaacatcccgccttaacgccctgacaatgttgtaa

SEQ ID NO: 224858 - DNA, 906 bp, Klebsiella pneumoniae; identical to SEQ ID NO: 6034

SEQ ID NO: 224859 - DNA, 1239 bp, Klebsiella pneumoniae; identical to SEQ ID NO: 6033

SEQ ID NO: 224860 - DNA, 585 bp, Klebsiella pneumoniae; identical to SEQ ID NO: 6032

SEQ ID NO: 224861 - DNA, 765 bp, Klebsiella pneumoniae; identical to SEQ ID NO: 6031

SEQ ID NO: 224862 - DNA, 306 bp, Klebsiella pneumoniae; identical to SEQ ID NO: 6030

SEQ ID NO: 224863 - DNA, 1206 bp, Klebsiella pneumoniae; identical to SEQ ID NO: 6029

SEQ ID NO: 224864 - DNA, 204 bp, Klebsiella pneumoniae; identical to SEQ ID NO: 6028

SEQ ID NO: 224865 - DNA, 840 bp, Klebsiella pneumoniae
atggtgacggtgttcggcattctgaatctcaccgaggactccttcttcgatgagagccggcggctagaccccgccggcgctgtcaccgcggcgatcgaaatgctgcgagtcggatcagacgtcgtggatgtcggaccggccgccagccatccggacgcgaggcctgtatcgccggccgatgagatcagacgtattgcgccgctcttagacgccctgtccgatcagatgcaccgtgtttcaatcgacagcttccaaccggaaacccagcgctatgcgctcaagcgcggcgtgggctacctgaacgatatccaaggatttcctgaccctgcgctctatcccgttattgctgaggcggactgcaggctggtggttatgcactcagcgcagcgggatggcatcgccacccgcaccggtcaccttcgacccgaagacgcgctcgacgagattgtgcggttcttcgaggcgcgggtttccgccttgcgacggagcggggtcgctgccgaccggctcatcctcgatccggggatgggatttttcttgagccccgcaccggaaacatcgctgcacgtgctgtcgaaccttcaaaagctgaagtcggcgttggggcttccgctattggtctcggtgtcgcggaaatccttcttgggcgccaccgttggccttcctgtaaaggatctgggtccagcgagccttgcggcggaacttcacgcgatcggcaatggcgctgactacgtccgcacccacgcgcctggagatctgcgaagcgcaatcaccttctcggaaaccctcgcgaaatttcgcagtcgcgacgccagagaccgagggttagatcatgcctag

SEQ ID NO: 224866 - DNA, 348 bp, Klebsiella pneumoniae; identical to SEQ ID NO: 6026

SEQ ID NO: 224867 - DNA, 540 bp, Klebsiella pneumoniae
atggcagttcgtggcattaacaaggtcattctcgtgggacgcctgggaaaagatccggaagtccgttacatccccaacgggggcgcagtggcaaacctgcaggtcgccacgtcggaaacctggcgtgacaaacagacaggggagatgcgggagcagacagaatggcatcgcgtggtgctgttcggcaagctcgcggaagtggctggcgaatatctgcgcaagggcgcgcaggtctacatcgaaggtcagcttcgcacccgtagctgggaggataacggtatcacccgttacgtcaccgaaattcttgttaagaccacgggcaccatgcagatgctgggacgtgccgcaggtgctcagactcagccggaagaggggcaacagttcagcggtcagcctcagccggaaccacaggcggaggccggtacgaaaaaaggtggcgcaaaaacgaaaggccgtggacgtaaggccgcgcagccggagcctcagccgcaaccgccggagggtgacgattacgggttttcagacgatatcccgttctga

SEQ ID NO: 224868 - DNA, 234 bp, Klebsiella pneumoniae; identical to SEQ ID NO: 19741

SEQ ID NO: 224869 - DNA, 435 bp, Klebsiella pneumoniae
atgaaaactgaactgaccctgaatgtattacagaccatgaacacacaggaatatgaagatatccgggctgccggaagtgatgaacgccgtgagctgactcacgccgtgatgcgggagcaggatgcgccggataactggacgatgaacggcgagtacggcagcgagtttggcggctttttccccgtccaggtccgtttcacgcctgcccacgaacgttttcacctggcgttatgttcaccgggcgatgtctctcaggtctgggtgctggttctggtgaatgccggtggtgagccgtttgcggtggttcaggtacagcggcggtttgcaccggaagctgtcagccattcactggcactggcggcgtcactggacgcgcaggggtacagcgtcagtgacatcatccatatcctgatggcggaaggaagtcaggcatga

SEQ ID NO: 224870 - DNA, 720 bp, Klebsiella pneumoniae
atgagcgcacgttcacaggcactggttcctctcagcacagagcaacaggccgcatggcgggcggtggcggagaccgaaaaacgccgccatcagggtaacacgctggctgaatatccgtatgcgggggcgtttttccgctgtctgaacggaagccgcaggatatcgctgtctgacctgcgatttttcatgccgtccctgaccgcagaagaactgcacggcaaccgtcttcagtggctgtatgccatcgatgtgctgattgaaacacagggcgaggtttgcctccttccccttccaggcgatgcagcagaacgcttgttcccgtcggtgcggtttcgtgtcagggaacgcagtcgccataaatccgcgctggtcatgcagaagtacagccgccagcaggcgagggaggcagagcagaaagcccgtgcgtaccaggcgctggtcgctcaggctgaaatcgaactggcattccattcgccggaaacagtcggaagctggtatgcacgctggagtgaccgggtggcagagcatgacctggaaaccctgttctggcagtggggcgagcgttttccgtcactggccggaatggaacgctggcagtggcaggatatgccattctggcaggtcatcgcagaggctggtatggcggcaagggtggtcggtcatgctgttcgtgagatggagcggtggatggtgccgaacaaactccgggaggcagcgtga

SEQ ID NO: 224871 - DNA, 384 bp, Klebsiella pneumoniae; identical to SEQ ID NO: 8120

SEQ ID NO: 224872 - DNA, 354 bp, Klebsiella pneumoniae
atgtcagaaacggtacagattgagtcgttcaacgcagaatttttgaccaaacagaaactacacgacctgattttttaccgcaaaagttttgatatcacgaatgttaacgacatcagtgaaaccgtcaaaatagtggagtatgtgattgaacatcagcagaagaaattaacctgccgcgtatacaccgaatacagaagcactgcggtggcaggctccctatggtcaccaacagcacttctgggagctgtgagtgctgccgcaatcggtgtccataatctggcgacatggaacccggactatgaaattggtaagaattacgtcaaaagaaccatatctgtaaggtataaaaagtaa

SEQ ID NO: 224873 - DNA, 366 bp, Klebsiella pneumoniae
gtggccgccgcgcgccgcagccgtgtggaatgggaaaacagacagcgcaaaaagcaggggctggataccctgggtatggatgaactgatagcgaaagcctggcgttttgtccgtgagcgtttccgcagttaccagacagagcttaagtcccggggaataaagcgtgcccgtgcgcgtcgtgatgcgaacagggaacgtcaggatatcgtcaccctggtgaaacggcagctgacgcgtgaaatctcggaagggcgcttctctgccagtcgtgaggcggtaaaacgtgaagtggagcgtcgtgtgaaggagcgcatgattctgtcacgtaaccgcaattacagccggctggccaccgcttccccctga

SEQ ID NO: 224874 - DNA, 312 bp, Klebsiella pneumoniae; identical to SEQ ID NO: 8084

SEQ ID NO: 224875 - DNA, 543 bp, Klebsiella pneumoniae; identical to SEQ ID NO: 8085

SEQ ID NO: 224876 - DNA, 861 bp, Klebsiella pneumoniae; identical to SEQ ID NO: 8086

SEQ ID NO: 224877 - DNA, 600 bp, Klebsiella pneumoniae; identical to SEQ ID NO: 8101

SEQ ID NO: 224878 - DNA, 123 bp, Klebsiella pneumoniae
atgctgcgcttctacgtgaccggcggccaggtggacaacgagcacaccgcgaaggtaaacggcacccaggaccagcagctggattcgctgaacgtcggcgggatgtttgaggcgtggttctga

SEQ ID NO: 224879 - DNA, 150 bp, Klebsiella pneumoniae; identical to SEQ ID NO: 19381

SEQ ID NO: 224880 - DNA, 546 bp, Klebsiella pneumoniae
atggcgcagcaaaaatcggtgaccctggttatcagccatctgctcgatccgcaacacagccagcgctacgaagagtggctcggtaaaattatgcccattgcggcagaatttcccggccatcttggggcgaatgtgatccggcccgccgcagggcagaatctgtggagcgtcataatccgcttcgataccctggagcacctctacgcctggacgcagtcagaaacccgtcggcaactggtggctgagattgccccactgctgacggaaggcgatcggactgaggtgcggactgaaccggccttctggtttaccccgccgacggtgaacgtacgccagccgcggcgctggaaacagtttctgatcaccctgctggtgattttccccagcaccaacctggtgcctgcggtgaccggcatgctgctgccgtcgcttaaggggagcctgctgctgcacctcatcaatgatgcctgcgtggttgcgctggtggtctggttctggatgcccatcgtgacccgcctgtttgctggctggttgaagaaaaactga

SEQ ID NO: 224881 - DNA, 1869 bp, Klebsiella pneumoniae
atgtcgcaaactgccacactgattctgacccacggtcagattcataccctcgatcgtgcgaatcccctggcagaagccgtggccatcgccgacggaaaaattgttgccaccggaagtcacgatcggatcatgagctttgccgccgaggggacgcaaatcgtcgatctcaaagggcatacggtgatcccgggcctcaacgattctcacctgcacctgatccgcggtgggttgaactacaaccttgagctccgctgggagggcgtcccctcgctggcggatgccctgcgaatgctgaaggatcaggcggatcgcacgccgtccccgcagtgggtgcgggtggtcggcggctggagcgaatttcagttcgctgaacggcggatgccgaccctggaagagctgaacgaggcggcgcctgatacgccggtgtttgtgctccatctctacgatcgagcgctgttgaaccgtgcggcgctgaaagccgtgggatataccaaagagacgccggatccggcgggcggcgagatcgtccgcgatagccacggcaacccgaccgggatgctgatcgccaaaccgaacgccatgatcctttacgctacgctggccaaggggccgaagctgccgctggatctgcaggtgaactccacccgtcaatttatgcgcgagctgaaccgactggggctgaccagcgccatcgacgccggcggcggcttccagaactatccggaagattacgaaattatcgaacagctgcacgcgaaagatcagatgaccgtgcgcatcgcctacaacctgtttactcagcggccgaagcaggagctggaggatttcgaacgctggaccgacatgctgaagccggggcaggggactgacttctatcgcgccaacggcgccggcgagatgctggtattttcggcggcggattttgaagatttcctgcagccgcggccggatctgccgcaaggcatggaggatgagctggagcgggtggtacgccatctggtggagcatcgctggccgttccgcctgcatgccacctacgatgagtccatcagccggatgctggacgtgtttgagaaggtgaaccgcgatatcccgtttaatggcctgcactggttcttcgatcatgccgagaccattaccgagcgtaacattgagcgggtgaaggcgctggggggcggtattgcggtgcagcatcggatggccttccagggcgaatattttgtcgatcgctacggcaaagaggcggtgaaacataccccgccggtagcaaagatgctggcgctggacgtgccggtggggctgggcaccgatgcgacccgcgtcgccagctataacccgtggaccgcgctgtactggctggtctccgggcgcaccgttggcgggatggcgatgtatgacgacgccaaccgcctgtcgcgcgatgtcgcgctggagctatggacggcgggcagcgcctggttctccagcgagcagggcaagaaaggccgtctggccgccggtcagcttgccgatctggtggtgctgtcgaaagactacttcagcgtcgcggaagaggagatcaaaggcattgagtcggtgctgacggtggttgacggcaaagtggtctatgccgccggtcacttctcgccgctggcgccgccgcctattccggtgctgccggagtggtcgccggtggtgaaggtcccgggccattaccgttccgctccgccggcgacggctaaaatcggcgccatggtgcagatgcaccagtgctgcggtagctgtggcgtccacggccatcagcatgatattgcgcgtaagtcgtcgattccggtctctgacgagcaggccttctggggcgtgctgggctgttcctgctttgccttttga

SEQ ID NO: 224882 - DNA, 1119 bp, Klebsiella pneumoniae
atgctgggcgtggaaaccatgagtattttgctgttaggctttattttcaacctgattatcgcccgctgtaccaagtataagtatatctttctgaccggccatcattcgttctttctcgcctgcctgttctccgccgttctgcaggcggcggagttccagggctggatgttgatcctgatcggtggattcctgttgggctcatggtcggccatctccccggccatcggtcagcgttacaccaggcaggtaaccgaagacggcgggatcgccatgggccatttcggctctctcggctactacctctcggcatggatcgccagccggaccggcaatccggcaaattccttcgccgataccgaaatttcagaaaagtggggctttctgcgcgataccacggtcaccaccggtatcgtgatgtttgttatctactttgtctgcagcgctgtcgccgggtcggcgtacctgagcaccatcaccgaccaaaacatgctgatcttctcggtgctgaccggtctgcagttcgccgttggcgtagccattgtctataacggcgtgcggctgatcctcggcgatctggtgccggcgttccagggcatcagccagaagctgatcccggactccatcccggccgttgactgcgcggtgttcttcacctttagccccaccgcggtggtagtgggattcatcagctcctttgtgggcgggctggtcgggatgctcttgctcggcgggctgggcatggcgctgattattcccggcatggtgccgcacttcttctgcggcggcacgtccggcgtcttcgccgacaaactgggcggtaagcgcggatgtatcatcgcctcctttatcggcgggatcttcctcgccttcctgccggcgatgctgctgccggcgctcggcaacctcgggtttgaaaacagcaccttcgccgatttcgacttcgcggtatggggcatcattatcgggaatgctttcacccagtttggtcagatcactatctatctgatttgtctggcgctgctcgtcgcgctgctggcgcctttctgcttccgtcacgtccaggtggtgggcaacacgctcagctatgaggagctgacggcgaagcagaaaaatgaataa

SEQ ID NO: 224883 - DNA, 720 bp, Klebsiella pneumoniae
atgaaagaacgtggaatgatttttaacgctgagatggtgcgggccattctcaacggtcggaagacgcagacccggcggattatgaaacctcaaccagaaccatgcccccgtggtggacattggtggccaagcaacgtgtttaaaacaatgcttcatgtcgaagaagaaatgcagaacgggaaaggcggctggggtgggcttgttggagatgcttgcccgttcggggacgtcggcgaccgcatctgggtgcgtgaggcttatcgtttcccggcatcgttagacgatgttagcccaactggtgttggtgaaatggctgtggcaacaggatacagaaaaccatgggcgccgaccttctacgagtttacaggcactttcagtgatggatggaaaggattcgaaacccctccaaaagtttctgacgccggaaagcttcgcccatccatccacatgccgcgctgggccagccgcattctgctggaaatcaccgacgtgcgggttgagcggctgaacgctattagccaagaagatgctcaagctgaaggcatggagcttactgggtggcggccaacatactctgacccggatagcggcggcgaggttatgacgccatacgacaactttgctgagttgtggtcatccatctacggcgacgaaagctggaaagctaatccctgggtttgggtcatttcgtttaagcgcgttgaaggcggtgcagcatga

SEQ ID NO: 224884 - DNA, 201 bp, Klebsiella pneumoniae
atgagcaaatacccaagagtcggcagtgttgccgccaaaagcaaaaacacctcggccaaatgcaagtgcggtgcagttgcgaagtttaaaaccacagttgaagtaaatgttttccgtggtgatgacgaagtggtctggtcttgtaacgagcacaaaaaagactgctcatttttagtcggcgggcaaggcggtgctgcatga

SEQ ID NO: 224885 - DNA, 705 bp, Klebsiella pneumoniae
atgaaccagccaatgtcttttgtatggaataccgaagctgccagcctggcgaagaaagcaggcgccactggcggaattagcgaaactggtgcttatgagggattcattacctcagccatttataccttcggtaaggatggcagtcagtcacaggcgcttgagctgagcctggacagtgacggcgccaaagccaactacctgcgcatcaactacatcgggaaagatggccagcaaacttttggcatgggtttgatctctgcccttctctgggctgcccaggttaaaagcgctcagccagaacaagtgcaaacagaaaatggtgttgagtggcattgcccggcgctggttggcaagaaagtgggcctgttcctgcagaaagtcctgtacaccaaaagcgatggaactgacggctataaattcgaagtccgccatgttttccagcctggctcgcgtcgcacttatgccgaatacagcgaaaacgaagcggcaaccgctatcgctgccctggaaaagtcgatgaaagataaagacgatcgcgtccagggtaatcctcagttttccggtggtggtcgccagcaggctggcgctaatccttatgcgcaaaaccctaatgcagtacctcattcccggcttcagcaggctgctaatcagcacgctcagaacatccagaatccgccggacttcgacgacgacattcccttttga

SEQ ID NO: 224886 - DNA, 669 bp, Klebsiella pneumoniae
atgggaacgcctgtactcatcctgggtgatagcggcgccggcaagtcatacagcctgcgcaacttcacacctgacgaagtgattttactgcaatgcattccgaagatgctgccattccgcgctaccggctggaagctcaacgggaaagagctgccggatggctctgtgcaacgtggaaacatcatccggtttgatgcctgggatgcggtgctggactccatcaaccgcatggttctttcgaagacaagacgcgtactggttatcgacgatttccaggtcgtcatgcagcacgaaaacatgatgcgcgcataccagaccgggtatcagaagtttacggaaatggcagatcacgtttggcaaatcattatggccgccacacggctgccggacgacttcagggtttacttcctggcacataccgaagagtcggacgggaaaatcaggatgaaaaccaccggcaagatgttgaacgaaaagcttacgcctgaggggtatttctccatcgttctgcgggccatcaagaaagacgggaagcacgtttttttgattaagggtgacgacaacgacaccgcaaaagcgcctccggacctgttcccggggctcactgaaatggataacgaccttaaagccgttgatgtcgctatcactgaatttatgaccgaattataa

SEQ ID NO: 224887 - DNA, 660 bp, Klebsiella pneumoniae
atgttgcgcgtaattgataccgaaacaaccagctttgaaggcggcattgtggaaatcgccagcgtcgatattgaatttggcgcgatctgcaacccgatgagcgattttgtccgccctccggaagcgatcggttttgaggctatggccattcaccacataaccgaagacatggttgccgatgctccgttcatcagcgaggtaatcggccgctacctgggtgccagcgtttatgtggctcataacgccgcattcgacaaaggcaagcttccacagattgatgccccatggatttgcacgctgaagctggctcggaagctttatccggagtttgaaagccatggcaaccagtacctgcgttaccgccttgggcttaaaccgacccttcctgaagggctctatgcacaccgcgcgctgtatgactgctatgtcaccgcggagctgctgatgtacatgggccgcgaggcgcagtggacgatccgcgagatgcgcgagatatcggcaagcccatctcttctctaccggatgcgtttcggtaagcacaagggaaaaacctttgaggaggttgccgcagaggataaggggtatctccgctggcttctcgggactgatctggacgaagacatggaattcaccgttaagcactggctgaaaggagcctga

SEQ ID NO: 224888 - DNA, 156 bp, Klebsiella pneumoniae
atggtaagtcaggaaagcggaatgctggctctggccatggtgattgttgcctatgacctgcaaccagaagacctcgataacgcggctaggcaactggccgaatatgacgcagtaagcgacgccaatacggagatgaaagatgttgcgcgtaattga

SEQ ID NO: 224889 - DNA, 396 bp, Klebsiella pneumoniae
atgcaacctttaccgcgtttaacttctgaacgtcttgcctctttgcctgcaggcacacgcctgaaaatggggggtcacattgtgaagcttgttggtcgtggggtgtttaccaacgatgctggcatcacccagaacatggtcgattacgtcgattcccgcggcgtaccgggcagctttgaggaaaaaatcttcctctccacggcaaccgaacaccttaacgcagtcatgtgcgaacactgctacgcacttcgccatccgaatgattgcgtcgttcgcaacatcacgaactacatgaccagccgccaggcgcatttctgcgacgacaaagggtgcgccgagaaatatttcattaaacacccggggcgccagaagtcctcacggagaacgagatggtaa

SEQ ID NO: 224890 - DNA, 837 bp, Klebsiella pneumoniae
atggatcaagactcacaaagcacagattcactatttgattatttttatgtggataaagagcgtgtaaatgctataactgcgcagcttttcccttctggagttcttaatagtattaagcagacgtctggagagtctgaaaaagaccttaaagagcttaaggcggggctgtcattgataggcgttaaaactaacgcctctgaatcttggaatcgcagtcaagaaagattatttgactcatcatggagcatcccgctgaatcttttagataaactttctgaatcaggaaggataaaagcgagcttaaatgatgctagactaggcgacatagtcctaataaaaggtatgatgaaaatattcgatgcacaaatggttcacttgtgcatgccaatagttaaaaagataaaaatcaacgagatgaagaatgagaaaaatcctaaagctaagggcctactgaaggaaagcatctcagaatttgaaaatgcggaggagttagtaaagatgcttcctccaactacgcacattgactttgctgatagttatggaaactacagttggatgtcggttgaaccatccaatctgacaactaccttgagcgatgtttctttaaagtacggccccttcattcccggtgagtggcatatactatgtattgttgatgcttatgctgatgatacaaaactggataatccaaccgcaccataccctacagtatccaatgatttaaaagatgccatgaatagcatgttaatcatgatgagaaatataatggggagacctgtaggatcctttggtataacaccactaattatttttcgtggcttagcaaaccatcgttaa

SEQ ID NO: 224891 - DNA, 180 bp, Klebsiella pneumoniae; identical to SEQ ID NO: 188882

SEQ ID NO: 224892 - DNA, 855 bp, Klebsiella pneumoniae; identical to SEQ ID NO: 203452

SEQ ID NO: 224893 - DNA, 336 bp, Klebsiella pneumoniae
atgactgatatcaccgaactggcgcagagcatgaaagcggcggcgaccaacgtgaaagagaccgcccatatagcgcgatattttaaggcaaccatagcccgtcaaacattcaaagagctaatgacgccggaaaacatcctcgcgctggtagaggcgctggagaaggcgcagcagcggattactcagctggagtaccgagccgtgaagctacctaagcgccacagcatgctgcttcgtgaagacttcaatgaagactatcacaccgaaatggccttcaaagcagaagaagtacaggcatcgctggactccgctggcatcaaggtggaggctgagtga

SEQ ID NO: 224894 - DNA, 189 bp, Klebsiella pneumoniae
atgaaaatgggtgaacacatggagccggttatcgagctcctggaagaactgaacggcaacaacactgacgcaaaactaaagctactcgccctggttatctcggaatacatgctaaatgcggatgttactggctttgaggtcaccgcggggaagatgaaagttgccgtagatataagcgtggaggaatag

SEQ ID NO: 224895 - DNA, 258 bp, Klebsiella pneumoniae
atgtcacagtggaacattgcagctaagtcaaaagacgagcaggacaaggtcaacgttgaccttgcagcgtccggtgtcgcctacaaagagcgcctgaacatgccggttgtcgccgaagtggtagccagagagcagcccgagcatttgcgcgagtattttatggagcgcgtccgctactaccgcgagcaaagcatccaactccccaaggcatccgaaccgcgctatctggaaatgacagagcagaacgccaagaaatag

SEQ ID NO: 224896 - DNA, 141 bp, Klebsiella pneumoniae
atgagccttgacgttatcgaacgcatccgcgaacgctggcaaaagctccgcctcctgcgtagccgcggcaccgtactggttgactaccgcatactgagaaatttcgttcgcatctatcagaccctgggagagaaagcatga

SEQ ID NO: 224897 - DNA, 486 bp, Klebsiella pneumoniae
atggctgcactaaaaccagaagtgagagcctttatcgttcaagagctcgcttgctttgatacgccatcccaaatcgtcgagtccgtacaaaaagaattcaaggttcaggtgacgcgccagcaagtggcatcacatgacccgacaaaagtggcaggaaaaggcctggcgcagaaatggatcgacctcttcaaccatacccgtgaccgcttcctcaacgaaatctccgacatcccgatcgccaacaaagcctaccgcctgcgcgtcctgcagcggatgtcgacgactgccgaaggtatgaaaaacctcggcatgacagctcagttactggagcaggcggcaaaagaggttggtgacgcctacagcaacaagcaaaaggtcgagctgaccggtaaagacggcggcccgctgaatcaggtgacgtacaccgctgaagactatgcgaaggcccagcagaagctggagggaaggttagaagggctggactga

SEQ ID NO: 224898 - DNA, 1677 bp, Klebsiella pneumoniae
atgagcggaattatcgaatgggatgacctgtcattcccggagcgcgtgatcatccgttcaaagtctacgaagtcattcctgaacttcacccggatatggttcgagctgattcagggcgatcggttgctggttaactggcatcaccgcctgatggcttcgaaaattgatgatctgcttgccgggcgtcttatcccgcgaaacctgattatcaacatcccgccaggcggcacaaaaacagagttcttctccatccacttcccggcgtatgtcaacgccctggtgcaggagaagcggcttaaacgctttcgcaacctgaatatctcttttgctgacacgctggtaaagcgtaacagccggcgtacccgcgacattatcgccagccgcgaatatcaggagttctggccctgctcgtttggtatcaaccaggcggaagagtgggagataaaggatgaacgagggcgttctatagggcagacggtatcgcgctcaagcaacgggcagatcaccggtggtcgtggtggctactacggaccagagttctccggcatggtgatgctggacgactacaacaagccggtggacatgctaagcgagtcccgacgcaaaagcgctaatacgctgctggtaaacaccattcgctcacgccgcggcgataagtcgaaagagcacccgacgccatttgtaagcattcagcagcgtctgcacaccgacgacgcaacgggcttcatgcttgccggcggaatgggggtgccgtttcaccatgtcgccataccggccatgatcgacgagaagtacatccagtcgctcgatgagccatggcgttcgctttgctgggaaacggtcaaagataccgactctgtggtcgttggaggcgttcgctactggtcctactggccgcagatggaagacgttaacgacctcctgcagctgtgggaaaaggaccgctacaccttcctgtcgcaataccagcaaaacccgatggcgctgacaggcgggattatcgacaccagctggttcagaacgtacaccacgctgccgaagcttacgcaccgcgccgtgtacgtcgatacgaacagcgggaaggtagaggactggctggattacaccgtatttacgctggctggcatgggcgttgacgggaatctgtacatcatcgacgtcgttcgcggtcggtgggacccggaagacctcctgaagaaagcggaagaggtttgggaaaaatggcgcctgtctggctccatgcgggttatgccactacgccatatggccattgaagagaagcaagctggacagggcctcatcaccacgctgaaaaaacgtagccagactcccgggcagctcgccatcccggtgagggaaattccgcgcggcaccgggcagaacaagctcgttcgctgccttaacgtcatccctcaaatcaaaaccgggaaagtgttcgtccccgcgacgcacaccgacgacggacagaagctttccagcatcttctacgaggacggcacgatcgcaggctcaacggagtgggtgctgacggcgatgacggaatgcgctgctttctccgctgatgacagtcacgacaacgacgacatccttgatacctggatggacgcaatcgacgacaacctgatttccggcccgcagccgatggttatcgacccgaatcaactcaggagaatttaa

SEQ ID NO: 224899 - DNA, 1521 bp, Klebsiella pneumoniae
gtgtggtggtttaaaaagaaagaagtcgccgcgcctgagccggcaaaagaacctgaagcgccgaaggtcgggatcaggcccgaggccgtggccgaagtccacgcattaccgaaaagagagtttcaacgctacgaaccgccgaaaggggtgatccccgaggctatcaaaagcgccattctggcaatggactccacgccttacgatgatctcaatgctgcgtatggcggttacggctacggcgactttgatagctttcccggatacccgtacctggccacgctggcgcagaagcctgaatatcgcaagatggtcggcaccatcgcggaagaaatgacccgcaaatggataaagctcaaaactgtcggcgatgaagacaaggcggatcgggtaaaacagctcgaagaggccatgaagcggtttaaggtgcgcgagcgctttaaagaagccgcagaacacgacggctactttggcggcggccagatttacatcgacgttcgttcgccgcggggcatctccgcatggatggacgacaacgagctgcaatcgaagctcttcatgagcgacaagaagatcacgaaaggcagcctgcaggggttcagggtcatcgagcctatctggacctatccggggatttataactccgacaacccgctgagcccggatttctacaagccgacgcagtggtttgtcatgggacggaccgtacatgcaagccggatgattgatttcgtctcgcggcaggtccctgatctgctgaaagcgtcgtataacttccgcggcctgtcactctcgcagattgccgagccatacgtcaataactggcttcgtacccgcgacagcgtcagcgacatgatccactcctactcgataccggttttcggtacggatatgagccagatcctgacaggtggcgcagcggatacgctgattgcccgcctgcaggttatgaatcagtgtcgtgataaccgcggggcgttcgctgtcaataatgataaggaaaagccggagaccgtggagtttgtcagcgctcctatagctggccttgatgccctgcaggcacaatcgcaggagcagatgtcatcggtatcaagcattccgctggtcaaactattgggcattacgcccaacggcctcaatgcatcgtcagacggcgaaatccgcgttttctacgattacattcacgccctgcagcagtctgtttttaaagacaacctgaagcgtgtgatggacatcattcagctctctgagtttggcgacattgacgacggcataaccttcgactttgagccgctgtacgaaatgagcgctaaagagcgggcggaaattcgcaaagtagacgcggacacagacgctgtctatgtgggcgccagcgtgctctctggcaacgaagtccgcgaaaaaatcgccggtgacccggactcgccctatcactctctggacctgaatgatgacctcgaaatcgaagacgactacgacgaagaggaagaaacagaccctgacgataagggcggttcatcctaa

SEQ ID NO: 224900 - DNA, 699 bp, Klebsiella pneumoniae
atgcaggcatctgttgtctactggctgtcggcaaactatcgggccagcggcgcggctgtcgccatggatgcatcacctgcagtgatgatgcgtaatgccatgcagaaactggctaagcgctggacgcggcggtttgatgacatggcgcaaaagctggccgacaggttcgctaacgacgccatgaaaaacgcggatgcttcactggccacagccttcaaagatgcggggtttactgtcgagttcaagatgacctcgcagatgaataacgctcttcaggcgaccatcgccgagaatgtcggcctaatccgatccatccccgagaagtatttcaccgaggtggaagggctggttatgcggtcggtagcgcgtgggcgcgacttgtcctatctcaccgatgaactccagaagcgatacgggattacccggcgccgtgcggcgttcattgcccgagatcagaacaacaaggctacctcagtcgttcagtctgcgcgacagcaggcgctcggcattacccagggaatatggaagcactcccatgcaggcaaaaagcctcgccagtcccatgtgaaagctaatggcaagctgttcgatctctcagaagggatgctcatcgatggcgagcacatcatgccaggcgaattaccaaattgtcgttgcacctgggaggctgtcattccagggctttcaaaacaggattga

SEQ ID NO: 224901 - DNA, 1170 bp, Klebsiella pneumoniae
atgaactccacagagtgcttagctttcgatcgcgcctctgtgcgcaccatcgacgcaaatgggcgccttcagatttcacgaacgaatatcagcaaggcaaacgtcaacgcctactacggacgagagataccaagaagcgaagagcttgggctcgatcccaacaaactttaccggctttggcgccacccggacgagctccggaaagcagccaaaaccttcaataacatccccgtgctcagcaagcacatccccgattttcccaccgacccgcccaatgaatttcgtgttggcgtgacgcactccaatgcggagtttgacggcacgtatctcacggttggtatgtcgatatgggataacagcgcgattgctggaattgagagcggagagcagcgagagctatctgcatcgtacaagtacgtcgcagacatgaccccgggtgtcacccctgacggcgagacttatgacggcgttatgcgtgacattttcggaaaccacgaagcgctggtccctgacggccgcgcagggccagatgtactggtcgcagattcattaccaccggagcttaatcacatgcgtaaacataaggtagcggcgatccgcgccacccttaagccacttctggcgcaggatgcagatctggaggcagaagtccgcaaagctcttctggctcttgatgaggccgaaaaggaagacgaaaaagaaaacaaaaccgccgacgacgaagacgacgacgagaaggacaagaaaaaaacggcggatgatgaggacgacgaggaagacaaggacaagaagaaaacagccgaagatgaagacgatgaagaagacgacaaagtctccaaaacggcaatggactctgcgattcgcctggcaaccgacagcgcaactaaaaaggctgcggaaaacttccggaaaatccgtgaagcagagctggtcgtccgtccgctgatcggcgacgttgttgccatggactcagccgaagatgtctatcgcaccgcgcttgagcaaagcggtgtggatatcgccggcgttcacccgtccgcttatccggcgatggtcaaaatggcgatcagccagaaagaaaattcacgccctgtcattgcgcaggattccgcttccgtcagtgagttcgaaaaagcattcccgaccgctggcaaactgaaacgaggttaa

SEQ ID NO: 224902 - DNA, 483 bp, Klebsiella pneumoniae
atggcaggttttcagacacgaattaaccagtatccggcccccggcgtcgaagggggttttgctggcactaacccacacgcgacctatcaggccggtgagggcgccctggttgctggcgaggacggccttactgtcggccgctttgcctgggttgttgacggtgtggcttccaatgccggtagcggtgttccgtctggctttgttcatcgtgacggtcaggcgtcgatcaccatctggctgggtcaggcatccatgcttatccagcccggccgcgaaatcaccctgatggtagccggtgacttctgggccaaaacgtcaaccgctgccacccgcgggcagaaggtttttgcatccctgaccaccggtgaggtgcaagtcgccgcagccggcgcaaccgtggccggttttatcgagaccgcattctatgccgcaagcgattgtgacgctggcgagaaggtcaaaatcagcacctggagcaagtaa

SEQ ID NO: 224903 - DNA, 1038 bp, Klebsiella pneumoniae
atgaacgaatttcagcgacactacgccgcagccagcgggaaatatggcattgtgctgcccggcgcgaaggactacctgaagccggagtttgcggagaatttcgcgctggcgatggatgcccagccgcaaatggttactgcgaataacgccggtatcccggcctacttcacgaactacgtcgatccggaacttatccgcgttctcgtaacgccgatgaaggccgcagagattatcggtgaagtgaaaaaaggcgactggacgacgctgacctcgcagttcccgatcgtcgagtcgactggtgaaaccagcgcttacggcgacttcaacaacaacggcatgacgtccgccaacgttaactgggtaccgcgccagtcattccattatcagactcacacccgatggggtgagcgcgagctggacatgtacggcgccgggcgtatcggctatgccgccgagctcaatgtggcctctgcacttgtgctgaacaagttccagaacaagtcctacttctacggcatcgccgggctggaaaactacggtctgctcaacgatccgtctctgagcgctccggtgactccggcggcgactggttccggtgggagcgttacctgggcaacgaaagacgggcaagctgtatatgacgacatttccggtcgcctctataagcagctggtctctcagaccaaaggcctcgtagagcgtaccgatcgcatggtgctcggcatgtcgccggaaatggaagtcaacctgaccaagacgaaccagtacaacgtgaacgtcaccgatcagttgaagaaaaacttcccgaacctgcgtatcgaaaccgctgttgaatacagcaccgacgcaggtgagcttgtgcagctgatcgttgagcggctgggtgagcaggacaccgcttacgcagcattcacggagaagatgcgcgcacacgctgtcgtggtggaagagtcttcctggcggcagaaaaaatccggtggcacctggggtgcaatcattcgtcaaccgctgggcattgccagcatgatcggggtgtaa

SEQ ID NO: 224904 - DNA, 327 bp, Klebsiella pneumoniae
atggccgaaacagtaactgtaggatgcaaactgccgaacggcctgatcctggaacagggtgggtacaaagtggagcttaacggctccaactcctctctcgttttcggcggctacggcctgaccgaaaacgtggacaaggaagcgtttgaggcgtggctggcagtacatgctgatcagccctacgttcgcaaagagctggtgtttgcccaggcgaaaaccagcagcgcccaggcgaaagcgaatgaaaatgcttcggagaaaactggtctggaaggtctggatcagaacaacccggccccgggcgttgagaaggcggacaaaaaataa

SEQ ID NO: 224905 - DNA, 444 bp, Klebsiella pneumoniae
atggcgatcgttgtctttgatgttgccgcatttcgtgagcgttatccggagttcgatgccgtaagtgaaacgctgcttaatgcgtacttcacggaggcaacgatttacctgaataacacggacagcagcccggtaaaagatatctctatccgggctcttttcctgaacatgctggttgcgcacattgcggcgctgaattcaggcgtaaacggcgaaaaggcttctggtctggttggtcgtgtggcaagcgcatcggagggttcagtgtcagtctcagctgacgcaggcccctcaagcgaaagctcctggtggtataagcaaactacttacgggtcagcttactgggaggccacaaagccttacaggacaggtttttatgtccctggctcatccccttcgatgtaccctggccattataaccgccgttctttcatccggaggtag

SEQ ID NO: 224906 - DNA, 564 bp, Klebsiella pneumoniae
atggatggaatgtcaggcggcgataagctgatggagcacctgcagtcgatcgcaaaggggctgtcctctggcgatgatttgaaggttggcttccttgagggggctaaataccccgacgggacgccggtagcacttgtggcagccaccaacgaatttggcggcactgtaaaaatcccggcgcataccagggatttgaacttttacgttcgccgtgacggtgtttcgcgcttcgcaaagccatcaaaggccaatttcgcgcagtcagtaatgatacccgagcatatcgttacgatcccatcccggccgtacttcaggaagaccatttctgaacatggtccggagtggggcggagagctcgggaaactcatgaaggcaaacgattttgacgcccgcaaaagcctggagctgatgggggagcggatcaaggggcagattcagtcgtctatcatcgccttttctgagccgccgaacgcaaaaagcacggtcgacaaaaaagggtttaatgacccgttaatcgactcggcccacatgctgaactcggtcgactacgaggtgaaagagtga

SEQ ID NO: 224907 - DNA, 369 bp, Klebsiella pneumoniae
gtgaatcttcattccatagtgcgaaacgccattagcgcggttaatcctcgcgtcgaggcgcagatttaccgctcgatcggcccaatcaaaaacccggattattcgacctctcctggcttcgatccgccggtaacgatgatggtgcaaaagcagtcgctgagtcaggaagatatcaggcacatggataacatgaacatccagggtgtactggtcagcatctggactgatggcaactggtgcggcattaacagggatcggcagcagggcggcgataagttcatcatcggcgatgaaatatggcttgtcgttgctgtgcctgaaatctggccggactggacgagggttatcgcatgtcaacaattgacgtag

SEQ ID NO: 224908 - DNA, 552 bp, Klebsiella pneumoniae
atgtcaacaattgacgtaggcctgcaggtcactgaaaaagatctgtttaaggcgactggcaatttcctttctgccctcttcccggatgcagagatcaggcagactcagcaaaatcagaccgccatgccgaaaggcggcttcataactatgacgccgctttttctgactgacctctcaaccagcgctgtcaattacgagtatgacggcgtgagtgattacgggcgggcagaacttcgccgcgttgatgaatggcaatgtcagctcgatttctacggagatcaggcgcaaaacaatgccagcatcttttcgcgtattgcccgttccgaattcgcatgcacctggttcagggaaaacgcgaatgtcctggtgccgctttattccggccccccgcggcaaacctcgatgatcaacggcgagaaacagtgggaatcccgctggacgcttgaattccatgcaaacccgctgattgtcgtcagcgttcctcagcagtttatgacaggcgcagatgtgatatcgcagccggtcgacgtgagatttcctccggagaaataa

SEQ ID NO: 224909 - DNA, 1482 bp, Klebsiella pneumoniae
atggcaatttcgctatcaaaaatcgcccagatgcttcccggcgtactgaaggcgacagggacggctattgatctcaatggcctgttcctgaccgacagcgcatacgcgccggttggtgcagtaccctcattttccagtgcggatgaggtaaaggcgtacttcggcagcgcgtcgattgagtacaccgccgcggtgctgtatttcgccgcattcaccggtaaaacacagatgcctggcaagctgtattttagccgattcaatactgcagcagtggcggcattccttcgttccggatcgcacgccgcgaccacgctggcacagctcaagttgctttcgggtacgctgactctgaccgttgatggtacggaggagacttctgcggctatcaacctcagcggcgccaccagttttgataacgcggcagagctgattgaaaccggcattggctcctcggttgtagtgacctgggatagcgtgctgaagaaattcatcatcacctctgccaccacaggcgtggatagcaccattacctttgccgatgaaggtacgcttgctacgggtctgaaactgaccgaagcgaccggcgcggtgatctctcagggtgcggcgccggcagtgattgacgatatctttactgccattctggccaaagagcaggactgggtaacattctccacgacgttcgctgtcaccaaagaccaggctaatgcgtttgctctctggacaaacagccagaaccaccgcttttcctatgtcccatgggacgcatcaggaacggcaatcgtggcgggcagctcgaatgcactggtgtacgacatcatcaacacctacgcctataacgacatctgcccggtgtatggttatccgaaccacgcagcaaacgctatggggtttgtggctgcgctgaacttcacgcaggccaatgggcgctgttctctgaatggtcgtcaggtgtccggcctgctgccgatgatcagcaacgatactgattacgatgcggctaaggccaacggctataacttctacggcaactatgcctcgaatgccgtcgaaaccaaccagtgggcgcctggctctattaccggtgattatgcgtggcttgacgcctgggctggtcaggtatgggtaaatgctcagcttcaggcggctctcgttgcgctgttccagcaggcgagcaatctgccttacgcagcagccgggaaagctcgtattgagtcgtgcatgaagccgaccattgagcaattcagggcatggggtggcatgacggcgggaaccgatcttgaccagtcgcagatcgaccagattaacgccatcgctggcgtcgatgttacggattcgcttctggctgaagggtattacgtctatatcggcccgttcaccccggcaatgcgcgccgcgcgtaccaagccaacggtttacttctggtacaccgacggcgggatcatccagggtatcaccgttaacagcgtggaggtgcagtaa

SEQ ID NO: 224910 - DNA, 444 bp, Klebsiella pneumoniae
atgtccggtcaaaatattacgtcggcagacgcgatcattgagctggtaatcgctgagctctacccgtcagggtttaacctggagcagttcgaagcgcagaacatcttcgaaatgggtgatactgacacggcagagtaccagcgtactgctgacgggaaactgctgggcggttttgtttatggtgatcttccgtggactttccatctggcggcatcatccccgtcgattaagtacatcgacaactggcaaaccacgcagatgaccacgcggtctgtgctgcgtgtcaatggtacggtgatcctgccgtcgctgggtaaaaagtacattatgaccaacggtatcctgcagcgcgcgcgccgtatgccgtctgccggccgtgtgcttcagccggtaactggactcatccagtgggaaactgtcaccccggcagactactcagcgtaa

SEQ ID NO: 224911 - DNA, 531 bp, Klebsiella pneumoniae
atgaagtatccaaccgtatcagtaaacggcgtctctgttcgtgtcgacaatgagggacgctatagccttaatgatctccatgcggccgccgtggcgaatggggaggctacagagtcccagcgcccaagtgtattcctcagaagcgcccaaataaaacgcttcatcaaggcgcttcaatccaaagcactaaaaagtgcttcggaacaaaatcaaccgcttaaggtgataaaaggcggctctgaatcaggagcgtggggcgtcgagctacttgccattcgctacgccgcctggattaagccggagttcgaaattgaagtgtatgaggtatttcgaaccgttgtacgtttggggatcggcgccatgtccaggctgaataaaatcgaccatatcatcaacactgaaaccaaagcgattagtcaatgcgcaagccagatggccaggtggggagtaggtggccgcaagaaattgctccacgcagcacgcgagcgtgtagctgatgaggtgcagatgtatttgcccggtatcgcatga

SEQ ID NO: 224912 - DNA, 477 bp, Klebsiella pneumoniae
atggctcgtaaaagcatcgtattcacggttgaagcagataaccgtgacaagggtaagcagttcaaaatcaccgaaatgccggcgagaaaggccgaagagtgggcgatccgcctggcgtgtgccgtaattggcgccggcgttaccgttcccgacaatatgatgatggccatcagtgctgcggtggcgccggccccagccgaggataacgcagaagctcgcgagctgtatgaaagcgtgatggccagcggcatggcaggtctcgctcagtggggtattacttcactggctaaagttccgttcgcacagtctaagcctctgcttgatgagttgcttggctgcgtgaaattcctcgggggtaacggtatcgagacagcgcttgttgacgaagggcagatcgaagaaattagcacctggtcgcgcctgaaaatcgaagccttcaaactccatatcgcttttgtagcagccaccgcaagttag

SEQ ID NO: 224913 - DNA, 2013 bp, Klebsiella pneumoniae
atggcagcaacggtaattgacgccctcctgattacgctgggccttgatacgtctgacttccgtaaggggcagaaagacgttagcgatgacctcaagaagcagcgtgaggatgcgaaaaaaactgccaaggaaatggcggagcaggggaaaaaggcagcagcattcttcagcagcataaagacggaattgctggcactgactggcgttactgtcactgccggcggcctgataagctttttgaaaagcaccacttccggcctgatggatttatcgatccagtcgaaagcgctggggctgtcagcccgtgagcttgacggctggtcgaagtcagcagaagcagcagggagttcagctgagaagataagcgcttctctgcaggggtttcagggtgccatacagggcgccagggtcggcgattacagtagttctatttttggtggtctggcgcaattaaatgcgctgacgggccagaattttgacgtgtggggacaggacgccagttctctggccaaaacgtcccttgatgcgctacggaaaatcagcgatccaaaccttcgccggcaggtcgggttaagtcttggatttgatgatgcaaccttgcagcgcaaccaggaaggcaagttccttcctgacgttgatcgcttgactaaaagctccggcattacagacgcctcaaccaaaggcgcaaaggaatttacggctgcatgggcggaattaaaccagaacctcgaaaccactaaaaaccagttttacacgttccttattccgtatgtgcgcgactttaacgttgtgctccgcgaactttccaactggatgaagtcacatcctgaggagatgaaacaaaaagtcgatgctttctttggtgcaattgagagcggcgcaaagatggcagataaagcagcgcaagcggttgggggttgggaaaacgcgataaaaataattatcggggcgtcggttggcggaaaactgctattctttctgacaaatttatccaaatccatattgggtttagcgagaataacccttcctggttggctcgttgccgctgcggggcttagcgcggcagataaagttgacgatcttaatcagaaagcaaaggaaagtggtgttgatgttggcacctatctcgtcggaaaaatgaaggaaaagcaaaaagaaaacgcagaagccttcgataagcattttgactattctccatcgggaatagaattatctccgcagcagcaggcaacgcaaaaaatgcttgatgctgttaagtttcagccgcttcctgaacagcgcaggcagcagcaggatgagagagactactgggaaagcaccaaaaatctcctttcaaaaatcgctgacgccctgatctctccagctggcgcggcaacaatgcagccagatacctcgggataccagccaaacgtcccgcttaacgcgcaggccgctcgccttggcgccaaaggaaaggcgtttcttcaggcgatggctggcgaattcggggcgctggaaggtaaatatggactccccgccgggctgctgtcttcggtggctggtactgaatcaggtggcgacccgttcgcagtatcccctaaaggggcgaaaggcccattccagtttatggatggaactgccagagacttgggtttgaaggggatggacgtttatgacccccacaagtcagctgatgccgctgcaagatacctgcgctatctgctggatgctactggtggcgatctggaaaaaactcttgcctcctataactgggggctcggaaacgtccagaagaaaggcatggataatctgccgccggaaactcgcaattacgtccctaaagtcatggccggaatgcgccccggcgccgggatggccgtagaccgcgcgatgcccgggcagtccggtgcgacttatcagttttatggcaccaaaatcaccacccaagcccagaacgtggaacagcttaccagcgacatcaaaaagcacggcgacaaccgtgtcatgcttttggctggctactcaggacaataa

SEQ ID NO: 224914 - DNA, 840 bp, Klebsiella pneumoniae
atgtcgttttctctgaatgtctcgacagtgctatccgccattcagggaggaagcctgttatccgtccttaacagcgccctgtcgccaacttaccggatcacctataacaccgttgacgagtcgcttttgacggctgcagccgggcaggaggttttctctccttccggctgggttagcgttgatcgctacggtgatgcggcagtgactaaggggccagtagaaaagggccggtacacgtcctacaacaaagtgaaacagccgtctgaactcaggatcatttttgcccttgaggggtggacggctttttccgggtcactgcctaacctgaccaatttctctctgctgagccggaacaatttcattcagaaactggatgagatgaaaaacacggccagcacctacaacatcgagacgccggacacggtgtattacagctacgatctgacccacttcgattattttgtggggtcatatcgcgggcagacgttgttgatggcaaactgcactttcgaggagatcatggacggcggggaggtcatgctttcaaatgctgttattgaagggccgccgaccagcaacgcgaaaaccaacaatggcggggcagcctcaacacaggtgatcaccggggcgacgaaagaggtgactttgagcgatgttaagaatgcctggtcaagtgcagatacaaccttatcagacgctctccagactacaggggcggcgattgtatctaacgttaactcagcggccgagtcggtctctaaggcgtgggacagctcttctactgcagtttctaagcagataaaaagcaccgtctccgactttctgggaaaggtgatgtga

SEQ ID NO: 224915 - DNA, 306 bp, Klebsiella pneumoniae
atgcaggaaattagcttatcaccgtcactatcccaaaaggtgtatgtcacgcttggcggccagaactgcgctatcaagttgcatcagcgctctaccgggttttacgccgatctgtatgtcgatgacaagccgatatttcagggcgttctctgcctgaactgcgtttacctggttcggtataaatatctggggttcagtggcgatctggttttcgttgactcgaaaggtacagccgatccctattacgacgaaatcggcaccagattcaagctgtattatgcgaccagcagcgaggttggcagatga

SEQ ID NO: 224916 - DNA, 870 bp, Klebsiella pneumoniae
atgagttacaaggagagagaacttaccgtatcgttcacgctggccaacggtacgtttgacggcgacattggcgacaccttgacggttaaaggcttcaagtgtgaagctgctatatctgcctttggcggcgctacagggacaatgatggagctaagcctgtggggcctgtcactggagaacatggccaagctgacgaccaacgcgcaaaaaataatcgccgccgagcaaaatgctatcgtcgtttatgctggcgacacccgtgttttttccgggtcaataacatcagccaggattaacctgaaccagatgccggatgcgccgattgagataaccgcggcggccgccggcagagagcgcctgatcccctgtgagcccacatccattcgcggcgatgcggatgtggctgatatgattcgcgctcttgcctttaaagttggcctgaaattcatcaatgtcgacgtcaaaagcaccgagcgcaacccggtgtacaaaggcaatgcgataaagcagatcattgaaatagcagctgcgcataaaataacggtaaatattgattttggcacggtcactatttacaccggaaagaaaccctctgactctgtcgttccatatgtttctccatcaacagggcttattgggtatccgattttttatgacatggggattaactttcgctgcatttactctccatctctgaaattgaataccaaaatcatccttgagactgacctgccgcacgcaagcggggaatggattattcaggcaggaactactcattatctttcctgtaaagttcccggtggtctgtgggaaacgttcgttgtggccgcgcctgggtatcttgtaaaaggggatgaaaatgctaactaa

SEQ ID NO: 224917 - DNA, 588 bp, Klebsiella pneumoniae
atgctaactaaccagacccctgagagcgtgtcatcgcagggtaacgccatattatcgctgctacattcagtgctgaaaggaatgacgtttgtcgatattgttctggttagggaggttgaaggcgatgtgttgaccgttctccccctggttaatgatgtagacgtttcaggtcgggccattgccaatcaggacgtttaccagatcccatacctcagacttcaggctggaaacagcgcggtaaaaatggagccaaggccaggagacattggtctggttgtgatctgcgacaaggacaccacgaacgttagggaaaccagatcagaggggcccgcaccaactcagcggcggcactcgtattccgatgcgatgtacataaccgcaatagccagtatgaatggcgagccgactgagtacgcagagtttaccggcagcggcataaacatcaaaagccccggcgtggttaacatcaatggactgaagatactcgcgaacgggaaattgcagttggttgatggttcaatcgttgatgggcacgaccacggcggggtagagagtggtggcagtcgaacaagcccgctgggtggataa

SEQ ID NO: 224918 - DNA, 450 bp, Klebsiella pneumoniae
atggaaagtctggacgcacgaaaagtggtattgcaattcttgacagaactgccagatacgataagaaccgatgagctactcttggttctcgcttattgtgggcaaaaccccaacttaaatgaccctgacaacttccctgaatccattgaaaaataccttctccagagtggcttgccgggcattggtgctgtgctatgcgcccgggcatccattgactacacacttggagatgtaaacctcaagatgatccgcgctgaagaggacctcaaggcattggcggcgaaacatccagactttccggaggccggtctcctcggcattcctctaagaaaacggcattatgctgccgctcttgagaagtggaatgcattgcgggcgaatgagctatccgacgaaaatattcgatattttggacgaatgtttttatccccacgatggggtaaaaattga

SEQ ID NO: 224919 - DNA, 657 bp, Klebsiella pneumoniae
atgataaaaaaatccattcttcttgcgctttctttttctttggctgggtgcgcaatgtcgcctggagaatatattgcctatcaaaagtctaacaacttcgataagacaaaattttctacaaattccggcggaatgcagtcggtggaagatttgcgagaaatctataaaaatgtgacggggcaaaatcttccatttcaagatactagtgattgcaggaaagacaacgcgtgctacttcaatagatacaacgacctacttcacgatttgatgtatcaacgacagatagaaacgcagaaaaaagaaaatgaagaatttgcccgaaaaaaagaggctgagtgtcaggccagcaaagagtgtatggctaagcgagaaattgatgccgcatcctacactttaaataatgtttactattccctaatggcccgatacccataccagcaggctgattctgatgccggggtaaggcatatgtgccgggtagctggagcagcccaaagggaaggcgtgacccttgagtttatgaaacagcacattagcttaacagaaggaattgggccggaaatgagataccaaataatccaggttgctgaggcttgctggaaaatgagcaagtacggcgttcctgacggcaccacgcagatccggtcgatgtactga

SEQ ID NO: 224920 - DNA, 453 bp, Klebsiella pneumoniae
atgcctaacatcagtagcgaagagagtacagtcattgaggatatgttctcttggtgtcccaatgatctttctgttatcaaaaaggcccttcttgatgttaaaaacagggaaggcctataccaagaggtcgtaaagcacaaaggaaatctgtactcattaaagaatgacatatcggaagctacaggcctcaacttgaaagtatctggcgagctgggcagggagctctggtttgtcgttaagcaaaattccgatcgagagagaatgttaaaaaatgggatagtctatggaatctggatacatgaaggatctctctgcaaatatcctgagcacgaaaaactaaatggaagacaattccccatcaagaaaggggttaaaatgggggtattcaaaagaatactcccggcacagttaatcggttgcaagtgtatgattaagcctgttttatcattttag

SEQ ID NO: 224921 - DNA, 267 bp, Klebsiella pneumoniae; identical to SEQ ID NO: 194827

SEQ ID NO: 224922 - DNA, 177 bp, Klebsiella pneumoniae
atgaaagacctgttacatagccagcgcgtgatcgagcagttctcactgagactgccggaaagagtcaagaaagcagttcaggaaaaagcagaagaagaggggttgtcattgaatgcagcgatcgttcagcggttggtttggagcttaaaaaacgatgagaaaatgttcggcgcctaa

SEQ ID NO: 224923 - DNA, 1071 bp, Klebsiella pneumoniae
atgagaaaatgttcggcgcctaaaaacaacgaaaccccgaaggctgccacctccgaggtctctaatttaccagttaactacgagaaaactgacatgactagtttagcaattgcagatcgtacaatcaacgttcctttctatggcaactctttgtttgtggttgaacacaacggtgaggcctatacgccgatgcgccctatcattgacggtatggggatggactgggcatctcagttcacgaagctgaaacagcgcttcaaatcaaccgttgtggaaatcacaatggttgccgcagatggtaaatcacgctctatgatttgtctggctcttcgcaaactggctgcgtggctccagaccattagtcccaacaaagtccgcgctgaaattcgcgataacgtcattcgttatcaggaagagtgcgacgatgttctttacgagtactggacgaaaggcgaggttaagaacccacgcaaggctaaaaagtcactacccggcaaaatcacctctgagcagcaggaagccattaagcaactggtaatgactcgcggtaaggcgctgccgaaagagaatcaggccaaagcgatgatcaccatgtggtcttcactgaaatctcactttggttgcagttacaaagaaatcaacgacgaccagtttaccgaggcgctttctatcgctgcgcgtgtgcctcttgagggggaatttcttggcaagcaggaaacactgccagcgccgaagtttgacgttaacattccgcttcaatggtggatcgataacaacccgttggttcgcagtggcaacctgtcatttgggaagtctctaacagccccgtcctttgacgtgacgatggagatgctttgtggtgacaactcgacatctgcggccattcgcctgattaacgttctggaggaggctggctttgatgtatcagcgccgaaggccgaaattgtagcgatgcgaaaacatctgggtaatgtcgagtacggcatgaaggctatcgcagacgcttgccgccgggcgggaaataaaaccatctcgttccgcggcggaaaggctgaatatctgattggttaa

SEQ ID NO: 224924 - DNA, 288 bp, Klebsiella pneumoniae
atgctcattaccctgtcaatcgacacctcacgcatagacgacaagattcacgtcctgaccggcgagcttaaatcacgatttcccgatggaatttctgagcgagtcgatagtgaactgtctcgcctgactaacgacatcatctttactgatttctcttccacagtcggcgcagatggaacccgcgaggtcgtccagcgtgttgacttcggcgggagctttgatgcgttcacttccgcactccgggcaggtgattttgatgtccatggcgatcccctcaaagttgtttaa

SEQ ID NO: 224925 - DNA, 357 bp, Klebsiella pneumoniae
atgaaaacaatctctctcaaactcgatcccgacacctgggatcttgtccttgatgagctgggtaatatcgccacggttgaaaacccctacgcctgcgctcaggacgtagcgacggcatgcctggctatacgcggtgagtgcatttacgaaaaagacaccggcgttaattacaaagagcttctgaacgttaaggccagcaccggcgccatggcggccgcgcttcaggttgaagcgttgcggatgagctatatcgcgcgcgctgagccgacgctgattaacaaccgcgatacgcgccgcactaccggcgttattgcgatcgtggatacaaacggcctggattccagcgtcaccctgtga

SEQ ID NO: 224926 - DNA, 1233 bp, Klebsiella pneumoniae
atgacgacaatctctacggctgtaccggccgtgaccttttccaccactggccttgatgttccagatgagggagacattcttgccgggcgtatagcagatattggttctgcattcgggacggcgatgagcacgaacctcaagacgccgcaggggcaactggctgtcactgatactgcaatcatcgccgacaagaacgatcagcttctggctatcgtcaacaacatgaacccggacttttcctccggcagatttcaggatggcatcggcaggatttacttcctcgatcgcattgctgctgcgggtacagttgtaacagccacatgttccggcgtgcctggagcggtgatcccggcacagtcctatgcaaaagacgataacggttatatgtacgtgtcactggcagcaggaacgataggcgccgacgggacggtaaagatcgagttccagaacctgactaccgggccgatagcttgtcccatcggtaccctgacaaacatctatgtcgcggtaagtggctggtcgagtatcaccaacgagaacgcgggtgtaccgggctcgaatgttgaagggcgatctgcatttgagtatcgccgtcgccagtcagtggcacgtaacgcctttaacacagcagcggctgtgcgggctgctgtcctggaagtcgacggggtgcttgatgtttatgtgatcgataacaaagagccaacttctgtcaaaaaaggttccacgaattacacgctgcttgccagctcgatttatatcggggtttatggcggggcagtggcagacattgcagcggccatcaataaaaaacttcccccgggcaccgttatgaacggtgacaccaccgggaccgtgcaggataccgaaaattatgacgccccttatccggagtacacctacaggtggaaaactctggacgcggtgagtgttcatatcaaggtggaatacgaggcgaatgatggccttccgtcagatatcaacgcgcagatcagaacggtcgtcctgaatgcctttaccggcgcagatggcggtacccgggcgcgtgccggtgcgcgaatttatggcagccggtatatcggccccatccaggcgcttgatgcacagaacatgaacgttctttcggtccagatctctctggacggagccacctggtctagtgcgctgactatggggatagatcaggaaccgaccctcgatacgacaaacatcataacggaggcggtaagtgaataa

SEQ ID NO: 224927 - DNA, 588 bp, Klebsiella pneumoniae
gtgaataatgtcgactggacgatctacgcgcagtacgtaaactcaaccagcctgcggtcactgattgacacctttaacgcttccgtagcgccagaggactggatagacacgttctatgacctcgtattcaacatcgagacctgtggagattacgggctgatgtgctggggtaaaatcgttgatgtagagcgtttgctgactgtgacgccatcccagcagtttctggggtttggcgaagcgaccagcaccccggcagaactcaccgatccgcaaccctttaaccaggcacctttctataccggtgtacaggacacaaacactgtcgtcctgaccaatgacgcataccgcaagctgatcatgtgcaaagcgatggctaacatcagcgactgcaccgtgccggtcatgaatcgcatgctgatgtacatgttcggcgcaagcgggcgggcttacgtgcgtgacgatggcaaccatgtcatgagctacgtattcgagttccagctttccgattcggagctggccatagtgcaaagctccggagcacttccttccccgcctggggtaaaagtaaacatcgttcaggaggtctga

SEQ ID NO: 224928 - DNA, 1044 bp, Klebsiella pneumoniae
ttgaacaattcagccatgccgtcacgtctgacggttgttttttctgcgagtggtgacaaaaacacgatcccggtaaattccacccctgaaacgctggctgatggccttgccgcgatggactcaggatttcctccgcttacccgcatcgctctatctgctggcggtaagccgccaaaggggcaggattttaatgggatttttaatgatgcctatactcgacttcaatgggagcaagccggaggtttctatacattcgactctgcattttcggcagctatcggtggatacccaaaaggcgcaattcttatcaattcagcgagggatggattctggcaaagcactatcgaaaataacacgacaaatcctgatgctggcggtattggatggattaattattcatcaggacgactcctgaacgtgcagacatttttatcatccggcacttatacgccaacccctggtgctaagtcggctgttgttgaaatggttggcggtggtggtgggagcgatgctgctccagccactggagcggggcaggtatcaatagtttcaggtggtggggccgggtcatatgctaagggtagattttcaataaatttcaccagcattagcatcgttgttggcgctggcgggaagggagggaccgcagcatctccggttggctctgttggtggttcgagctcatttggatcgctgatggttgcgcctggcggaacaagagggccgtctgccggaccagcaaatccaccttttctacctcagggtaatgtcgcatcaagcgctccttccggtgccaatatcataggctctccaggagccccatctacacctgcatacgctaacgcaacccagtcattcctcggatcacctggggcaagtagcgtttttggaggcgggggatgggtgccatcatttggagatccggctattgatggacaggcatatggttcaggcgcatctggttcttcacaaggaccatcctctccggcagtgaatggcgcccgggggaaagaaggcatcgtgataatttatgaatattcatga

SEQ ID NO: 224929 - DNA, 2988 bp, Klebsiella pneumoniae
atgacaatcaccgaaacgcaaaaaactgctcaattagcagcagatgccgccgttagtgccgcagaagccaaacaatacatgctggaggctgagcaaggatatcaggatactagtgctgccacccagcaagcccaggatgcagccagcgctgcggagttggccagagatcaggctgagtcaattgcgtcagggcttgaagaaaaaatagatgctcaacttactgagcaacaggaagaattcgaaactcaaatgactagtcagcaagagtcatttgaatcagcacaaacagaaagagatactgatttttcagaatttctcgacaccagaaattcagcctttatctctcagtacaatcagcaggctcaagaatttgacgcacaactggcaagtcaggaatcgcgttacgaatctgttcttcagcaggccgggaaaaccgtgcttggccgctacgaggatggcccctggacgctgaccagttataaccagcttgtttcgtatggcggtacgttctggaagctcgcagcctcagttgttattggtgccggctatacaacagctggcacgactggcgcaacctgggatgctactgacagggctaattttgtcgatgttggtcaggatcagttgcgcacggaactgggcactatttttatgccagccgcatctggggactcagcaactgacacgcagttgctacaggctgcgttaagtgtgggcggtcagattaactacaataaccctggtacgtattattacagttctacaagcacaattcgcagcaatacccggctagtcattggccatggagtgacctgggaaaaagatattaattctgtgtgggggccattcctcaggaacgcggcatacagtaattccagatatgcagtaaccagtatgacggtttcaaccagctacagcgacccgtggaaagacaacgtcagttcaagcggcctgaaggcatacctcaatattgcctgcccagggcataatttcattgctggcgattatgttgcgttttacggcgcggttgagttcggattcgatggcatcatgaaagttgtcagtgtaactgatgacgataattttgtggtagaggcacacaacctgccgaaaggaacatccgccacttatgacacctgggctaatggcttattttgctttaaagctgacgaaaatatcagcgtagaaatctatggccgtctcgacgggaagtgcacgcaactgaaagccagtggcgagccgtctgacaccatgaaactttatctcatggggatgatttttcatggcatcatgaatggcagtctgtacatagactcaattcggcgaatgagaaaatattcagcgctgattgctaatgtgcgtaatttcgtcgtgccgtttgcgaacatcgataactattcagatggtctgcacttcatgcccccgtatgttggtgtacatatcaaaacgatcgccggcgcagggggagacgacattttcgcgctaaccggcggtgattttgcgcattatgaaatcagtcgcggacacgggtacgacattacgtgtgacaaactgaatccgcagaatgcattatgtgcggttaaaatcacagggaatgcgccgtacagattctggaatatcggcattggcgaaatcacaggactgacgcagacagatgccataaaggcaatctgggatacgaacctgacatatacagcaatcgggacgctgaaaattggtcggtttgattgcgctgtccagcttggttccgggctgaggctgacagcagatgaaatagattctgtggtcattgatgagtatgtcatttctcagaagtcgaccagtgggtgggatattgctgttggtgattcatcaagaaataatgttgctatgaagtctctcatcgtacgcaacgtcagattaaaaacaccggatgttgctgttacccggtttctgcaacttggtcgcgcggctgaggttggtgatgtcgatatccatgtcggcaatcttgctatttccgcgctcggctctggatttatttacagtaacggttcgacagagaccctcgcggcaaacaaaaccagccgcatcaggctcagcggtaaaatctccgcgccgtccgcaaactatgtggtgatgttcctcaatggtctgaatgatgcgatcgatgtgtcggggctggattttgagggtttcgcaaaccttatccggacctctaaaaccgtcgccccctggaaaaaggaccatattgatattaatgcgcgcggtttgcgcgcatacgatatcaaccgtctcttcacgctatatgccgggcaatggaaaattggtttcagcggcgaagtgcttacgccgggggcgttgaaattgacacccattttcatgggttataacaccacgttacatatagacggctatgcccgtgttgaaggatcgtcagagttaatggtaacgcccggcggtagtttcactctggttaactcactggtcattcctactgcagaatctatggttgccggggatgttgccccggttattcattcatacgataagaggaacctgctgcctctggcctttgccacagctccgcaagcaggtgaggaactgacaaatgcagtgagcggtcagaaagagaacaggctgaaatacggtcattttggctgggttcctgaatccgactggaggaactatcaggtggcggatgatgcaacggcagcagtctaccgcccactttttgaccgtggcaacgtctggcacgtgaacgggattacacagaacatcactattacgcagtcgtcatcgaactggagcgtgctgaaaccaggagcgcgggtggctgtgatggtgactcaggattctgcaggagggcatacagtaacctttgatccggcaaacttcacccttggctatactcccgcaacggaagcccctgcaggcgccacctcagtatacgaatttgtgtatcaggggggagggaagttttacggtatgataccgaacatctggtattga

SEQ ID NO: 224930 - DNA, 711 bp, Klebsiella pneumoniae
atgagcaacaaaagtactgataatgccattagtcaaatcaatgagctcttccagcgctttgagaacgggctctccgctaagcggttgcccatcagcgaacgttatatcaacgatcgcattgagttgctggccgagcttaaaattttctgcggcgggagcacttataatgcactggccgtcatgaacagggctgatgcgcattttcccaatagaaagagaaccgattacctgacttcccgtcattttgaagttgttcaaaccgacataagttgccacaggaataagcgcgaggtgcttatcagctatatcaaggtcatggatggctcggagatatttattccctccagtgtaaggtttcattgtccgtataatggaaacgatatcctgcccagcccttcctatctttctcttaacaatagctgcctcaagttcatcgggcccggaagcgaacgggaaatagacgccattggtactacctcccactcgcctgacaaggtcgcacgccagcaaatcaagggcggcccgcaggttatgaatgacgtctccgatgtagcaggatatgtcttcggggatttcttctttgacccggataacgtagttgtactgaaacgcattcccctcaacgactactttgaatggatttttccgtgtaaaagagacgatctcattattgaggtcacggatgtggcgtttcgctctctcgatttttaa

SEQ ID NO: 224931 - DNA, 1851 bp, Klebsiella pneumoniae
atggcaacgatcatcccaaccatcggaagctgcggtaacaagattactgccggagaaaagcgtcttgcgagaatttttgaaagcaatctgagtagcgattgtacttgttggtatgacattcctactggcgaaaaacaaacacatcctgatttcatcattctggatcctcagcgagggctgctttttattgaagtgaaggactggtatatttcaaaaataaaatccgctaataaaacacatgtgatatatgaaacatcagatggtgacatttctctaacccatcccatagaacaggtcagacaatattcttacggcgcaattaactatctaaagcgggacccacaacttcttcaggacaacgaaaaatataaaggacaattttgcgccccctacggtcatggagtctacctcagtaatattacacgtaagcagttagataaatacttttccaatagtgatatttttccttctgatatcgtgatttgtaaagatgaaatcaccgagtttatgtcatctgaagaaatatcattacgcctattttctttggtcaaacatacattttctaaagagataagtaataagcaagtagatcgtatacgttggcatttataccctgaaattcgcatcacccacgctctcgataaaccagagagttctgccaaaccaatatctgtactccgaacgccgaatattataaaaataatggatactcagcaagaattactcgccagaagccttggtgaggggcatcggataattcacggcgtcgccggctcaggtaaaaccttaattctcctttatcgttgcctacacctggcgaaagataataatttaaagaaacctattcttgtcgtgtgttataatataatgctggcccaaaaattaaaatctctaataaaaagccatcaacttacggttccggttgaaattaccaacttccatgcatggtgttataagcaagcaaaaattaaaaatattctccctaactcaaagcaaaattttatagaaaaccttgagcaagctgttattactggttttcaaaataaaacaatagcagcagaacaatatagtgcggtattaattgatgaggggcatgattttaaacaggattggctaaaaatactttctggaatggttgatagcgaaactaactatctattatttctatatgacgatgcgcaatcaatttatcagaaaaaaagctcacttgattttacgctttccagcgttggtatcaaagctcaagggcgtacaactattcttgacatcaattatcgaaatacacagcagattctccactttgctaccagcattgcatttgattatttaaatgatcatattgaggataactttaaatatcataaaccagatgctggtggacttcaaggccaggttccaaacatgcttgtttttgataaccaccaacaagaaatcatccatataattaaatggctaaagcaacaacatcatactggtgttagctggaatgacatggctatattatgtccctcgaccgcacatctttctgcaatattagtaaaagagttaagggattcaaaaatcccgcactactttatagcaagctcggaagataaaaaacgctactcaccacaaagcgattttttgtctattatacctttgcctagtagcaaaggtctcgagtttcattcagtcgcagtgatagatagttcaaacataatgggtaatagcgatgatctcagcgacgagatcaagcgactatatgttggtttcactcgggcaaccaataatttgcttgtgactttacatcaaaaaaatgtgctcagcagacatttaacctcaacttataatcaaatctataacaatgcatag

SEQ ID NO: 224932 - DNA, 1029 bp, Klebsiella pneumoniae
atgagtcaagacgtcaccgcgaagatgttaaagcccgattttgatagtgaagtttccggcctggtgcatggctatttgtttcatgaacagcgccccccgcagcccatcgcctctggcgaggtctgcgcccgctatcaggcgctcgccgatgacaaggcgtttatctggttacacctgaatcttaatcatgccaccgccgagaaatggttaaccagccactttccggtggccgattttttcttcgaggagatccgcagcggctcgcacaccacccgcattgagcgacagggggaaaatctgttcgctgtgcttaacgatgtgctgtttcgtccgcaggataccagcgcggaaaccgccacgctgtggctctactgtagccccaggctggtggtgacggcgcgcttcaaaccgttgcggtttatcgaatggatgctgccgcgcttgcagacgctcagggtgaacacgtctactgagctgctggcctttctgctggaggagcaggaggaggtgctggagcaggtcgtccgccaggccagccgccatgttgaccttattgaagagcgtcttctgagcaatcacgtgcagcgcaaccgggccgatctggcgcggctacggcggatgcttttacgcttccagcggctgctggcgccggagccggcggcgatgttccggctgcttaaccggccgccggcgtggatggatcgcgcggtggtgcaggcgtttcgtcagttcaccgaagagtttagcgtggtgcttaacgatctgtcgggcctgatcgagcgcatcagtctgctgcaggaggagattggcgcccgccagctggagcagagcaatcgcaccctctataccctgacggtgatcaccgtcctcgcgctgccgattaacatcgtcgccggtttcttcggcatgaacgtcggtgggatcccgctggcaagcaaccaccacgggtttatcctgctggtggtgattgtcgctgtctttaccctcggcgccggttacctggcgtttcgccggcgcgatgacctgtag

SEQ ID NO: 224933 - DNA, 213 bp, Klebsiella pneumoniae
gtgtatgcctataccggggattttttctttgatgccttcagccactgtggggattccggcacctaccgcaccgccaaaaaaatcaccggcatcggtttttcgccctacctctatcatggcctgcaatataatttcaccgattatttcggtgtggaaggcgggattattgtgccggcgatctttgtgatgagtgttcagtggagctttcgctag

SEQ ID NO: 224934 - DNA, 426 bp, Klebsiella pneumoniae
atgaacaaaaacgaaccaccatttctggcaattgattaccgcatcctggcattagatattaaagcagccatcaacgaaaaaaccatcgatagcagcacaattattaaactcaaactagtctattcctatctcctggggttctccaaaacttgcagcgaggtttatccagagcaaacaaaaataggtaaaaaattgggtattggttctcggcaggttgttgggagattaatttcgttacttgagtctctgggatggatctcaaaaacatcgagaaacggaacatcaaatctataccaggtgaaaaccgtcgagcaaattttagaaggtatgccgcgcgagactaaagaagaacacgaagcacctaagatatatacgcgcgctgtgatgggtgatgatgatagtgacatcccatcgttttcaaaataa

SEQ ID NO: 224935 - DNA, 759 bp, Klebsiella pneumoniae
ttgaataaaaagaaatcttttgaagtatcgattaacaacttacccgccgcattaaaacgtttagatttaccagccgaacaagtcaaggttatcgaagactataagaagcaatttcctttcttgattgaagatgaggaaaatgtgctaataagtctcgatcaactttgggaagcactggacaccccctattatacagcccccggaaagccacccgaactttcgggggggttagagaagccccgcacagctccaaaagaaaaagaatacaaaaggaaaaaattcacacagtggcgtgatgatgttgctttgaaagaggtagattcacctacatttaatcgaatggtgccggttagaggtggaaagagaaaagagacctttgtaacaatcgaagatgcaaaaacaattgcgatgttaacacccggtgagcagggtagaaaaattagacgttattttgtgacggtagaaaaggtctgcaaggttttgtggcaatacaactttcagcgtcatcagatagaaaataaatctaacgaggtttacaaactcagattagcacaaactggttataagggttttgatgttgctgcgaaagataaagttcggtttaattccttagttaagaagatcgcaggtgcaagaaacatcaaggaaactgatttggatgaatattatcacgtccagtttatagtttttgatggaatgaaacgtggaagaacagacagcgagatccttgcatttcatcttggtgatgaagcagcgtaa

SEQ ID NO: 224936 - DNA, 360 bp, Klebsiella pneumoniae
ttggcattagcaagaaacactgtgtttgaagaatcggttgaattaggatttaataacagaacaaagaaagtaaaaataccaaaaaaactaaaaccattagcaatcattaaactcagcgaaccatccccaccactgacaccagacgaacaagaaataatagattctatgcaaggtgttaaatggaaacctcgtcagaggtatgccggattcaaattcaatcgtgaaccactcaaatttgagtacctgtttgataacatcaatgagtatgaaggctggctcgaattcaatcgccttgagaatgaaaactttaacggcaatgatcttggattagattttgatgcaccaggcatcaacgattaa

SEQ ID NO: 224937 - DNA, 276 bp, Klebsiella pneumoniae
atgattaattttgaacaacataaaaacattatagaagacttcgttgaacagcattacccactcgcgcatagcttgatggtggatagctataaagatgcagaggtttactactccaactaccatatgttgctggaggcgatgaataaactgcctgaacatccagaatgctttttagagtggttactggaagatgacgcagctttgtatattaacctgatggaacttgttgtcatcaccagaactattcacaacgtttttgaacaagtctcaccttaa

SEQ ID NO: 224938 - DNA, 1209 bp, Klebsiella pneumoniae
atggcaatcaacagaaaaacccagtacctataccagttacgtgagggaacctggatgtttcagatcttcatcccctcatatctgcgccacctttttagcgggaaaaccctctggcgtcggagtacaggaactcgagatttagcaaaagcgggaatatttcgtgatcacctgctccttgagttcaatcaactcaaggaaaaatatcgtgaagacaccagtgatgtaaaactgcgcaatgcactggctgaactgaatgcagaggttaggcagaatgtagaaaaacctcgtttggtcactgcctacaacatccctaccctccgtttcgtctgtaacgagtatgtaaacacctattcaggtaaacgagcgtcagcaacgataggaagggttcagtgggccactgatcgatttctggagagtataaaacgtgatgatattagattagatcagattggtcggcggatggtttccctgttcattgaggaacagacacggagcgaacagttggctctctcaacactgcaaaactggataatatcactttcgagcctctataaatatgcacggaggggttttgatgctctgagccccgataacccatttcatgggcatggtatcgatggacgtggtacctcaattgaatcctatcagccgtttaccattgagcagatcaaaattttgttggataacgccaggtctgacatcagggatatgatcctcatatccctctttagcgcgatgcgtttaaacgaaatcgccagtctgaaacattccgatatcataaccgttgatggtatacgatgtttgcatatcccagcggcgaaatccaaagcgggcattcgtgatataccaatccactcccgtttagatcctattattgattcatatctcaatcagaatcatggtgagtttttgtttaaatcctccaataccctcaccaggaaagattcccgccctgggtcattattctccagcaaattttcagtattgaaacggaaatatttacctgatgcaggtgatagacaatgttttcatagtctccgaggaatggctataacacaactcgatagagcgggagtaccagaaaggcgtatagctcaaatcgcaggccaccagaaaggcaaatctgagagtatgaaaacatactcaaaaggggccgatatgcaggagttagcgacctatatcgaaatgattaaatacgaggggctttaa

SEQ ID NO: 224939 - DNA, 915 bp, Klebsiella pneumoniae
atgcttattcagaaaaaacgtattagaaatatcgataactacattaccacatttgatggtagggatgtttttatcgcacatgcattacctagccagcagaagggagaatcgattgggtttactgcaaatcaatctctaggtgaagaagttctccctcacatcgttggagcaatatctcgatttaatgccaacggcaaatccgtgcctgataaaacacttccaaaagaaacagcttatcgtcaagtttcatggacgtggaagaaatgggccgggaaaggacatactgaagagaccacggaaacacgtgaaattgagtatcagcgatatcagaggatttttaccccccctccgagcatcgagttgaaaattgtcgaaaacctgaaaggggaaaagctggttatttctcctaagctgactttgcgtgatgagaacaaagccttggtaactcactgcattaatctatttttggagattttcggtaagtgcgaggtggttgacgagaagctagataccatcatcacaagtaagtctttgaaactaaattggaaccttcttccacaaggccaatacccttggagttcaatcggtccgcagattctcaaagcaattaatattagaggaaagggaaataccgctgttgttgaaggcaggctggaacttgtaaacagtaaaaaacccgaccttgttgcagtcggaagagcaggttttcaaggttacgtagtgtttggtttttccagtaaaaacacctacatacttgaaagctctcagagcaacaatgcaacttatatctttgataacaactggcctaacttatcccagcttacaaaagctgaaattttagatggtaacttgcatcatgctcgcgtcatccatcgtcgaagttggtcggctgatattcttaaatatttgccttaa

SEQ ID NO: 224940 - DNA, 222 bp, Klebsiella pneumoniae
atgatccgcatctactccatcaaattgaacaactttaaaccatccgccttcgttttcggcctcttttgctttttcaccaccgacgggataataatcacactcaatgctctcaatacttgggattgtttcacactcagtaatgatttttttgcgcaatgttggataggcttcactttctttcatgaccccgagttcaatcacagcgctgctgtgaaggtttaa

SEQ ID NO: 224941 - DNA, 621 bp, Klebsiella pneumoniae
atgggtaacgcaatggtcgcgctgaagacagcggacgaagtgaaggcagtcagcgcggagctggcacggaatacaaagacgaatcttttccgctgtttgtgggctatgcagttcgagagcgctctccggttctctgacgtggttaaattgacgtgggatcagttcgcagagggcaagacgcatctgatcatcattcagcagaagaagacccgtaaaggcgcggatggcaagcctataaagccacagcctcttagggtcgccatcactccagctatgcgctctatcgtgcaggctcgccgggaggaggcagcagaccgcccttgctttggtgactacatattcagcctgtccgacctgaggtcgaagggtcagccagtcagccataacgcggtgttgactgagtacgggaaatgcggacgccgtgcaggcttccaggatgtgggaagccatacaccacgcaagagtaaaggtcggatcatgtttgagaacggtaagccactggaacacatcagcaacctgctggggcattccaacccggccagcaccctgttttacatcgggttcacgcaggagacggcagacacattagcgggagaattttctctcggagaggaatggtaa

SEQ ID NO: 224942 - DNA, 426 bp, Klebsiella pneumoniae
atggcaaaaccagtcctgttcgacttctcgaacgctaccgcatctgagattgtttctgcaatcgacaacaagatcacctctttagtaaatctgagaagtttcagaactcgcgttggcggctccagagttgccgatcggcgctatccagctacccgcgaagcgatgaacatcatcaaacgcctgcgtcagcaagcgagagatgcaaaaatcatccgtgatattctgcaaccatactcagcagagttggcaaaaggccgtgatgttctggaaatcattgaaccagtgctttctgcctggcgtgtctattacgcctctcatggcatcgggctgatggagcagcagatcctcctgttgaaaatgattaagtctggcggtgaactcgaagccattaccggaaaacccattccagacttaaccactccgtaa

SEQ ID NO: 224943 - DNA, 189 bp, Klebsiella pneumoniae
atgaaactgagcctcgatgatgaaacctacgcgattttacgtgaagagtctgatcggctggggatgccggttccgaggatgatccggaacatgtgccagaacctggcgaaacacattcagaaacgcaatgaacaaccactgacgaacccacagggagaacaacatgagccagaacggaaacaccaatga

SEQ ID NO: 224944 - DNA, 822 bp, Klebsiella pneumoniae
atgagccagaacggaaacaccaatgagcgtttttacaagagcgagaatcgccttttccatgcagacacggttacaaataaatccactggtgaagtggttgaaattagtaattcactagaaaaattatacgcttacatgcttaaccagtatcgtttctggagtggattaaatcaatcatttgctgagtcgcaggagcgtcttggaaccattgcccgaatcggtgaccccaagaagaaaacaaagcctcagatcgataagctgatcgctcttggtctagttgaaatcactggaaaggtcgggcgttgcaatatttacaaagtgatcgatgttgataaggtcgctggaaatcttgagttttcctacccagagtgggctggagaaccaatgtatgaccatgagaaacgcttaggaaaatctagtcaacagccaaaaaacgaggagaaaaaaggcaatggcgaatctgttcagggcaatagtggaaagcgagacggtgtatctggcgttcatgacggtggcaatgctcctttatcctctggtggtgatgcgttaaacgggggaaatgttgtcgggataccgtggatcgccaactcgtttacccctcgtgggcctttggttccagaggcgcgacgctgggcgcaatcacagggcgctacaacctggcaggatgagatcaaacttgtgtggaaactgacaggaaaaaccaatatggatgagcctggagagcatatgcgacctgatgatgtacctgcacctgaaccagcaaaacagcaggctagcgggtatgctccgcagcttgattatgatgaagatcaaccattctga

SEQ ID NO: 224945 - DNA, 390 bp, Klebsiella pneumoniae
atgacactgaacagcattcgaaatgctctgtttgccgcgatgcatggcctaagcgttgagcaatatgaacttcaaaaggcacgggataatctgaagagcgtcaccgatgactttctggatcaacatcctgaatatctccgagggagatttgccgaaggcaaacggtgcaaagcactctcgcagcagcgagacacctctggtgctgaaggcaacccccctaccgagttagaagtgctcaaatccgccccggttaatgccggaacgtttacacctcacattatagataagggcgctctcgaacgtgctcgcgttaaatgccgcgaggttgtcgcctcagaaccagaccgctattcacacattatcgaatcagcaccgctacgtgctggttag

SEQ ID NO: 224946 - DNA, 471 bp, Klebsiella pneumoniae
atggaacacgaagcgaaaaaggtcgctgatagcggctttcttttcacccctcaatggcaaatttgccagagaaataataacgccatcattggcgatgacctgaatggagatttcaagattatgaaactggatgattatccaaaaacctataataacgtggtgaaaaattcggcaactgccaattttgatcgtaaatgtcaaacattcgcgacactcccacaagctgtggaaccgggttctgtggtgacctctgccggggcgctgtatacctccggtgatgatgcgattctttgcctgtcctacgctgacgcaggttctaatgttccggttatcgtggctgaccgcctgatttacgtgtacccggaagcaattcgcgccgtaatgggttcggcgacaaacgcagcgttagcagcattgaccgccaacggaaacattcgcctgacctctgacgatgttgtcatcgcagaataa

SEQ ID NO: 224947 - DNA, 1041 bp, Klebsiella pneumoniae
atggctattaaatcattcgattatgttaattacagcaaggtcttccgtactcaggttccacagagcaatttactgctgactcaccttaatgtatttgcagaccgccagatcgcagattcccacaaagttagtatggatcgtatccaagaggcatctattggtgtggatgcgccattgatgcgtttcagttcagagtgggggactatcgagaagccgaccgctggatcgtatttatacgaattgccttggtctggtgtgactgaccgtgtgacttcggcagatctcaaaggttaccgtaaacctggcagcactatggagcagtctcttgatgagattgaggccaataagtttcttcagatgcgtgctaagtttgaacgctcccgcgaatatgcttattggcaggtactgatcttcaacaaggttaatggattcggcacccagcagagcgagatcgattggtcgttagagttctccctgaaccagcgtcaggcagatttgcaccaggacgtaaatgatgatccgatgcgcgacattgacgatcaagtcagtgccacaaaagcactgatgggtggtctgactcaatacctgcgtggctgggttctgctgtgtggatctgatgcctaccgtgctgtgcgatatcatccacaaatccgcgaactcctggtctattcaaacggtctggttggttctgatgtgctgttcccgtctgatgttctgccgggcttcagttcctttatgttgggttctgtacgcctgatcgagtgctcagattctgccttcactggtgtgaaaagtgaccaagcatttttagttcctgtatttggcaatgctccggttgagcagagtttgcctatgggacgcttcattggcccatgtgctcgtcatcttgaaatctccgcttctggtgatgttgaagattggtatgctttccgcagctatgatgaacttcgaaatcggaatttatatagtgaatacagcttgttagcctataattttagacctgatttgatcaccagaatgactctggttccggtcgagtaa

SEQ ID NO: 224948 - DNA, 207 bp, Klebsiella pneumoniae
atgcacatgaaactattcaactcgaaaggtctgccacttctggcaatgagccttgataaccgatctgataattggctgaacctgtcagccattgcgagatatttcgacgttccacgcagcacttttttgcagcgggtgaatgattacggttgggaatcagcacttgctcattatgagcagcatcgaaagactaaactgaaacattga

SEQ ID NO: 224949 - DNA, 708 bp, Klebsiella pneumoniae
atggcacaaagaccagtatacgttcctgttgttgaacaatcactcttcgttaaaaccgaacttgtggaattcaagtggtttccgggcatgtcagtttcacagaaacagaagtctatcgactctcttcatgaagcagccaaaacaaatctgccaaatgttgacaaaattcttgagatttccagcaagtcgcgtgacagtctcggtattgcattgagtgcttttaacctgtcttttactactctgaaacaccaacgcacattaactatcgaatgtgcgtttcaaggtagcaaagtcttccaacgaggggggccatataccgacatgtttgacatgactccacgcgaggccaaaaaggacaaacgtttattgacttctggcagactaaccggattcaagttttttggtaaagaatgggaactggagccacgtactgcattttatgattggctgtacataagtgcattgaaaaaaagtaccgagctagcagagcaactaattgaatattcagcatttaccgacatagagtttaaccctgagcgctcgataaattgccaagcatattctgcggcattatatgtttcattgtacaaacaaggcattcttgatgatgccattgcatctaaagagagtttcctagaaacgatcaaaagtgcatcaataagtaatgctcttcaagatgaaacaactcaatcgggttttgggttttga

SEQ ID NO: 224950 - DNA, 636 bp, Klebsiella pneumoniae
atgcctcaacgaattcagcaaatccaaagcatcgtggctcaaagaggaatcgagcatcttgttcatttcactcgggtcgataacttagcaagcataatgcaaaatggcatcatcccaattgcaaacaccgcccaaaatcaaattaatccagtcattaatgatccttatagatgggatggacatacaaatgcgtcatgtctatcaataacgcgaccgaaccaccatatgttttacaggttacgttgcgataaccctcaaactgaatgggttgttctacttttgcgtccagctttactttgggaaaaaccatgtgcattttgttgccacaatgctgccgatggaacaatgagtagccaacccctagaacagcttcaagatactgccgcactctcaggaatgtttgatgaaatgccagcgttacaaactcgacaagagcaacgcttgctgccctacgacactacagatgcgcaagcagaagtgttagtatttgatacgattgagccacattatattgttggcgcagcattctgcaaacaagcggtaaaagcagattatgaaaatctgcttttgggaagaaatgtatgtttgaaccaagtagggggcggtttctttgcttctcgctcattcgttcgataa

SEQ ID NO: 224951 - DNA, 393 bp, Klebsiella pneumoniae
atgaaaaatgatactgatttgccccaaagtgtcacaattttagagcatgtacaaaaacctacgaaacagcgtttttttgtgttagggatactattcgttagcttatcgattatatatcttgaccgtgtcaatatttctattattgcagcaaatacacactttttaaacgaaatgcatcttaatgacaaaccaatcttagttggcttgttgatgtctttattcttagcgagttacgggattgctaatttttttaagccctttaggagattatattggccctcgaagggccatgcttatcgcttatgtggtgataagcctatcacttttgattgggggggtgtcaagtttctttgctatattattaggaaccaggattttgctaggtattggtga

SEQ ID NO: 224952 - DNA, 1206 bp, Klebsiella pneumoniae
atgactaatcatagttttgataaccagatgtctccagaaacgtatctgtgccatggcccattcgatcctgaggtatttggtggcgtggttaacccgcctgtatatcacgcctctacggtcatcttcaaaaactgcaaagagctaaacgagcgtcaccaggctctgtttgaagatgcggaagatgaagtgatgtattacggtcgatttggaacgccaatcaccttcgccgtgcagaaagctctggccgaactggagggggggtaccgatctttactggtgcctacagggctggcagcatgcaccagtgcattactggctctggtaaaaagtggcgatcatattcttgtcagtagcagcgtttacggcccgacgcgtgggttcgtaaataatgtgctggccaaaatgggcgtttcggcaacctttttcgaccctactatcggcgatggcattggtcaactgttccaggaaaacactaccgtggtgtttacagaatctccaggctcccaaacatttgatatccaggatattccggcaataactcgcgtggcgcatgcccacaacgctaaagtgataattgacaatacctgggcaacgccactatttttcaaaccatttgagcatggcgtggatgtctccgtgcatgccgccactaaatatatcgttgggcactctgatgcgcagatgggcttgatcacgacgaataaagaaacctggcttgccattcgtcgctttatctatctatttggtcttcatgctgcgccggatgatgtttatctcgcacaacgtggattacgcacgatgtctttgcgtctcggacgccatcaggattcagcgcttaaaattgctaaatggtttgaagaacgtgaagaagtggagcaggtgctacacccggcattgccttcatgtccggggcacgaaatttggaaacgtgacttcaccggttccagcggtttgtttagcgtggtgcttaaaccgcactactcaaaagagtctgtggagaagtttattgatagcctgcagtatttcggcattggtttttcgtggggcggttttgaaagcctggccattccatttaacccgcgtaaagatcgtccggaatatcactggccgtacgaagggcactccttccgtttacaaatcggcttagaagatccagtagatttagtaagagacctggatcaggcgctgcgtcatctgaaggggtaa

SEQ ID NO: 224953 - DNA, 1005 bp, Klebsiella pneumoniae; identical to SEQ ID NO: 216447

SEQ ID NO: 224954 - DNA, 1038 bp, Klebsiella pneumoniae
atgaagacaaccatccccacgccccccgcccattgcacctttgatccagaggactggctgcggctggcccgctgctggcacccggtggcccgtacctgcgatattgccggcgccccggtgaaagccaccctgctggacgaacagctggttatctatcgtattaaaggccaggtggtggtcgcccgcgacgtctgcccgcaccgcggggtgccgctgaccctggggtttcatgaagaagaaggcatcgtctgcccctatcatggcctgcgctttggcgaggatggccgctgcaaccgcatcccctccagtccggggcaacccattccggccaaactgcatctcaccagcttcgccgtggaggagcgctacgggctgatctggacctgcctggcctgcgatccggacaatccaccgccgttaccgaccatgccgcactgggacgacgcgggatttcagcaaatcaactgcccggccttcgaggtgaagggatttgccggccgccaggtcgaaggctttctcgatgtcgcccacttcgcgtggatccacaccgacaccttcgccgatccggacaaccagcaggtgccggactataccccgcaggagacgccgttcggctttgttgccgactactggagctcggtgggcaattacccggccagctctgatttccgcgcgccggaagggttccagtggctgcgtcactttgaaatgcatctgccgttcaccgctacgctgaccatccattttcccgccgacgccaggctggtgatcatgaacgccgcctcgccggtgtcgtcccgggtgacgcggatgtttgcccctattgcccgcaacttcgatctgcacgtgccggtggaagacgtacatgcgttcaacctgcgggtatttgaagaggaccgcctgatggtcgagacccagcgtccggaacggttgccgctggatctgaccctggaggcgcatattccggcggaccgcagctctatcgcctaccggcgcgggctgaagaagatgggctttggcgatttctttctggtatga

SEQ ID NO: 224955 - DNA, 945 bp, Klebsiella pneumoniae
atgagccagcctgccatcgacctgaccagcgaactgttgcgcggtatgcgcctctccggcgttaactaccggcgcatcgaaaccgcacgcccgttcggcgtcggctttagcgccgtggcgggtaaagcccagttccatttcatcagccgcgggccggtgctactgcgcatggccagcggggaacagttcaccctcgagagcggcgatgcactgtttattcccaacggcgacgggcacgccctgctctcagatccgcaggccacggtggtcaatgtggcgcagctgcccagcgaaacggtgtgcagcacggtaagttgtatcaacgctggcgaccagcctgactgcccggagcgcgccgtcattttcagcggttgtatggactttgagctcggcggcatgcagccgctggtcaaggccatgcccgaggtgatgcgggtcagcagcctgcttaatacctggccggagatccagccgctgctggcggcgatggagcgggaatccctcacccgccaggcaggctatgccgggatcctcgcccggctggcggacgtggtggccgcgctgattgtccgcggctgggtagcgtgcgggtgcggcaacgccaccggctgggtacaggtcctgcgcgatccccggctggcgaaagcgatctacgccatgcatcagcgcccgggggtcaactggaaagtggaagatctggcgcgggaggcgggtctttcacgctcgctgttcgcggaacgttttctcgccgccaccggcaccacccccgcccgctatctcaccgagctgcgtatgcggctggcggtgcagtacatcacccatgaaggccaggcgctggaaacggtcgccttcagcctcgggtatcagtcgctggcggccttcagccgggctttcaaacgcatcaccggccagccgccgggagccctgcgcgccacggcacgctag

SEQ ID NO: 224956 - DNA, 219 bp, Klebsiella pneumoniae
gtgttcgaggtggtcaatccgcaggcggtgcgcgatcgctggcaggcgctgctgggctttccgccactgggggagcagggactggacgtgggcggccggcaatttatcttccgtgaaggggctgccaaccagctgaccgaactggtgttccgcgtcgccaacccggcgcttaaggggcagcgctttcgtgtcggcaacggcgtgtatcgctttacataa

SEQ ID NO: 224957 - DNA, 807 bp, Klebsiella pneumoniae
atgaaatatgccgcttttaaactggcaggggtcgcactgtctctttctctggcatggacgtctgcccaggctgccgcgctgcgcgtcgccgcggacccggttccccacgcggagatcctcaactacatcaaaaaaatcgatcccagcctcgatctgaaggtggtggagctgaccagcggggtcaacgccaatgaactgctggccagtggcgatgtggatgccaactacttccagcatgtcccctacctgaaggatcaggagaaagcgttgggtaaaacctttaccgtcgcggccacggtgcatattgagccgctggggatctattcgcataagcataaaaatttctcatcactgccggaaaacgccacggtggcggtgccgaataacaccaccaacctgagccgggcgctgttcctgctgcaggcgcagaagcttattaagctggatcccaaatttaccgacccggccaccaccctggcgacgccgaaggatattgtcgagaacccgaaacacctgaagattctggagattgaatcgccgcagatcccgcgctccctcgacgatgtcgacctggcggtgattaacggtaactacgcgctggaagccggcctggtgccagcgaaggatgccctggggctggaaagcgccgagcataacccgtacgcaaatattctggtgaccaccccagccctggcgaatgacccgcgcattaaggcgctggcgaaagacctgacctcgccgcaggtggcggagtttatccgtaaaacctacaacggctcggtgatcccggtggcccctcagtcatga

SEQ ID NO: 224958 - DNA, 570 bp, Klebsiella pneumoniae
atgggtaaagaacgtaaatgttcttttggcagtgatgtaaaagaaccgatcattgagcgcatcttttctctggtagagcgttatccatctagaaacgaggccgcaaaggcgtggggtataaacatcaataccctacagaactattataagaggcgtgatattgctcccacccctaggaagcaacttttggaagttattgcaaatcatgaaggtgtatcgcttgattggctggttgagggaatcggggaaccaccggtggacacaaagaaagaacatgaaaaagaacgcacacattcagggctaagtgatccagacgccagactcgcgacactgttctcgattttgtcagacgaggaaaaacaatcactgtttgaaattgttgtccgcaaaggggttgatacagtgttacggctgcgtgatgatcgcaatatcaagctactgcaatgcaatgatttggagaaagaacggcttctcgtgtggcttgatagtggtatgaaaaaagaggcatttgaggctagtgaagttgtagcagaaacaggccttgcaaactctggtaagaaggccggttaa

SEQ ID NO: 224959 - DNA, 249 bp, Klebsiella pneumoniae
atgagccgaaatgaagatctgaatgctgactggcatcccgagaccataaaagccgaaatccacaaacgtggtttgtccctccggacactctcccttcaggctggttacagcaaggattccctgaagagtgtgttgcgtactccctgcaagccttatcagcagatcgtcgctgatgctctgggcgtttcccccgaaataatctggccaagtcgttacagaaccagtagctacgtcaataaggcggtttga

SEQ ID NO: 224960 - DNA, 618 bp, Klebsiella pneumoniae
atgaataattcaaataccatcccggaaggttaccggattaacgcgcaggggcatttagttcctgaatcacagattaaaccactggataaactgcgtgatgaaatggtgctcggcatcgttgaagccgctcgcctgcagcgtcagtcgctggtcgagttcaagctcggttctatggcgaaaatcggtgactttatcgacctttcagccgcggagtacggtgttgaatatggcggtgctaaaggtaacgtcacgctggtcagctttgatggccgttataagctggttcgtgccgttggcgagcatcgcatctttgatgagcgtattcaggcagcaaaaaaactgattgacgactgtatccatgaatggtctgccggggctaacgagaagattatggcaatggtcgatcatgccttccgtgtcaacaaacagggacggattgatatcaatcaggttctcgggctccgctcactgaatattgacgatgccaaatggaatgaagcgatggacgctgtagccgatgctattcaggtcacgggaaccagtcagtatctgcgtttatatgagcgtcaggacgatggcacttataaacagatatcgctggatttagccaaactctga

SEQ ID NO: 224961 - DNA, 498 bp, Klebsiella pneumoniae
atgaatccgaaaacaaaaggtatttttgaggctgcattcgccaaatggggatttgaatctcaggtgcttgttctttccgaagaggccagcgaattatcagctgcctgctgtcgttttctaaatcataaaaccgacagcagcaaagtggccgaagaagcggcggacgttgagatcatgattgagcaactgcgtcataacgggatgggcccgatgattgaccatgaaaagaaccgcaagatggcgcgtctggctcaggttgttggtgttgagtcacaacctgtcagcccctttggcccgtccgttatggggcttctggaggaagcgacagaacagatggggctggcagaaactctctatcgcgacaccaaaaccagcaatcgctatgccgccgctcgcgcccgtatggccgtcagtctgctgatgcaggctgctcaaaagatgattcgcgagcagcagcatgccgaacgtatgcgggcggaggataaagcacatgattaa

SEQ ID NO: 224962 - DNA, 441 bp, Klebsiella pneumoniae
atgggtatttacgttacccgtgatgacctgctggctgcggacgggtcgctggtctggaatatggccatcgacaaggcaacgaaccagctcgacgagacgaagatagccacggccatcgaggacgcggacgcggagatcaactcgtttctgtcaaagcgctatcagctgccgctgaacatcaccaccgttccgcgcccgctgcaccgggtagctgtgtccatcgccatttactggctgtccgagcgcgacaatcagatcaccgatctgattcagaagcgctacgacagcgccatccagaccctgaaggagatggcgaacggcacccgggacctcggtctgccgaccgacactccggctccggagaccgataacggcaggatgattgttgtctccgataacaaacgtctcttcacccgtaacaacctcaaaggagtgttgtga

SEQ ID NO: 224963 - DNA, 210 bp, Klebsiella pneumoniae
atgaagaaacatattaagcccgcccgcgcgggactgcaggtgcgtaaagccgatggccagcgcctgaatcccgaaggggaagagctgcctgtaagtgcgtggtggctacgtcgcgaagccgaaggtgatgttgttatcaccgatatccaggcggaatccgtaactgaaccggcggaagcccgccagacccgaaccgtaaaggagaaatga

SEQ ID NO: 224964 - DNA, 384 bp, Klebsiella pneumoniae
atggcgcagatgagcatcaccttaaaacatggttacatcgcaggtaaaggtactgacgatgagatccgctacaaagaagtcaccttccgtgagctgacctcaaaagacgttatcgacgcccagcttgaggcggagcgcgtggtgatcggggagaacggcaaggcggtggcgtactgctctgaggttctgatggggctgggtatgctgcggcgacagattgcctcggtgggtgagattcctgggccattgtccctcaagcaaatctacgcctttcaccctgaggatctggagttactcagcagtaaagctgcagcactcgatgacctgatttcggagaccgcatcgcgggggcgaactgatgccgctggcgacggcgctcagtaa

SEQ ID NO: 224965 - DNA, 1257 bp, Klebsiella pneumoniae
atggctatcaagtgggaagacctgcgtgatgcctcgttccggggcgtcccgttctttttccgcgacgtcgagggtgctggcggtcgtcgtgctatccctcacgcctaccccaaaaaagaggtgggctggacggaagaccacggcgcggtactgacgcagcaacagattaacgcgatcctgctaggcagcgactacatcgaccagatgaaccgcctgctggccgcactcaatactgcgggtcccggtgagctggtgcatccgtggttcggcgtccagaaggttcaggtgggtcgcgtcacgcatcgcctttccactgaggaaggcggcattgcctacgtttcctttgaggtgtacgaagctggcgagcagctgtttccctccggcactgaagacaccagcgccaccacgctcagcgcggcggataaggtcaaggaagcgctggccagcggtgattattttgcagcactcgatggcgtcggtagcatggtggacacacttcttgaggacatggagggctttgtcaccagcctgccgaccctgccggatgcgctcagcgagtggatggaccgcctcaaccggtttaaggacctcgcaggtattgtggccgccgcacctggtgaaatgatccgcgatatcaccgacctcatcagcgatatgaaggacctggtctctgagccgccgttcgccctgcgggtctatgaccagttgcgcgacaaatgggaaggcgaccgggcagcacaatccgctaccaaatctctggtcgataacatcagcgtgaacaccgataccggctttgccagcagcgtcacccctgcatcgacgccggagaccacggcggcgatggagactaatatcgaagacttccggcgtctggtcattatctccacgctggtcgctcaggctgaagcggtggccacggcgaccttcgagaccggccaggatgcgcagaacaccggcgaccagctggctgagcgtctcggcgagaccgcagcggaagctgtcgaaagcggtctccgtgagctgtggcgttcccttcgcgagctgcggttcgcggtggtgaatgatgtgcgtatccgcagcatccagctgccggagctgcgccgtgtcaccccggcccggacagtaccggtgatgctgctggcctaccgcgagaccggcgactcggagaaccggggtgaactggtgacccgcaaccggctgcgctatccctcctttattacgccttcacagacgattgagatcatcagcaatgactga

SEQ ID NO: 224966 - DNA, 1092 bp, Klebsiella pneumoniae
atgactgaagagttaaccctgaacgttgatggcaaggtctggggcggctggacggacatgaccattaatcgctcgctggagtctgtggcgggcgagttcgacctgaccgtcaccgcccgatggtcatctgccgcgccgcgctctatcaagcccggccagtcctgcagcgttgatatcggcagcgaccgcgtcatgaccggttacatcgacgattttattcccagttatgatgcggataatgtctccctgcgcgtcatgggtcgcgacaaaaccggcgatctggtggacagttcggtggtcgataagtccggtcagtggaaaggtcagaagctggagcaactggcagccaccatctgcaagccctacggcatcgaggtggttaacgaggtcgacaccggcgatgcctttggcagcatcaccctcgaacagggcgaaaccggctttgaactgctcgaccgtctggccaaacagcgcggcgttctggtgacctcagacgcttacgggcggctggttatcacccgagcatccacccaacgggccggagtggcactcactctcggcgacaatattctggctgcccgtggacgcttcagctggcgagaacgtgccagccagtacatcgtcaagggctccgccagcgcgggcggttcaacatgggatgaccagccggtgaaaatggtcggcggtcgccagactgtggtaagtgaccccgaaataacccgctatcgtccgaagattctggtcaatgaagacagcctgacggtcggcggtgccagcgcccgtggtgagtggcataaggcgtatgtgctgggcgaatccaacaccactgaaatcaccgtggcaggctggcgggagaatggcatcagcgggccgctgtggcagaccaaccgactggtgaaggtaaccgacgccattcaacagctcgatgttacctggctgattaaaactgtctcctttatggaaggtgacggcggtcgtctgacggtactgaccctggccccgcctgagtcgctggacatgccgtcccagaaggctaaagcgaaagggaaaaaagcgaagtcgaaaacgaccgtgggggcaacatgggactga

SEQ ID NO: 224967 - DNA, 540 bp, Klebsiella pneumoniae
atgggactgaaagacgctaatatcgggcgctcatttgcagagcttggccgacgtctgcgcctgatggtggaccgggcgctggtgcgcattgtgacggacagcctcggtcgccagaacctgcaggtgcagtcgctggccgatgagaccaatgacgacgtcgagcgcttccagaattacggcttttccagcgttccgcctgcgggctccgaggcgattgtcgttgctgtcggtggccgtcgcggtggcatggtggccatcgccgtcgaggataaagggagccgtccccgtggcggtgaagaaagcgacgttgttatttatcatcaggaaggacatattattcgcctgaaaaagaatggcgtgattgaaataacagggaagacggtaaatgtggttgccgaagagagctgtgacattatcggtaaacagataaatatcaccggccccacttctttcagtgaagatattcaggttaagggaaaatctttccttggccatattcataaggatggcgacggtgaaaacacgactgaacccttatga

SEQ ID NO: 224968 - DNA, 453 bp, Klebsiella pneumoniae
atgaccatcagaataaactggcacctgcccgctggcggcgacatcgagattgaacacaatggcctttcgtttgacgagggccttgtttctttggtgtatatctgcctgtttactgatgcgcgggcagataccagcgacgaaatacccgacggcaccgatgaccgtcgcggctggtgcggtaattccttcagcgatttcgaatggggctcaaagctctggctgattgaccgtgaaaagctgaccgaagaggtcaggctccgcgcggagaattacgcccgtctggccatgcagccgttattacgttacggctatgcgcgaaatgcgcaggtcattgccaccatcccccgtattaactggctggcattaaccattattctcacccgcccggataaaaccgagttaaccgtcgaaataaagaaacgctgggaggcggttgaaaatggctacatttaa

SEQ ID NO: 224969 - DNA, 1077 bp, Klebsiella pneumoniae
atggctacatttaatgtcccgacgctccgccagctcattcgtgccggcattcaggatttagagattgaactcgaccaggaattaccgattttaggcgttgaacgtgcgttaaataccgctttcagcggcgctttacgcgacgtctacgattatcagacgtggattaaaaaccagattatcccgtcagagcagtccgccgacgaaaccatcattgataccgcccgctatgagggcgttattcgtaaggctgcatcctatgccagcggaccggtcgccttcaccggcacccgaccgctgccgctcgacacggaaatgcagacgcaggacggcgtgcgctaccacgtcaccgccaccagtgacccgtcagcgggtaaaatcaccgtcaccgtgcaggctgacgagacgggcctcagcggcaacctgaaagccggtgacgtgctgaccctgatttccccggtggccggagtgaacagcgacggtgtggtggccgatgccggtatctccggcggcgcggacgtcgagtccgtggccgagctgctgacgcgcctgctgtaccgcaagcgtaacccgccaaccggcggcgcactgcatgattacgttatctgggccaccgaactgccgggtatcagccgggcatgggcctttgactgctggcacgggctgggtacggtgggccttgcgtgggtctacgaccagcgcactgacattatcccgaccggcaccgaccgcgaagccatgcagcaatacctgttccgccatcaggacccggctaccgggacatacgtcggcaagcccggcggtatcgaggtctggcccattcccctgacgctcaagccggtgccgctgaccatccgcatcattcccgatactgcggccatccgttctgcagtcaccctgagcctgcaggcgctgttccgctcggtctcgccgggcgacacgctgctgctctccgccatccgaacggccatcggctcatcgacgggtgtcacggattacgagctggacctcaccaccaatcaggccagcgagaactatgagctgctgacgctgggggctgtcacatggcgcatcgtgtag

SEQ ID NO: 224970 - DNA, 585 bp, Klebsiella pneumoniae
atggcgcatcgtgtagaggactggcaggacgtcctgcagcagctgatgccacgcggtaaagcgtggccacgcgaccagacggcggcgctgacgtcactgctccggggcttcagttcccgcctgcagctggcggaggcgaacgcggatttgctggttaccgagatgcgcccggagaccaccgacctgctgctggccgactgggaggactatctcggtctgccggactgcaacgccatcccggacggcttcgaccgccgccgcgatgccgtggtggagaagtatcaccgcaagggcgggctggccacctggcagattgagcaggccgtgaaggacgcgctgggcttcaccattcaggtgaccgaaattctgccgcatcacgtcatgcgcgacatcatgtatccgatttattcgcataaataccgctacctgctgcaggtgacggtcacggatatgccgatgatccgctttcgcagtatcagcaacgtcctgacgccgttaattagccttcaggcgcagatactggaatgttttttacgtcgttaccggctcgctggccacgattatgattttctttacgaggtttaa

SEQ ID NO: 224971 - DNA, 813 bp, Klebsiella pneumoniae
atgtatcacctggataatgcctcttccgttcctgatatgcccgccatcaagccggtattatttaccgagcgccgctggtttaccgaaggcggcgacggtattgcgccgagttatccgggggcggactggtttaatgccattcaggcggaaatgctgaacgtgctggcgctggcaaatatcacgccggataaaaatgcactggaccagtttgcccaggccatccggttattttcatcggattatatgcttcctcctggcattccacttccgtggccgggggcgaccgcgccgaacggctttattcttatgttgggtcagagcttcaataaaacggcgtatcctcgtcttgccgttgcgtatccctccggtgttctgccggatatgcgcggccagaccatcaagtttctgcctgcatccgggcgtgcgttgctgtcatatgaagctgacggtgtgaaggctcacgcacacaccggaagcgtggccacaacggacctcgggacggtgtccgccagtaactttgatcacggtacaaagcccaccagttcggataacgagcatgaccatgatggtggcatgttagcgccgggggctgtctgggacccggactatgtcgtcgggtcagataatgactcgcatcgcacgcgtaacaagaccagtaaagccccggcccacagtcacaccgtcaacataggtattcacggacatactgtttatatcggtcctcatgctcatgcagtgacgatcaacagcactggtaatgccgaaaacaccgtcaaaaatatcgcctttaacgccattgtgaggttagcgtaa

SEQ ID NO: 224972 - DNA, 876 bp, Klebsiella pneumoniae
atgtcatttgaattttctcaaagcccgcaggccatctggctttatcagtacgatgccgatggcgtttatattggctctgtttttatgacgatcccggcaggtacaggcctgcccgcaaataccacgcatattccctgcgagccggataaaggccataccggtatatttaaaaataacgtctgggaatacgtgaaagatattcgcggaacccgttactggaatattcacggcaccggctttgttatttccgcactgagtgaatccctgccagagtgggccattaccattgagccgccggtcgctgatgccggttacgttctgctgttcacggatggccagtggatgcaaatcgaagacaggaccggtcagctttattacgagagcaacgggactaagcacgtcgtttctgacgcgtggtttattctgccggagggttgcacgttcgttgccccgccagaagacaagccgacgttcgtcaccctctggaacggcacagaatggatttacctcaaagacctgcgcggtcagcttgcctggaataccggaacccgagaggcaatcactattctggaagtcggccccgttcctgacggctacaccctcaaaatgccaggccagttcgatgagtggaatggctcagcctgggtgaaaaacaccgacgctgaacaggcttatctcatcgctcaggccgaccgccagaaggctaagttcctgtctgctgcatccgagcagatctcactgctgagctatgccgtcagcagcggacaggctactgacgatgaaaccgcgcagcttgcaagctgggagaactatcgccttgccctgagccgtgtggataccactacaaccgacattatctggcccgagaagccgtaa

SEQ ID NO: 224973 - DNA, 2148 bp, Klebsiella pneumoniae
atgtatcatctcgacaataccagcggcgtccctgagatgccggagcctaaagaaacgcagacaatttctacacgttggttcggagagagtcaggaacaaggcggtataagctggcccggtgcggactggtttaatattatgcaggccgagatgctgaatctgttggccgccgctggtatgcaacctgaaaagcatgtgtttgaccagttatcaaaagctgtaccggaactcagttctgccaaagtaaaagaatttatgactgctgaggacggctaccgctgggttgggcaggtcaaaagctttgctgcgctcaacttgctgcaaccttcatttgacgggcagcggatactgctggccgggtttaatgaaggtgactcaacgggaaaaggggaatttgtcgcagtgttcggcatggccacgcctgtttctggtcagattgcggtagtgaatccatactggtactggaagcgcataacgaaagagattcgcctgtctgactgtggtctgcaaaagtcccagcgctctgatgtgacaaaacaaaacgaatatatttatgacgtcaccgacgagctacaggccattatctattatgcaaatatcaaccagttgccgcttaacgccgatgactatgacaccgccaatccgggttttgagagtgagggttattatattacccggtctctgcactttgagcgactggtgtcagcagatcccgttaaagacgaatatatatacactggcgtgcgctccatgccggggaatttagtgctgctgattcattcgggggcgtttacagcatgggagacccctgaggggccttttgtcattacttcccggtgcgcaaagctgaacggcgaaggtaagctgtatcacggcacggtcaatacttccacgcgtgttgagcgcatcacaatacgcgattgcagcgagtcgaacggcggacctgggagactgcgccccctgagcgccattctctggatgtgcctgggttttaattatacccaactgagcgcatacggttttaatggccacggggttagagtgttcgcgtatgacggcatcgcgcagtcaacccgcgcagagcagtgcgggaatatagataaattttctatttattcatcgacatacccttacgcggacaaagctgatgaatccaatgccatcacgttccaggaggtttttgcacacaactcgtttgaaaaaagctggtatatagcagggtcaaaagtcaacgttgacagatttcatgatgaggcattgacctgcactatcgacaatccgccaaacacttacggtatagagcgacgtaacgggtacgggtatacaagcgcctatttttcgtcgattggcggaaagctgggcagcggtacattctcaacgtttaaaaacaaggcagtacaaccagtgctaacgctcggcgttatttctaacagcattgggaccatcagcgtaggtgccgccagagtttctattattgccggtgatccaggaccggagggcggtgttattaatacgctgtcgaatatcggtggtgaaacacgcatcgttgaaggtgccagggttacaatcaactattctcgttctgatgttctgttgttactcgatcccgactctaaaattgaaaatggcggcgctaaaacgacggtgtgcgctggcaggctggagaagttctctgcgggtgatctcattacaaataccggcgcagacatagacgggggctcatgcggcgatttgactgttaattctaatggagagagcgcggtttcaatcgagaagctacgcgtaagagggaatgccacagtgtcatctaaaacatatcgctcattcattaaaaattgttgggtactaggaacgctgacaggcccggataacaacgtttttgacctggaaaattgcacagttcataacatggccctgggaaataaaacaggaatgaacgttaacgtgatgggcggcgttttcgatactgctatgatttctccgggtgtctatttaaacccttgcccgtcattcaacgtttcatgcggtgggtttaccgcccctacagggagcgcagcgataggacgaacaacaaccgacccaaatacgggtattacatatcgctacgtgggtaataacgtctggaaaagaatcgttccatctacttaa

SEQ ID NO: 224974 - DNA, 195 bp, Klebsiella pneumoniae
atgttacttgggttgcacggttccattgccattaccgcgatcctgatgatagccctggccgccggcttcttcggcgtggtcttcggcaaccgcttcggcgtacagtctccggatgctgaagccgtgctgctgttgagctcggttctgtgtatcctgtcgctaccgctgtttatctctttgacttcaggactgtaa

SEQ ID NO: 224975 - DNA, 903 bp, Klebsiella pneumoniae
atgaagattttatttacctttcccggccagggcggccagcgccccggcatgctggcggcgctccccgatcgcgaggcgatcctcacccaggcgcgcgccgtgctgggggatgaagtcgataccctcgatagcgccgacgcgctacaacacacccgtgcggtccagctctgtctgctgatcgccggggtagcctgggcgcgcgagctacagcgtcagggcgtggatccgcagatggtcagcggcctgtccatcggcgcgtttccggccgcggtgattgccggcgcgctcgatttcgccagcgcgttgcggctggtggccctgcgcggggacttaatggaacaggcgtatcctgaaggttacggactgacggcgattatgggcctgacccgcccgcgggttgaggcgctgatgcagggccacgaggtttatctcgccaacctgaacgccgaaacgcagttcgtgattgcgggccgtgatgaggcactggccgaggtggcgcagctggcgctgcgggctggcgccagtaaagtccagcggctggcggtcagcgtgccgtcgcactgcgcgctgttggataaacctgccgcagccctggcaaaagcctttgccgacgtcaccttaacgcgccctcagcgcgcctatttaagcggctcgacggcgcgcgtgctgtgggatccgcagcggatcgccgacgatctggcgatgaacatggcgcgcccggtccactggcaggaggcgatggtcgccgccgatgagcgcgatgcgcgcttagccattgagatgccccccggcggggtgctcacctgcctgacccgccaggcgggctggcgcggggagaccattgcgttggagcgcagcggcctggacgtcgcccgccatctggcgcagcggcttagcgattaa

SEQ ID NO: 224976 - DNA, 1800 bp, Klebsiella pneumoniae
atgagtaacaggctgaatacagaaattctgattaaccttactggtaacctgaccgccaaagcccgccagtatggttctaacatgtccgagttcgcgcggcgtagtgagcgggctatgtctgtggtcaaagctactgcctcagctgcgggtcgtggtattgatgcccttggaaatcgttatacagctgcgattgctggtttcggtggtagcgccatgctcagaaatttcaccgcgacagaacgtcagttaacgcaactggggattgtggcagagaaaacccgcgcagagatgagagcgatgtatgagggtattcaggatgaatcctttaatgttgggattgatccgaaatctttgctcggggtttacaacaccattaacggaatgatgggtgatgttgagttagcggtaaaaaataaggatacgctagccgcgacagttgcggccactggtgttggcggtgaggatttgggggcgcttgtctctcagtttcctaaattcacaggattcgataaagccagcgctgaggatttcaaacttgccgtagacggccttaaccgcctgggtaaagagggttccttcgagctgggggatatggccagatatttaccctcaatcttctctgctgcggcagcgatgaatcagcgtggcacgaaagggattatgaatgtgggtgttctggctgaggctgcgaatgaccttaccggtaatgctgcgataagtgccacacatattcagagcctgtttaccgatgtgcaaagcggaaaaacagaaaaagcgctgaaagatgcgggtattcgcactcgtaataaggatggaggattccgtgatattgttgaactggcgacagagattgccagaaaatcactgaactacagtatcaaaagtggaaagtctcaaacgtccttactggaaggcgctggttttactgattattcggtccggtttttacagtcaatgtccacgcccgaagcaataagacgtatggagcgttatcgtaatgttgtcgctgatgggaaaagtatttttgtagatgcgaaatatgcatcggatgatttcgcatcctcattacaacgtctgtctatttcatgggaaaaattctctaacgctcagcttacaggcccgataagagaactggctgactctattaattcagtggatcaggacgccgttcagaactggcttgaaattgggaaaaatattgctattgcaggcgctggtattattgcagctcgcaaggcttttcagttgggaaaaggcgcgtgggatttattcggtggtggtaagtcaaaaggcattcccaaaggcgtttcagatacgttcggctcaggcgtcatgcccgtctatgtggtgaacatgggggctggaggcatgggaatacctgatgtgggcggcggtaaaaacccgcgcggcggctggcgtaactcgctaggatctatggcgatgatgtcacctctggcggcgacaataccttttcttgccgaagaacctaagctgactgataatgagaaagctgagatggttaagtgggcacaggaacgcgccaaagggccttcaatatggtcgagagtgtctgactggatcaattcggccagtgaaacacctcagattgcagacccgaggccgtgggcatcgttgcagccccagaatcagcctggatatccattcttgccgcagcagttaaaaggcagtattgaagtatcagttaaagatgaccgggtacaagtcaccagtgttaaagtcaatgcacctggtataaccatgagcgccggtagtggcgttagaaatatggaacagcagtga

SEQ ID NO: 224977 - DNA, 900 bp, Klebsiella pneumoniae
atggttgattctgtaaatattgatggcatcgttgctgatgctcaggttgcctttaacgttaagtttgaacagggtacaaaagcttaccagccgagccacgttcagcttgctaatgaagttccgtcttcctccgggtctaacgcttatggctttctggaagaattcccggaaattaaagaatggctcgccgaccgccagttaaaagaattgtccactcaggactatatcctcaaaaataaaacgtttgaaagcagcatttcaatcaagcgtgaagattttgaagataatgactatggcaaatattccatgattttcgaacaatacggacggaaagcagcgcaatttcctgacaagcttatgttcgaagcgatggttaaaggccacacgtcactgggtattgatggtcagaacttctttgatactgaccatccggttaatgacggcgcgttatccaacatctacggcacagcgccggaatcgaacccgaaaccaaaatggtatttgtttgatgccactcaggggctgaagccttttatttatcagaaccgtcgccccatcgttatgacggcagttacgcgcccggaagacgctgaagtcttccttaaaaaccgctacctgttcggcgtggatgggcgtctgaatgtggggtacgggatgtggcagtgtgccgccgcatcttatgacgatctgacggaagaatctttcggccaggtctatgacggcatgttgtccattaagggcagcagtggtgaaccactcggcattgtaccgtcgattattgttgttccggtttccctgcgatcggcagcagagaaaattctcctgcgccgccagctggataacggtgaagacaacccgaattacaaacgtgttgaaatcatcgtcagcccgtacctttaa

SEQ ID NO: 224978 - DNA, 819 bp, Klebsiella pneumoniae
atgaacgtaatggctttatgttctgagttaaacgcagaaaaagcagccccggaatggatcgagttacttccggccgggccggatattgttggccgtgatggtcgtagctggcggctgagcgaccctaaaaaagtggctgaggctttcaacaaacaaggcatgtctcttgttattgactacgaacattcaacagaagttaaagcaccaaaaggtgacgaggctcccgccgctggctggatagaatctgtagaggttcgtgatgatggttcggtctggggtaaagttgactggactaaaaaagcgaataattccattgtcgataaagaataccgttttatttctccggcattcaaccacacaacgagcggcgaaattacccgcctcagaagcgtggcgctgaccaataagcccaatttaaccctgctggcacttaactcgcaggatgaatggggggaagtcgctcaggcgttaggggtggaaagtatcagttctcctcaggacgtactgaaagcacttaaccgggaaaaacaatcgacagctaataaaatcgttgatgaggttattgctcaggcaattttctgcccggctcagcgagagcagcttattgcgatgtgctctcaggttggcgaagagcaattccgggagtttgccaaaattcagttaaacactttcgggaaaatggtgaacacagctaaaagccaacgtaattattcaagtacgggacacagtcgattaaatgagagtcaggttgcggtatgtcgtaatactggcgtaagtgaagatgattatttaactgctctggggaaagataatggttga

SEQ ID NO: 224979 - DNA, 414 bp, Klebsiella pneumoniae
atgaaattatctaaagaattattcagcgctggtatcagtcttggcattgaaacgatgcgaaagaatctccctgagcctttaaagattgtggaacagggtgttattgccgcctgtaaagagattgggcttgatcctgagcatgaaattaacggcatcccctttgtcggtcgggtcatggtgcgggtgatggaggctcagcttggagagaacctgatgccggaagcggaggaagattgtgcacatctcattttctgcaccaaagttgccgcttacgctgatgcttttggcgcagaaaaagccgctgacgaatacgagttgacacttaaacaggtagaagaaatcagcctgctggttcacggattccaggatgaggttgcaggtatcggggagcgcctgaaacaaaaagcgcactaa

SEQ ID NO: 224980 - DNA, 729 bp, Klebsiella pneumoniae
atgacgaatacaaaatttaatacattgctggcccacgctccccataaagacataacagcaataaataaatttattacatcttcctgttttacccgcacaggacaggaaacgctttcgtttatccgcaggatgggatacagatataacctttctgatacaagtgtctatatctgtcaggttaaagaacagtttgaagaggctcgtagaaaatttggtgacagtgtagaaattgattttttctgtgatgttgctggtacgaagtatttcgaagacttcatggctgtttatgataaagattcattttatcaggaaatgataaacttcaatcccgacttcaattacacggggaatctgaagagtattcggaagcgcgcattcacggctgtcagagaaaaagaccttcagaatccgggggaaggtgtttcttatcttattggcgcactggaaaatgcactaaagagaattggtgtaaatcctgaagatgacatgaacggaatgaccaaggcgctcataatggctatgactgttatgaatgatattggcggcatgcaattttaccttccgaaaggtgaattacttaaacgggtggttaataaaatagatatttataccgatagctacacaatgggtacgcagcaactcgcaataaagtatggcgtttcatttaaagcaatcacgcttgttattaaatccgtcaggcaggcaattaaagaatatgagggaaaataa

SEQ ID NO: 224981 - DNA, 174 bp, Klebsiella pneumoniae
atggctaccagtaagtttacctatgtgttcgcggcaatcaaccgccacctgccgaaatctcgcccggtcatgctccgcaccattgcaaccgacgaaaaaagcgcccgtgaacgttatgcgccggactatgatctcattttctcctgccgcctccctgccgggggtgccaaatga

SEQ ID NO: 224982 - DNA, 417 bp, Klebsiella pneumoniae
atgaacatgccctcaataaatatccagataatcattacgttaaatagcatgcacaaaggaaaaaccatgtccgttcagcctgtcgaaataagtaaggcctatcgtttattgcaggtcgggtccaccaccatgatttccgcaaaatatgatggcgtcgaaaatgtcatgtcagccgcctgggttgggctggcaggcgagcgaaaagtggtggcctatattggcacccaggctttcactcatcagctggtggaaaagagcggctatttcgtggtgcagatccccgtagtcagccagatggcaaccgtcctctacgctggcgggcgcagctatgccgacgcgccggataaaaatgacaccatccccttcttttatcagccggaatttgatcttcctcttattgcgcacgaaaaattttga

SEQ ID NO: 224983 - DNA, 1620 bp, Klebsiella pneumoniae
atggcaattacttctaccccatctaacaaaggtggccctgcagctaggcaaggttttaaatatcaggatcatgttgccgtcagctttatactaaaaatgctccaagatagttcttatctgcagatcgaatgtgagacagcagatgacatagttgcggtctctcgcccaaatacagaattcatttacgagtatattcaggtcaaaacgacagagggagacacaaaatggaatctcactgaagcaacagctttggaaaaaggcagacctgatagctcactttttcaaaaatctctgaaatgtgacacgcgactcggcatcgctcgtttccggattgtctctaagagagatatatcaaaaccactgcaatgtttcctcattgatatcggcaagcgagtgtttcctgatgattgtacggaacgtggggttaagctagttaaaaaattccctaagacgatatcagctcaaaagagagattttaaatattgggctgaaaactttgtttggcaagtctgtggtgagactgcatggcttgaagctatgaacgtccgtgtgttatcagaattagcagagcaatatggcgtagtgcctagtcatcggcagcagaaagaaatatacgaacacttccttaactgggcagatgacgctgctaccgctgatgttaaaacccaaagtcagatgaaaatcatagcgcgaaaagaagcccttgagtgctttagcaaattactcgatacggttgaagcttcttcttcaataactgctaaaccttataaatctaaaccagagccctttttagtggagtttcatagcgtagctgaaaccgctcttctacgctctttagcgggatttgatgttgagtatgattttggtgaatggagatgtaaggaactagctgaacatttagtggagtggcttcctgagttctgtttacgtgctagtgagatagctaatttccaagtacatcatgcaaaaacaatcttagctaaatcaattagcactttcacacaagcaaaaatgccacgtgataaactcatcgccgaacttattttgcatacgattttgcgatgcagaaaagacagtgagccgatagcatgtaaggttttctatgagtcggaaggaaaactatcagaatttggtaatgcccatattgttcatcaggctggtaaagccgatgaattatggcttggcctttctaaaatgatccctactggaaagatggacgatacgcttaaagaaatttgtagtgtactagacactaccatttctaaagctgtattgagctccgagcgtgaaattataatcacgctgcgtgaacctcaccaccacttacctaccgcggagcaattcagtaaggcattaagtaagcattcgcctgctcaagaaatgctcaaaattatgtgtttccctatacttcttgcttacgatagtgatgtacttggaagaggatatgcctccgattacattaatcatttaaagaatgagatcatggctcactatagcgagctaaaaagcagattacccccaaaagtcttacaagtgaaaatagctattttccttcttccaatagaaaacatccagagattagtcatcgagtttaactcgctttgtaggactggaatttga

SEQ ID NO: 224984 - DNA, 2145 bp, Klebsiella pneumoniae
atgaattacgaaattacaaaaaagaaaattcatttgatcgggagcaaggatatctccacaactgaaattcttgtttcgataagtaaaattgtcaatagaggtattcccgagtgggaaggacgtgatttagtaatacgagctttggataaaattgatttttttgatgctgttgaaaagtcactattattaagcatggttcgttctgtagggttatatccatatatcaagccttatcttgatgaagtatcggatgatgaccgcttggcatatgaaatacatcgaatagataatgttgaaccaggaatggtatttcaccgcctccaagctcatgtatacaacttactgatgcaacgtaagaatgttgttcttagtgcatccactagtgtaggtaaaagcttagtcattgatgcgattttagctagtaaacagtacagtaaaatagtagttgttgtgcctaccatagcgttaatagatgagacccgacgcagaatggttaaacgattcagatcatattgcaatataatcacccatcctagccaagaggctactctttctttagcaaatgtttacttactgacacaagagcgtgtacttcaacgtggcgatttagatgatgtggatttctttgttattgatgagttctataagctggaccttgaaaatgattcagatgagaaaaaccgttcaattgacctaagtcttgcatttcacaggcttgctaagcagggggcgcaattttatttgcttggaccaaatatccaaaatattcatgggcttgaagcctacgaatataattttattccatcaagtttctcaacagtttcggttgatgtgtatcactacaatctttcgtcgaaaggagatgcacgtaaagaaaaactgcttgagctttgttcgcaactatcttcccctacgctaatctattgccaatctcctgctagtgcaaataaagtggctcaatttcttattaatgaggctaatcttccccgtgtggaaaatactcaggatgttgccgattggattggtaaacattatcaccctgattggaatatatcaaaggcaatatcgctaggtgtaggaattcaccatggtggggttccacgagcacttcagcagtactttgtgaagctgttcaacgaaggggctattaagttcatcgtttgcacctcgacaatgattgagggtgttaatacttctgctgaaaatgtcatcatttatgaccgaagggtcaacaatactccatttgatttctttaccttcaaaaatatatctggtcgagctgggcgtatgaaccgttacttcatcggaaaagtttatatgcttgaagctcctccattagagaaagacttaagcgttgaatatcctgtaggttctcagaacgaggattcacctatgggcttgcttctcaaattagaacctgagtttttatctgacctatcccgtcaacggttagagcaagcctattcaacgccacagatttcggctgtaacattgatcgaaaaccgccatgtaccaatagaggtgcaagtcaaaatcgcagaacagattttagaagatcaacatgaacataagcatcttctttgctggaaaggtaatcctgagcagaatcagcttgagtatctttgtagtctcgtttatgagcatcttcctcacaatctcatggaatacggcattttctcggggctccaactggcttggcatataaatgcgctaaggtcacagaagaacttcactgaatatcttcaacaagcgattgatgatgattggcataaccgcacacccagcgaggcaataggactgcggctaaaattaatccgtaatgttatcagctaccgtttgccaagggattttatgtctatcagtagaatccaggccgatgttttaggcaggcgaaatcttgagtttggagattatacctttatctcagagcaacttgaaaacctgtttcaagatcctttgattactgctctggatgaatacggcatccctatacagatatctactaaaataaaagggatgatacttccatctgataacttaaatgaggtgctcgctaagctaaggaagctggttgtaaaaattgatggaatgcaattaagtaaatttgaaaaaaacatcctacgttgggctatagccgaaatgtga

SEQ ID NO: 224985 - DNA, 663 bp, Klebsiella pneumoniae
atggaaagtggcatggtgataaactatgaagagaattttcagtgtctctgcagcgattttgaaagaaaattaaagcaaacaaataagcaggatggtttgtcggaggctgagattggttcggtgcttgcatcagggcaaaaatgggcttctgacttcttccgacagtttggagagaacgatgttgaggctcagtacaataccgctctcatccaaaaatttgaacaactatgccatcaagctgatcgtgacggtactatgactggtactactgatatcgccgtcggtctggatactcttagtcaaatcttcagaaaacagggaagagtgagggaagcctgtaaatatcttgcaatagcttgtgggtatcttgagttaaaaaaagatctgtcgattctgtataacgtagcattgagctttacggaacagaagataagtgaacaacgaacgtctagggcgagaaagggtggccttgcaaggtggcgcacatttgaacctgcccgtcaaaaagtcatcgagctcctggagactacggaaaaaccagaggaaggctggtcattcaaggaggaagcatttgacgccattgatgaagctttacgaaattttatcgatgaggaaggcatcgctttgaaggatagtgacctccgcgcacgagtgttgcgctga

SEQ ID NO: 224986 - DNA, 1095 bp, Klebsiella pneumoniae
atgcatcctttccaagacagtctccaggtatggttttctaggaaactacctgaacatgcatttaatcaatgctgggaaattccatttgttttatcaagcgacataggcttggtgcgtaaagaaaatcaagatcgcgttgcagctctccacactgggaaaaagtcagttaatccgctctttgctatagcagtggttgatgggatgggggggatgcgtgacggaggggtttgtgcttctttggcactctcaggatttttctatgcattaatccaatatcgttctttagaaataaaagatagaataaatgcagcaataaaactagccaataaacaagttttcgatatttataatggtagcggcggagcgacattaaccgcagttttatttgattctcaaggaaatcgcttgtttgtgcatgtgggtgatacccgaatatatacctttagttccaatgctcaagtacaacggcacacaactgatgattcattagctgaagctgttgggggaagtgggagagaattacttcagttcgttgggatgggagagtcaatgcaacctaaaatagcagagctcaccgatgcaggtgagttttgtgctattaccactgatggtattcatggcatcgaagaaaaaacactgaataagctttttgtcaattcttctgatataaaacaaattgcagaaagattatgtaatgtatcaaagtggtgtggaggtcatgacaacgctacatccgcaatattgaacttgaaaaatatagcggaatctttatcccactatgaagttaatggtattagaatatgggatgctcaaggggacttaactacactgtggttgaaggagggggatgttggaattaattttttacaggggcagaatgtaaataattcagttgataaagatgaagggattttatcgtctaagcaagtctctgaaaaattaaccaatcaacaaaaaaagattaataaagatagagcttctaaaaaaagaacggtcaataaaaagaaagcggatagtcagcctgaaaaaatacaactagatatcgaaattggtaaatcaggagagaaaggagaattcgatgttgatacagaatag

SEQ ID NO: 224987 - DNA, 1047 bp, Klebsiella pneumoniae
atgttgatacagaatagatacagaactcttgacacgtctgatagaggtggaatgggagaagtgttatattgtgaggatatacacctgcaacgacaggttgtattaaaatatcttcaacctggtgtagatgggcggcgactgttagatgaacaaaaagcattgactaaagttcgctctaaacatgtagttcagctttatgatattgtcacaattaatggtgtcggtattgaatatccggctattatccttgagtatatcaatggtgaaactttaaccattggtaactattctgctgatatcgaatacttaaaactaatatggcagatatcttgtggtttagctgagatacatgcacatggtataattcatcgcgatattaagcccagtaatataaaaatagataatgagggtgttgttaaaatccttgatttcggcctttcaaggaacgatgctgatgcgcaaacaaggagtattattggaacaccagtttttatggctccagaactttggggtgatcagacaatcgcttttgattcatcaatagacgtctacgcttttggcgttacttgctttgctcttctctctgaaaacgtactcggtaatttagccgaacggccgccagttcaaccatcattggctgatttttctgttccattcgcaagcttacctcaagaagtatcacaaatgctacatagttgcgttgctaccaataaaatagataggccaactatgcaagatgtcgctgagttattagaaaaacaactacttaaagataaacatcgcgcaactgttgtattgaatggtgtagtccatatcttagacaataataatagaagaattacacttaatgcctctattggtagtcttacaattgaatacaatggtcttgagttcattgttgctcaagtcaccggtgccgtttttattaacaatactcaggttcgagtgggaaatgttgttccagggtgttgtgttcttacatttggtacaagtagcggaagaacatttgttactttcgatgtttctaaccctgaggtgatgccatga

SEQ ID NO: 224988 - DNA, 1071 bp, Klebsiella pneumoniae
atgaatgcaggcgatgttatttcagaacgttatagaatcgaacgtcatgttggtcgaggcgggatgcaagacgtatatttagcgtatgatattttacttgaaactcacgttgcacttaaaactccgcaacttggtcaaccagatacaaggtttaaaacaagtgctataatttctgcccgggttaatcatcataatgtcgcgaaaacattggattacatcgaggagaatggttctttatttctaatcgaggaatatgtgcctggagataatctagaaaaacgattgaatattttcggagcaatagaccctcatttggcagcaagaatatttttgcatgtctccaagggggtagcagcttcgcaccatgctggtgtagtacatcgtgatttaaaaccgagtaacataattgttgagtccgatgttaatcttcatgagttaaagctaactgatttcggaattgcgactttgaccgaagaagtctttgaggaggctgcacgtggaggtgatataacacgttcaacctctggtacgatccggggggcacttccttatatggcccctgagatgatgtttagacaacctggtgaaaatcctggtaagtcagtagatatttggtcgttgggagcaatgatgttccaaatattaactggaaaggttcccttcggtgtttatctccaagccgctgttaatgttcagaacagaaatagagaaccttggccaggattcatgttagctaatcctcaatataaaaatctttcgttacaactccaggctatagtagaaaaatgccttcagtatgatatagcggatcgcccttcagcggacgagatagtggaagaaatatctgaactgtgttttatcggtgttgatagggaattggggactgtttctaatcttatccaaaacggatatagtggatttattgacggagacagtggtggtactacattctttagtcaggaaagcgtttacggtcaaataaaccgcgcaactcgaagtaacaaagtatgttactccagtttccccggctccccgcgagatcgtgctcaccctattattgtgcttacttaa

SEQ ID NO: 224989 - DNA, 1242 bp, Klebsiella pneumoniae
atggcaagacaaaccaaacctctatccgttaaagaaatcgaatctgctaaacccaaggaagcggactacgttctctatgatggcgatggccttgagctactgattaaatccagcgggagtaaaatctggcagtttcgctacattcgccctgtcaccaagaaacgtgcgaagaagagcataggcccctacccgtcagttacgcttgccgatgccagaaactatcgagcagaatctcgctctctcctggcgaaacaaatcgatcctcaggagcatcagcaagaacaactgcgcagttcgcttgaagccaaaacaaatactttccagctcgtagctgaacgatggtggaatgtgaagaaagccagcgtgacagaggactatgcggaagatatctggcgctctcttgaaagagatgtctttcctgcgattggcgacgttagcgttacagatattaaagctcacacactggttcaggccgtccaaccggttcaggccagaggagcactggaaaccgttcgtcgcctgtgccagcgcattaatgaggtcatgatctatgcccaaaacacagggctgattgatgctgttcccagcgttaatattggtaaagccttcgagaagcctcagaaaaagaacatgcccagcattcgaccggatcagctacctcaattgatgcagacaatgcgaacagccagtattagcctttccacacgctgcctgttcatgtggcaacttcttactattacccgccctgccgaagcggctgaagctcgctgggaagagatagacatagaagcacaagagtggaagattcctgcagcacgcatgaaaatgaaccgcgaccatactgttccattgtcagatgaagcaattgcgatactagagatgatgaagccgttaagtggaaatcgagaatttatctttcccagccgcatcaagccaaaccaacctatgaacagtcagaccgtaaacgcatcgctaaaacgcgcaggttttggtggagtgctcgtttcacacggtctgcgatctatcgccagtacagcccttaatgaacaaggctttccgcctgatgttattgaggcagcactggcccacgtggataagaatgaggtacgtcgagcatataaccgcagcgattatcttgagcagagacgcccgatgatgcagtggtgggctgattttgtaggagtggctgatagtgggggcatgataaaaagtggtaaagaaggacttcgcctcgtaggctaa

SEQ ID NO: 224990 - DNA, 1302 bp, Klebsiella pneumoniae
atgagtcaaggcctcaacaatgatatcgccgtcagcaaaacgcgccgggtagtgaaaaacctgcgctggtgggtgctggtcctgtttttacttggcgttaccgtcaactacatcacacgcaactcgctgggaattatcgcgccggaactgaaagcgaccctcggcattactaccgaacaatactcgtggatcgtcggcgcgtttcagctggcttacacgattttccagccgctgtgcggctggcttatcgacgtcatcggcctgaagcttggctttatgatctgcgccaccctgtgggcgctggcctgtatcgcccacgccggggccggtagctggctgcacctggctatgttgcgcttctttatgggtggggccgaggcggccgctactccggccaacgccaaaaccatcggcgaatggtttccgaaatctgaacgcccgattgccgccggctgggctggcgttgggttctccatcggcgcgatgctggccccgccgatcatctacttcgcccacgcctccttcggctggcaaggggcgtttatgtttaccggcgcgctggcgctactgtgggtagtactatggtgggccttctatcagaccccggaaaagcaccccaatctcagcaaaagcgagctggagtacatcaaacaggataacgaagccccgccggtaaaacagcccttctttaccgcgctcaaaaccgtctcgaaaaataaacgtttctacgggatcgccattcccgcctttatggccgagcccgcctgggcggtgctgagtttctgggtgccgctgtacctggcgaaagagcacggcatggatttgaagcagatcgccatgttcgcctggctgccgtttctcgccgccgatctcggcagcgtggtcagcggctacctcacccgcctgtatgttcgctggttcggctgtacgcgagtgaactcggtgatcgccagctcggtaaccggcgcgttcctgatgctctccctggccctcgtcgccatcacccgcgatccctatatcaccatcatcctgatctccattggcggcttcggccatcagatcatctcctgcatgctcagcgcgctggtggtggagtctttcgacaagggacaaatggcgacggtcaacggtatgcgcggctccgcagcgtggatcgccagcttcttgttctcgttattaatcggggtgaccgccgacaaaatcggcttcaacccgctattcatcgccatgggtttctttgacctgattggcgccgttttcctggtggcatttattgctgaacgtcgcgccaagcgcgcctga

SEQ ID NO: 224991 - DNA, 540 bp, Klebsiella pneumoniae
atggcgttgaaggaacggagtggaggttctgaccataggccggtagtttcagccagcatggtgaataaattaaaagcaggccgtacggaccttggttactgttctcggtttgcaacggttttggtccgggaaaaacagttcttttttattatttcagagcagattgcgctcccgatgtttcttctgcgttatgtctctcatggcgcagggagcgtacagggggcggccagtcgccgccgcccctgtacccccgggctctggccgccaaaatcgccacttcgtggtaccttcgacttatccctgcaggcttcgggtcgggccgaggcagcgtccgtgcaaaacacggccctcaggccgcatccatgcgggctgccccggtcttccgggaacgtctcagcgattttgaggccaccaacaccggcagtttcagccagcgcggtgaagacattaaaggcaggtcgcaagaaccataggtcgggtaaggcgttagccgccacccgacaaaaaaacggcaccgcgtgtcgcccgggtaaggcgtag

SEQ ID NO: 224992 - DNA, 786 bp, Klebsiella pneumoniae
atgaccagcagcctatcgcgacacccggcttttttatccctgcagggcggcatcaattttcgcgacctgggcggccagcttgccgccgatggacgccgcgtccgcagcggcaagctattgcgatccggcgcgctaaaccggttaacggcggaggatctcaaccacctcgatactttgccgctcagccgggtgctcgactatcgcgaccccggagaggtagcccgtactccggacaagcttagcccgcttacccattatcttaacgcgccggccaatccgccggtgagcgaggttaatgcgaaggtcaccgaactgaatgccgccacccttaacgcgctgaacggcgagcagtttatgctgcaactctaccgccagctgccgtttaacaacccggcctatcgccagctcgccgcctggctgaccacgccttttgaaggcgctttactgcaacactgcgcggtcggcaaagatcgcaccggcgtcggctgcgcgttaacgctgttcgccgtcggctgcgacagcgaaacggtgatggaggagtatctccttacccacggcatgctgacgcaggtggaggcctggatgttggagctgctcggcaacgacctcactgcccaagggcgccaaagcctggcggatattctgacggtaaaagagtcctatctcgccgccgcgctgtcggctattcaccagcgctatggcaccgtcgacgcctggctggcggcagagtaccagcttaccgcgccggttcgcgccgcgctgcaggcccggctgctggaagagtaa

SEQ ID NO: 224993 - DNA, 2247 bp, Klebsiella pneumoniae
atgctcactcggttgcgagaaatagtcgagaaggtcgcgagcgcgccgcgtttaaacgaggcgctggatattctggtgacggatgtctgccaggcgatggagacggaagtctgctcggtttacctggctgacaatgaccgacgctgctattacctgatggccacccgcgggttaaaaaaacctcgcgggcgcaccgttgcgctggcgttcgatgaaggcctggtggggctggttggccgcctggcggaacccatcaacctcgccgatgcgcaaaaacaccccagcttcaaatatatccccgccgtcaaagaggaccgcttccgcgccttccttggcgtgccgatcattcagcgccgccagctgctgggcgtgctggtggtccagcagcgcgagctgcgtcagtttgatgaaagcgaagagtctttcctcgtcaccctcgccacccagatggcggcgatcctctcccagtcccagctgaacgccctgttcggccagtatcgtcaaacgcgcattcgcgctctgccggcctcttccggggtggcgatcgccgagggctggatggacgtcagcctgccgctgatggagcaggtgtatgaagcctcgacgctggacaccgcctcggaacgcgaacgcctgaccggtgcgctggaagaggcggccaacgagtttcgtcgctacagcaaacgctacgccgccggggcgcaaaaagagacggcggcgatcttcgatctctactcgcacctgctctctgacgcccgcctgcgtcgcgagctgtttgccgaagttgacaaaggcgccgtcgccgagtgggccgtcaaaaagatcattgagaagttcgccgaacagtttgccgcgctgagcgacggctatttgaaagagcgggccggcgatctgcgtaccctgggccagcgtctgctgttccatctcgacgacagtattcaggggcccaacacctggccggcgcgcattatcctcgtggcggacgagctgtcggccaccaccctcgccgaagtgccgcaggatcgcctggccggcgtggtggtgcgcgatggcgccgccaactcccatgccgctattatggtgcgggccctcggcatcccaacggtgatgggcgccgatattcagccctcgctgctgcatggccatacgctgattgtcgatggctatcgcggtgaactgctggtggatcctgaacctgtcctgttgcaggagtatcagcgccttatcagcgaagagaacgaactcagccgcctggcggaggacgatctccagcgcgcgtcggagctgaaaagcggcgagcgggtgaaagtcatgcttaacgccggcttaagccccgagcacgaagagaagctcggcagctttgttgacggcattggcctctaccgcaccgaaattccctttatgctgcagagcggcttcccctcagaagaggagcaggtcgcccagtatcagggcatgctgcagatgtttaacagcaaaccggtgaccctgcgtaccctggacatcggcgcggataaacagctgccgtatatgccgatcagcgaagagaacccgtgcctcggctggcgcgggatccgcatcaccctcgatcagccggagatctttttgatccaggtgcgggcgatgctgcgcgccaacgccgccaccggcaacctcagcattttgctgccgatggtgaccagtctggaggaggtggatgaggcccgtcggctgatcgatcgcgccagccgggaagtggaagagatgatcggctacgccatcccacgtccgcgcctgggggtgatgctggaggtcccgtcgatggtctttatgctgccgcagctggccagccggatcgattttatctcggtagggacgaacgacctgacccagtacctgctggccgtcgaccgcaacaatacccgggtcgccagcatgtatgacagcctgcatcctgcggtattgcgtgcgctggcgatgatcgcccatgacgcggagcgctttggcatcgatctgcgcctgtgcggcgagatggcgggcgacccgatgtgcgtgacgatccttatcggcctcggttaccgccatctgtcgatgaacggccgctcggtggcgagggtgaagtatctgctgcgccgcattgatatcgaagaggcgcaggagctgtcgcgtcgcagcctcgatgcgcagatgaccgccgaggtgcgccatcaggtggcggcctttatggagcgtcgcggtctcggcggcctgatccgcggcgggcggtag

SEQ ID NO: 224994 - DNA, 552 bp, Klebsiella pneumoniae
atgcaaagcttttttgcgtatctggccgggaaagctattttccgtcgtcgcgccagggccaatcgccgcggcatactcgacgccatgaacagagaacatggctacaccctgatggaaaccctggtaacgctgacactgatgatgatcctcagcgtcggcggcctgtacggctggcagcgctggcagcagcagcaacgactgtggcaaaccgccgtccaggtgcgggattttctgctctttctgcgcgatgacgccaacgcctacaaccgggaccgcgtgcttcgcgtcggccaggacgaagtgggctggtgcctgagcgcggagggggaggggcctgactgcgcctcggggacatccttcacgctgcgcccgcgctggccggggatcacgctggctggagttacgcctggtctggggttttatggtctgcgcagcaccgcctgggcggggaatctgcggctgcagagcgcggccggcagctggagcattgtgatctcacactgggggcggattcgtttatgccgcagcgacagcgcaggagggtgtcagtga

SEQ ID NO: 224995 - DNA, 558 bp, Klebsiella pneumoniae
gtgagccgccgcggattttccctggcggaggcgcttatcgccatggccatcggctcgctgctgctgatgggggcctgccgctttctgcctgccctgcagcgtcatattctgcgccagggcgaacagctggccctggagaacgagctgtggcagcgtgtgcatgccgtgggaaaacatctgcagcgcgccgggtactgccggggagcgtgcggcggagccgggctggagctagccgctggcggcgagtgtctgattgtgcgctgggatgcgaacagcaacgggagatgggaaacctcccccgcggcagcggcggagagcaccggctttcgcctgcgcgacggcgcgctggagaccctgcgcggggccagcgactgccgcggcggcggatgggagaaaatcaccaacccggccgccatcgtggtgacgcgcttctcggtacaacgtcaggtcaccccgggcttcgcgccggagctgagcgtgacgctggcggcgcgctccgcgcaacagacgggcctgacgagcgaggttgagcagcgggtgacggggtataacctgtga

SEQ ID NO: 224996 - DNA, 180 bp, Klebsiella pneumoniae
gtgatccgccagcgtggaatgtcgtcgctgctgatggtgctcctgttgctgaccctcggcagcctgttactcgaggggcttaacctgcagcagcgggcgctgctggcgcaaactgccagcgaaacgcagacgggcctgacgagcgaggttgagcagcgggtgacggggtataacctgtga

SEQ ID NO: 224997 - DNA, 3378 bp, Klebsiella pneumoniae
atgttaagggtataccactcaaaccggctggatgttctcgaggcgttgatggagtttatcgtcgagcgccagcggctggatgacccttttcaggccgaaatggtgctggtgcagagtaccggcatggcgcagtggctgcagatgaccctggccgcgcgcttcgggattgccgccaatatcgagttcccgctgccggcgagctttatctgggatatgttcgtgcgcgtcctgaaagatattccgggcgaaagcgccttcagcaagcagagcatgagctggaagctgatgaccctcctgccgcagcacctggaggaagacgattttatcctgctgcgccagtatctgagtgatgacggcgacaagcgcaagctgtttcagctggccgcccgggtggcggacctctatgaccagtacctcgtctatcgcccggagtggctgatgcgctgggaggccggccagcgggtggaaggtctcggcgatgcccagcagtggcaggcgccgctgtggcaggcgctggtgagctataccgccgagctggggcagccgcagtggcaccgcgccaatctctaccagcgctttatcagtaccctggaaaaagcggacgaaccgcccgccgggctgccgtcgcgcgtcttcatctgcgggatttccgcgctgccgccggtctatcttcaggcgctgcaggcgctgggtaagcatgtcgatgtctatgtcttgtttaccaacccctgccgctactactggggagacattaaggatccggcgtttctggcgaagctgctgtcgcgtcagcggcgccatcaccgcgaggcgcgcgcgctacctctgtttcgcgacaccgagcaggcgccggggttgtttaatgacgccggggaacaggatgtcggcaacccgttgctcgcctcctgggggaaactggggcgcgactatatctacctgctggcggggctggagcgctatgaggagctggacgcttttgtcgacatcgcccccgataacctgttgcataacctgcagtcggatatccttgaactacgcaacgcggcggtggccgggcagagcgcagaggcattcgcccacagtcgcgacaaacgtccgctgacgctggatgaccgcagtctgagcattcacgtctgccacagtccacagcgcgaagtggaggttctgcacgataggctactggcgatgctggaggcggatccgacgctcacgccgcgggatatcatcgtcatggtggcggatatcgacagctacagcccctatatacaggcggtgtttggcgccgccagcggcgatcgctggctgccgtgggcgatctccgaccgtcgcgcccgagagtcgcacccggtgctgcaggcgtttattacgctgctctcactgccggacagccgctttgccagtgaagatgtgctggcgctgctggacgtcccggtgctggcggcgcgctttaatatcacggaagaagggctgcgctacctgcgccagtgggtgaacgagtccggcgtccgctggggaatggatgacgacaacgtccgtgagctggacctgccggcgaccgggcagcatacctggcggttcggcctcacccgcatgctgttgggctacgcgatggacagccgcgagggagaatggcagtcggtgctgccgtatgacgaatccagcggtttgatcgccgagctggtgggcaacctcgcgtcgctgctgatgcagcttaatctgtggcgacgcggcctggcccagcagcggccgctggcggagtggctgccggtctgtcgcgatctgctgaatgactttttcctgccggacagtgagaccgaagcggcgctggcgctgattgagcagcagtggctggcggttattgatagcggtctggaggcgcagtatggcgagcaggtgccgctgacgctgctgcgcgatgagctggcccagcgcctcgatcagcagcggatcagccagcgctttcttgccggcccggtcaatatctgtaccctgatgccgatgcgttcgatcccctttaaggtggtgtgcctgctggggatgaatgacggggtttatccgcgcacgctaccgccgctgggctttgatttaatgagccagaagccgcagcgcggcgaccgcagccggcgcgatgatgaccgctatctgttcctcgaggcgctgatgtccgccgagcagacgctgtatatcagctatatcggccgttcgatccaggacaacagcgagcgttttccttcggtgctggtgcaggagctggtggattatatcggccagagccactgtctcgccggtgacgaagagcttgactgcgacgccagcgaagcgcgggttaaagcccacatcacccatctgcatacgcgcatgccgttcgacgttgccaatttccaggaagacgagaacaagagctacgctcgtgaatggctggcggccgccggccagcagggagaggcgcatagcgattttatacagccgctcaccgcgccgccgattgacagcctgccgttcgatcagcttctgcgcttctggcagcacccggtacgcgcgttctttcagcagcgtttgcgggtcaatttccgcgccgaagaggacgatattccagacgacgagccgttcactcttgaagggctgagccgttatcaactgaatcagcaactgctcaatacgcttattgaggagcaggacgtctcggctatgttccgccgctttcgcgccgccggcgagctgccgtatggcgcctttggcgagctggtctgggagacgcagcgcctggagatgcaggcgctggccgagcgagtgatggccgagcgccagcaggcgcagagcatggagatcgatctgcagtgcggcggcgtgaacctgaccggctggctgcagcaggtgcagccggacggtctgctgcgctggcggccttcgctgctgagcgtctcccaggggatgcaactttggctggaacaccttgtctactgcgccagcggcggcaccggcgagagccggctgtttgtgcggaaagagggagagtggcgctttccggcgctggcgcccgccgaggcgcaggcgtaccttaacgagctggtggatggctatttgctggggatgtcgcagccgctgctgctgctgccggaaagcggtggcgcctggctgaaagcctgttacgacgccgaaaaggatgtcatcttaatggacgaagagacgcagcagaaagcgcggagcaaattcctgcagacctacgaagggaacatggtggtcagcggggagggcgccgatatctggtatcaacgcctgtggcgttcgctggagccggcgcattacgaagaaatcattgcccagacgcagcgttatctgttaccgctatatcgttaccatcggtccacacaaatttaa

SEQ ID NO: 224998 - DNA, 2886 bp, Klebsiella pneumoniae
atgccccgcagtttatggttcaaggtttttgttgtgctggccgccctctgggcgccgtttagtcaggccgacaccggatggcagccgattcaggagacgatccgcaaaagcgaaaaagatacgcgtcagtatcaggcgatccgccttgataacgacatggtcgtgctgctggtttccgatccgcaggcggtgaaatcgctgtcggcgctggtggtgccggtgggatccctgcaggatccggcagatcatcaggggctggcgcattttctggaacatatgacgctgatggggtcgcaaaaatatccccagcctgacagccttgcagagtttcttaagctgcacggcggcagccataacgccagtaccgcgccctaccgcaccgcgttttatcttgaagtggaaaatgatgcgctggacggggccgtagatcgcctggccgacgccatcgccgcgccgctgctggataaaaaatatgccgaccgcgaacgtaacgcggtcaacgccgagctgacgatggcccggacgcgagacgggatgcgcatggcccaggtcagcgcggagaccatcaacccggctcacccggcggcccacttctccggtggcaacctcgagacgctcagcgataagcccggcagcccggtgcttgatgcgctgcacaccttccgcgatagctggtactccgccaatctgatgaaagcggtgatctacagcaacaagccgttgccggcgctggcgcgcatggctgcggacacctttggccgcgtgccgaatcgtcagatcagcaggccggatattaccgtcccggtggtcacggatgcgcaaaaaggcatcattattcactatgtgccggcgatgccgcgtaaagtgctgcgcgtcgagtttcgcatcgacaacaacagcgatcgcttccgcagcaaaaccgatgagctggtcacctatcttatcggcaaccgcagcccgggcacgctctctgactggttgcaaaaacagggtctggcggaaggtatccgcgccgattccgatccggtggtaaacggcaacagcggcgtactggcgatctcagccaccctcaccgacaaaggcctggcgcaccgcgatgaagtgacggcggccattttcagctacctcgacctcctgcgtactcagggcatcgacaaacgctatttcgacgaactggcgcatgtgctggcgctggatttccgctatccgtcgatcaaccgcgacatggactacgtggaatggctggcggataccatgatccgggtgccggtcgagcatgcgctggacgtggtgaatattgccgaccagtacgacccgcaggcgatcaaagaccggctggcgatgatgaccccgcagaacgcccgcatctggtatatcagcccccaggagccgcataacaagacggcttactttgtcgatgccccgtatcaggtggataagattagcgagcagacgttcgctgactggcagcacaaatcgcaggccatccagctgcagctgccggcgctcaacccctatattccggatgacttcacccttatcaaaagcgataaagcctggccgcatccgcagctgatccttgatgaaccgacgctgcgggtggtgtatgccccgagccagtattttgccagcgagccgaaggcggacatctccctggtgctgcgtaatccccaggcgatggacagcgctcgccggcaggtgatgtttgccctcaacgattatctcgccggcatcgccctcgaccagctcagtaaccaggcggcggtcggcggcatttcgttctctaccggcgctaataacggattaatggtcaatgccaacggctatacccagcatcttccggcgctgttcagcgatctgttgcagggatacttcagctatacgccgactgaggagcagctggagcaggccaaatcctggtatgcgcagatgatggattccgccgagaaaggcaaagcctacgatcaggcgataatgccgatccagatggtctcgcaggtgccgtacttccagcgcgaagtgcgccgggcgctgctgccctccattacccttaaagaggtgctcgactaccgcgccaacctgaaaaccagggggcgtcctgaactgatggtgatcggcaatatgaccgccgatgccgccacgaccctggcccgccagatccagcagcagctgggcgccgacggcaacgaatggtgccgtaataaagacgtggtggtgaaccggcagcagctggcgatcttcaacaaagcgggcaatagcaccgactccgcgctggccgcggtgtttgcgccgcccaacgtggatgagttcagcagcaccgccgccagcaccctgctggggcagatcattcagccgtggttctacaaccagctgcgtactgaagagcagctcggctacgcggtctttgtcttcccgatgaacgtggggcgccagtggggcatgggcttcctgctgcagagtagcgataagcagccggccttcctctggcagcggttccaggccttcttccccaccgcggaggcgaagctgcgggcgatgaagccggaagagtttgctcagctccagcaggcggtgataagccagatgctgcaggcgccgcagacgctgggcgatgaagcctcgaaactgagcaaagatttcgatcgcggtaatatgcgttttgattcacgtgataaagtagtggctcagattaaactgctgacgccgcaaaaacttgccgacttcttccatcagacggtggtggatccgcagggcatgacgatcttgtcccagatttccggtagccagaatggcaaagcggactatgcccagccgaaaggcggcaaagtgtgggaaaacgtcagcgcattgcagcaatccttacccctgatgcgagagaatgaatga

SEQ ID NO: 224999 - DNA, 3537 bp, Klebsiella pneumoniae
atgaccgacaccgctgagtctttggatcccctgcgcttgcccctgatcggcgagcgcctgatagaagcctctgcgggcaccggaaaaacctttaccatcgccgcgctgtatctgcggctgctgttggggctgggcggtgaggccgcctatccccgcgccatcagcgttgaagaactgctggtggtgacctttaccgaggcggcgaccgaagagctgcgcggccgtatccgcagcaacatccacgaactgcgcatcgcctgcctgcgcggcgaatccgacaatccgctctacagcgcgttgttggcggagatcgccgataaagacgacgccgcgaagacgctgctgctggctgaacggcagatggacgaggcggcggtattcaccatccacggcttttgccaacggatgctgagccttaatgccttcgagtcgggcatgctgttcgagcaacagctgatcgaggatgaatcccgcctgcgctatcaggcctgcgccgatttctggcgccgccactgctatcccctgacccgcgatatcgcggcggtgatccacgacgtctggaaagggccgcgcgatctgctgaagtcccttgaccgctggctgcagggcgaagcgccgcagcttaagtcgccgccagcccctaacgagacgctggccgaacgccatcagcagatcatcgcccgcattgactcgctcaagcagcagtggcgcgagcaggtgggcgagatcgaaggcgtgctggaaaattccggccttgaccggcggaagtttaatcgcggcaaccagggcaagtggatggagaaagtgaacgcctgggcgcaggaagagacgttaagctaccagctgcccgacgcgctggagaaatttgcccagtcgtttctgctcgagcgcaccaaagccggtggcgaaccgccggtgcatcccctgtttagcgccgtagagtcgttgctggcctcctcgctgacgctcaccgatctggtgctggcgagagcgatggtcgagatccgcgatgcggtcgcccgcgaaaagcgccgccgcggcgagctggggtttgacgatatgctcagccggcttgacgaggcgctgcgcggcgacagcggcgagacgctggccagcgccattcgccagcgttttccggtggcgatgatcgatgaatttcaggacaccgaccctcagcagtaccggatttttcgccgcatctggcgccggcagccggagacggctctgctgctgatcggcgatccgaagcaggccatctacgcctttcgcggcgccgatatctttacctatatgaaagcgcgcggcgacgttgccgcgcactacaccctcgataccaactggcgctcctcgccgggcatggtgggcagcgtcaatcggctgttcagcctcagcgataaccccttcatgttccacgagatcccgttcctgccggtgaaggcggcggcgaagaacaaggggctgcgctttaccgttgacgcggcggacgtaccggcgatgaacgtctggctgatgcccggcgacaccgtcgggtctggcgattatcagacctttatggcgcagctctgcgccacgcagatccgcgactggctgagcgccggtcagcaggggcgcgcgctgctgtggcgcggggaaacctcgcgcccggtacaggcttcggatattaccgtgctggtgcgcaaccggctggaggcagcgcaggtacgtgaagcgctgcagacgctgggtattccctcagtctacctctccaaccgcgacagcgtttttgagacgctggaggcccaggagctgctctggctgctgcaggcggtgctggccccggagcgggaaaataccctgcgcagcgcgctggcgacgtcgatgtttggtctgaccgcgctggatattgaaaacctgaaccaggatgagcaggcgtgggacgcgctggtggaagagttcagcgaataccgccagatttggcggcagcgcggagtgatgccgatgctgcgggcgctgatgacggcccgacatatcgccgagaatctgctggcgacccgcggcggcgagcggcgcttaaccgacattctgcacatcagcgaactgctgcaggaggcagccagccagctggaaagcgagcatgccctggtgcgctggctggcgcagcatatcgccgagccggacagcaacgccgccagccagcagatgcgtctcgaaagcgataagcacctggtgcaaattgtcactattcacaagtcaaaagggctggaataccccctggtctggctgccgtttatcgcccggtttcgtaaacaggaccaggcgttttaccacgatcgcgagacgttcgcggcggtgctggatttgggccaggatgaggccagcctcgagctggcggaggcggaacgactggcggaagatctgcgcctgctgtacgtggccctgacccgcgcggtctggcactgcagcctcggcgtggcgccgctcagcagccggaaatccggcaacagcgatttccacctcagcgcgctgggacggctgctgcaggcgggcgaagccatggacgccgccgggctggctgcgcggctggcggacttctgtcatggcgatattgcattacagagaccgggcgaactggatctcaccccgtggcaggcgcccgcggcgaccatcccgcgattgtcggcgcgcgagctgcagcgccgcatcgccgacgactggcgggtgaccagttactccggactgcagcagcatggtttcagcggcgggcaggatttgctgccgcgtctggatgttgatgccgccggcgtcggcgaagtcgtggaagagccgcagctgactccgcaccagttcccgcgcggcgccgcgccggggaccttcctgcacagcctgtttgaggagctggacttcacccagccggtgccggaagggtggatggcggagaagctgcagctgagcgggtttgacgcgcagtgggcgccggtgctgaccgactggctggggggcgtgctgaagacccgcctgccggggccggatatcgcgctcaatcagcttgcggcgtgggataaacaggtggagatggcattttacctgcccatcgcccagctgctgacggcggagcgccttgacgcgcttatccgccagtacgatcccctctctgccgacacgccgccgctggatttccgccaggtgcgcggcatgctgaagggctttatcgatctggtcttccgtcacgaaggccgttattacctgctggattacaaatccaactggctgggggaagatcgcgaggcctacacccggccggcgatggagcaggcgatgcgtgcccaccgctacgatctacagtatcagctgtatagcctggcgctgcaccgctatctgcgccaccggctggccgattatgactatgaccgccacttcggcggcgtgatttatcttttcctgcgcggcatggacgggcaggagggggggcaggggatcttcaccacccggccggtgcgaccgctgattgacggtctggatcagctttttgccggagaaactcaggaggaggcctcatga

SEQ ID NO: 225000 - DNA, 1845 bp, Klebsiella pneumoniae
atgactttcgaacaactactgctggcggcggtggagcagcgtctgctgcggccgctggacgtccagtttgccctgatggtggcgcaaaacgacccgccggcggtcaagctggcggcggccttgctgagccgggatgccggcgaggggcacgtctgtctgccgctctcgcggttgagcggcgacgaggcgctgagcggtaaagcgggggagatccgcgatcggctgctggccgaagccggcgcgccggaggactggcccgcactgctgctcgcttcgtcggcggtgagctgcggcgatgctccggcgccgatgattttgtgcggcgaccggctctatctgaatcggatgtggcgcaacgagctgaccgtcgcccgcttcttcaatgaagccaaccgggtgctggagatggatgaggcccggctggcgtcaaccctgaatgccctgttccctgccaccagcgaaaccgactggcaaaaagtggccgcggcggtggcgctgacccgccgcatctcagtgatctccggcggtcccgggaccgggaagaccaccaccgtggcgaagcttctggcggcgctgatccagatcgaagatagtccgcgctgtcgtattcgcctggcggcgccaaccgggaaagcggcggcgcgtctgaccgaatcgctgggcgcggcgctgagaaaattgccgctgaccgacgcacagaaagcgttgattcccactgaggccagcacgctgcatcgtctgctgggcgcccagccaggcagccagcggatgcgctatcacgccggcaacccgctgcatctggacgtgctggtggtggatgaagcctcgatgatcgacctgccgatgatgtcgcggcttatcgacgcgctgccggcccacgggcgggtgattttcctcggcgatcgcgaccagctggcctccgtagaagcgggggcggtgctgggggatatctgcgcctgggcgagttcgggctataccgccgcgcgggcgcaggagctgacccggctgaccggttcgccggtgctggcgggcgagggggctatcgcgggcgcgctgagagacagtttgtgcctgctgcaaaagagctatcgcttcggtagtcactccggcatcgggagcctggcgcgggcggtgaacgctggcgcgcgcgcggaggtgaaggccacgctgcgccagccgtttgacgatatcgcgcttcatcccctcagcacgaccgaagagtacgaagccatgctcggcgcggctcagcagggctatgagcgctacctgcagctgcgctgcgagcgggccgaaccgcaggccatgctggccgctttcagcgaattccagctgctgtgcgcgctgcgcgaggggccgtacggcgtgagcggcgtcaatgagcggctggagcagcggctcaaccgccagcgggcgatcgccctgccgcgccactctcgctggtatgatggccgaccgatcatgatatcgcgcaacgacagcgcgctggggctgtttaacggcgatatcggcatcgccctggagcgcaacggcgagctgcgggtgtggttcctgatgcccgacggcgccatcaagtcggtgcagccgagccgtctgccggagcatgacaccgcctgggcgatgaccgtgcataaatcgcagggctcggagttcgaacacgcggcgctgatcctgccggcgcgcagcgtcccgctggtgacccgcgaactggtctacacggcgatcacacgcgcgaaacggcggttgtcgctctatgccgacgagcaggtgctctcccaggccattgtgacgcgcaccgaacggcgcagcggcctggcggagattttcgccgggcgcgaaaccccatga

SEQ ID NO: 225001 - DNA, 570 bp, Klebsiella pneumoniae
atgggctggtcttcgttggttaggataaccattggtacttttttgttagctgggttatcgttttctacatacgcaaaaaattgtaaaaaaggcataccatgcggcaactcctgcattgctgcgtggaagacatgcggtggtagctctcgcacctattctacttacaataatcatttatactcttatccatcatcatcatcaattaagagttctcatccaaaatcatcggggcaatcaccatcacgggcaatagaaaacaaaactccgatttcaacaactaaaacttatctttgccagtatgctattgctaccgtacaaaacggtaaattgggtgccttacgaattatgggtaatgccgaggtaacgttgtatgtcgatagcttcaaagctaaccgtttgaacggaacatacctgctttcgccaaagcttaaaactaacggtaagttgatgatggcagatgataaaagcaaggtatatgcctatgactcgtcgctgataaactttgcaattagtgaccgtatagcaagaagcacagagcagtgggatcgttgtaaactggtacacaactaa

SEQ ID NO: 225002 - DNA, 810 bp, Klebsiella pneumoniae
gtgcttactttaacaaagcagaaagaaatcttctcaaaaacgataacagagaaattttatgtcaaggatgaacttctctccgattgtataggtctgggaagaaaatgctcaaacaattactctaaagttgagggatttaacgcaaggaaagggttcggttacgcccttctgacctactttacttcacgaaccttgaatattcacaggatacctttttgcctcgaccggatttatcaaaagtatgtaagccatgttggggagtatgacataaagatacttgaaaatcttacgcaggcaagagttgatgcaatttgcaatgagttgaaaggcttatatcttcacactcaacaaaaattcagatatgcagggattgaaacggtcaatttacgacgtcaaatcaattatcactctggtgaaatgattgatttgttaaaaagcgcaaaactacttaatcttaccagtatagacattgaaatggacacacttaattcatttggtgaaagtgatgagtatcctaaggatttttatatagacatggaaattcctgttgataatgttttgtattgtagtgttttaatcgattcagaacattgttcaggaccgcttgttgaagaaggagagtgggtgataatcaataaatcaccaacaggcgtaattactatcccattaaaagctattcatgtaaaaagagaagctagttcgctatacatccctaaagtgaataacacaaaagacgcagaggaatttatgtctaagtattcacctgtttatattaacccattttataatcacaaaagagagtttgtatga

SEQ ID NO: 225003 - DNA, 1233 bp, Klebsiella pneumoniae
atgcctcttttctccctgcgccctgcggcaaccctctggcctccggtgttactgggaagccagttcgtttttaatattggcttttacgcggtcgttcctttcctcgccctcttcctgcgcgacgacatgctgctctcaggcggacttatcggcctgatcctcgggctgcgtaccttctctcagcagggcatgtttatcctcggcgggacgctggccgaccgctatggcgctaaggcgatcattctcgccggctgcgtcgttcgcgtcgccggttttctcctgctggcgtgcggggcgtcgctgtggcccattatcctcggcgcctgcctgaccggcgtcggcggcgccctgttctccccgtcgatagaggccctgctggcgcgggccggtaccctcagccaggccaacgggaaacgcagtcgcgccgagtggtttgcgctgtttgcggtatgcggtgaactgggagcggtgatcggcccggtggccggaggcgtgctgagcgggatcggctttcggcatatcgccctcgccggcgcgggaatatttcttctggcgctggcggtgctctttttctgtctgcccgccgacgggcacacgacaacaacgcgcagacgagtcccatggtggacgcctttgcgccagccgcgctttgtcgcgtttattctcgcctacagctcatggctgttgagctacaaccaactgtacctcgccctgccggtggagatccaacgttccggcggccgcgagcaggatctggcgccgctctttatgctggcctcgctgttgattatcaccctccagctccctctcgcccgcttcgcccggcgaatgggcgccgtgcgcatcctgccggtgggctttctgctgctgtcggcttcctttgccagcgtggcgttattcgccgccgccccacccgccgaaggttggctgcggttaatgccggcggctggttttgtcacgctgctcaccctcggccagatgctgttagtgcccgcagccaaggatctgatcccgctgttcgccgaggagtcgacgctgggcgcccactacggagcgctcgccaccgcaggagggtgcgcggtgttagccgggaatttactgctcggtcatttgcttgaccaggcgctcattccgtcgccgcaggcggtttatccctggcttctgctggcgctgtttccgctgtgcagcgccgtcgccctgcgggcaatctgtcgcccgctggcggcaacatga

SEQ ID NO: 225004 - DNA, 3525 bp, Klebsiella pneumoniae
atggatgctttaagggctacaacatcgacaaatttcagttttctcgctgaacatgacccgctgtttctacaaatcgccactgctgcagaaaacgccttctcaggcgatcccaacaccaccttgattaagttgcgccaactaggtgaagccttagcacaacatattgctgcgctggtcgggctcacgtttgatgaaccgcccactcaggctgatttactctaccgcctcaatcgcgagctaaaatttgaacccacggtacgcgagctatttcatctattgcggatagagggcaacaaggctactcaccagttcaaaaccaagcacaaagaggcgttagatggcttaaaagtggcgcgagcgctagctatctggttccaccaatctttcggcaagcagggcgcggcctttaaacccggcgcttttattgctcctccagacccgagcaatcagctcaggcaactccaaacggaaatcgaacgcctcaaaagtgagctcactaccgccaacatacagctagattccagccaacagctgcaaaatttgctggtgcaggaaaagagtgaatatgaaacgctggcgctagccatggatgatgaaactaaggtgttagcatcgcaggcgaaagagcaggaaattgcacttgaacagcttcgacagcaatacgaagaaaaattaaaaatcctgcaagcgcagctgactgaaaaagatgaaaagcaggcccgaacacaacggcaagagtttgcccagaagagccgccgtgccagccaacatatcgcgttaaatgaagaactcacccgtatactgattgaccaaaacttaaatgatgcgggctggcttgctgacagtcaggaactgacctgggctaacggaactcgccctgaaaaagggataaacaaagccattgccgaatggccgacggagcatcagggtaaaaaaggtcgcgctgattacgttctgttttgcggattaactccgctggccacagtcgaagccaaaaaagaaaacaccgatgttgcgggaaaaattccgcaggcagaacgctacagcaaaggcttcaaaatcacttctcccatgatcggtgcatgggagcgggaaggccgaactattgcatgggcggatgaaactgacgggcattacattatcccgtttgtatactcctgcaacggtcgcccctatgtgccacagttggccgagtcatcaggaacttggttcagagacgtgcgcgaaccgtccaacatccgccgtgcgctgcaaaagtttcataccccgcaaggcttgctggataagctcgatcgcagcaaagacagcgccgaacagaagctaaagcaagaaggcttcgcttacctccggttacgcgattatcagcaaaaggccattctcgccgttgaaagcacattggcgcaaaacatccgaaatgcccttctggcgatggcgaccggcaccgggaaaacacgcactattgttggcttgatgtaccgttttctgaaaacggaacgcttcaagcgtatcctctttctggttgaccgcacggctttgggagaccaagccatggacaccttcaaagaagctccgctggagcaaaaccagacgctatctcagatttacaatatcgctgagctcggcgatatggcaacacaagcagaaacccgagtacaggtcgcgacggtacaggccatggttagtcgcattttttcctcggacacaccaccgccggtggatgaatttgactgcatcatcgttgatgaagcccaccgaggctacaccttagatcaggaaatgactgaaggggaactctcgacccgcgacgccagccaatatctctccagctaccgtcgggtgctcgattatttcgacgcggtaaaaatcggccttaccgccacaccagcgaaacataccagcgatatcttcggcaaaccgatttacatctactcctaccgagaagccgtggcggatgattggctcatcgatcatgaacccccaatccgttatgaaacgctgctgacgcaaaatggcatccactttgacaaagggagccaagtgcatgccattaatatccacaccggagaggttgagattgatcagctagaagacgaagtggatttcaacgttgatgcatttaaccgtggcgtcatcagtgaaaactttaatcgggttatttgccaacaactcgtgaaagagctcgacccctttggcgaagagaaaacgctggttttctgcgttacagacaaacatgccgacatggtcaaacgcctgatggacgaagcgttctctgccgaatatgaaaactataatcaagcggccgtcgagaaaatcaccggtgaaagtgacaaagtcaagcagttgttcaaacgttataaaaatgagcgctatccgaatattgcaatcaccgttgatttgcttagcaccggcattgacgtgccgaagatttgtaatctggttttcatgcgtcgggtgaagtcacgtattttatttgaacaaatgatcggtcgcgcaacgcgccgctgtgatgatattggcaaaacggtctttcgtatttacgatccggtggatatttatgaggccctcagcgacgtcaacacaatgagaccgctggtcaaagaccccaatatcacgcttgaacaattggtcagcgagctaacagatactgaactgcttgaaaaagcgtttaatagtcccggcgaacaggccggggaaactcaagctgatgtggtactcagccagttaagccaaaaggtgatgcgtattttgcgtaaagcggaaaaacgcgcagaaagtcgtccggcggtgaaacaaaagttggctgatcttcaccagatttggggtgtagaacctaaacaactgcatcaacatctgcatcatttaggaccgcgtcaggcggctgccttcatccaacaacagcaagggttaatcagtcagctaaacgagatcgctacattactcggcagtgaataccggccgattatttctgagcatcatgaccaactacaggaacgtaatcagagctacggtagccatcagcggccagaagattacctggaaagctttgcggattttattcagcagcagcttaaccaatccactgctctggccgtggtggtcaacaaaccccgcgacctcactcgtgaacagcttaaagagatccgcttattattagatggtgcgggctattccgaagctaaactacaaaccgccgtgcgtaatcaaactaatcaggatatcgccgccagcattgtcggccatattcgccgtgctgcactaggggaaccgcttgtgccttttgcgcagcgcgtatcacaggcaatgatcaacatttataacagccacgcatggacaacccagcaacgaaaatggctggatcgtctggcaaaacagctggttcatgaagtgatcattgatcaccaatttattaacagtagttttgctgatgatggcggcgtaaaacagctaaataagatattggtagatcaacttgacagcgtgctggatgaacttaacggtgcgatctggccacaacaaagcgcctga

SEQ ID NO: 225005 - DNA, 1620 bp, Klebsiella pneumoniae
atgagtaataataacgatatcgtacaaaaactttggaacctgtgtgacgtactgcgtgacgacggcatcaactatagcgattacgtcaccgaactggtgctgctgctatttatcaagatggtgcatgaaaataccgaagcagaattattagatcagcataccttaccgaagggctgcagatggagcgacctcaacaatttatctggcctcaacctgcttaaccattacaaacaaatgctgttgaagctctccagcggcaaagatgctgaaggcaatttgattcatgccgacccgctgattagcgccatttatgccgatgcgcaaactcgcctgcgtgagcctcgtcatctcgaacagatgatccgcaccctcgaccagattgactggttcagtgcccaaaaagacggtcttggcgatctttatgaaggtctgctggagaaaaacgccggagaaacaaaatctggcgcaggacaatactttacgccgcgagccttgattaacagcatggtacgctgtatcaagccacagcccggagaagtgattcaagatcccgctgcgggcaccgcaggctttttgattgccgccgatcaatacatcaagcaacagaccgacaacctctacgacctgactgccaaagcgagaacttttcaaaaaaataaagcctttgttggggtggaactggttccgtctacgcgccgcctggcattgatgaactgcttgctgcacggcatggaaggggatgacgaaggcgtcgtgcatcagggcaacgcgctgggcatggcaggtgcagggttgcccaaagccgatatcattcttgctaacccgccgtttggtacggcgaaaggcggtgaagccagcattacccgtgatgacttaacctacccaaccagtaataagcagctcgcgtttttacagcacatctaccgtaacttaaaaccgggtggtcgcgcggccgtggtgctgcctgacaacgtcctgtttgaagcgggcgttggcaccgaggtacgccgcgacctgatgaacaaatgcaacctgcatactattttgcgtttacctaccgggattttttacgcgcaaggggtgaaaaccaacgttttattcttcaccaaaggcagcgctagtaacaaaaatcaagatgaaagctgcaccgaaaacgtctgggtttatgacctgcgcagcaacatgcctagttttggcaaacgcaccccgtttggtgagcagcatttaaaaccctttgaggctgtttacggtgaggaccccaacggccaaagcttgcgcagcgaaggtgagtggagctttaacgctgccgaacaggaagtaccggataacatagagaatcagggtgttggcgaccgtatggcgaccagccgttggcgtatatttagccgtgaatggatccgtgatactaagggggattcgttagatatctcatggttgaaagacgataacagcgtcgatgcggctaacctgcctgaaccttcggtgctggctgccgaggcaatgggcgagctggtccaggcattgggagaactggatgcgctgatgcgcgagctgggtgctagcgatgaagccgaggcgcaaaagacgttgctgaatgagatgttgggtggggctaagtga

SEQ ID NO: 225006 - DNA, 1365 bp, Klebsiella pneumoniae
atggatgaggttaaattgccggaggggtgggtgtatagccaattactgaagcttggtacaattattacaggcaagacacctagtacaaaagatgttgataattttggtggtaatattccttttatcaaaccaggagatttggataaaggtggttttataactgagacgtcggatacattaactgaatccggacttctcactgtaccaaaacttcccgtgaatgccattgttgtaacgtgtattggaaatttaggtaaggtaggaatcacaacaaaaatatctgcaactaaccaacaaataaattcttttatttgcaatgaaaatctaaattttaaattcttgtactatcaaatttgcacgctaaagccttggctagaaaatgagtcttcggctacaacaatcgctatagtgaataaggggaaattctcaaaagctcctattagtatcccttccttggccgaacaaaaaatcatcgccgataaactcgacactctgctagcacaggttgatagcaccagagcacgccttgagcaaataccacaaaccctaaagcgttttcgtcagactgtgttggcggctgcggtgagtgggaaattgacggaggaatggcgagtttctaatggattgaaatattgggaaactcaaaaaattggcaatattgtttctcaaatagaatcagggaaaagtctaaaatgcttagaaactccacctcaagaacacgaatatgggatcgttaaaataagtgccgtaacttggggggaatataatgagaatgaaagtaaaacattgccaaataaaaaagatttcattgaaactcgcagagttaatgatggagacttccttatttctcgagctaatactcttgagttacttggtgcgccagtcattgtacataaagcaacaaaaaatttaatgttgagtgataaagtattacgccttgttatggaaaatgagcataagaaatggctcagtatttttttaagatcgccttctggcagaaaggaaattgaatctcgctctacgggaaatcagctctcaatgcgaaacattgggcagaaatccttattggatatcgatttaccaaaaccaccaatcgaagaacaacatgaaatagtccgccgcgtggaaaaactcttcatctatgctgataccatcgaaaagcaggtacaaaacgcccttgagtgcgtcaacaacctcacacagtcgattctggctaaagcatttcgcggggatctcacggcgcaatggcgtgcagaaaatcccgatttaattagtggtgaaaatagcgcacaagcattgctggcaaaaattcaacagcagcgcaaaagcacaaaaactatcaaacgcagcaaaggtaatagctga

SEQ ID NO: 225007 - DNA, 1704 bp, Klebsiella pneumoniae
atgcgactaatttctttagatttgaggggcagctacaaaggcttgaaagaccaattttttgattttagttatgcccaagataatatatttgcattgattggccttaatggttctggtaaatctcaattacttgagttaatcggggaaacgtttgcctatctagagcgatggcaacgtgcagagttcaaaaataaaacatcgttaggttttagcgtcgcggtacactatcaatgggatcttagaaatgatagtgctgttatatcttacccagacgagctcatgaatcatggtgagagtattgagctaaaggtaactattgagcttgacggagctgtggttttaaatgttcttggtgctgatgagtggcatataatacagcttggtgagcgccattttcccatccctctcgtggttggttatgcttcggggctaaacgaaaatttacagcgaagttttatgaaaaatgctgtgcaatattttgaagttcgacgaattagtagccagcgtctaaaaatgctatcacgagaaatcaatgatgaacagttggctgaaatcaataaaaagtatcttaaaaaatacccacacatatttgttcctttatcagaaggtgattttgctccaaattatcacctgaatttgagagaagtgaaccctgcccctagcaattttaactatcttgattacgataatattgggctcttaattttatcgctatcgattcttcctgctgggacagtatttcaactattagatgaaataacatataaatatccagtcaaagccgtacttcattacgattttcgttcaggtatcatagaagatgatgccattcgtgatgtgaaaatgttgatccgtatagcaggcaccgatcaagtaaggccaacaggaggccgaactacagataaccagtatgaactttatgagttagaatatctgtctggagaaatcactctcgaattaagtgatgaggctgttttaaaccgacttcgtgaagataactactatgattctttcgcattatttaaaagacttaataatattcaacagcttggcataaagaacttggatcgtacatctcgtttgaaattaatgaaagatgattttataggtacggtaaaaaaaccgcttcagtcaaggttacccttatctgttgttgagttattaatggctaatgaacagggcgataccgtgaagtttgatgatttatctgacggtgaagctcaattgattcaggttgtcgccgcaacaaggatattcagtcaggttcaagcgctatttctttttgatgagccagaaacacaccttaatccgtcttggcgtacctattttcatcagcgtttaactgaagcatttacacctggaaacgagaggaaaggtcaatcgcaattctttctatctactcactcgccattcatgatttcctcgctcaaacgcgagaatgtatttttcttcgagcgtaatgatatgggttgtatcagtatggaaccggtgtccagccagacttatggcacatcatttgatgtcttggttaagaaccactacggtctgcgttcccttatttcacagacagtggtaaaggatgttaaaaatcgattaccagaagataataatcctgaagcagttatagctgcgcggctctggattgaggaaaatctgggagagtcaatggaaaaggcttatctgctaaggaaactagagagctaa

SEQ ID NO: 225008 - DNA, 1167 bp, Klebsiella pneumoniae
atgttattttcacttaatccacagacgcctcaatgttcggtatttgcatttcttaatgctgaatttcttcattttttgcaagcttctattaatgctgatgtattctcagaaaacttattccgcacttttcctgagatgattgaaaatatagaagtacttgtccctagtgtatgttggagtaatgagcccacaagagagaaatttcttgggttatgggaagcgcggcctacgaccgttgcgcagcgacgggagttgtcagaccaaataagtcaggctcaggatattaatttatttttcaacaatacccaagctgtattgccgcaattagtaccagactccttattcgaagcatgtaaggcgttaacaactcatttgtttacacgcaccaaagatctagctcaagcaaagtcacaatccaatagttctattgaaaaacattatcagaatttcgtcagagaaaataataatagccatctatgtcctatttgtggcactgcacttctctctcaaaatcgagaaagcgtagcagaggaggaacaatggcgatcagattatgaccaccttctttgcaaagataaatatccagtttacagtgtccatccaggaaacttcattccgacttgccatatttgtaatagtaaagctaaaggggcaagggacttactgaacactgctgatctccagagacgattagcgttttatccacttcccccatcacaagagtcatgtgagcaatttgttgtggtatcgcttcacctcagcgaccgtagagatttaattgtgaatagttgggaaacaccgttggagtcagcatccattttattccctagagctccagctgacatagtagataaaatagttgtatggaaagaagtttataaagtaccagaaagagttgaacagcatcttaaggtcaacttttgcgagcgtgtggccgctgatctacgaccagtaagctttgatgatttctgtcagcaattacatagatattcgagacaaatgccagcagactatagaaaatcggaatggaggttttggtggcagaaagtctatgaattcttatcagatcaaaatagagactatttacatgatgtgtggatattaattgactggaagttaaggttatcaaatgatgctgatatggctgatacttttaatcacatttaa

SEQ ID NO: 225009 - DNA, 1173 bp, Klebsiella pneumoniae
atggttcctatagagaaagaaaacgtttatcagctacgcgactattttcacagtaaggtgatcgaatccgctcacattgatccatttaagtcctgcttttttagtctcctggaaggagttaaaagctgcattacgaattttagctttgcggacctatctttataccaacgctgtgcaatttcaggtttaggtattcttgatgaaacggtctcggtccaggatgtctctcgcctgctcggacaagctcccaagatagattcaacaccgagaccttgggtatcggatatgttcggtgtaatggcagtgaaatggctaaccgcacagatgcaagatgagagcatagatcacgagttcgaaaagtggatttcagggtttctggctcagcagattgaaagcaaccatctaagtatcttcgagaaagatatcgcggcatatgtcagtaacagcgaatcagcctcctttagtagtgcctgcataccactcttccttcattatcgaaagttactgaagatcaatagccatcagaaccgactttctcttgtcggacgtttcatgagcgaatttcaagcacaagctacagaaaatccttcagttactctcttgtgcgtaatgctttacgtttttaatcaaattaatcaggaaattgccattgctccaccgtctggatggacactggatgacctgctaggatttctggaacatatccctgctgggttaaaacggtggacatgggaggactcaggtcgaactagagccgcagagcccgtaaagtggcaagttgaaaatgaatatcatgttcagaatctgctttatatcctacttgcaccaatattcaacgatattgcagatgaggtgaatcttcagcctgtcgggcaaaaaaacccccgcatagacctttatctgccatcactgcacacaattattgaagtaaaataccgaaaagatacaaagaaatcgtttcctgcactaataggagaaattgcagaagatgcgtcactttatcgtgtcgacgaaaaatataaggattcgtatatcatcagcttcctgtgggactgcactcgagcaacacaagaacatgttaaattcaaggaaggagtattgaagataaaaggcattgatggttgcgtagtaataagcgcaccttctacaatgaattttaaaaagagagagtaa

SEQ ID NO: 225010 - DNA, 2232 bp, Klebsiella pneumoniae
atgttggatttttcactaacacaaaaggggtgggtcttgccgattgtcctgaatgcgtttccactgaaaatccctgaattggagttgaaatttgtccagataccctacgacaagatgactctagatagcctccgctcctcccataaagcgacgcacgtcttccggcgtcagggtgataatattcagatcttttcgagtgatggtacgttccccaaatctggtacaccgcagacactgcaattaaaggataatttgggaaccttttgctctctggttaaagatggtctgatcaagcacttcgctgggttgggtcgaactcctcgcggcttcaatcctatcgaggtggtaagtgccaaagaaaaagacaatcttttagcctcaattcttggtgaggcttatcccttaaaaatttgtgccaagtattcaatcgacactcgtactgtccagggtcaaccgtgtcttataattgattgctcaacacgtcgtgtagtaaaagagaactgcctgtttttcctaaaaaccggattcaatgttattggtcgctacgtcgtcaccgagcaggacgacggatttagaaaacttttagggtttgtagaaagctgccacgaagggagaactctgagtgtcattcgtcccgacggccaagcagttcatgctgaggctaaagacgtttatctcgaagctagtcgagcgaattttgacgactacatccttcatacgcatggtacgaagaaagactccattgtcgaacatattcggcagtccgtttccattttcaacggaggcgagaataaaaaagaccgcatcgacgcccttaagaggtatatccaaacgacaaacatctcgctgctcgatggaacgcgtatcgaaattgaggatccatccgacattcaaaaagattgtgcacagatgcaaaagccggtgttcgtcttcaacgataacggtgaagcagattggacggagaagggtcttacacaaaatggcccctatacaaaacgtaccttcgataggaacgatccatcaatctgcgtgatctgcgcccaacatgacaaagggcgagttgagcagttcgtccgtaagcttctgaaaggcatggctaatagtaaatatttcagaaatggccttgagggtaaatttgcacttggaaccagtcgtgttgaagtgttcgaaacatccacagacagcgtcgatgcatacaaaaatgccatcgaagctgcaatacgcaaaaaagctgatgacggaggacgttgggatctggccctcgtacaggtgcggcagtcatttaaaaaactcaaagttgctgataatccttactatcttggtaaaagcctattttacttgcaccaagttcctgtacaggatttcacaatagagctgctaacgcagtctgattattcactcggctactcgcttaataacatgtcactggcctgctatgcgaagatgggtggagtcccgtggctactcaaatcatcgccaacactatcccatgaactcgtgataggtattggcagtgcaaatatcgtccaagagcgtggtgcccataatcagcgcattatgggaatcaccaccgtattttcaggagacggtagttacattgtctcgagtacgtccaaagccgttgtaccggaagcttactgcggcgctctaacctctgttctagccgagaatatagaaaaaatacaaaggcgaatgaactggcagaaaggcgatacgattcgcttaattttccatgtacaagtcaaaaagttcaataaggaagagattcaggcagtccgtgcggtaatcgacaagtatagagattaccagatcgagtatgccttcgtaaaaatctcagagaatcatggactccacatgttcgactcttcaacggcgaccatgtcgaaaggacgcctggcgacacatcgcggaaaaacgtttaagctttctaaaaacgaaatgcttgtttacctgatcggccaacgtgaattacgacaagaaacggacggtcatccacgtggtgtgatcgtcaacgttcataaagactcgaccttcaaagatattaagtatttgagtgctcagctctacagtttcgcatcacactcctggcgtagttacttccccaatcccatgccagttaccatcacttattccgatcttatcgcccataatttaggatggttgaatcagcttccgggctggagtgactcagtcatgattggaaaaatagggcattcacaatggttcctatag

SEQ ID NO: 225011 - DNA, 666 bp, Klebsiella pneumoniae
atgaacggaatggaaaatctgatgccacgggagaagatgctgcaatacggcatcgaaacgctaacggatgttgagctgctggcgctgtttctgcgcgtcggcacgcgtcgtcaggatgtgctcagctatgcccaggcgttactgcagcgttttggctcactctacgctctgctttccgctgataaagcgcaactgattgctgtagacggactggggctggcgaaatatgcccaactgaagggcattgccgagctggcgcgacgctattttagctcgcagctggtcgaggaggccgcgctggtcaccccctcgatgacgcgcgagtttttacaaagccagctgacggaagaggagcgcgagatctttatggtgatctttttagataatcagaaccgggtgttgaaacatagtcgtcttttttctggtactcttagccacgttgaggtgcatccgcgagaaattgtacgcgaagccatcaaagtgaacgccgccgccgtgatccttgcgcataatcatccctccggtagcccggagccaagtcaggccgacagactgattaccgaaagggtgataaaatgttgtagattcatggagatacgcgtgcttgatcatctggttatcggccgcggtgcgtatgtatcttttgccgaacgtggctggatttag

SEQ ID NO: 225012 - DNA, 1395 bp, Klebsiella pneumoniae
atgaaagatcacattttgtccgtcaaagagaaaattggttacggcatgggtgatgccgccagccacattatttttgataacgtcatgttgtacatgatgtttttttacaccgatatttttggtatccccgccggctttgtcggcaccatgttcctgctggcgcgcgcgctggacgcgatttccgacccgtgtatgggtctgcttgccgaccgtacccgcagccgctggggtaagttccgcccatggatcctcttcggcgctatcccgttcggcctcgtctgcgtgctggcctacagctcgccggatttaagccacaacggcaagctgatctacgccgccgtgacctacacgctgctgaccctgctctacaccgtggtgaatatcccttactgcgcgctgggcggcgtgatcaccgacaacccgacgcagcgcatttcgctgcagtcctggcgcttcgtgctggcgacggcggggggcatgctctccaccgtgctgatgatgccgctggtcaactttatcggcggcgaagacaaagcgctcggcttccaggggggcatcgcggtgctgtcggtgattgccttcctgatgctggccttctgcttctttaccaccaaagagcgtgtcgaagcgccgccgagcagtacctcgatgcgtgaagacctgcgcgatatctggcgcaatgaccagtggcgggtggtcggcgtgctcaccatcctcaatatcctcgcggtctgcgttcgcggcggcgcgatgatgtactacaccacctggatcatgggctcggcggcgctgttcaccgccttcctcacgacctactgcgtcggcaatttgattggctcggcgctggcgaaaccgctgaccgactggaaatgcaaagtcagcgtcttctggtggaccaacgccctcctggcggtgctcagcgtggcgatgttcttcgtaccgatggacgccgaaatcaccatgtttgtctttatcttcgtcattggcgtactgcaccagctggtgacgccaatccagtgggtaatgatgtccgacaccgtcgactacggcgaatggtgtaacggcaaacgcctgaccggcatcagcttcgccggtaccctgtttgtgctcaagttagggctggcgctgggcggcgcgctgatcggctggatgctggccggcggcggctatgacgccgccgctaaaacccagaacagcgccaccctcaccatcattatcgccttgttcaccctcgttccggcggtgtgctacctgctgagcgcggtgatcgccaaacgctactacacgctgaaaacgccgttcctgaaaaaaatgatggccgagctggccgagggcgcgcgtcgcaacgaacaagatttcaccgccgccccgatcgacaaagaatggcaaaactaa

SEQ ID NO: 225013 - DNA, 1005 bp, Klebsiella pneumoniae
atgaataacgtctctttgattggtattgatctcggcaaaaattcattccacgtccattgccaggacgccacaggcaaagctcttagccgtaaaaaattcacgcgagcgaaattattcgaatttcttgccaattgcccttctgcaactgttgttatggaagcctgtgcaggagctcactatatagctcgtaaaatttctgacatgggtcataaaccaaagctgatttctcctcaatttgtccggccattcgttaaaagcaataagaatgatttcgttgatgctgaagccatatgtgaagcggcatcaagaccatcgatgcgatttgtagcaccaagaactgagtcccagcaggaaatacttgctttacatcgcatacgagaatctctcgtcagagataaagtcaaaacaaccaaccaaatgcatgcttttttactcgaatttgggatcagcatgccaaaaggtcttgcagttatacggagactatccgtagtcctcacggaaaatgaattgcctccctatttggcaaaattgttagtgaagttacagagccattatttatatctggttgaacaaattcgcgatatagaaaatgaactaaaactagcagcgaatcaagatgatacaacccaaaggcttatgtctatcccttcagttggcccgattacagcaagcgtcctgatggcaaacctcggtaacggtcaacaatataaacagagcagggattttgctgcggcaactggtcttgtccccaggcaatacagcactggcggccgaccaacattgttagggatcagtaagcggggaaacaaaaatttgcgaaggttattagtacaatgtgcaagggtgtacatccttcacctcgagcatcagtcgggttatctggcagaatgggtgagacaccaactatcaaaaaaacactcatgcgttgtagcttgcggtctggcaaataaactcgcacgaattgcctgggcgattacgacaaaacagagcgtatatatggcttag

SEQ ID NO: 225014 - DNA, 213 bp, Klebsiella pneumoniae
atgtttaactttgacatgcaactcgaccagaactacgcatcgttctacaacccagacagtggaaaggctgttttcgttgatagctttgacaatgttgagttcgatgtgcgtgtagggaccttgcgtgaaagtcatcatgtagctactgtgcatgcagaaacagatgaagagctcaactcaaaactcaaagatcttgctgagcagtacttatga

SEQ ID NO: 225015 - DNA, 378 bp, Klebsiella pneumoniae
atgactataacaaagcgggcgattcttgatctggaagctgagataaatgacatccttgaggaagattgtgcagaggttaaatttacctttcatgcagcatacgaaaggcttaatgatcctcgaaacaatcccgcaatatctcttaatgagcttgaggatgtcttcaaggaattcataaaaattcatctcactacgttacttggctacccggaaggaacaactttcacaattaaatgcaataagacaaaactgcattttccttgctcggttgttcatgaccttagatatgggaaaaaatggatagtgcaatcagttgtaaccgtaatgaggaaagctgatttcaaatccaaggatcctattatcctagaaattaattaa

SEQ ID NO: 225016 - DNA, 144 bp, Klebsiella pneumoniae
atgtataaagtcacaaaggccgctttcgcggccttaattatcactgaccgccggggcgggagtcagcagaacggccgccacagcgtgagccatcagctgcagtatcatcaggatgctggcagttaccagcgaaagcttgtgtag

SEQ ID NO: 225017 - DNA, 591 bp, Klebsiella pneumoniae
atgccaaaggatccgaagcgcaaatcaactcagtacaaaccgttgacggtgatgcaggaagcctacgcccaggagtatgtgaaatgccctgaaaatcagacgcaggcggccatcaatgccgggttctccccaaagtctgcccacgtcaaagccagcacaatgatgcgtgatgaacgtatccagaaacgaatcgctgagctgatggaagagcgcaacaagcgcctgcgcgtcagcgccgattacgtgctgctgcgcctggtggaaatcgaccagatggatgtgatcgacatcctcgacgatgaaggcggactgaagccgattagccagtggcctaaagtctggcgaacgtcgatcagcgcagtggatataaaccgcatcaggatggcgatgaaggatgacgaggaagatatcgagtccacgctgcaaaaaataaaatggcccgacaaggtgaaaaacctcgagctgattggtaagcatgttgacgtgatggcattcaaagagcgcatggaagttaacgtgaacgtcaccattgccgaccgcatggccgccgcccggcgccgcctgaaagagcgccagggtggtgaccagtga

SEQ ID NO: 225018 - DNA, 861 bp, Klebsiella pneumoniae
atgagcgaattttcacgagaaacactactcaacattatcgagactgaccatgtgcaatgcggtgaggcttcggcattggcccgtatggcgctggccgcaatggacagcgagccggttgagatgcctctcgactacctgcagggacacaaagacggcctggagtgggcctcccaactggcagaagccaatcaccctgagaccggggactggctttacgatgaccctatcgagctggcaaaagccattcgcaaaggtccagatatgccgccagtgcagccggtagcggacagcgagccggatcgcaatcctgtgctggcgtatgccgacagttatcgtgatatggcgaaacaaggcgtcgagtcagtcccaatatggagcgtcattaccgacctcgagcgaaacattgctccgctctatcgtcacgctcagccagtgccggtagtgcctcaggatgtgctggaagcattacagaaggtggctcgtatacgcctcgacatgaacgacttcgacggcgatcgccgtggcatcgctgattgcctgggtgatgccgaagaggcactcatcgaggtggtaaaccgccgcgccgccatgctcgcagccgccccgcatgatacccccgcgctgaactcggtgcagagcgtcgttaccgggtcggatacatggattcaggtaagcgagcggatgcctgaaaaagggcaggcggtgcttgtgtacaggcctaaagcgcatgaaggtggcgactcggatgtaagggttgctgtatacggtagacataattttgagcatggttttggttgctattgggagccgtcgcactggatgccgctgccagccgccccgcaggaggttggtgatgcctaa

SEQ ID NO: 225019 - DNA, 321 bp, Klebsiella pneumoniae
atgagcaagccactcagttttattgataatcattttcttagcgttcgtgtcgatgaaatttgctcctcagttcctacttttacgactaaacaggcggcactcgatgccggttcattgttcggctggcgctcagctgttcgcattgagagacgtttcgagaaggtttgggttgtcggtaagcaatgctttcagggcgaccatgccgcaggccttaatttcgattcctggcgatttcctctgcttaagtgggtgcaagaaaacggcgtaactaaatgcccggtccttactgtccgtaggtttaaacaggagcgtgcagcatga

SEQ ID NO: 225020 - DNA, 822 bp, Klebsiella pneumoniae
atgacgccaggaatttacttcgatatcagcaacgaggactaccacgccggagacggcgtgagtaagtcgcagctggatatggtggcgctgagcccggcccttctgcagtggcagaaatcagcaccggtcgataccgaaaagttgaaagctctggatatgggaacggccctgcactgcctgcttctggagccggaagagtttgataagcgcttcatcgtggcgcctccctttaaccgccgaacaaaccaggggaaagcggatgaagcagctttcatgaaggattgcgaggggagcgggaaaacagttatggaggcggagcaggatcgtcagttgaagctgatgcgtgatagcgcaatggcgcaccctgcagcgcgctggctgcttgaggcggaaggattctgcgaagcatcccactactggacggatccggagactggcgagctgtgccgcatacgcccggacaagcgcctgaagaatcaccctgtcctgctggacgtgaagaaggttgccgatatggagcgtttctcgcgccacattgaggaattccggtaccacgtacaggacgcgatgtaccgcgaaggtgcgcagcaaaccaccggtgatccacatggattcttcttcctggcagtgagcgaaaccattgactgcggccgctacccggtgcgggtgttcgaactggatgcgcaggacgtggacacagggcatgcgctataccgccgggatctgaatacctatcaccagtgccgcgaaacaggcgactggggtggatttgaagttattaaacgccctgagtgggcacgtaaacaggatatgtacgtatga

SEQ ID NO: 225021 - DNA, 882 bp, Klebsiella pneumoniae
atgagcaacgacatcgcaatcacttctcagcctggtgctaccgtcggcaccgcagcggcaatcttcagcccggaagggatggatcgcctggtgcgatttgccaccctgatggctgacagcaaagccaccgttccggcgcacctcgctggaaagccagctgattgcctggcagtcactatgcaggcggcgcagtggggaatgaacccgttcgcggtggcgcagaaaacccatgtggttaacggcacgttgggctatgaagcgcaactggttaatgcggttgtctcttcctcaaaccttctggccactcgcctgaactacaaatgggatggcgactggtcaaaagtaagcgggaaaaccgacaaatctccgagcctgacagtgacagtgtgggcaacccttaaaggcgaatctgagcctcgcaccctgaccatcagcatggcgcaagccggagtgcgcaactcaccactctgggagcaggatccgcgtcagcaactggcttacctgtgcgttaagcgctgggcacgcctgcacgcccctgatgttctccttggcgtctacacccctgacgaattgcaggaagcagcaccgcgtgttgagcgcgatattacgccaacaccagcgactgcatccggcatgaacaagctgatcaacacgaagcctgaacaaccggcggaagagaaaccaaagagcagcgacgaccgcgatccagaagaaattctgtgcgctttcactgacgcagcgatgaactacaacacgctgaaggacctggacaacgcttacaaatacgttgccaaaaagctcgctaacgatgatgagcgtctggctaaagctacggacgtatacagcatccgccgcgaagagctgaatcaaatcccgatgtaa

SEQ ID NO: 225022 - DNA, 192 bp, Klebsiella pneumoniae
atgaacagagcctctcccgttgatttaaggaaatgccttgaggcggcacatggcctcgctcacatcggcatccgttttgtgccgatcccggtagcgacagaggaagagttccgggcactgtctgccgagctttcacgaaagcttgagcggatggcggttgaagcggaaaaaagcgaaggcggtgcagtatga

SEQ ID NO: 225023 - DNA, 1683 bp, Klebsiella pneumoniae
atgagcagaacccgtaaaacgttggttatcatcacaggaacgatactattgctgatcgttcttttctttatcgtgctggccacctttgactggaaccggctgaagccgacgatcaatcagaaagtgtccgccgaacttaaccgcccgttcgccatccgcggcgatctcggcgtggtctgggaacggcagccggacgagcgcggctggcgcagctggatcccgtggccccacgtacacgcggaggatatcgtgctgggcaacccgccggccattccccaggtgaccatgatccatctgccgcgggtggaggcgacccttgccccgctggcgctgctgagcaaaacggtgtacctgccgtggatcaagctggagcagcccgacgtacggttgatccgcctggcggaagacaacaataactggacctttcagctggcgggcgataagcgtactccgggcgacagcgcgccctccagctggtcctttcgcctcgataatattctctttgatcgcgggactatcgccattgacgacaagatcacccgcagcgatatcaccatcctcgtcgatcccctcggcaaaccgctgccgttcagcgaagtgaccggcacaaaggatcgccatagcgcggcgaaaccaggcgactatgtctttggtctgtcgctgaagggccgctacaagggccagccggtcaccggcaacgggaaaatcggcggcatgctggccctgcgcagcgcaagcgcccccttcccattgcagggcgacttccactccggtaacacccgggtagcgttcagcggcacggtcagcgacccgctcaacgtcggcggcattgacctgcggctaaaattcgccggtgactcgctgcgcgatctctacgacctgaccggcgtgctgctgccggagacgccgtcattctccaccgacggccgcctgcgcgcagactttacgcaaaaaaaccgcatgcgctttaactatcagaattttaacggccgaatcggcgatagcgacattcatggctccctgacctacaccaccggcaagccgcggccgaaactcagcggcgatatggagtcgaagcagctgcgtctggcggacctcgggccattaatcggcgttgattccggcaaaggaacgaagaaaagcgcttcgcgccaggcgggtgaccggccgcagccggcgggtaaagtgctgccggcggaccgctttgaaaccgacaagtggcaggtgatggatgccgatgtgcgcttcaagggccggagaattgagcacggcggcaccctgccgatcagcgatctgtcgacccatgtgattctggaggatggtgacctgcgcctacagccggtgcgctttggcctggccaacgggtcgattgccggcagcgtacacctgcagggcgataaaaagccgctgcagggtgaggccaatctgcaggcgcgacgcctgaagctgaaggcgctgatgccaaacgtcgagatgatgcagaaaaccctcggcgagatgaatggcgacgtccagctgcgcggcagcggcaactcggtggcggccctgctcggcaacagcaacggtaacctgaagctgctgatgaacgacggactgatcagtcgcaacctgatggaaatcctcggtcttaacgtcggtaactacctgatcggccagattttggcgatgaggaggttcgggtga

SEQ ID NO: 225024 - DNA, 900 bp, Klebsiella pneumoniae
atggataaaattcatgcaatgcagttattcattcgcgtagcggatctggagagcttctcccgcgccgccgagaccctggcgctacctaagggtagcgtctcgcgacagattcaggccctggaaagccatcttggcgtgcggctcctgcaccgcaccacccgccgggtccagctcacccaggatgggatggtctactacgagcgggcgaaagatctgctgagcaacctcgacgaactggacggcatgttccagcacgatccggcgagcatcagcggccggctgcgggtagatatgccggtcggttttgctaaaaaaatggtgatcccgcatctgccgacttttttacagcagtatccgggcatcgaactggaactgagcagcagcgatcggctggtggacgtgatccgcgaggggtttgactgcgtggtgcgcgtcggcgcgctcaaagactcagggctgattgcccggccgctgggcaagctgacgcaaattaactgcgccagcccggactatctggcgcgttttggctatccgcaatccctggaggatctggcggatcatgccctgatccactacgccagcaccctcggggtccgtccccccggctttgaggtaatgatcgacggcgcggtgcgctgggtaaaaaccggcggcatattgacggtcaacagtacagaaacctatcaggcagcctgtatcgccgggctggggattattcaggtgccacgcaccggcgtgcgcgaggcgttacgcgccggcgacctgattgagatcctgccccagtaccgcgccgagccgctaccggtctcgctgatctatccgcaccggcgcaatctctcccgccgggtaaatctgtttatggagtggctgggcggactgatgaaagcgtatgtcgattga

SEQ ID NO: 225025 - DNA, 759 bp, Klebsiella pneumoniae
atgacacaacgtatcgctttagtgaccggcggcagccgcggtctgggtaaaaacgccgcgttgaagctggcggcaaagggaaccgatattcttttgacctatcacagcaaccgccaggcggccctcgacgtggtggcggaaatagagcaaaaagggggcaaagcggcagcattagcgctgaacgtcggcgattccacaacatttgacgcattcgccagcgaggtggcgcaggtgctggcgcagaagtggggacgcacaacctttgattatttactgaacaatgccgggatcggactcaacgcgcccttcgccgagaccagcgaagcgcagtttgacgagctgatgaatatccagttcaaagggccgtttttcctgacccagcgtctgctgcctctcctgcaggatggggggcgtatccttaatgtctccagcggcctggcgcgctttgccctgccgggctatgcggcctacgccgcgatgaagggggcgatggaggttctgacccgctatcaggcgaaagagctgggcggacgggggatatcagtgaacatcatcgcgccgggtgccattgagaccgactttggcggcggggaggtgcgcgataacgccgaggtgaatcggcatatcgccgcccagactgcgctggggcgcgttgggttgccggatgatatcggcgacgccatcgccgccctgctcagcgatgagctgacgtggatgaacgcgcagcgtgtggaagtctcgggcgggatgttcctctga

SEQ ID NO: 225026 - DNA, 123 bp, Klebsiella pneumoniae; identical to SEQ ID NO: 206642

SEQ ID NO: 225027 - DNA, 777 bp, Klebsiella pneumoniae
atgagcccactttggaagccaatgccttactacataatgagagataaaaaattcttacaaagcttaaagaaaaataaagtttctcagggaatttctgttcttaagctctttatcgtaatttgtttaaagtcagatattgatgaagaaggcaagatcggcgcgaacttaacctatgacgactttgctgcaatgtgttctctgagcagaaaattgatcaactctggtttacgtgtcctcgaagaggctaagattattcgtacaaaaggcgagagaaagaaaagatacatactaataaattgcaagccaagagaaaaaggtagagatttggctgactttagcacaagtcatggtttttggtgcaaaatgccctacaagggagtggtagacgacaagagtcatatcccttcttttgaagcaatgactaaccggggagttaatgaactaaatgctctaaaggtatacctatatcttttgatgataaggtctagaggggatgtttatatttcagtaaagttatcaatcatttgtggtaagttgactctatcaagtcaagaggtgattaatgcagttgggtatttaaaagcaataggtttagtggctaaagtcgacgttggatcgaacaccatgattaataacgatgaccgttttgctattgcttttttagttagtggttgggaaagtttagaatggaaacctaattacataacagatgaatcttggaataaaagggagcaagaggtctatgaacgttttaaggatagtaaagatttcttttaa

SEQ ID NO: 225028 - DNA, 1074 bp, Klebsiella pneumoniae
atggcaaaaggaaaatcagcactggcaatggcattaaaaaagaaaatcggcagcaatgacgagatccaaaaggtttcacactggattgattccggcttccctccgctgaataaagccatctccgggcgctatgacggcggtttcccaagcggacgtatcgttgagatctttgggccgccaagtgctggtaaaaccttcctggcgacggccgccatggtctccgctcagaaacaggagggtctggctgtattcctcgaccacgaaaacagctttgatgttggtctggcggtggcaaacggcctgaatgcggatgaggatgacggccagtgggtctataagcagccggacacgttcgaagaatcggttgagctgatcggcaccatcctgaaattggtgcgagacgaagagctgatccccgcagacgcccctatttgcatcgtagccgactcccttgcgtcaatggtgccaaactccaaagccgagaagttcgacaaaatggcggaaggtacagcgaaggataaagatcagctaaacatgaacgacaatacggccctggctcgtgctacgagcgccaactttccaacgctggcgctctgggcgcgcaagtacaatgcctgcattattttccttaaccaggttcgtacaaaaatcggcgtgatgtttggcgatccgaccacctcccctggtggtgattctccgaagttctacgcctcagtacgtattcgtcttggcgcttctgttatgaaggatggcaaagataagatcggtcaggacgttggcgccgagtgcatcaaaaacaaagtggcaccgccattcggcaaatgctcatggaaattctacttcgacccgacccgcggtctggacgttatcgagtcactggttgagcacatgctcgaagaaggatacctgccaaagaatgccagcggccgcgtagagattggcgacaagaagtataccaaatcgcagatcgtcgacatgtatcgagaaaaaccccttacggaaattattgctgctctgcaagctattgaagacagacgtatgaaggaatctaagacattggttgagggcgattaa

SEQ ID NO: 225029 - DNA, 1197 bp, Klebsiella pneumoniae
atgattattttctgggatactgttaaggaaaacgtagaggttataggaacgcttgccacttctcttgctttttttgctactgcctgggctgcatacgaggcaagacatagtgcaaaagcagcaatgaaagcgacccagctaacggcggattcactccttgaaatgaaaaaagcctcctttaaggaatggtacggcatcttacttgaacagcataataaattgcttgaggacgtaaataagaccttgctcgctgaccgtgaacttaatgttaaattgggcacgaatatcatcaggggaatttattatcatgcaacaaaaaaacctgcttacatcaagtatattaaccacataattttaattttgacgtatttggataaagatttctatctaccatcatcagcggataatgaaaagagatcttatattgaacagttgcgcaatagtattagcccaaaagtaagtctactgatttctattttcggtcttaatatcgataataataaaacctacgatgcaaagaagctttacaacctcctgaacaaatataacttctttgaaaatgaacttttttttgaagatgcaatatcaaaagttcattacttagattcttatattgctgaaatatttaacaaagaataccgaagatacgtagaatttcatgttgatgaaatggttcgtggtcgtgatccctctagtatcaaagtgtcacgtccgcatagcagaattacgttctcagtgttgtggtcgtataacaatccttgccaacaacatttgttgcaaatattcaatgacttgcctctacatatgagaaatagcatcaagctaaatatggaaaaatcggccgaaaaagtggccgagttcgattcttggcttcctaatattatcggctgggagcttaatatatctggattcaaaaatagagttatcaaggacgaaaaagagctaaaaaggctaataaagatttacattaaacatcctttcaatagcaggcagacaggaatcttgttgactaatggagttactaatagattcgctgaagatattgaaagtaatctagataaatattttttatataaagcatatttaaacctcaatactaatcccttgaaagaggaattgattgacggaatagtgactaaagttgaggaaatggttgatatttacaaatcagagctcaatgcattcagttttaaataa

SEQ ID NO: 225030 - DNA, 147 bp, Klebsiella pneumoniae
atgatctcaccgcagatgaacttcgtgttgttgttgatcggcttaaccaacaacgtactaaatttgatactgaactgcctgaaattaagccaccagttactggtggttggttgtctaggagtcggtcgttgcagcaagcccaaataa

SEQ ID NO: 225031 - DNA, 1167 bp, Klebsiella pneumoniae
atgtctttgtggaacgagtcctatcaaagctcagttgattcaatcagcaattacattgaaaataatttcattcacttctctgaaatacctgacaacatagacaaaatagacgattcagtttttgttgattcaattttagttgtagcctggcgttattttttgactatatataatcatcgtcgagaatcgctcaacaaatacacaccctttaatcaaaagcagctaggaaaattaaatctccctagcatccaagaattgatggaagataagtttcgcttccttaataaaatattaagggtaatatttgaatactgcttttgggggcgtgatgatttaagcccgcctaaggtcttagatcctcaagtgttagatagactagacaaattaaaaacaccatctgattttccagtcaacttcatctggattgaacgctctatgcctgcggcattaacgaaagatttattattatccaatgatttttcagtacttacgaagattgcgactgatgtaggcaattacagcgaagaaataactcaaggcataaataaaggactcaaagatgttggagaaaaaacagatcaattacgagttgaaatagaagggctaataggatctgcgaacgcatctgtaaaatctctcaaagaatatgaatccaaactagatgaatataaaaacgattacaacttcgccctattaagtaaggctttctcaaacctattaaaaaccaaaaagtcagaatatgcgacaaatcacaaaaacataactattttttccatgtggctaattgctactcctttacttacattactaaatcatatatttaatatttacccagtagaatttaatctgaatgcattgttttatttcttgccaatcttatcattagagctattgttcttttattttatgcggctatattacattgaaggtaagtccattaaggctcaaatacttcagatagagcagcgccttagtctatgtgagtttatacatgattacgtggagaaaaaaaataattcaggtgctgataaggaatcttggtcattgtttgagaagttgatttttagtccaatacaagttacttctgaaaatataccatctttactggatggagcatcatctattgccgagttagcagggaaagtattttccaaagatcctaaataa

SEQ ID NO: 225032 - DNA, 645 bp, Klebsiella pneumoniae
atggataaatttttgtctagacatttaggttggtttataggcttagcgtttgccatattagccgcaattgtgtttggcaaagttatcggcttgctggggatttcgagccaaggagttatttctgttgctggttcaatgatagggatgatatgtagcggattataccgcaacactttaaagtatattaaatcccaagaatacagattaaaaatacaagagtataaagaaaaacgtgacgaaagtgtcaagaaagagcgagaggagttgaagaggaagacaatcgtcgaactttatctcttgaatgaaaagaaaatcttcatcaaggttaagcttctctctgtgatgatgatatttttcggcgcagcactgagctacttattcggctatagttctatcgttaccattactggaactgtagcctttgctttactagagctaaaagagagagttttggcttatcgtatagctaaaggctttttcggtaataatagtactgaagctatccaattacttaaatttattgagaccaatatcgacaccatcgatactggtagcagtggcggcaaacgtaaaatattgaatgaccctgttttagaagaaatcccaaatgagaatttgggaaagggggctttggatgccagataa

SEQ ID NO: 225033 - DNA, 522 bp, Klebsiella pneumoniae
atgagcattgagctaagcagcacccaaaacacttacggccttctgaactcaggaaccccctactcatcttgctggcgcttcttcgagccacgaggagtccatatagaccaattaggggaatacactctaaagcagctcgtggagaaaatgtacgtacaaaagcccctagacatgttctctatgaacgctggtaagctgattgggctcgatcgatgtgggccaagacaggctatgaatatttgcaaaggcatagaacgagcaaaaaacgtccgcttaggcccgctacttttcgcctgcggcatctacggtgttgaagaggaagaagcgtggttgctggcagagaaattcaattctcttgaggcgctatacgatgccagcgtggactctctgctaagccatggttttttaaacgagtctgtggccgtgaatgcatacaatttttttcgccaccctgccaatgtcttagcacttactgagttacaggagaaagccgggttaaagataagtaacgtgaaaatctga

SEQ ID NO: 225034 - DNA, 537 bp, Klebsiella pneumoniae
atgaattacttagcagaactaccatttgttgacatcttcgatgccaaagccaacaaggcttttttctggcgcgtcgataatccactagattataagtgcggcgtgaatggggcgaagacgttcgtagagtttatcgagaagtatccatttatgaacaacagcaatgttctttatcggatcgcgtgcgatatgagcgactcaggacttattaaatcggaatcagcaagagggttcttcaatacgctggatacattgcttacaccgaaaagtgaaatatcagccagtggagtaactaaaatcagaggcagagcacgtcgcaccatcaatgaggtagcatgtgatatggggatcacaagcatgaaacttctaaactttcttgctcttattggatggatagacaatgcaactgtacagccaaccactaattcgcttactgaaggcgtgttacgaaaaaacagcaagatgccgtttggttttacaataaccagaaagggtgaacgcttgatcgcgagcaaataccaagcattgagtaaataa

SEQ ID NO: 225035 - DNA, 600 bp, Klebsiella pneumoniae
gtggctctttcaaatatacaacttcaaaccatcattaataattctgttgacaacccagattatttactgctgaagaatgacataagaatacaacgggcaaaagaaaaaaataaaaaagaacatgctagaggtttctattttggagatgagcacataaactcattaaaaagtccaaatatagatccattccatatatacataatttcaccagagaatcaatcaagaagagatgattactcgctggtcatattccctttcgacattaaaaaattaattcatattattgataaaatagacggcatagcacttggacacatccaactaagttccaacttcaatgcattccaaatacacaaaccatcaaaaagtaaaagatactgtggcgtaggatactctatgaaagttgataatgaagacaatttgtggaaccttatcattgaattaaaaaaacatctacttttacctgcgggaaccacaggaaagctatctagtatctattatcaatccgggctacctagacatagaaacgaaaataatacaaatgaaaatatattagaatatttttctcttatagcttctgatacaataggtcacaaatag

SEQ ID NO: 225036 - DNA, 357 bp, Klebsiella pneumoniae
atgaaacaggttaaaatttcgctactagtaacacttttgtctgttttttcatctatgactgcacttgcggctaaacctattacgatagatcagcaaaattatataaaagccactcttgagccaaatttacttgatcctgattcagcaaaatataaatttcctgactacatcgaaagcgaatcaacatattgtttccagctaaatgctaccaatctatatggcggttacacaggctatcgatgggtccagatcccctacaagagcatagtttctaaggagaaaaatgttccggtagatatcaatattcttcccaaggaagtcttcgaagaaagctgtaaagaaataggttacaaataa

SEQ ID NO: 225037 - DNA, 531 bp, Klebsiella pneumoniae
atgcccaacaatattactgatataacatacggcatcccagcagaagtatggcctcgtgactactccagcatagagtcggctttgatgttctggagaaagcgaacagtacctattagggttactgtagaaaatggacaagtgttcaacatgtacgtacagggaacactatcatcacgcaataaagtcgatctttgccctactccattcgatagagagaatcgtgtaaggcttccactggagcgagtaagcaccatagagacaatcatacctccagatgtggacaaagagttcaccggaagactgactgtaagcaacgaggacgtgcaaaaccaaccctctcggcgtgactttttcaaaatttgtcgtaatgcacacaatgaacaaaagtctataagggtgtacatggctgacggtcgtgaaatagaaggcgtgtcgttaggcgttgacgcttgtcaggtaactatgagggtcggggaacaaaccagaatgattattctcttcgattgggtcgagcgcattttaccgttttaa

SEQ ID NO: 225038 - DNA, 195 bp, Klebsiella pneumoniae
atgacggcagaagacgtgattaatgatgtgctggtggagctgggtaagctacctgatcatctcctcatagccaccgtatttgacaacaaacctgctgagttaaaggcactggccaatgagtggggatggatggatacggaagttagagagcagctctatgcgatagcctggcggatagttaacgcgcaaccatag

SEQ ID NO: 225039 - DNA, 966 bp, Klebsiella pneumoniae
atgagtaagtggctattagacaggctatttgaagccggtgatcaggcagagccccggtttgcgtttcaggggactgtaaattggatgagggcccttgccgaagtcgttaacggtggcgcttgtgccgatgataaactaaatgatttatatgctcgggtacaacgtagacctgtcaatcgtgaagctgatacgcttgtttttgagaacacaatgatggccttacataatctgtcatctttgaaaagtatgaataaagatgtcgaagataaatatgacatatgtcgttcagctattatttcttggtattacagtatctatttttccgctagcgcgatggttgcagcatcttctggttctattcaagagacacatacagccacagcaaaagtttggcagtcagatatcgcggaaaaaaaacttatcccatatccatttaatcttcttctaactagtttagtttcaaacactgctgatgccgagattgctgcatatagaggtgataaccgtttcgacctgaatgatagagcttatgataatgaaactgctcatggtgcactggtttcctatctcaaggggactcatggctacaaaaagtgggaaacagaagagagggtgagaacttctcgtgatttcaaagctcttggtgttgacaactttcgcacgaaagctgctcgcgaagttcgcgatcacgcactagaaaaaggacaagttaatttccttattcaggcatttagataccgtggtaaagcgaactatcgtgactctatatttttatcctacggtgacaacaacgaagctattatagaagaatttatccaagatttgtatgacgtcgctattggcttcattagggctacttcgcattattgcagtcgaagagtcgagagaggtacgtgggctgagtttgtcaaggatatttctgataactcaaggttgtctattgactctgtcgtgcttgaaatataa

SEQ ID NO: 225040 - DNA, 579 bp, Klebsiella pneumoniae
atgtgtgataaatgcaccgccgctaacgctgaagtaaagaagatcattaatgaagtcggggctaaaaaactcgtagggatgcttgattctataactggtcatggtgacgctcatccgctggaacgcatcatggccatcgtccaggtcatgggcttatttgacgaaccaatgaaaatcctgatgcttgctcgtcactttggcggggcgtatgtggaagagcatgaacgtgccaataaactgcaggcaactctggacatgatgagcgaaccaaaatgcgcgccggcgccagatctctccggagacaatatcggcattgaaagcaaagagcgggagatcgccagccttaagtcttctttaggcatgttaattaccgcctttaaactaatggcaacccataacgggttcaaaatgccagagctaaccggcgatgaacatcccgctgctattcgccagctgcttggtgcgatggcggataatatggatgaagcgaagagccgtatcgaagacatgatgcgagaacttgcccatcgccacgatctaaatgaccagccgcacaagatgcagcaagtcagccactga

SEQ ID NO: 225041 - DNA, 207 bp, Klebsiella pneumoniae
atgtgttatgtgaaattgaagatgtgctggcgagagccggccatcgtaaagccgctgctgatgaaaacgcagacactctcgttgcaggtgatgagctcatatttcccacaagccgcatgttgcgtggctttgctcgctctggtgctgaagtggtgcttatcagccaccgtccggaagcgctcgaaagcgcaaccaaaaaatggctga

SEQ ID NO: 225042 - DNA, 180 bp, Klebsiella pneumoniae
atgaagatatacatagatatcctgttactcatcttttcaatactgtttatgttggactgcctgctgatcgggacactcaagaaagctctgtctcctgtcaacggaaccactgtgaacatgctcgcactggtgctggtcgtcacctctacagcacaggtctacacagggatagtggtatga

SEQ ID NO: 225043 - DNA, 264 bp, Klebsiella pneumoniae
atgttcagcgattgtcaggccaacggggactgcttttgtcgtcgctgccgctatcagattgagtacatcctcaatcgtcagtttgccttcagcaacgtcgccaaaatcgtgttttccgcgccccggttttgcaaaaagaatggagcggaacagagatgggtcgagtacgtccagatcgatatggatcgccagatacgcaatcttttctttcgctatccactccaggacttcatctgcaccgcttttaacctgttcaggtgctag

SEQ ID NO: 225044 - DNA, 657 bp, Klebsiella pneumoniae
atgggttcatggactggtgtaattataatgggattagtgatgaacatctcatctatagttcctgctttatttttaaaagtagagaaaaaagtaaaaatatcaattttgatacgaatttatttgctatctgttttcttgatactgacacttattacattgacgaccaatattattggcgaatattcaacatttcctgtttggctaccaatagcatcagttgtatttttcatgatttcgttaacgggatatattaaatatattcgtcaatatatatcaaaatggaaaagaagatctattgtccttctttcattctttattgtatatgcgatcaggttcaatgctttgtttattaatacaggcgtagggtatgagataacatcatttggagttgtgtggacgtcaatattcttatttgcatgtttactcgcttacattggaacatcagatgcgaagagcttagatgccgcctattattcattgaccacaaggacatctgagcctcgtagggataaaagctatgcccctcaagtggagatcgattatgatgtcgcgattaaaggccgttctgtattaaacgatcctaatttaagccttgtagaacagcaacgctatagagaagcattgcaaaaaagagaagatgattcggagtcgaactag

SEQ ID NO: 225045 - DNA, 618 bp, Klebsiella pneumoniae
  misc_feature (572)..(581): n is a, c, g, or t
atgaaacgccctatttacttgttaaaaaatgatatcgacttttcattagactcaaagataacgttgataagtctcgtttcccctgacacatcgtcaatattaggcgtaatcaatatttcaggaactgactctgagcaaataataaaaagattatctttagatatagataattacgcagatgtagaatataatgaagattacttaactgttaaaatagaagcaaaacaatttctagatgaagtttgtaattcattcaaacaggcacaatatggattggattacaatatgagaataaacctcattttaacgtctaaaattaaagagttaagtggtgtattcccacattacattgaaatagagttcactcgtgtaaaaagaaagaacgttcctaaagtaaacctgtcatccgttttgagaaacgtatattttgacgaaagatcagaaataatttccaatgtattatgtatggagaaaatcattgttgatataatcactgagcgttttcaagataataagatagaaataaaaacaaaaaaaggtgttgagaaaaaatatatcaataaatcaacacnnnnnnnnnnaatcaacactataccaaaaaatttgttttttgcatga

SEQ ID NO: 225046 - DNA, 1152 bp, Klebsiella pneumoniae
atgatagctgatatcgcatttcatgatctggacggtaagaatccccatgcgcatgttatgttaaccctgaaaactatcaccgctgctggctttggcaaaaaagacagaagctggaatgataagaagatggttgttcagtggcgtgagtcgtgggccaccatgtcaaacagctatcttgaagccgctggatgtgaagaacgtatcgatcaccgttctctcaggacacaatgtgctgatgcccttgcccaagcagaagaagcattcagcgctgaagaaaaagcattctggcttgccaaagcaacggtaacaaaccgcccggcaatgcagcgcgttcatcgtgccaaatggaatgacatcgagtcacaggaacagcgagctgctgaacaagctcaacgcgatcatcaaattgaggaagcaaagaaggtatacaccacattcagtgagctaccactggagatcgtggttgatgtcagaagctttacgattaaacaccttgctgaacccgaagaaattgttatccctgactactcgacagtagaagaacagcagccgattatggcaacaccagcaacaagcagaagaccagcagcaaagtcttatcgtgatcccaataagatcagcaaagttggtgcagcagggaagaaatcccatgttctggttgttcctgaaccaaatgcatccactaaattgaaaaccccttcttctcgaaacaccagagcaaagaaccgcgctcccatgaacaatagaaagcaagttaaaccacgccagaatggtatgtttaagcgtttcacactacttgtggtgggcttcttcaaagagagatttgtatgggccaggaggaaacccgataccactgatactgatcatgacaaacgtatcgcagaaaactatgtcttcgatgaggtgttggggatctatgttccacgctcagagtttgaaaatcgcgttaaatataacaatgaccaaacatcatcaaaaacagagttctgtggcaatctatcagataatgacatagccgttcgttttccaagccgtcctaaacaggagcagccagatattgataaaaacatcgacctcactccatcaataccatcaaagcaatcaagaaatgcggttaaacgactaagaccactgagtgatcgtaatagatag

SEQ ID NO: 225047 - DNA, 306 bp, Klebsiella pneumoniae
atggataatgaaagcaaaagatcaagaacagaaaaaacattaaagcagaaagtagcatttgctcaacttgaacttaaccgtcttaagtcaatggagaaatcagagcaaaagaaagttgaaacaaggctaaaaattattcttggcgcggaagtggctaaggctatgaggtgtggtgtcgaacaggtggataaagaacttgttctgggcattttactttcagcatctgagttgaatgatattgaaagaataaagtatataaaagcagggagatggtttcttgctcaaatggatggaagacagaaataa

SEQ ID NO: 225048 - DNA, 558 bp, Klebsiella pneumoniae
atggttttattaaatagtaaaagaaaaagtaaaaaaggtttctcactactcgaactattacttgttctggggattattgctgcgttagtggtagctgcttttattgtgtatcccaaggttcaggcttcacaaagagcacaagcagagtctaataacataaccaccatacaagcaggtgtcaaagcactctatacatcagcatccagctttaccggactaacgaatacagtggctgttcaggcaaaaatctttcctaacaatatgttgagtggaacaggcaatactgcaaagcccattaatgcattcaagggaaatgtgacgttggtggctgcggctacaggaccatcatcagcggctggctcttcttttaccattacttatagcaatgtgcctgcggcagagtgtgtgaagattgcgaccgcagcagcaggtaatttttacattgctactgtcggaacgaaggtggttaaagctgctggtggaatgctggatgttgcggtaacggcttcagcatgttctaacgccacaagcaacacattagtattcacgtctatttaa

SEQ ID NO: 225049 - DNA, 1464 bp, Klebsiella pneumoniae
atgataaagaaaaaaggatttaccttactggaggtctctatcgttttaggtattggcactcttattgcttttatgaagtttcaggatatgaaaaaagatcaggaaacggttatggcggaaaatgtcggaacacaaataaaacagcttggtgaggcggttaaccgttatatcagtattcgatacgataaggtttcaacgttgtcatccaccaacaatcaaagcagcgatccgggaccaagaacttgtacggctaatagctgtgaaattacttaccagacgttaattaatgaaggtcttttacctgtcggctataccggaaccaacgcacaaaagtccacgtataagattttgttgaagcgttcaggaacagcgcctgattacgtgattaatggtctgataacaacgagtagtccgtggaaggaaggtaagaatgtccgttatgacctgctgggtaaagctgttcaggctgcgggtgttgatggggggatgagcagagcgacaaagatcgcttctggatatggtggtcagtggagtgagaattctgggaactacagcaatattactgacggtggattgttggcctaccgcgtgggctacaactcttctatgtattctgtttacctgcgtcgtgatggaacattgccaatgactggcgatctaaatcttggcggtaagagcatcaaaaatatccaagacattacggcatcaggaacaaccagcaccggtagtttgaaaacaacaggaaacgctgctatcggatcagatcttgctgttggtggagcctctacccttaatggtcctgtaaatatcaacaacaacctgaaggtaaaatccgatacctatctcaacacgctttctacaacagggctggcgaagtttggaggacgtatcgcgacgaacggactcaatcccaacgatctaccgtcaggatgggctggaggtgttcgcacttatgatttgtatgcgtctggaactgttggggctggaaccgggaaaacggtcaatgcttatatgaacagtgcaggtaatatttttgcgtcaggcaatcttactgctggaacgataaaatctaatggcacaattgaatcagccgggaggattaaggtcggtgagtatcttcatctgaacggtcaggcaacgctgaatgcgaaatgtacgcctaatggtctggtggggcgagacagttcaggtagggttttatcctgtgtcagtggtaagtggcagacagtgagtggtaatggcttaaaaggtatttatattacgatcacagatcaagtttcaggctataagtgcgttataccaaacagcgatacaggctcatgttcttgtccgggatcggcgtatggctcaaaatatggttatttatctggaactttaatagctcaatatgatgatcaacgttgtagtggtggtaagaatgatcactgttatagcaattacagaaggttatatgcatgccaataa

SEQ ID NO: 225050 - DNA, 804 bp, Klebsiella pneumoniae
atgctaaatgatgtatattcaggctattggactggagatatctcaggaaccaaccaaggagggattagttttactctgaatgtagaaggtaataaagtaagcggttcggcgaagatacatgaactagcacttggtgcatatgaatacagtatttcaggcaaaatagatgaaaacctgtttattgaactaactcccggaaatagaaatccgatggtcatgttagggaaagtcactgtaatttgtagtttaattaataataataaactcagaggcaaatggagatctagcattggaacggaaggtgtatttaatgcagaaaaatttgatgaatcagaattgaaaacagaattaccagagagtaactccgtatttttagttcatggtcatgatgagggaacaaaacattcagtcgcgagatttttagaaaaacttggtgttgaaccagtcatattgcaagaacaaattaacaaaggaatgacgataattgaaaaatttcaagagtttgcaaaaagagcaggttttgcagtaatcttaatgactcccgacgattatggctatcctataaacaatgagcaaaataaaagccttcgagctcgtcagaatgtaattctcgaacttggttattttaccgcattgttaggtagagaaaaaaccatggttcttataaaaggtgatattgaaattccaactgacgctcttggtatcacatatgaaaaaatagactctaatgaaggatggaaaatgcgtttagcgagagaattaaaagaagcgggatattcaatagacatgaacaatataatttag

SEQ ID NO: 225051 - DNA, 951 bp, Klebsiella pneumoniae
atgagccagttagacgaactgaaaaaatacaccacggttgttgctgataccggcgatattgaatcgattaaaaagtttgcaccccaagatgcgaccaccaacccctcgctggtgctgaaggccgcgcagctgccgcagtatcagccgctgattgccgatgcgattggcaaggcacgccgccagggaggcagcgcagaaacgcaattgattaacgcctgcgatcaggtggcagtggatatcggcagcgaggtgctgcgccatgtgcccgggcgtatctccaccgaagtggatgcccgctttgcctgggatcgcgggatgtgcgtcgcgaaggcgcgcaagctcatccagttatatgagaaaaatggcattggtcccgagcggattttaattaagctcgccgccacctgggagggcattcgcgctgccgaagagctggagcagagcggtataaactgcaacctgacgttactgttctctttcgctcaggcccgggcgtgcgccgaagcgggcgtctttctcatctcgccctttgtgggccgcatctacgactggtatcagaagcaccagccgcagtcagcctatcaggtggacagcgatccgggcgtggtctctgtgcgccagatttatcagtattacaaatcccatggctatgacacggtggtaatgggtgccagcttccgtcgaattgagcagatccaggcgctggcgggctgcgatcgcctgaccatctctccggcactgctggacgagctggcggccagcgaaggagtgctgacccgccagttgacccccggctgcgtgacggaaacccgtcccagcccgatgacgcaggcggagttcctctggcagcatcatcaggatcccatggcagtggaaaaactagcggaagggatccgactgtttgctgtcgatcaggtgaaactggaacaacagattcagcagatgttgtaa

SEQ ID NO: 225052 - DNA, 2712 bp, Klebsiella pneumoniae
gtgtcaatttataactactggggtaaaactcgccagggagaacccggcgggggtgatgattaccatctgctgtgctggcattcccttgatgtcgccgcaatgggctactggatggtaaagcgagatatctatggtctggcaggttatttcaggcgtttagggattaatgatattgaaaacgccgcgcaattctttgcctggctattatgctggcatgatattgggaaattctcccgttcatttcaacaattatattcccatgataatctctgcgtgcagaaggatagtcgaaatacatatgaaaaaatatcccatgcgtcactgggatattggctatggaattcccacttcagcgattgtccagaattatttccgaactcatcgctttccattcgtaaacttaagcgtgtaattactctgtggatgcccttaaccactggccatcacgggcgtccgccggtggggatgcgcgctctggataatttccatccatccgatattaaagcagcgcatgactttctgttagctattaaatcgctattcccggacatggaaatcccgtccttttgggatgatgatgcaggtgtggagctgttcagtcacctgtcgtggtttatttcggctgcggtggtactggctgactggacgggctcatcgacccgcttttttccccgggtctcccaacgaatgccgcttgatgtctactggcggcaggcaaacgcgcaggcagagcaggcagtgaatgtttttcctcctgctgcggcttttgcaccatttacgggaatagagacattgtttccttttatccagcatcctacgccgctccagaaggcggtgcttgagctggatatcagccagcctggaccgcagctgtttatccttgaagatgttaccggagcaggcaaaacggaggcggcgttaatcctgacccaccgcttgatgtctgccggaaaggcgcaggggctgtttttcggtctgccgacgatggcgacggccaatgcgatgtttgaccggctggcacaatcgtggcttgccttataccagtctgacgcgcgccccagcctggtgctggcgcacagcgctcgcgggttgatggagggctttaatcagcgtatctggcccggcgctgtctccggttcggaagagcctgatgacgaacagccattcagccagggctgcgcggcatggtttgccgacagcaataaaaaagcgcttctggccgaggtgggggtgggcacgcttgatcaggcgctgatggcagtcatgccctttaaacataacaacctgcggttgttgggactcgacaataaagtgctgctggccgatgagatccatgcctacgatgcctatatgtcgcggattctggaaagcctgattgagcaacaggcgcgcagcggcaactgcgttatcttgctttccgctacgctctcgcagcagcagcgcgataagttggttgcttcctttagtcgcggtagcggctgcgcgcttgcggcgccgcttctgggtgatgacgattatccctggctgacgcaggtggcggggcgagaggtgatctcccgctatgtcgccacccgcaaagaggtcgagcgcagcgtgaacatcggctggctggataacgaagaagcctgcctcacccgtatcgaacaatccgccagcgaaggccgctgtatcgcctggatacgcaattccattgacgacgccgtgcgtatctatcgccaactgctggcccgaggcgcgatccccgccgaaaaaatctcgttattccatagccgctttgccttttatgaccgtcagcgaattgagacggaaaccttatcgcacttcggaaaggacgacagcacgcagcgggcgggtagggtgctgattgccactcaggtcatagagcagagcctggatatcgatatggacgacatgatctctgatttagcgccgatcgacttgctgattcagcgcgcgggtcggcttcaacgccatatccgggatcgtcgcggtcggctgaaaatcggcggagaggacgagcgtgcggcgccacagttgctgatcctcgccccggagtgggatgaagcgccgcaagaagagtggctgaccagtgcgttgcgtaacagcgcttatgtctatcccgatcacggccgtctgtggctgacgcagcgcgttttgcgacagcagggggccattcggatgccacaatctgcccgattattgattgaatccgtctacggggaagatatcgctatttccgatggtttagccaaagccgagcaagcgcagttggcaaaatattactgcgatcgcgcgtttgctcaccaaatgctcctgaacttcaagccgggatatagccccgatagcagtgatttcctggctgacaagctctctactcgcctggcagaagagtcgatcacgctgtggctggcgaaaaacgtcgatggacagttgctgccttatgcctgcggcgcgcatccgtgggaaatgagcatgctgcgggtgcgggaaagctggtggcgtaaacacaaagctgaattcacgctcctggctgaaaagccgctacagcagtggtgtgtacaacagcatcaaaacccggatttcgccgtggtgattattgttacagactcgccggattgcggttattgtgttccccgcgccagcggggataaaccgcctcaatattgggatttactgattgaattgcggtgttccccgcgccagcggggataa

SEQ ID NO: 225053 - DNA, 264 bp, Klebsiella pneumoniae
atgagcatcgccacttatctcaataccggtttagccattcttggatgggcatacatcatggttaaaacaggccagtggattaccaaaaatgctctgaggcagtgggacaagcgtcgtaaggaatctcgccgccagaaagcagtgaatgagttttatgacgcctttgaacttaacagcctggaacccggatctaccgttcgcctggccactaaaggcgacctgacaatcatgatgtttcgcagtgagggaaagtcaaatgactga

SEQ ID NO: 225054 - DNA, 786 bp, Klebsiella pneumoniae
atggctaaagactcaaagcttgtatacggcgccaacggaaaaaccaacgttttgacgttcgaacctgaaaacctgcacctggttaccgacaaaacgcacccgctttacgatgagcgcatccaccttcctatcgacgaagggatggttctgaacatcaaagagctgggtgtactggaacctatcatcgtctggaaagaccctgaaactgggctcacctgcgtagttgtaggccgtcagcgcgtaaaacataccctggaggcaaataagcttcttttgaaagagggcaaagacccactgcttgttcctggggttgttaagcgcgggtcagcaaatcagatggctaaatacatggtcagcgaaaacgaaattcgccgacctgatacaccgcttggccgggctaaaaaaatgtcagacgcactcgaccgcgggctcgatgaggacgacattgcagtgttgtttggctgcagcgttcagaccgttcgtgcaacgctttcccttctcgatgccacccaggccgtcagggaagcggtggaggctggcacagttaccgttacccaggcgcgtcagctggcatcgcttaaacccgaagaacagcgggagaaggtagcggaaatcgagcaggcgaccgctggcacaaccggccatgaaaaagcccggcgtcaacgtcagatcctcggtgaggcaaagccgcgcctgaaaacccgcaaagaaatcacaaaagccctggaatctgccgagggtgattatgcgaacgcacttcgttgggtgcttggggaggcgcaatga

SEQ ID NO: 225055 - DNA, 1155 bp, Klebsiella pneumoniae
atggaaaacttcaaagtacgtcttaaaaatcacattgaacatgttaaaaaagttagagaacactgcacaacggaagagacaaccaagcaggctttgatacttcctttcttggacatcctaggctttaacgcatatgatccgcaaaaagtcaaagctgaatatggtgcggacttccctggtgtgaaagtgggtgagcgtgtagattatgctctattctgccaaggtgttcccgttatgtttattgaggccaaaggttgtaaagaaaaaatggacaaccattgccctcaattatctaggtattttaattctactcctgaggtgacaatatcagcaattactaatggcattgaatggcgtttttttacggatctcaatgagaaaaacataatggattcaacgccatttttacgaatcatgatggatgacattaaagattctgatgctgagcaattatttagattccggcatgacaaattcaaaccagaggccttaagaacacttgcagaagagagtgtatatatttctgcatttgttaaagttgtgagtacaagccttcgggaagtagatcatgaatttgttagatatgttgcaggacgagcaaacattggtcgtcaattaaatcaaagatttatagaaacaataactccattggtgaggcaggccgtagagaggtcagtaagtgaaatggttgtttctggtctttcatcaagaacatctattcctgaattagaatcccctgctgatgtaactgaaaataatgtaattgatgagcgcgcagatattgtcgatgcagagaatcccaacatagtaacaacctataatgaaagaattttatttgaaaaaatctgttctattataggtcctgcatacgaacttcaagccaaagacacagagtcatattactctattcttttccaaggaaaaacaaaccgctggctggttcgctattatgacaagaagaaccgctcaaacatacagttaccaattgatatcaatgaaataacaggtaatgaaattaaaagagccggacttgaacatgataacaatcgtattttcattgaacatcccgaggatgtattaaggatttcaggtttaatccttgattctttacaatatgtacagaatgatgagaatttcagaaagcgtcgtccataa

SEQ ID NO: 225056 - DNA, 477 bp, Klebsiella pneumoniae; identical to SEQ ID NO: 199041

SEQ ID NO: 225057 - DNA, 540 bp, Klebsiella pneumoniae
atgacagcagatcagattatcgagaggatcctcggcaaggagggtggttatgtcgatcatccgtcggataaaggcgggccgacccgctggggcatcacgcagaccaccgcgcgtgcacatggctacaccggtgatatgcggaacctgcccagggaaacagcaaagcaaatcctgctgagcgattactggaccggcccccggtttgaccaggtggcagctctatctacgttactggcagatgagctttgcgacactggcgtgaacatggggccatctgtagccagtaagtttttccagcgctggctgaccgcaatgaatatgcgcggaaagctgtatcccgatctgattccggatggtgccattggtccccgaaccatcaccgcgcttaagggatacctttccgcccgcgggaaagagggtgaacaggttctgttgcgtgcgctgaactgcagccagggtgccagatacctcgaactggcggagggccgcgaagccaacgaggattttctctacggctgggttaaggagcgtgtcctgtga

SEQ ID NO: 225058 - DNA, 345 bp, Klebsiella pneumoniae
gtgaagatgatcattttcgctttgcttgtgctggtggctgtgctcgttctgttacttctgcgcaaatatacccggctggagttcgtagggcatgccagcttgctgctgaaaacgtggtctgtaaagctgggagctatcggcgcgctggttggtgtatgggcgcagtcgttcccggatgctgcgctgcacgcctgggcggtgctgccgccggatatcaaaaacatcctgccgccaaacatcgttgcgttgattagccctgcgctggtggtgctggccgtactatctcaatacgtacgccagccagcattgaaagaaaaggccgacgaactgaaggagcagcaatga

SEQ ID NO: 225059 - DNA, 198 bp, Klebsiella pneumoniae
atgaacgagcaactggtaaacgcgctgatagcagcgctgagagaacaaacagcagcacagcgagagcagacggaagcgataaaccggctggctgagtctaacgtcgccctgtccgatgtgattatccagtcgcttgccggcgatctcgaagaggcgccagagcagcaaacctatctgagtgggaaaccaaggggatga

SEQ ID NO: 225060 - DNA, 480 bp, Klebsiella pneumoniae
atggcaatcaccacgacactttactaccccgctgatgttctccctgggccgttgaaagacggctttggaatgaagccgaaatccccggtaaaaatcaccgagctcgtaacggggcgtaaaagaatacggcgtggctatacctctgttcctacggaaacagacgtagcctggatttttactgacgcgcaggcccaggcttttgaggcatggtaccgggatgttcttaaagacggcagcgcctggtttaacatgccgctactgacgccagtggggcaaaaaaattacgtttgcaggtttaacgatatttatgaggggcctacgcctgaaggaggcttgtactggcggtattcagcatcccttgagttatgggaacggccgctgccggcggttggctggggagaatatccggagtggattgtggggagttcgttactcgatatagctctaaacagggagtggcctaagcatgacagcgattaa

SEQ ID NO: 225061 - DNA, 483 bp, Klebsiella pneumoniae
atgacagcgattaaccgcctttatgcgtcctccgggtcggaggtcatcattggtacgttgcagatcgatattggcggccagacgcattatctgtgtgaggggtacgaggacattacggcggttaccgagaggggcgaaaccgtaacgtttattgcctgtgccattgtcctatcccttcctgccagaaacgaagacgggacgcaggacctgaagtttatgctgtgcaacatagacggcgttgtatccacggctattcgcaaggtcattgatgccatatccactgccagcatcacattcaggaaatacatttccactgaccttaccgcgccagcggagccgccttacgtcatgccggttaaaggaggctcctggacaccgctgactgtaaacgtcactgctggttttaaaaatatgctcgattatgcctggccacgtgacaggtacacgttgacgtacttccagggtcttcgttacacacgatag

SEQ ID NO: 225062 - DNA, 1956 bp, Klebsiella pneumoniae
atggccgaacttaacccgccgctgggcacgacgacgcctgaaattttcctggaaaacgttaagcgcgtagaacgattagtgaacggcccggcggccaccgtccccgatcgcggcggcgacccgctggactcctggcgcctgattatggcaaaggtcgcggatgtcctggccgcgtatcaggaaaatggcggtgtgctggtgttcgctgatgaacagacgctgctggcctatacgccggataaaccgaacgtgctggctctggatagcgcgactggcgcttactggttctgggacgggacggcatggacgagaaacagataccagttcggtgatattgcggagggtattcagcggctactcctcgcgaaccatacactcacggttgccatgaatgaaatggataatggaaatgttatcctgcgtgaaattattcaacagcaacatgtttcgcagcagttactttcgtgcgcagtgaatgaggtgagcggcctgcctgacaccgtaccggtcatgcaactggatgcgctgatgacaatctccaccctggggggcgctcttgcggcacttgatgggtttgatcccggggaaggagacgggaccggagaccagcaacgtcttctcaacaatctttatagcctgtccatgctgggcggggcactggtaccgctggatggtttcgatcctgatgcgatttctgttgaggcccgcgaaacgtacagcgagcagtacacgttcccgaagccgggcaatattattaaactatttgtcacgtcgccatccggtattccggcctctaaaggcgagggcgaatattacaccaccgccactattgatattgatggtgaaatactgaatatcccgtattcatccatttccgtgcagggggattcgtccgccgcctacgcgaaaaaaaatctcaatatcgggttatatattgacgacaaatacgatgatttatttacgctaaaaattggcgactgcctgccgcacgatgaatgggtgtttaaggccaactggattgaccacacaaacctacgcaacctgatgagttatcatctgtgggaacgaatgatggcatcccgcgacggctggccgaaacgagatatcgataattattacgtcggtaaaaccggactggatgaaatggatacgcgggcaacgggataccctgtcggctatccctgcgtcatgtatatcaatggtgatttctacggcaccggcgcgctggctatcggcaaaaagaaagaaaattataatattccgaaaaataaagccgaacagataatgattatcatggggggatggaagtccatcacgaccatgtacgataacgctcaggttaccgatacggataccatagaaatcaaagcgccgaaaactgtttcagaggagacgctgggctatctgcaggactgggacgcctttgcgaacctggcacaagccgattttacggaacaggcaccggcgcatctcgatacccgcaatattgttgatttttatttgttgctggccgccatcggtgcgacagacctctttgccggcgataaggccaaaaacgcgattttttatacctgggacgggacaaagtggtatttcgggccgtatgacctcgataccacttacgggttgcattacaacggcacgcagattagttatgccgctgattcagcaccgaaaaccgacggcggtacgttctggaaaaaaatactggtcacgtatgctgacgagctggccgcccgttacgccgaactccgcgataaagatattttcagcgtgaattgcctctatgacattgccgccggactgtccgcgaaatatacccacgaactggataaagcggaaatcaataaatggccgactaaaccgtcgctaaccgtcacgagtcgcgatcagatattcagctggtttaacgaccgtctggcgtatctcgacaataaatttaattacacccgataa

SEQ ID NO: 225063 - DNA, 1122 bp, Klebsiella pneumoniae
atgacgacgattttaattaaagatgcgctccgccagtcggtggaggccgccagcggcgggttacagacggtgctttatacggcaaaaggccagccgtcgtttatgaatattattgagaaattcgacctgtcggttattgacccgaccctgagcgggacacatccggcatttattatcaatggcgtcgaagtgagccggattttggtcggcacctacacggcgtcgttaatcaacggcgagctgctgtctctgcctaaccgtcagccgtcaacccccgcgctggcggcggcggtaaccgcagcgcgcgcgggtggggatggttttcacgtcatgaccaatgcggagtggtctgcggttcagatgcagtgttacgcgctgggattcaaccctaaaggaaataactattacgggcgggatgcaaccgacagcacgcaatacggccgccgggtggatggggtgagcgccacagccggtatcacaaccggcacgccggtgatttacacaggctcaggcccggtgtcattccggcacaataacgcgtacaacggtatcagcgatgtgaacggaaactacaacctgctgacaccagatgtccgtctgtgcggtgccaccggtgagctgcatatttttgcaaacaataacgctgctgcggggggggctgacctgtccgtctcttctgcgggctggaaggcaatcaatgccacaaccggcgagttaatggacctttcatacaccggtaccccaggcgtggattttgtttcgaatctggcgaacagcgtgaagatactcaatgcatcagcggtgggtaataactacacgctcaccgccactgacggcgctgcgttttcatccatggccaatgctggcgcgatcccggtttcggcaacggcgttggcggtactgaaaaagtacggcctttatccgctggtagccaatgccgccacgctgggcggcgacaaaattgtgatttccgccaccactgcaacggctgcgaccgagcgcatgttgcgccgccagggttcctatacggatggcgcactcgccggtgtctggatggctggttttaacggtgttcgtgctgcgagcggagtatcggcgtttcgtgtggcgtattacgcataa

SEQ ID NO: 225064 - DNA, 246 bp, Klebsiella pneumoniae
atgagcctgattattgtcagcaatgatttatcggaagaagtacacctggtgacggtggagaacggcgcggccacggccacggagcgactgagcggggccagcgtatcagcggaggaaatggaaaccctgtttcccggattcgccgacgcaattaccgcggcccaggatactgccgaactactggggacgctgggatcactgaatgagagttttatctgggcgcaggtgtccggcgccctgcggtaa

SEQ ID NO: 225065 - DNA, 669 bp, Klebsiella pneumoniae; identical to SEQ ID NO: 138480

SEQ ID NO: 225066 - DNA, 5259 bp, Klebsiella pneumoniae
atgcttagtttcagccaggttaaatcagctggcagtgccggtaattactatacggacaaggataattactacgttatcgggagtatggacgagcgctggcagggtaaaggcgcggaagcgcttggtcttgaaggaaaggtagacaagcaggtcttcacggagcttctgcagggaaaactacctgatggcagcgacctgacccggatacaggatggcgtgaataagcaccggcccggttacgacctgaccttctcggcaccgaaaagtgtatcgatgctggctatgctgggcggcgataagcgtcttatcgatgctcataatcgcgcggtgacagtagctcttaaccaggtggagtcccttgcctccacacgggtaaagagagatggcgtttctgaaacggtcctgaccgggaatctgattattgcccgctttaaccacgatacatcgcgcgctcaggacccacagatacacacgcacagcgtggttatcaatgcgacacagaacggcgataaatggcagacgctggccagcgataccgtcggtaaaaccgggttttccgaaaacatactggccaaccgcatcgctttgggaaagatataccagaactctctcagggccgatgttgagtctatgggttacaagacagtggatgcgggtaagaatggcatgtgggagatggagggcgtgccggttgagtcgttttccacgcgcagtcaggagctccgggaggctgcaggacccgatgcctccctgaagtcccgggatgtggccgcgctcgatacccgcaagtcgaaagaagccatcgatccggcagagaagatggtggagtggatgaacacgctgaaggagaccgggtttgacatccgggggtaccgtgaggccgccgatgcgcgagccgcagagctggcacgtgcacctgccgcgccggtgaacactgacggtccggatatcacggatgtggtgacgaaagcgattgccggtctcagcgaccgcaaggtgcagttcacgtatgccgacctgctggcacgcacggtcggccagctggaggcgaaggacggtgtgtttgagctggccagagccggtatcgatgccgccattgaacgggagcagcctatccctctcgatcgcgagaaaggcctgttcacctcaaatatccacgttctcgatgaactcgccgtcaaagccctgagtcaggaggtgcagcgccagaatcatgtctccgtcacgcccgatgcgtctgtggtgcgccaggtccctttcagcgatgccgtcagcgtgctggcgcaggatcgcccggtcatgggtatcgtttccggtcagggcggtgcaaccggccagcgggagcgggtggccgagttaaccctgatggcccgggagcaggggcgtgacgtccatatcctggcggccgataaccgctcacgtgattttctcgccggtgatgtgcgtctggccggggaaacggtgaccggtaaatccgccctgcaggacgggacggcgtttattccgggcggaacactcatcgtggatcaggcggagaagctgagcctgaaggaaacgatttccctgctcgatggcgcgatgcgccataacgtgcaggtcctgctctcagacagcgggaagcgcagcgggaccggcagtgcgctgacggtgctgaaggacagcggcgtgaatacgtatcgctggcaggggggccaacagaccacagccgacatcatcagtgaaccggataaaggagcacgctacagccggctggcacaggagtttgccgtcagcgtacgtgaagggcaggaaagcgtggcccaaatcagcgggacgcgtgaacagagcgtactcaacggccttatccgtgactccctcagacaggagggggtgctgggtgagaaagacacgaccattacagccctgacgccggtgtggctggacagtaaaagccggggcgtgcgggattattaccgggaggggatggtgatggaaagctgggatccggagacccggacgcacgatcgctttgtcattgaccgggtgaccgcgagcagcaatatgctgaccctgaaagaccgggaagggggccgtctggatctgaaggtttccgcggtcgacagccagtggacgctgttccgggcagagacactgccggtggccgagggggaacgtctggcggtgctcgggaagataccggacacacgcctgaagggcggggaaagcatcacggtgatgaaagtggaggacgggcaactgacggtacagcgtccggggcagaaaaccacgcagaccctggccgtgggcgcgggcgtgtttgacgggattaaaatcggccacggctgggtggaaagtcccggcaggtcggttagcgagacggcaacggtctttgcgtcggtgacgcagcgtgagctggataacgccaccctcaaccagctggcgcagagcggaagtcatctccgtctgtactcggcgcaggatgcggctcgcacgacggagaagctgtcgcggcataccgccttcagcgtggtctcagagcagctgaagacccgatccggcgagacggacctggatgcggccattgcgcagcagaaggccggactgcgtaccccggcagaacaggccattcacctggccatcccgctgcttgaaagtgagaaactgaccttctcccggccccagctgctggcgacggcgctggaaaccgggggcgggaaggtttcgatggcggacatcgacacgaccatccaggcacaaatctggtcggggcagttgctgaatgtaccggtggcgcacggctacggcaatgacctgctgatttcccgtcagacctgggacgccgaaaaaagcatcctgacccacgtgctggaaggtaaagacgcggtggcccccctgatggaccgtgtgccggccagtctgatgacggacctgaccgccggacagcgggcggcgacccggatgattctggaaagcacggatcggttcacggtggttcaggggtatgccggggtggggaaaaccacccagttccgggcagtcatgagtgccatcagtctgctgccggaagagacccgtccgcgcgtcatcggtctggcgccgacgcatcgcgcggtcggggaaatgcagagtgccggcgtggatgcgcgcacgacggcgtcgttcctccacgacacgcagctgctgcagcgcaatggccagacacccgatttcagcaacaccctgttcctgctcgacgagagctcaatggtggggctggccgatatggcaaaagcccactccctcatcgtcgctggcggtggacgggcggtgtccagtggggataacgaccagctgcagcccatcgcgccgggccagccgttcaggctgatgcagcagcgcagcgccgccgacattgccatcatgaaagagattgtgcgccaggtacctgagctgcgaccggcggtctacagcctgattgagcgggatgtgcaccgcgccctgaccaccattgagcaggtcacgccggagcaggtgccgagaaaagaaggcgcctgggcgccgggcagttctgtggtggaattcacacagaagcaggaaaaggagataaaaaaggcactgagcgaggggaaaaccctgccggaaggtcagcccgcgacgctctacgaggcgctggtgaaggactataccggacggaccccggaggcacagtcgcagacgctggtgatcacccatctgaataaggaccggcgggcgctgaacagtctgatccatgacgcaaggcgggagaacggggaaaccggcaaagaggaaatcaccctgccggtgctggtcacgagtaacatccgtgacggtgaactgcgcaaactgtcgacctggacggctcacaaggaggcggtggcgctggttgataacgtataccaccgtatcagcaaagtggataaggataatcagctgatcaccctgacagacagtgaaggaaaggagcgatttatctcaccccgggaggcatcggcagaaggcgtcacgctctatcgtcaggaaaagatcaccgtgtctcagggggaccgaatgcgcttcagcaaaagtgacccggagcgcggctatgtggccaacagtatctgggaagtgcagtctgtttcgggtgacagtgtcacgctttctgatggcaaaatcacccgtacgctgaccccgaaggcggagcaggcacagcagcatatcgacctcgcctacgccatcaccgcccacggcgcccagggggccagcgaaccgtatgccatcgcgctggaaggggtggccggtggtcgggaacagatggccagctttgagtctgcctatgtggctttatcccgcatgaaacagcatgttcaggtctacaccgacaaccgtgagggctggataaaggccatcaagaattcacctgagaaagcgacggcgcacgatattcttgaaccccgtaacgaccgggcggtgaaaacagccgatctgctgttcgggcgggcaaggccactggatgaaaccgccgcgggccgggcagccctgcagcagtccggtctggcacagggaagttcaccgggaaaattcatttctccggggaaaaagtaccctcagccgcatgtggcgctgccggcatttgataaaaacgggaaagccgccggtatctggctcagcccgctgaccgatcgggacggacggctggaggctatcggcggagagggacgaattatgggcaatgaagacgcccggttcgtggcgctgcagaacagccgcaacggagaaagcctgctggccgggaatatgggggagggggtcagaatggcccgcgacaatcccgatacgggggtggtggtgcggctggccggtgatgaccgcccctggaaccccggggccatgaccggtgggcgggtatgggctgaacctgcgccggtggctccggtaccgcaggccggggctgacattatcctcccgccagaggtactggcacagcgggcggctgaagaacagcagcgccgggaaatggaaaaacaggcggaacagactgcccgggaagtggccggggaggcgcgtaaagccggcgagccggcggaccgggtgaaagaggttatcggggacgtcattcgcggactggagcgtgaccggccgggtacggagaaaacgacgctaccggatgatcctcagttccggcgccaggaggcggcgattcagcaggtggcctcagaacgtctgcagcgtgagcgtctgcaggctgtggagcgtgacatggttcgtgaccttaaccgcgagaaaaccctcgggggcgactga

SEQ ID NO: 225067 - DNA, 594 bp, Klebsiella pneumoniae
atgagtgaagaaaaacgccctgtactgagcctgaaacgaaaaccggcggagaacagcacggccccctcagaggcaacccctgctcctggtgtggtgcgccgaaagaaggtcgtggtggtctcgtccccgccggcctggaaggcaaagaaagcgaaacttgagaaggctaaacaagcggccgaagccgacgcgcgcaacgctgcgccggcgccggataaagcggtaaagacgccacctccggtgcgttatcttcgcctgctgccgccggaacaggccatcatgaccctgaaggcattctggccacagctgttcgacggaaactcaccccgtctgctggcgacgggaatgcgcgagcagctgtttgccgacattgtgaaccgcgacctgccgctgtcgcataaacaggtcattaagtgcctgaagagtctgacccggtctgcgggctatctgtcccggatgaaggtgggggcctcccgctatgatctgcaggggaatgccgttgcgaccgtcactgcagaggaagcgcagtacgccagtgagcgcatgatgaaggagctgctgcgggctgaacgaaagatgagtcagaccctttaa

SEQ ID NO: 225068 - DNA, 645 bp, Klebsiella pneumoniae
atgttcagatatttcattctgcgccctgagcagcagttattctgttatttatacggctgcgcgctggcactggttcagatggttttattttctcctgtatcccgggcaagcggattttatctggttgcgttatctgtcgcgctgttctgggccggtctggccctgtacacccggcacatcgaccggatgagaaagccagaggtctcaccgctggtcagtattcgcgacggtattcaggtggtggccgaggtgccgcgccatgaaaaggcccggctggaatgggaaatcctccgggatgatgaggtgtttcgccagcaaaggtgtcagcttacaggcctgaccggacgggttatcagccgggggctgttgtatacgccggcggtgatgctggtcggtatcggtattctcgcctggggttccccacaggatgccatccggctgattaatgctcttcgtaatatgcctgctgcggaactggtgcatcagattggttttgtcctgtgccacttcctgcagattagcgtcatatcagttctgattgctgatgttgtagccgggagaggactgccgaatgtatttcgccgcgcgttgctcgacaggctgccggcagagttctgccttatcagaagagggacagaaagatga

SEQ ID NO: 225069 - DNA, 804 bp, Klebsiella pneumoniae
atgtgtcgggtccttaaggttacccgtgccggattttatgtctggctccataaccctgtatctgccggagaaaaggataaccagcgactgctggaactcatccgcgactcctatacgctgagtggtggagtttacggttatcgcagggttcatggcgatcttcgcgaaattggcgaagtgtgcagcagaaaccgggttgccaaaatcatgaggaaaaacaggattcaggctatacatggttataaagtgccacgcgggagccggggacgaccgtcactgatagcgcctaatcacgtgcggcgtgaatttactgtagtgaagcccaatcaggtgtgggtcaccgacatcacctacatccgcacctggcagggctggctgtacctggcagtggttatcgatctttttgcccgtaatgtggtgggctggtcgatgaagccgacactgtcgcgcgagctggcactggatgcgctgctgatggcggtctggcgacgtaaacctgaagaaaacgtcattgtgcacagcgatcagggcagtcagtatggcagtgatgactggcagcggttctgccgggccaataatctggtaccgatcatgagccgtcgcggcaactgctgggataatgcagtggcagaatcgttcttcagttcactcaaaaaagagcgcatcaggaagcggatatacaaaacccgggacatggcccgggcggatattttcgattacattgaagtgttctacaaccgtaaccgacgccacagccacctcggcggcgtcagcccggaggccttcgaaaaggcctcgcagtga

SEQ ID NO: 225070 - DNA, 285 bp, Klebsiella pneumoniae
atgggcacaccacgttttacccctgaatttaaggaagaggccgtccgccagatcaccgagcggggctattctattgctgaagtatctgaacggctcggcgtgtcggcgcacagcctatataaatggctccgggctgttaagcctgacaacagtggacagcaggcacaggatttactggatgccagaacagaaattctcaggctgaaagcacagcttaaacgcactgaggaagagcgggatattctgaaaaaggcagcgcggtactttgcaagggagcccgactga

SEQ ID NO: 225071 - DNA, 981 bp, Klebsiella pneumoniae
atgagccatcaactcaccttcgccgatagtgaattcagcactaagcgccgtcagacccgaaaagagattttcctctcccgcatggagcagattctgccatggcagaatatgaccgctgtcatcgagccgttttatcccaaggcgggcaatggccgacggccctatccgctggagaccatgctgcgtattcactgcatgcagcattggtacaacctgagcgacggtgccatggaagatgccctgtacgaaatcgcctccatgcgcctgtttgcccgattatccctggatagcgccctgccggatcgcaccaccatcatgaatttccgccacctgctcgagcagcatcaactggcccgtcaattgttcaagaccatcaatcgctggctggccgaagcaggcgtcatgatgacccaaggcactttggtggatgccaccatcattgaggcacccagctctaccaagaacaaagagcagcaacgcgatccggagatgcatcagaccaagaaaggcaatcagtggcactttggcatgaaggcccacattggtgtcgatgccaagagtggcctgacccacagcctagtcaccaccgcggccaacgagcatgacctcaatcagctgggtaatctgcttcatggagaggagcaatttgtctcagccgatgccggctaccaaggagcgccacagcgcgaggagctggccgaggtggatgtggactggctgatcgccgagcgtcccggcaaggtaaaaaccttgaagcagcatccgcgcaagaacaaaacggccatcaacatcgaatatatgaaagccagcatccgtgccaaggtggagcacccgtttcgcatcatcaagcggcagttcggcttcgtgaaagccagatacagggggctgctgaaaaacgataaccaactggcgatgttattcaccccggccaacctgtttcgggtggaccaaatgatacgtcagtgggagagatctcagtaa

SEQ ID NO: 225072 - DNA, 390 bp, Klebsiella pneumoniae
atgccattgctgacattcgacatcaatgagggacgttctgctacggaaatcagaacaatgctggacgctgcacatcgggctgtgctcaccgcgtttaacgttcccgaacgtgaccgttatcagattgttcacgaaaataaaaattaccagatggtgttccaggataccgggctggggtttgaacgcagcgaccgtctggtgatggtccgggtgtttaccagcccgagaagtgaagagcaaaaaacgcgtttcatggcggaactggcacgggaactggcagaacactgtggggtggaagggaaagatttgatgatcagctttattaccaatgcgccgggtgactggagctttgcggatggtgaagcacagtatctgaccggaaagctgtaa

SEQ ID NO: 225073 - DNA, 1008 bp, Klebsiella pneumoniae
atgctaatcccacaaccctatttactttttcttggcgatgttaccgatcccctcgcggcaaaaacggcgcgcggtattcatatctggcgaccggaacagtgcgttggcgaaattaaactgccgggctgtacggtcagcctggggctggatgaacttgatatcgccagcgccaaagcgcgcggcgcgaaaacgctggtgctgggcaccgccaacgcagggggatatctgcccgaacactggctggatacggtgaaaagtgccatcaaagccggcatgaacgtggccagcggattacatcatcgtctggtagatgggcccgagctggtcacgctggcagagacgtttggtgttgcgcttttcgatttacgtcatatgcgtccgaagctgagtgttggcagcggtaagaagcgttcaggcaagcggatactcacggtggggaccgactgctcagtgggcaagatgtacacctcactggcgctggaagcggcaatgcgtgcgcgcggaatgaaagcggattttcgtgccacgggacagaccgggattctggttgcaggggaaggcattgctgtggatgcggtaatcgcggactttattgccggtgcggcagaagccctgtctcctgccaacgatgatgatcactgggatatcgtggaagggcagggatcgttgttccatccctcttacgcgggcgtcagtatggggcttatgcacggtgcgcaaccacactggttggtgatgtgccatgaaatgggccgtccgcatatgcgccatttgccgcatcaaccgatggttagcctgaaagactgcgtggaagccaatctgcgcgccgcccgggtgaccagtgagtccgttcaactggctggctttgcgattaacacctcaaactacacggaagaagacgcgcgcgcctattgtgctgaaatctgtgccgaattcggtttaccggcaaccgatccggtgcgttttggtatcgatgacatcgccgcgctgcttcaggagcggggctga

SEQ ID NO: 225074 - DNA, 966 bp, Klebsiella pneumoniae
atgagacaggtgcagatcaacgtggtggaactgccgctggcgcgaccgtttgctatctcgcgcggtgtgcgtaccgccgtgacggttatccgcgtcacgcttgagcaaaacggctttattgggcagggcgaatgtacaccaacggcgcgctacgatgaaacgccagacagcgttcaggcccagcttgaggcggtacgtgctgacgtggaagcaggcctgagccgcgatgatctgcaacaccgtttgcccgccggttccgcgcgcaatgttctggactgcgcactgtggcgacttgacgccgcacgggccagtcaaacgctctggcaacaaagtgcatgcccgccgccacgctcggtcgtcacggcggaaaccctcagcctcgatacgctggaaaacatggcgctggcggcggcggatgccgtctcgcggggtgccatcctgctcaaaatcaagcttgaccgcgatgcggttctggaaaaagtggcggcgattcgtgcggcggccccgcgtgcgacgctcattatcgatgccaatgaagcctggtcgggaatggatctggaaagcctgctggtggcgcttcaggcctttaacatcgcgatggtcgagcaaccgcttcccgctggtcaggatcatgacctgcaacgcttccgtcatcctgttcccgtctgtgcggacgagagttgccacacgcgagaggacattgccagcctgcgtcatcgctacgagatgatcaacatcaagctggataagtgcggaggtctgacggaagcgctggcgatggtcgatgaagcgcacaagcagaacatgcgcatcatggtcggctgcatgctgggttcatccctggcgatggaagcggcattgcccgtggcggtgcacgcagagcacgtcgatttagatggcccgatctggctggcggctgacagctctccttttttgaattactccgatggccgtatctggctgtaa

SEQ ID NO: 225075 - DNA, 1866 bp, Klebsiella pneumoniae
atgacggacacacgactcacttcttctgccacacgtgctgacggtgcatcaccggtgcttgctgttcagaaccttagcgtctcatttcgtggacgcagtggtgagaatcaggcgctaaaaggcatcagtttcgccatttatccaggcgaaattgtcgccgtggtgggcgagagcggctcaggtaaatcagtcacgtcgctggccgtgatgggcttgctggcgagcagcggccgtatcgatcgcggcagcatgcagtttcgcgatcgccgcggagaagttcatgcgttagaaacgctggatgacagtcagcgccgcacgttgcgtggccgtgaaatggcgatgatctttcaggagccgatgacctcactgaatccggtgctgcgtatcgatgatcaactcaccgaagcgttacgcgaccatcatcagtgcgacaagaaacaggctcatgcgcgcgtacgtgaactgctgcgacaggtacgtattgccgatgtcgatcgcgtcatgaaaagctatccgcacgcgctgtccggcggaatgcgccagcgcgtgatgattgctcaggcgctggcctgtgatccgcaactcctgattgccgacgaacccacgacggcgctggacgtcaccgtacaggcgcgcattttacatatcctgcgtgagttgcaacgcgagaagaacatggcggtgttgtttatcacccatgatatgggcgttgtggcggaaattgcggatcgtgttgtggtcatgctgcgtggcgaagtggtcgagcagggcaccgtgtcagagatttttgccgccccgcagcatgcatataccaaagcgttgctggcagccgtgccaaaactgggcgacatgcgcgaatacgcgtggccgcaacgctttcctctgttgggtgcacaacaggtggcgcaacacgaacagctgacggcgcgctacgacagcgaaccgctactcgatgtacgtgggttaaaagtgtattaccccatccgcagcggcatcttctcgacccatacgcatcatgtgcatgcggttgagcagattgatttcagtctgtggccgggtgaaaccctggccatcgtgggtgaaagcggctgcggtaaatcgaccaccgggcgtgcgctgatgcgcctgatcgccagtgaggcggaaagcatccactttgaaggaaaggaaatctctcatctgaaagagacggcattccagccgctgcgccgtgaaattcagatggtgtttcaggacccctatgcgtcactgaatccacgtctgacggtggggtttaccattgccgagccgttgctgttgcatggcatggtggactcactggaacaggcttctccacacattgatgcgctgctgacaagcgtcgggctgttgccggagcacgcgcgccgttatccgcacgaattttcgggcggtcagcgccagcgtattgccattgcccgcgcgatggccctgaaaccgaaagtgattattgctgatgaagccgtatcggcccttgacgtttcaattcaggcgcaggtggtgaatctgatgatggatctccagcagcaaacgggcgtagcctggatattcatctctcatgatatggcggtcgtcgagcgcattgccaaccgcgtggcggtgatgtacctcggccagattgtcgagctcggaccgcgccagtcggtctttaatcaaccgcaacatccttatacccaacgtctgctggcctccgtgccggtggcagatcccgagaaccgtcagcctcgccgttttgatgacagcgaaatcccttcgccgttgcgaaaggtgggcgaaacggtcacgaaaccccgttatcggcaggttgcaccgcaacactgggtcgctgacggcattgcattgcgataa

SEQ ID NO: 225076 - DNA, 1542 bp, Klebsiella pneumoniae
atgaaaacgctgttccgccgtacttcactcgccctcgccttaacgacgacactggtcatgaccgcgcaggcacaggatctgcgcatttcaatgtatgccgatattacggggctcgatccgcacgatacctcggataatgtcagctactcggtgcaaagcggtatctttgagcgcctgtttcagtttgatccccagatgaagctggagccctggctggcgaccggttacacctccaacgacagtgcgacggaatttacgctgacgctgcgtaaaggcgttaccttccaggacggtacgccttttgatgcggaagcggtcaaagcgaaccttgatcgtctggctgaccagaaaaaagggctgaagcgcaacagcctgtacaaaatgatcgataaggtgacggtgctggcacccgatcaggtgaaaatctcactcaatcagtcatttggtgcttttattaacacgctggcgcacccttcggcggtgatgtggagcccgtcggttctgaaacagtatccggacgaggcccagttgcggctgcatccggtggggaccggaccatttaaattcgtaaactggacaccgggcaaagcggtcacgctggcgaagtatgacggttactggcggcagggctggcccaaagtcgatcaggtgatcttctcacccagtccggaagatgcgacacgggttgccgcgttgaaatcgggtcaggtggatgccatttggcctttgccttcggatctgatcgcggcggtgaagcaggacagcaacctcgcgattcagcgcgatccgagcatctatctctattacatggcgatcaatacgcagcataagccactggccgatgtccgcgtgcgccaggcaatcaactatgcgattgaccgtaatctgtggttgaaggtggcctttgccggtttgggtaaaccggccacctccgcgatgccggaaggggtgcagttctatgagaagcagagcgatcccgattaccactatgcgccggataaggccaaagcgttgctgaaagcggcgggctacccgaatgggctggatctcaagctctgggtcaccaatgcgaccgccagcgtgcgcgccgcccaggtgctgaaggcgcaactggccacggtgggtattcgcgccacggtgacaccgatggattccggaacgcgcaacgcgaagctgtggggcgttcaggacccgaaaaaagccgaatttgacctctattatggcggctggtcgacgtctacaggcgatgccgactgggctctgcgtccgctgttcgccaccgaatcctgggtacctacctcgtacaatgtctcctatttcagcaatcctgatgtcgacaaggcgattgctgccgggctggcgacggccgatccggcaaaacgtggtatcgcctatgcacaagcgcaaaagctgttgtggaaagaggcccccgtggcgttccttggcacgccagacaatctggtaggcaaacgcagcaccctgagcggcgtttcgatgctgcctgatggcaatctgttgtttactcaggcgtcgtttaaataa

SEQ ID NO: 225077 - DNA, 933 bp, Klebsiella pneumoniae; identical to SEQ ID NO: 150540

SEQ ID NO: 225078 - DNA, 885 bp, Klebsiella pneumoniae
atgagtcatcaatcgctgactgataacccgcctcaggttattcgctcgccgtggcgcgatttcctgcatgcttttgtgcgcaatcctctggcgctggtttctggcggatttgtcctgctgctgattctggtggcgatctttgcgccctggctggctccctgggatccgatggcacccgactggatggcgttatcctcgcccccttcggcagcacactggatgggcaccgatgaactggggcgcgacctgctcagccgtattatctatggggcgcgtatttcgctgtatgtcggcgtgctgtccgtgacgctcggcatgattgtcggcgtcgtgctggggttgctggcgggctattacggtagctgggtcgatatgctgatcatgcgcggtgctgatgtgttattcgcgtttcccggcatgctgctggccattgcggtggtggcgcttctgggaacgggcctgaacaatgtcatcatcgccgtcgcggtgttcagcgtgcccgtctttgcccggattgttcgcgcctccacgctgtcattgagacaggctgcctatgtggaagccgtgcgctgtgccggtgcacccgaccgaatcattatcctgcgccatattctgccgggcacgctttccagcgtcattgtttattttacgatgcgcattggcaccagtattctcacagcggcaggcttaagctttattggcctcggaccggagccggatgtgcctgaatggggcaatattctggccatgagccggagcatgatgatggcgggcgcgtggcacatgagcgtgtttccggggctggcgatttttatcacggtgctggcgtttaacctgctcggcgacgcgctgcgtgacacgctcgacccgaaacttaagggctga

SEQ ID NO: 225079 - DNA, 1044 bp, Klebsiella pneumoniae; identical to SEQ ID NO: 150538

SEQ ID NO: 225080 - DNA, 822 bp, Klebsiella pneumoniae
atgaaaatttttatttctgccgatattgaaggtatcgcgggcgttatgcgtccggagcaatgcacacccggcaacccggaatatcagttggcccgtggtctgatggaacaggaagtgaatgccgcgattgagggggcgttcgcgggaggcgcaacggaggtggtcgttgcagacagccatgcgcaaatgaccaacctgcgggcagaaaatcttgatccccgcgcccggctggtgcagggcaaaccgcgcggcttgtcgatggttgaaggcatagaacagcagacgttcgacggattatttctggtgggctatcacagcgcagcaggcgaacccggcgtactggcgcacaccattaatggccgtgcattctggcgtatccatatcaatggcctggtgatgggcgaaaccgatatttacgccgctgccgccgctgagcagggcacgccactgtggctggtcacgggcgacgatcagctgcagagctggatagcagagtattacccaacggttgactacgtttgtgtcaaacgcgccatttcccatacctgcgcagaatccattagtcccaaagcggcacaacgtgccataggcagtgctgcacgcgccgcgcttgagcatcagcgcgatacgcgcacgacccggttgaccgcgccttatcatatgcagcttcaggccagtaaacccgtgttggccgatctgttcagcctgatccccggcgtcacgcgcatcgatgcggttaccgtgggatatcaggcagagcggatggagacgttgatcagcttgctcagtgcattttcttacctggcgagtacccagtcgtag

SEQ ID NO: 225081 - DNA, 912 bp, Klebsiella pneumoniae; identical to SEQ ID NO: 150536

SEQ ID NO: 225082 - DNA, 180 bp, Klebsiella pneumoniae; identical to SEQ ID NO: 177869

SEQ ID NO: 225083 - DNA, 786 bp, Klebsiella pneumoniae
atgtcccgtagcacgtggtattacaatatgaatgcactgaagcaaggggacaggtatgcgggtcttaaagagaacatcaggaagatataccactatcacaaaggtcgttatggctaccgcaggatcacgctcgcactgagaaaacaggggctgcggataaaccataaaacagtgcagcggctgatggcagaactgtcactccggtctgtgataagggcgaaaaaatatcgtgcctggaaagggagaacgggcgaggccgcgcccaatatcctgagccggaacttcggtgcgtcaaaagccaacgaaaaatgggtaacagatgtgacagagttcccggtacagggaaaaaagctttacctgtcgtcagttctcgatctgtttaaccgggaggttatcgcctacagcctgtcggaaaggccggtgatggagatggtgaatacgatgctggacggtgcgttcccgaagctcagaccgggagatgctccgctgctgcactcggatcagggctggcattacaggatgaggagctatcaggaacgtttaaaggcgcatgggatgacgcagagtatgtcgcgtaaaggaaactgcctggataatgcagtgatggaaaacttcttcggtaccctgaaatcggagtgtttttatctgagggagttcaggagtgtcagtgcgctaagaaaagccgtagaggactatatccattactacaacaacgagcggataagcctgaaattaaaaggcctgagtccggtagagtaccgaacccaggctctgagagccgcttaa

SEQ ID NO: 225084 - DNA, 1812 bp, Klebsiella pneumoniae
atgattgattgttatgtaaacatttataatgataatgatgaattcagaataccactaacagacagtggtagttatgaggttagggaaaatgacaagctcgttttccacttaattataagtgagcatgacctgctaactcttggtgagccagttatggtaatcggcgatatcccaacaaagtttttaaaaaatgaaaactccccacatggggagtgtcattttgtaacttgcgaaccatcatattctcattcatcacgttacttctttaacttttttggtgaaagcgaggttacaatttattttgaaaaatccgaggggaaaactctaacatttaggttcaatattttagctagaaaagaaaatgcaaagttagctgaagaaatgttggggtttataagcgataatgttgatgatgctgtagccatttgtttttccagaagcaaaaacggaggtggctttaatagtgatgaagaacataagtttagcaagtatgatgctgtgatttatgctgtgaactatttatcaagaacattaccttcttttattaatgacaaaaaaacccactggaaacagaaggtcattttgtcgcaaaatgggcaaccaacggggcctgattctgtatattgggcacttacgaatttagataaattatctccctctacagcggagaattataatatatactttaacaatcgtggctatcattttgatgaacaacccaaggaagtgctaattgatgacacgaatgtctatgagaatatagtcataaactcattcttgtacaatgctgataagttcttatatgctttaacaaaacattattcagagttcgcaagtaaagaggttggctactctgatactgaatatgttcgctttgatcatacaatgacaaaatatgcgaagatagctttaaaaatgcgaataaaggaaattgaagaaaatcatgccttagtgaagaaattgatgtttttttataaaaaaataattaactctaagattaacccaaacatcattcctaaaataacagcatttgtagcaaaaaaaggacattatagagaagcgtttagattaataaatattgcgaacttatcatcagcacctgcttttgatgacactaattttttattcgggttgaaaaacctgtctattgtttatgaaataactagccttatcatgctccataagagtatctccgaaattttcggagtaagtttaagccttcaatcataccgagagcattctgaaaccaatgggttcggtggggtagcggttaacaggccaaccggagcagtcaataatcactttatgttctctggagacactttccaggtggagcttttatatgagccaaagatttttccaatggcaagctcaacacgtccaggcgatttgatcgataccagcaattcctatgccacatctctatatggaaaacatcatttctgtcctgactttgtaattaaaatacattcaaaaaaatggaaaaaatcattaacactaatccttgattctaaatataaagatgcaagaaatgtacgggattacgatattcctaaactagtaccacgctatctctttaatattcattctctatcaaacgacaactcagtaacaccaattgacttgctgattgttttattcccacacgacaaagcaggaacattagtaaaaaccgtttcttctaagcatttcatcactggatctcatccagtattacctcaagcacttggaacaatatacacaccacttaataatgggctagatgacaagttaaaaagcttagtgcaatattataatcttaaaatgatgtag

SEQ ID NO: 225085 - DNA, 1953 bp, Klebsiella pneumoniae; identical to SEQ ID NO: 180735

SEQ ID NO: 225086 - DNA, 252 bp, Klebsiella pneumoniae
atgacaaatatcattctgtgtgatgtgactgccagcatcagcgaacttaaaaacgatccggtggccaccgccagtgccggcggcggctacccggtcgcgattattgaccgcaaccgccctgttttttattgtgtgcccgcggctctgtatgaacaaatgctcgatgagctggacgaaaaagacctagtgcaaatgataacagaacgtcaaaaccagccgctgcgtgaagtggatctcaatcagtatctgtga

SEQ ID NO: 225087 - DNA, 1155 bp, Klebsiella pneumoniae
atgcaagaaaataaaaaaattggtgttgtcgctgattggttggttacctatgcaggtgccgaacgagtcatagcagagttcattgaactgtatccaaaatcagatcttttctcagttgttgattttattagtgatgaaaatagaaagtattttcatggaaaaaaagcaacaactacattcattcaaaaattacctaaggcaaaagagaaatatcagaaatacctacctttgatgccattggcaatagaacagcttgatgtttcaaaatataatatcattctttcaagcagtcatgcagtcgcgaaaggtattttaactggtccagatcaattacatattagctatgttcattcacccatacggtatgcttgggatttacaacatcaatatttgcgtgaggctggtctggatagaggattgaaaggtaaattagcacgtttaattttgcataaaatacgaatgtgggattatagaactgcaaatggggtagatcatttaattgctaattcaaaatttatttctcggagaattaagaaagtttatggtcgtgattcagatgttatttacccacctgtcgacgtagatcgtttttctcttgtagatgaaaaagaagacttctattttactgcttcacgattggttccttacaagcgcattgatttaatcgtagaggcatttagtcatataccagataagaagctagttgttattggagatggtagtgaaatgggtaaaattaaatcgaaagcggccaggaacatagaaatattaggttatcaatcaaatgaagtcatgcagagtacaatgcaaaaggctaaagcatttgtattcgcagctgaagaggacttcggcataacgcctgtagaggctatggcatgtggtactcctgtaattgcttatggcaaagggggagtattagaaacagttaaacccgtgggctatgaagctcctactggggtatttttcggagagcaaaatatcaattcattaattggtgcagttaatcaattcgaaagttcgtctgataattttttaccagagaattgcaggcaacgagcaatgtatttttcaacgcaacgttttaaaagtgaaattgaaaactatgttatgtctaaatgggatttgttctgcgagaataaaactattcattattaa

SEQ ID NO: 225088 - DNA, 306 bp, Klebsiella pneumoniae
atggcctatgacttcaaggaagccttcttctgcatctacgacgaacccgacaagcagagtgctcagaacgcctttgaggcttggaagaacagcctgccgccttatggcatggagcctttcaaaaaactggtaaaaacggtacacaaccattacgacgacatctttgcctactgggatgcgccgttctcactcaccaatggctataccgaagggctcaacggtttgatcaagatgtccaaccggttaggtcggggttatagctatgagatcatccgtgcaaagacgttgtactccaaagaagcgtaa

SEQ ID NO: 225089 - DNA, 1074 bp, Klebsiella pneumoniae; identical to SEQ ID NO: 101378

SEQ ID NO: 225090 - DNA, 252 bp, Klebsiella pneumoniae
atgaaaaaaagaaatttcagcgcagagtttaaacgcgaatccgctcaactggtcgttgaccagaactataccgtggcagatgcagccagcgctatggatgtcggcctttccacaatgacgcgatgggtgaaacaattacgtgatgagcggcagggaaaaacaccaaaaacctcccccattaccccggaacaaattgaaatccgtgagctcagaaaaaaagcggctttgttgaataaatcagatttcgggtaa

SEQ ID NO: 225091 - DNA, 1119 bp, Klebsiella pneumoniae
gtggtttccgttcatgaaatccatacaaatcccaaagtacaccttgcgctgggaaaggtaaggaaaaatgcggaaacaggtgaactaaacgttgatgtcagccgtattcgcgaccttgccaatcatgatgaaaatctggctctcaccaaccaaccgctgaatggttccaaaagcgatcaggacctcaaggaatgggctgagaaaaaacgaaaagacggcactacaaataaagagaaattcgacactgagaattcgctgacagaggagaagcacgatcaagcgcatcaacatatcgataacacggtggagcctgccttactgataaaacagacgacagaactcctgcaaaccggcggcaagcaggcagccttaatggggatgcgccaggccttcggcctgctgctaacagagctggtaaatagcttgtttaatgaattcaaattactcataaaacagggtattgcaacaggaaaaactctatttgaagagattcaacagcggctttcacgagcgattgaatcagtgataaaaaaaattccagaagctgtcgggcagatgtttcaaggcggtgtcagcggctttatgagtaacctgctgacctttctgatcaataactttctctccactgcaaaacgctttgtaacagttatccgtgaaggcattataggcctgttccgcgcctttaaaatgattttatttcctcctaaaaatatgacgcacgaccaggcaatgcaggaaggactgaagatcctgaccaccgttgttatctcatctgttggcatcctgcttaccgaaacggtctctgccttcatggcaacaatacccttccttcaacctatctccggcctgatcacacccgtgctaatagggattattaccggcctagcatcagcttttctggcctatcagatcgactgttggttcgatcgctatcgccattctctgagcgaaaagttcatggacgagttactggctgacgccaggcggcgtgatgagtttgcctgtgagctggtcaccctgtctgaaagttcgctgagtaatatcgaaaactacgcgaacgcaattggaacgtatcagcacataggcatagctcttggcaccgcaagtcggctttgttga

SEQ ID NO: 225092 - DNA, 348 bp, Klebsiella pneumoniae; identical to SEQ ID NO: 182324

SEQ ID NO: 225093 - DNA, 1317 bp, Klebsiella pneumoniae
atgctgcaagaaaccgtattgcgacttaatggactagaattcgactctccattagtaatatgtaacgaacagcatcggtttttagtggcagaacagttacggaaaataaaccatctatcccagaatattattcttgaacctgttggacgaaatacagctcctgcgattgctttagctgcattcagtgcaatagtaagaggagaggatccgattctgctggttctagctgctgatcacgttattgaaaataaaacagcttttcatgaggcgataaagcaagcattgccactggcagagcaaggggagctcgtgacatttggcattgtgccacaatcgcctgaaacgggttatggatatattcagagaggcgaatgtttatcagcagatgataaagttggctatagagtggatcggtttgttgaaaaacctgatttatctactgctcaaaaatacttaaactctggccagtattattggaacagtggtatgttcatgtttaaggccagtaaatatctaaatgaactttcttcttttagacctgacatatatattgcctgtgaaagttcgatgcaacactcatttttagataacggacaagattttatcagggttaatagtgatatttttaatttatgtcctgaggaatccgttgactatgcggtgatggaaaaaacgcagagtgcagtggtcgtccctttagatgcctcatggaatgatgttggctcatggtccgcactttgggatgtgaatattaagaatgaacagaataatgtattgattggtgatatttttactcatgatacacatgagtgctatatcaatactgatgagaaatttatagcaagtgttggtgtaaaagatctagttatcgttagtactaaagatgccgttttagttatagataaaaataaagttcaagatgtaaaaaaagttgttgagtatttaaagaataacgacaggcatgaacatcgtgttcataggcaatcatataagccgtggggatatagtgacaaagttgttagcgaaaaaagctacaaagtgaatcgagttgtggttaagcctggtggccaattctctttacaacagcatcaccatagaagtgagcactgggtcattctttctggcacagcaaaagttacattagaagaaaggacatttttgttaacggaaaatcaatcaaccttcattcctattggtgcaacgcatatgttggaaaatcctggaaaaatcccactggaatttttggaaattcaatcaggtagctatttaaacgaagatgatattgttcgcttaaaagaccattacggtaccttttga

SEQ ID NO: 225094 - DNA, 183 bp, Klebsiella pneumoniae
gtgatttggtttaaagagtctttgcttataaacaaagagtttgaactagatatggcttcctatatcaaagacaaaattaaacagtctaatcttaacccgatatataagttcattttagcaaatgactttatatttactggttttattagtgtgttagttttcttaaagtcatttaaaaggtag

SEQ ID NO: 225095 - DNA, 981 bp, Klebsiella pneumoniae
atgaagggtattctgcgtctttcaatcatcgcttgttctttattggtttctaaaaactcttttcccttgcagatgggggttaatgtccatccgaatcagtttcccggcactactaatgacattgtcgagattttaaataccaatcatattaagtcatttagaacagattattcgtgggggcaacttgaaaaaaaaccaggtgtattttcccctcaggatgataaaacaaatgatttaataaataaaagtagatctgccggattaaaaccgctgttaattttagattacggtaattctatctataatatagaacggccaattacaaccgatgaagtgaataaatacgttcaatatgtcagttgggtggtgaatcattttaaaggaaaagtatatgcgtatgaaatttggaacgagtggatccacagagataatttaaacgataaagaagaatcatatcaatctgcgagcaattattatagcttagtcaaagctgtcagtactgtgatacgacaacacgatccatctgtgaaaattattgcaggtggatataatcccacagatccaaaagcaagagagtggggggatatgattgttgataaaggaatacttaattatattgatggtatatcgatacatccatatgactattcatcgccagataaaacgaataaaatagaaacattctctataattgataaacaatataatcaatggaaaaataaaacaggtaaagtaactaaaatatatattactgaatttggttactctacttatgatgggaagtttcattatactgaacagcaagtaaaagatacacttagtctctattttgctgaggcaaaaaagtattcttatattgatggtatttggtactatgaacttatcgataagagcagaaatagaaacgatattgagtcaaactacggattgttaaattcttcagagtcacctaaggtgcaaatgaaatcatttttgcaatga

SEQ ID NO: 225096 - DNA, 1221 bp, Klebsiella pneumoniae; identical to SEQ ID NO: 218052

SEQ ID NO: 225097 - DNA, 210 bp, Klebsiella pneumoniae
atgtttgccagcagcggcgagataaccgcaccctgtggggtgccttcctccgatgcccgccattctccttcctccgatgcccgccattctccttcctctgaggtcccggctgtgagccactttcgtatgagcctgattaccctctggtcgccgattctgtgttctatgaacctgattagccattcatggcttaccttgtcgaagaactga

SEQ ID NO: 225098 - DNA, 894 bp, Klebsiella pneumoniae
atgagaaaattaatcgtagttgcttcagttgccgccagtttactgctcgggtgcgaccagaagagtactggcaagcgtgaaaccttgtctgaagcgcttgttgctaagtcgctttctaacatggttcccgttcagggcggcgagttcttaatgggggatttcggcccattagtcggtgaaaaactgcctttcagcataaaccaggatgataaggtattacataaggttgtattaagtgatttttcgatatcaaagtttaaagttaccaacgatgattataataaatatctgcagataacaggaataaaaaaacctcccattaatattctggtaaaagagtacccatccttgcaaaaagatgattactctgttggtgtgacctggcaacaggcaaaagactattgtcagtggttaggtaaggagtctggtaaaaaatttgatttaccaacagaggcgcaatgggaatatgcagcaagatccagaggtcaatattttcagtttccaacaaataatggtgagttcctgcccggtaaaaacatccccagccaggatgagctgagtgaatatactgatggagcaggtattcctatttatccagtaggcaaatatcccccaaatcccctgggtctgtatgacatgggacttagtggctcagaatggaccaatgactggtatgcgtcagattattactctcattctccggtaaacgatccccagggacctgcgcagggtactaaaaaagtcctgcgtggatatattggcggcgacagacagtacgctttaaccatgttcaggcaatcaaaattgccagttccgaagatcgataaagacgatgactatgaaaaatatggtgttggcccgcagtatgtctttcgttgtgtcgttaataaataa

SEQ ID NO: 225099 - DNA, 270 bp, Klebsiella pneumoniae
atggtattaagcgaagcgttaacgccggtgctggccgccagcctgcgcgccaaccgcgccacctccgatcgggacatcagccagctgaccccgcgcgagcgcgacattctcaagctgatagcccagggactgccgaacaaaatgatcgcccgtcgcctggatatcaccgaaagcaccgtcaaagtacacgtgaagcacatgctgaagaaaatgaagctcaaatcccgcgtggaagcggcggtatgggtccaccaggagcgaatcttctaa

SEQ ID NO: 225100 - DNA, 873 bp, Klebsiella pneumoniae; identical to SEQ ID NO: 137708

SEQ ID NO: 225101 - DNA, 1107 bp, Klebsiella pneumoniae
atgacaggtagtgtcccggtagtgctttctgaatctgagttaaagtcgatcttgaccttgactgagcgtttcacatggagcgttgcaagaccaattattgcttctttagggctaccaacaggtagagggcgtgaagcaaccaacgaaaaaatacttgaaagcctcattgatcttaaaagtaaagataagaaaaaatttgatggcatcatggaaaatgtaagtgacctggtttttggtcaggttgtttatggtgaaaaagcaatatttagtttgtctgtagacaatggcgtaattaaaacactaaatgacagatttagtttgcaatggaattcaatgaatcaagcaatatctttggttgatacaattcttgataatattcaattgcaaagtgctgttaaaaatcaacctaagcttattaattactctattcagaatagtcaatctattctggttttttcatctgtcagagaattggttataagagaaataatccctcctgcagcacttgcgcaatataaacattttgacgaaatcattgcaaagagaaaagaaaaacggcagtgtttcgatgtgtgtataatggattttgcttctaataaaattcatattttgattgataccaatggtaatattgttggtgataatgttacttttgcaaagagtagcattattcgcgaattgtataataatgccggttatgagtttaaatcttcggaaaaagatttttatccgttgattgaaccaatttttaagcaagatgtattgccctattcaaaattaaactataaagtctttgatttgtcatttttgacgagtgagggcaccacgcataaggaaaagaaaaatgtggctacaaaagatttgcgtgatgacttgtttaataaggaaggtataaaagcagtaggcagtattggtttgtatcgtattggaattagagtcgaaagaaataatccaaaattgcaattggcagataacgtagagcttatcattcctggaaccctccgcaggcatttaggagggagtggttgctctcctgtcaactatgctatattaagtaaatgtatatccaaaggtgatttcgaaaccctcacaaagctgatattataa

SEQ ID NO: 225102 - DNA, 435 bp, Klebsiella pneumoniae
atgaaggatggtgatatgcccaaagtcatcaaagaaatgtgtgcagagcgccctgatgttggggcgctagcttgctatttgtacgatgaaattgaggcaagggctaaaaaatcatcaaacatggctttaagttataaggatttgtttaatatagctgatggttataacaagggtttacaatcagaaacgtatgagcaggttctctatccagccatacaaattctgtgcagtccaaaaattgattttttaaaactcaattactggtttattgatgattttcatgaccctgtagaacttgagatagaggaagtggttgaggcggaaattagtcaatgtttagtaaacccatatacaggtgagcttatgcatgactataagttgttcgtcttccctttttttacattagatgagtctaaatcaaaggatattgtctga

SEQ ID NO: 225103 - DNA, 666 bp, Klebsiella pneumoniae
atgttaaaaatgtccacaccaatgagtttggctgatattgataatgattttttccttcagcgtatcaatgctgctattactcgtgttaaatttgcacttcaatcatatgataatttcaaacaatttgttaggattgaacttgatcgtgctgtaaaagaaatagaagagaattcaaataagttgaactttgatttaacggaagatcagcttactttaattctgttggctaatatcaaaaatagggatatgggcgttgaggcctatcatgaaaataatcaacgtggacattgtgatattacaataaagttaaataactttatttggcatggtgaggctaaaaaacatacgtcttcatatagttatttgtttaaaggatatgctcaactcacagaacgatatagtacgggtaccgtagacagcgcaagtggtggattgatcatctatactcgtaatcggaagtgcaatgaaatgatgaccaagtggaaatctcatttagataagtccgcaccaagaatacatgcctgtaaggctataacaattactccttgtcaaaaaaatcctttggttttttatagtcagcatgttcacacagtttctcaactagattatgaagttattcattatcctgtaaatctatatcatgagcctgtagatccggacctgtga

SEQ ID NO: 225104 - DNA, 138 bp, Klebsiella pneumoniae
atggatattcgctggtggcactatgtgttgttttttattttgattgcagccttttacaatataggtcccgaggctattgggcgtggcttaagagagcttggcggaatcattgttgatggcttgatccacaaaaactag

SEQ ID NO: 225105 - DNA, 348 bp, Klebsiella pneumoniae
gtgaagatgatcattttcgctttgctcgtgctggtggccgtgctcgttctgttacttctgcgcaaatatacccggctggagttcgtaggccatgccagcctgctgctgaaaacgtggtctgtaaagctgggagctattggcgcgctggttggcgtatgggcgcagtcgttcccggatgctgctctgcacgcctgggcgatgctgccgccggatatcaaaaacattctgcctccaaacatcgttgcgttgattagccctgcgctggtggtgctggccgtgctatcgcaatacgtacgccagtcagcattgaaagctaaggccgacgaactgaaggatccacagcaatga

SEQ ID NO: 225106 - DNA, 276 bp, Klebsiella pneumoniae
atgaacttcgaaattattgctgggctggtggtcgtcatcctgggcgctatcgctggcgcgttcggcatcggtcatgctcgcggaacaagtaaggcggaagccaaagccgatcagcagcgtaccgaagagaacgccgccgccaccgtcgccgcggcagaacgtaaggcggaagttgtgaaaggggccagtgatgtacagcagactgttagccatatgcctgatgacgatgttgatcgggagctgcgcgaaagatttacccgccccggtagtcgttga

SEQ ID NO: 225107 - DNA, 2169 bp, Klebsiella pneumoniae
atggcctttaacccggagctggggagctcgtctcctgaggtgctgctcgataacgctaagcgactcgatgagctgacgaacgggcctgcagctactgttcccgatcgtgcaggtgagccgctggactcctggcggaaaatgcaggaagacaacgccgctctcgttgatgaaacccgccagaatctgatccctctcagtcgacagtacatgaccctggcggcggcgcaggcagatattgctaatgtccccgatggctccgcaacctacgtgcgaagtgcagacgggagttcgctggcggatgagtacatcaacaacgccggcacgctggaggctaccgggcggaaaatgccttcacaggcaggattagatagcctcgatgcccggcagaatttcacagattcggttatctctccgtcgttatctacaaccgtactcgggtggctaattgcatttatgaattccgagcggacgggtctgtttggtggctttgatgaaaccggcggtttccggctggcagaaatgcccgacgcggtgcaggaccgtttaaagcaactgggggaatatgccctgcttacatcgatccccggcttccacgcgctgatgctggacccagatcaaaaatctgggtttgcggtcgctcaggactggggtttacttctggctggtctggacaaatcggttcaggatgaaatagccgacctgaaaaatggcaccggctcagcaattctccgcccgtataacggcgtactggcggtttataaagacggcgcggcagcagttcctgtttatgcggtgaacccagtggcctatgcgcagaaacttaactctggcggcgcaagtattgtctacgaggaggctggagttgtaaaaaccggcctgattaacctcatagataactcgttttctatgcgtcctgtaccggcggctgtcgcatccgttttctatcgcgctattctcggacagagcctggccgttggcggcggaaaccgcgtaacactggctgacccgaatttatacggactgtcgctcatgttcgcggccgctggcgcagaccgaaatgcggggattgacggtgaagttaacgacaccacattgtcgattttcgttgatgcagagccgaaattgtatcgtgagtgctgcgctgtacccgggcaacagcgctaccttaacgacctgatgacagaatacggctatgccaaatcagcattacctgctgttgtaagccgcatcgacgcaaagtccggcacggcttacagtggcctgaaaaaaggcactgagccgtattcgtggggtatcacagccttcaccactttctgcgaccgcgtactcgccatggggaaaatcccggtctccagctcgatcaccattgttcatggtgaggccgattcagcaatcgttacggctctggggcagtataaggccagcttaaacgagtggattactgacgaattttccgaccgtctggctatcctctcagcgcgtggtgtgacgcagactatcccgcagatcgcctacattgaccagatggggagccgcgtcaaaaccgacacgcagcgcggcgacttgattgcgtttgaccaactggcgatcagtaatgagcgcgctgataccgtgatgattggtccgaaatttcacctcaaccgcaaatatcacgttgatatccagcatcttaacaacgttggctatgccgttatgggggaataccagggggaggcagaagcctggatgcacaaagagcgcatcgcgggtacgaataaaaaatgggtgccagtccagccgatcagcgtcgtaaaaaacggcctggattacgatgtcacactcagctcgccgaagggcaagcctctaaaagtcaacactaaattcggtaccgcgccgaacctgggcatagatttagagaaaggatcagcgattatcaccagcgccggacaggtcggtgatttcgtattcagggtcactctcgacagagaaccggcggccggggagtatctccgtttcggattcaacgccactgactcgatcagcgtcccatcagtctcgggaggctcgaccatggtgacctggcagttcccgctggtttgtatcagcgacacatcaacgaaagtcagcaagtccgaccccaattttgttcttgagcacttctgctgcctttcccgcatcgcaataagctga

SEQ ID NO: 225108 - DNA, 918 bp, Klebsiella pneumoniae
atggcaattattcagtctcaaatcccaaccaccggcaatcgaacgctgatcccgttcactcgccttgacccgcaaacattgtttgacgcgcacaaatcacgcgtactcgcggacggtggggagattcttaacgaaagctcgctgatgcaggagatcacagatatcgtcgctgccggactgtggcagtacgcggtcagcctggctagtcctgaatgggggattaagcgcgatgccagtggctacgtcacaaaaatgtacggtctggccgggacgccggactatctggagtttatcgttgccggacagtatgcccgtcgctgtgagctggatacgacgacaactccgccgtctatccgggtacaaatcaacctgggggcggcatacctgcgcactgagacgccggtacgtcagcaaaaaatcgctaaccgtccatatatcatctcggcaatgctggcagacaaagaaagcgcggataacaggggggttgtcctggcgctgaatccagtatctggcaacactaacccaatcgcctatctgtggtgcatccgcaactctgctgggcgcgctgaatccggcacgtattacctgtccggtaaataccctgatacggggggcgatactgtcacggctccggccgctgcggggtacgtctcactgctaccatctgcctgcctggtggaacctgcgtctggcagggggaaaaactacagcaaaggcgttctggcgagcaccagcgccgtcactgcatcggggaaaatcccggacatgactgatgtcgacgtacacatccatattggctcccgctatacctcgaactacaacgctaccggccaggatacggacggtatggtcgggcggatcaggtgctttgggtacgccaccgaagagcaggcgaaatttatttctaagcgctcatag

SEQ ID NO: 225109 - DNA, 225 bp, Klebsiella pneumoniae
atgatttcaaatattaatgcgcatgcaagccttgcttttggtgaatgcatattaatattgataatacaggagatggaaataaataaagacaacttacttaaaacacttataagtgagattgaaaaaaaacatgatgacacccaccgtggatatagactggctatcgagatgctggctattcactgccgaaaaatcaataaaatcaaagccacctctcgcaaatga

SEQ ID NO: 225110 - DNA, 672 bp, Klebsiella pneumoniae
atgataaataaccacgctctctatcaacctatcccactgaatgactcactgttattgaaattcactgaacaaattaatccgctttcccgccccatccttgtccctgttatcgatacgccgggacccgcaggtaattcatactggaatgtagatgccgcgataaaaaaagttggtgggaaaatgcagcttggttgggatgtaaacctgtggcgtggatgttttatggtcgccactcatcatgctatactgttgtccgatagcggtgattttttcgatgtaacccagcgccccgcagtagtggcagcaccgtttgttactacatttattcctgatgattctattcagatcagtcttgataagaatccggcgattgcatctaagttttttatacttaacgacagtccagaaattagtagttacataaaatcatatgaaaaccttaatgcttttgaaaagaaaatgagtgaactcatgcacgcacacggttatcgctgcgaggccaataaatccatggcaaaaggtattcccgaacaaacggcgaacatagttagtattaatgaggttaattttatggagataaaggacaaaattaaagaactgacctggattatgaaagagaagataataaacctaaagaaatactctgactctctaaatagagtgactcactga

SEQ ID NO: 225111 - DNA, 831 bp, Klebsiella pneumoniae
atgaaagatgttattgttgttgtcggtagcggctcgattgcccaggctattgcacgacgtgttagtgtgggaaaacatgttttgctggcagatatcaaagctacaaacgcacagcaggcagaaaaaacgctttccagggccggtttcgaggtaagtacaacaatagttgatgtcagctcacgtcagtcgatacagcaacttgtgaaaacggcgtgcaatacaggaaacgtcaaaggaattattcataccgcaggattgtcaccttctcaggcgaaagcacaggatctcatccgcgtggatctctatggaagtgctgtgctatttgaagaatttggtaaagtcattgcaccgggtggctcatgtgtggtgattggttcgcagtccagtcatcgtttagccattgatgagctgactcaagctcaggccgatgacctggcaacattatctcccgaagcgctgctggagatgcccttggtgaaagaaattaaagacagcctatatgcttatcagatttccaaacgctgtaatgcgcttcgtgtgatgtcagaggccgtgaagtggggtaaacggggggcacgaattaactgcattagcgccggtattatttttacaccgctggcctatgacgaacttaatagtgctgaaagaggtgcgttttaccgaaatatgctggataaatcaccggtaggcagggggggaacaccggatgaaatagctgccttagcggaattcctttttgggccgaacgggacatatgtaaccggcagtgatctgcttatggatggtggtacaacagcctcttataaatacggtgatttacgatctcaataa

SEQ ID NO: 225112 - DNA, 327 bp, Klebsiella pneumoniae
atggaaagcttgtttgtctacgggaccctggggcctggccgacctaatgctcatgttcttgaaaagattggggggacatggcaggaaggccacgttggtggttctttattagataaaggttggggtgcagagatgggatatccggggatcgtattagatgattccggtaatcgtgtacagggttttattttcatgtcagagaatttgcatcttcactggcacatgctcgatgagttcgaaggttctgagtatgaacgggtaccagtagaggtaactacatattccggacagactgtaaaatcatgcatctacatgctcaaagcataa

SEQ ID NO: 225113 - DNA, 903 bp, Klebsiella pneumoniae
atgatatttgattgccttcccccattgcagactctgcgtgcttttgaagctacagcacggctttccagcatgacgttggcagcagcagagttgcacgtaacgcatggcgcgataagccggcaaatccggaagcttgaagagcatctggggttaaaactatttttcaggctgacccgacagataatattgactcaggaaggggctgaatatcatcgcattgttacccgccttctgagtgagctaatgatggaatctgagcgtctgcgcggaaggaatcctgcaaaaagtttacgtgtcagtacaacggtttcatttgccagcaagtggctggcaccgcgtctgagccggttcaggcagagatatcctgaatttgatattcagctggatgttactgacagtaatgtggatctaaatgatggtcaggtagatgcagccattcgttacggtcttggccattaccgcgacgtttcgtatgagcgtatcttcgatgaaacagttactcccgtctgtagccctagttttcttaaagaacataatggtctgacagaaattaaggaactttcaaactgcgttcttcttcatgaatacagaatgttggcgaactgggaggcatggtttgaaatggccggagaaaaaaatttttgctgccatcacggccccttatggactcttggcagcatggcgactgaggctgctatacgtggcgagggtgttgctctgggacgcagtgttctgattgcagatgatgtagctgctggaaggcttgttgtcctgtttccgcaatacaaacttaaggctgagcggggatacgatttagtttatcgctcggataatcaggattcatttaaaatacgaattctgagacagtggctctctgaagaaatgagtttgctggaagattga

SEQ ID NO: 225114 - DNA, 510 bp, Klebsiella pneumoniae
atgcttttccaagcaggggcctatattctagttgaattccttttgcaggatataaccatgataacagtagagaaatcagatccattttcttcagaatcttatcgattaatcgagatgctgtctgcagaacttgccgctattactggcgatagtggcaaaaccaacttcaccgttgaagctatgaacaatgacaaagcagtatgggctttggcaaaaaatacacatggcgatgcgatcggatgcggtgcaatccgcccattaacgcaaaacatagctgagcttaaaagaatgttttcagatcgaagtgagcctagcgtgggtagtgcattacttacttttctggaaacctctgcgaagcaaatgggatatcgagaactgaagctggaaacccgacatatcaaccaccgtgccgtcagcttttatgagaaaaatggatatgttcgtattgaaaattatggtccatacataggaagagaagaagctgtctgtttctcaaaaacattgtattga

SEQ ID NO: 225115 - DNA, 462 bp, Klebsiella pneumoniae
atggctactaccccaatccaaactcgccagttactcaccgttccgttcagcgccgccacggatttcaccgtccttgccgactattgcgatcgctttgctgaaatcctgattgaaagcgacgatccgacgctgcggctggcgctctgcggacggcttaccgcctgtctcgcgctgctgcggcccacattgaacgaccccatcccgctccacctgatcaaaagcctgaccgttgatattatccccgtaaatcctccccgttttgaacccggatccgaattactttgcgactactcgcttatgctggcgcagcttctaacggggcgagtgttgctgccgaaaatggaacggacgctgaccggattactgtgtgaactggtctggtatttcgccgccgatctcaaagccccgcgctggatacgtaccgccgatggcgttaaatttattgacgaggtgacggcatga

SEQ ID NO: 225116 - DNA, 1404 bp, Klebsiella pneumoniae
ttgctgttctcttacgcgggattactaaaattgcctcgggaaagtgagaatccaatggaatataacaataatgtaacatggtcagcagcccctccctcagcattcaagagaaacgtcccctacctttgcaaaaagccttttcccataggactgaaagcaggttttcgcttcattgaccttttcgcaggcttaggtggatttcatactggcttatcccgacttggaggcaaatgtgtttttgccgcagaacttgatgaaaatctacgcaacctttatctgaagaattatggattagaaccggagggcgatattcgtttcgttaatgaaaataatattccggatcatgaagtactgtgtgcaggctttccttgtcagcctttttccaaggcaggtaaaaagaaaggatctgagtgccctgagtcaggtaaactgattgatgatgtactccgcatagtcagaaaaaagacgcctcgttatgttatgctggaaaatgtgcccgatatactgagggttcagggaggattattctgggaatatattgtaaatagcctgattagcgaaggatatacggtccaacatcgaatctatacaccacaggacttcggtattccccaaaaaaggaagcgtatttttgttgtggcatcaagggatgaaaatatgtgtttcaattggcctcaaccgagtaataagtcattatctttggcttctattattaaagataatcccttgaaagtcagatgtcttgaaaaacaaaaagaagaagtattggaactctggtctgattttattaaaacaactaaagagtattcatccctacccatattagcccctgaattcggtgcaacataccccttccacatatccatgacagagctattatttgcaaaacagttcaggggcgctttcggcagggacatgtccgaagtaaaggacatagatgatgtgattgagtgtcttccaagatatgcaaaagcaaatataggtaaagtcagttctcgtgtggcagaagcaatacaggcatcacgtgaaatttatgcaaaacacaacaaatttttagatatgtggaaattgcggctgcaaaattttcctcttagttggcaaaaactcgaatggcagggtgatcgaaacggaactgagctatgggagcatcttatccagttcagggcttccgggatccgtataatcagaccaacatctgcaccatcattggttgcaatgtcaacgactcagacaccaataattggtaatctaagacgatatatgagcatcagagaagctgctgcgttacaatctcttgacaaacttgaatacttgccggaaacagatagtagagcctacaaagcacttggaaatgctgtgaacgcgcatattgttcatgaaatcgccagaaaattatttttgtaa

SEQ ID NO: 225117 - DNA, 1638 bp, Klebsiella pneumoniae
atgttttcagtagatgtgtcacctgatatgaatatgtatacgttacttgttaaccaagcctatgattcctcattcgcattatgtgaattcattgataacgccatacatgctcatcttatttccaaaaaaatgtctcccttgaatatcaacctggatttttattccaatgaaaatctggagtcgaatatgcggaataaaatagttatccgtgataacgggccaggtataaaccgaactttgttagaaaaagcattaaaacctgccagcaagcctgtaacaaaagggttaagtgaatttggcataggaatgaaagcagcggcagtctggtttgctgatgaatggcaaataaaaacacatcctttaaaagataataaccagtacacttgtaactttaacctaaatgaacttcttcaaaaacaacagtcacagattactgtctttgataacatctgttctgattcatggacaggtacggaaattatacttataggtgtacgccgagatattagccaagagcgctaccaggccattactgatgatattacacatatttatcaacgatttatttatggtgacaatccgcaagtaataattacatcaagctataatggctctccaaaaacattatcatttacaccttttagccctttaactcttcgctcaccaaaacacgttaaaaaaggaaatactgttactgctgtaggaccggaacatttatggaaagtcccagtagactttcagtacctaggtgaacgaattcacggttttattgaaataaaagagacaggaagttatatcaacaaccctggcttagtaatgtttaggcatgacagagtcatctgcggcattcctactaaaaaatatcttcctccacgtttgttcaagacctccaataaacatagggcactgagagtgtatggcgaacttaatcttgattcatctccggtctcatatactaaagatcgttttacttttgataatgatgaattctgtgacgctctcattgaagccacacaagggctgaatgaacttcttagccaagctgatgcttatagagctaacatcaatacaccttcatcccctacaagtacaactccgatacatgtcccagcaccgactcaaacaccgccccccattcaaacaccaccgacttcttcggcagttccagtaccgacaccgggcttaaccccatatccaagcgtaacaccatataatccccctgctcctactaaaattcagagatcttctgctgtcgaaattaaactaatcgaacttaattcgcaaaaactctgccgaatatatcattctttatgtacagtttcttgtgctgaacatgctgtactagtgtacgttggtgcgtggtctttttttgaaactatggcaaagcttctcggcgcgtcaagtaatattaacttccctgatttttttaagaatatgatggataaatggcaattcaacagggaggataaaaaatctgctggaagttcacttgcaaaaattcacgaagaaggaaacctcaataaacacgatagtataagttttaatactaacgcagcccaattagtcatacattttcaagtattggaaaaactaattattcgttcagtcgatgaaataataaaagtaaagtgtagttaa

SEQ ID NO: 225118 - DNA, 837 bp, Klebsiella pneumoniae
atggcatttgtcaccacccaagacggcgtcaacatttactttaaagattggggaccaaaggaagctcagccgattgtctttcatcacggctggccgttaagcgctgacgactgggataaccagatgttatttttccttgccgaagggttccgggtcatcgctatcgatcgtcggggtcatggccgctccgatcaggttagcgaggggcacgatatggaccattacgcggcggacgtttcggcggtggtggaacatctggatctgcacaatgcggtccacgtcgggcactccactggcggcggccaggtcgcccgctacgtcgcccgctacggccagccgcaggggcgggtggcgaaggcggtgttaattagcgccgtcccgccgctaatggtgaaaaccgagcagaatccgggcgggacgccgatcgaggtgtttgacggtttccgcaaagcgctggcggcgaaccgcgcccagttctatctcgacgtcgcctctggcccgttctatggcttcaatcgtgatggagcagagatatcccaggggacgatccagaactggtggcgacaggggatgatcggcagcgctaaagcccattatgaaggcattaaggcgttttcagagaccgaccagacggaagaccttaagtcgatcactttgccggtgctggtgatgcagggagatgacgaccaggtggtgccctataaaaatgcggccatcctgcaggacaagctgctgccgaacagccagctgaaaatttatcctggcttcccgcacgggatgcatacctcccacgccgatactatcaacgccgatctgctggcgtttatccgcgcctga

SEQ ID NO: 225119 - DNA, 537 bp, Klebsiella pneumoniae
atgagcaacaaagctaagttcagcgccgcgatgctggcgcttctggccgctggcgcgtcagcgccggtgttgatggaccagtttctgactgagaaagaggggagcagtctcaccgcctataaagacggctctggcatctggaccatttgccgcggggccacgcgtgtggacggtaggcccgtcattcaaggtatgcggctgacgcaggcaaagtgcggccaggttaacgccatcgagcgcgataaggcgctggcgtgggttgaaaagaacgtgcacgtgccgctcacacctccgcagaaagtcggcattgccagtttctgcccgtacaacatcgggcccggtaagtgcttcccctcaacgttctaccgcaagctgaatgccggcgaccgtaaaggggcatgcgctgaaatccgccgatgggtattcgacggcggccgggattgccggttaacgaaaggacagaagaacggctgttacgggcaggttgaacgccgggatcaggaaagcgcgctgacgtgctgggggctgtacgaatga

SEQ ID NO: 225120 - DNA, 189 bp, Klebsiella pneumoniae
atggctattaaatatttatccaatctcaaaatagagaacgaaattgacggatccgtgacacatctgtttgatgtggacggcgttattttcggcgttgtggtatccggtgacgctaaacaagtggtcgataaagattacgcagcttcgaatgcttatcaggttgcggatttccctcttcccgtttcataa

SEQ ID NO: 225121 - DNA, 846 bp, Klebsiella pneumoniae
atgggtatttttgttgtatcggatgcgtcgccaaaacaaagcggcaataaccccatgtatcttgaaaaagattcaattattatccgcagccagacgcttggtcttttggatttcagtaatgatcagtgttactcagccggttctccggtagctgcatatgcaaatatgaaaaatctggtgcataacgggtcgaatgcaacaaatggccctgcgccacgagtactggaagggggcatgctgaaatttgacggcaccgaacccagcaccaccgattatgcgctgctgccaacagatgagttttctttacccgctggatgtaaacgtgcgctggttagtgttgcattaaaactgcccgcgtctggttatggaacgccagcagccacacgttacccgatgttccttggccggatgaataacacagccgcaggaaacattaatttcggcgtgtgggggattgtcagcactgccggtgtgctcacttctgtgcagggggctgcgatgggcagtgttgctgtttcggctacggcgcaactcgcattactcaccaatggaggcgtacatgttgtttccgtatatgctgatggcgaaacgacacctggtacgctgatcacgcgtatttatgtcgataacatcctggtggctacggccacaaataacgcatgggatggggttgtgccagagcctactaatcttccgcgtattggtagttatcctgcgaccatccacagtccgtggaacggcatgaaggtaggccgaccgatggtgatgaaccttaccgggaaagataccgttgcgacggatatcatctctcaatccgtagaactggctaaacagtatctggtttaa

SEQ ID NO: 225122 - DNA, 408 bp, Klebsiella pneumoniae
atggcacgacagaagaaaaccatcgagacaccggggcaggagacaacgcagccgcaggacgccaccggcgcagcgctggtgggcgtcggcattagcggcgagcagctggcgacctctgaagccccaacggttgaccccgaagcaatcgcactcgcgaaccgcaacgccattcttgcaaccatcaacgagcagggcgccgccatcatcgcgcgctttgaatcgctgggtttctccgaccttaccgaccaaagccttaccgacaacctcgacttcctcaacctcgtacgcaaagccactgaggccaccaccggcagcgcgggcgcaacggtgacgaacgaagagggtaaaccgcagccggtacgcgacgcacctgtattaaccgaacacggctggcacgttccgggctaa

SEQ ID NO: 225123 - DNA, 294 bp, Klebsiella pneumoniae
atgccagtcgtcgtcacagttaaaacggactggttgcgagtggtgaccgatatcactaacaccgggataccgctgcaggaactggccaccgggcttgatgtttcaaagtcagcgctcattggctggaagcagggaagcagccccaaccatcatacgggggaagcgctaatcgctttctggtgtgaagtgacacatcggcatcgttcagaacttccggtgcaggtcatcaggcgtcgttttgttcgcagcggaacccgtaatttttggccgaaagaaccaacggcccgccggtaa

SEQ ID NO: 225124 - DNA, 309 bp, Klebsiella pneumoniae; identical to SEQ ID NO: 104234

SEQ ID NO: 225125 - DNA, 321 bp, Klebsiella pneumoniae
atggacgcttgcgccgaggcgttcagcatcgcggaactggataccgccgaggcgcttaaacgtctcgcgggcttcagcccacagcagctctctgtcacggactatggcatcggtactaaccatttcgacaacatctaccggcaaccagcggcggttaccggtcttgtccgcaaggaactcgtcttcgttagacgagcccagggggatacctcgccgagcgaatatggtcgtgaattctttaaattttggtacccatttatcatgcgttctggttacccatgctttaatagactcgaggtctttagtgttaaggccccttag

SEQ ID NO: 225126 - DNA, 366 bp, Klebsiella pneumoniae
gtgttaaggccccttagttcgcttatctcggccaccaggcatccggtatcggggttcaagctggtaaccggtaagcagggcaatcgtgcatggcgcgatgaagttgaagccgaagagctgctgaaatctttcaggctgaaacaggatcagatgtacagccagaaggtgataagcccgactcaggccgaaaaactgttgaagaaagaaagcccacgccgctggacgaaagtcgaagcgctgataacccgctctgatggtaagcccaccatcgcgccagaatccgacccgcgccccgcgctcaacgttaaccctgtaaacgattttgacgacgtgtccgaagatgcgatcgccgctgacctcatttga

SEQ ID NO: 225127 - DNA, 255 bp, Klebsiella pneumoniae
atgaaattgaaactcaataacgtacgtctggccttccctgctctgttcgaagcgaaaaccgtaaacggcgaaggcgatccgcgcttctcggcggtcttcctgatggacccgaaacacccgcaactcgaagaagttcgcaaaacgcttaaacaggtggaaagagaaatggggcgagaagtgggaaaccatctacggccagctggagaaaaagctcaatctctgcctgcacgacggagacgagaaagccgaatatga

SEQ ID NO: 225128 - DNA, 1506 bp, Klebsiella pneumoniae
atgtcaacgttgagaattggtatggaaatccaagagtttgtagggcattacaaaaatcacccagtgcttttcatcggcactggatttagcctaagatatcttcaaaactcattcagttggaatggccttctagagtttatatcctttgaactgactgagaatgaagagttttactatgatttaaaagctgaatctatggtaaatggggagtatagctatgatctattagcaagtaaattggagttagaatttaacaaacgactagccgaagaccgaaaagggaagtttgtaaaaattaatgacatattttatgacagcatgaaagaaggtataaagttaagcagattcaaaatctatttaactcaattactgacccctctgatgataaaacccgaaaagagtaatgaaattgacgcattgattagagcacgaaaaaatataggctctgtaattacaacgaactacgacagattgtgtgaaaaattttttgaatttaacccactaattggcaacgatattttattaagcaatccttatggctccgtatataaaatacatggttgcgtcagtgactctaacaatatcattataacacgtgaagactacgataatttcaataacaaatatgaattaattcgtgcacagttattatctattttcatacataacccgatcatattcattggttatagcattagtgactccaatataaaatcactcttgaagacaattttttcctatgtaaatgtcaatactgcactagcaaaaaaaatccgtgataacttccttttagtggagtatgcgccagacaatcaatcaatagagataaccgaacacgatattgatattgaaggcatggcaacgattagaataaataaaatcaaaaccgataattacacagccatatacgacgcgctgtctaaactcgtactacctgtatcagcaatggatatcagaaaagttcaaaaagtatggaatactataaaaagtggcggtgaaataaaagttaacatcactgaaaatatcgacgaactaaaaaacgaggatatggtgttggctgtcgggtccgagaaaacagtcaaatatgagtttcaaaccaaaactgaaatgattcaaaactattttaaaatagttgatgaagcaaactcccaacttatttcgctcctaaataagcaagtaatatcaacaagagaaaggtttccaatctttgccttttcttcaatttgcgaaaaccttatcaatgtagataagtacaaatcacgacaaatagacaagattatagatgatctaaaaagatatgttagggattgtgaaaacaattatacatcaattactgacataactaacaatctcgcagactggaaagttattggaggaattatgtatgcagtcatggaagataatatctcccttagtgagcttaaaaaatatcttgaagacaacgcaggtcgatgtgataccgatttcaggaagttattatgcctgtatgactatttagcatactga

SEQ ID NO: 225129 - DNA, 2067 bp, Klebsiella pneumoniae
atgtctgaaaccattctctggggcgacctggaaacctattgcgaaatcccgattaccaacggtacccacgcgtacgcggagagcgtcgaggtgatgctgttcgcctgggcgatcggtaacgagccggttaacgtctgggatttaactgctggcgagccaatccccggccctctatttaaagcccttaccgatcccgataccctgctttatttccacaattcacacttcgaccgcacggtgctgcgccacacccacccccggctggctccgccggttgagcgctggcgcgacacgatggtgcaggcgctggcgcacagcctgcccggcgcgctgggggcgctctgcgaagtgctgggtgttccgcaggacaaggcgaaggacaaagaaggcaaatcgctgatccagctcttctgtaaacctcgtccgaagaacagcaagctgcgccgcgcaaccagcaaaacgcacccggtagagtggcagcggttcgttgcctacgccgggctggatatcgaggcaatgcgcgaagtctataagcggctgccaaagtggaactatcagggcgctgagctggcgctgtggcatcgcgaccagcagatcaacgaccgaggcgtctgcatggatgtgcagctcgcgcaggcagcgatcgaagccgtggaccttgaacagaagcaactggcaaagcgtacgcaggtaatgaccgacggcgaagtgcaggcggccacacagcgcgatgcgatgattatgcacatcgtcgaatcgtacggcgttgacttgccggatatgcagcgcagcacgctggaacgccgtattgccgaccctgatctgccgtcgccagtgaaagagctgctggctatccgcctgcaggccagcaccacgagcaccagtaagtacaaatcgctgatgaagggtatcagcagcgacggacgtctgcgcggtacgctgcagttttgcggcgcatcgcgaaccgggcgctgggccgggcggctgttccagccccagaacctgccccgcccgacgctcgagcaggaacgtatcgacgagggcattgaggcgcttaaatccggctgcgccgatttgcttttcgataacgtcatggagctgaccagctccgcccttcgcggctgcattatggcgccagcgggtaaaaagcttgtcgtatccgacctgtcgaacatcgaaggccgaaagctggcgtggctggccggtgaggcgtggaagctggacgcctaccggcggtatgacgaaggcaccgggcccgatctctacaaactggcctacgcccgcgccttcaacatatcgcacgaagacgtgaccaaataccagcgccagatcggcaaagtgatggagctgggccttggctttggcggtggcgtggcggcgttcctgacctttgcgctggtctacggcctcgatctcgaagagctggcgaccgccgcgctgccgaatatcccgcgcgatgtgcagcgcgaggctaagagctggtatgacgaatcggtgaagcgtaaagcgacatacgggctaactgagcgcgtattcatcgcttgcgattcgcttaagcgcctgtggcgccgggcgcacccggaaacctgcgatttctggttccagctcgaacgcaccgtacgcgccgccatcgctacaccaaagaaaacactctattgcggctatatgaaagtgcgccgcgatggcgcatggctgcgtatccagttgccgtccgggcgcgcactctgctacccgtcgccgtcgattgagaaaggaaatatcacctacatggggatcaattcctactcgcggaaatggcaacggctcaaaacctacggcggaaagctggtcgaaaacgtcacacaggctgccgcccgcgacgttctggccgggaacatgccactgatcgagaacgccggatacagcattgtgctgaccgtgcacgatgaggtgatttgcgaagcgccggactccgacaactacaccgacgccgcgctttcttccctgctctccactaaccccacctgggcgcccgatataccgctgaacgccggcggctttgaagcgcttcattaccgtaaggaatga

SEQ ID NO: 225130 - DNA, 228 bp, Klebsiella pneumoniae
atggcattcaagtacagagacagtccgctgtattaccggtctgcgcgcgaagccgtgcagctggagcaagcaggcgagttcgaccgcgcggcgaaggtctgggcgaaagccaaccgggaatcgcgcaacgagctcaatcaggaatggagcgaacggcggaatgatttctgcctgatgcagaacatgcgcgaacggcgcaaggcggtggacgatgagttatcgaggtaa

SEQ ID NO: 225131 - DNA, 222 bp, Klebsiella pneumoniae
atgacaatcgtgaaaacgcataccgggaccgttatcaccgtcgacggaccgaagaccgtgaaactgagcgagacgaaaactatgtgggtagtcggcaagaatgagtgctaccacaaagaaaccggccgccgccattttgcagagcgtacgcgccggcgtttgctgctcgaatccatccgaccgatcgaggggcccattcatgcccctctggataaaagctga

SEQ ID NO: 225132 - DNA, 297 bp, Klebsiella pneumoniae
atggcctacgaacgcgagagcattattgaaaagcaccttgccgcggcggtgaaagccgccggcggggttgcctataaattcgtgtcgcccggccgccgttcggttcccgatcgcatcgtgctgctgcccggtggccgtatcgtttttgtggaatgcaaatcaccaggcaaatcaccacgcgccgaccagctgcgcgagcacgaacggctacgcgcactgggctttaacgtggtggtgcttgatagcaaagatctggaggaaatactgatagatactctagcttcagtaaaatactaa

SEQ ID NO: 225133 - DNA, 612 bp, Klebsiella pneumoniae
atggatatatgggagaagagtaagttttttatttttgtattgtttgtcatgcccggcttcataagtatgaaggtttatgatgtatttcagtcaagacccgggcaggattattcaaaaacgttaatagatgtaattgcttatagttgcgttaattacgctttgctattagtgcctatttattacgtagaaacatctaatttaatgctaaaacatccagtttggtattacttcttttacttgtttaccttttttatacttccaatagcattgccagtgttgttaatctatatcagaacaagacgtgggttcacacgttttatgccccatccaactggcagaccttgggacttttattttaaaaaagctaaaaaaagctgggttgtcgtaactctaaaaaatggtaaaaaatatgggggtagatatgattcggaatcatttgcctcaagctctcctgagccagagcaaatatatcttgagcatcattgggccttagatgccgatggtgatctggatcataagttgagagatacgcttggaattatcattttgactaatgagattgagagtatagagtttattgagattaccagtacacctgcgtctggtacgtga

SEQ ID NO: 225134 - DNA, 1407 bp, Klebsiella pneumoniae
atgacgaataactttaaagagtttaaacccagagtatatcaagatctcatcattaaccacgaaattaatatagagcgctgcaacatctgggcgggtatgggtatgggcaaaacggtggcgacgctgaccgcgctggaagatctcttcatgtgcggcgcggaaacccagccggcgctggtcctcgcgccgctgcgcgtggcggccagcacctggccggatgaggctgtaaagtggggccacctgcgcaatatcgaggtgcagcccgttgtcggtaccgccaaagcgcgcgctgcagcgctggcaaacagcaacgccagcgtgttcaccatcaactacgacaatctggcgtggctggttgaagagctcggcggtcgctggccgttcggtaccgtcatcccggatgagagcacccggctaaaatcgttccggctgcgcggcgggggtaagcgagctgcagcactcggtaaagtggcgcataagcacgtgcgccgctggatgaaccttaccggtacaccagcgccgaatggcctggttgatttgtgggggcaagcgtggttcgttgatcaggggcaacgcctcgggcgcacgtacggcgcgtttacctcccgctggtttaactcgatacaatttcccggccagagctggacaaagctggagccgttcgcgcattcgcaggacgaaatacagcgcgcactcgccgatgtgactatctcgctcgacgccgccgactggttcgatatcaaagagccaatccataatgtgatccgcgtggacatgccgccgaaggcacgccagcagtatcgcgagatggaaaaagaaatgttcctcgagctgaacggcgaaggcatcgaagcgccaaacgcggcggccaaaaccgttaagtgcctgcaaattgccagcggcgcggtgtacaccgacgacgcggggagctgggcggagttgcacgacgcaaagctgcaggcgctggacagcatactcaccgaagcagctggcgcgccggtgctggttgcctaccactggaaacacgacctcgagcggttacttaaagcgttcccacgcggccgccatcttgaccaggatccgcagacgctacgcgactggaacgccgggaaaataccggtactgttcgctcacccagccagcgcaggccacggcttgaatatgcaggacggcggcaacatactggtgtttttctcgcactggtgggacctggagcagtaccagcaaattatcgaacgtatcgggccaacccggcagatccaggccggacacaaccgcccggtattcatacaccacattatcgccgccagcagtatggatgaaatggtgatggaacggcgcaattcaaaacgtacagtgcaggatatcctgctcgatgccatgaaaaaacaggccagtaggccgtag

SEQ ID NO: 225135 - DNA, 192 bp, Klebsiella pneumoniae
gtggccagcattgaaatgataaccgagaaagaagtgatgcagatgatgcgcatctcatcgcgtatgactatatggaaatataccgagcgttataattttccaaaaccgatacgcacccaccccaaacaatacctgctgtcggaggtggaagcgtggatcttaaacggcggaatcaacccgaaatcttcttga

SEQ ID NO: 225136 - DNA, 1182 bp, Klebsiella pneumoniae
atggcaattagcgacacaaaactgcgttctctctatggtaaaccatattcgggcccggctgaaatcactgattcagacgggcttgggatccgcataacgcctaaaggagtaatcagctttcagttccgttttcgttgggacggcaaacagcatcgtctggggcttgggcgttacccatccttaacgttaagagacgctcgcaacaaggttgctgatttgcgcgaggcagttgataaagggattgacccccggattatggccggcgggctacgcgcccaaaacaagcccacggtaaaagagtgcctggactactggaaggaaaattacgtcgatatctcgttgagggaaaaaacacaggcgctctataaatcgacagtcattaaacatttgagcgatgtgtttgcgggggttcctgtcgaagatatccccgtacggctgtgggtggagctgttcactgaagaggagcgtatcaacccccggcgtgccaggcagctgctgattcagctacgatcggcgattggatggtgcgttcgcaggcagtttgtcagtgcacctgaactgatgctcctgcagcctaaggatatcggtgttaagccctcagtcggtgaggtgacgctgagttacaatcagcttgcaaaaatctggctggctattgagcgcagccgcggttcaacatcaaaccggctgttacatcagttattaatgctttatggcgcaagaaatagcgagatacgggattcggtaaagggtgagtttaacagggaagaggggatctggctgcttccagccgaaaggagtaagaccaaaaaagttgtcaggcgacctatttttgacgcggcggatactttgctgaaaaaggcagaaatgacctacggaaatattctctttcccgggcctgatctgactaagcctatgtctatcgccggtgctaatcgcttcctgaaaagaatcgagctttcactggggattggcgaatttaccgcacatgactttcgtcgcacgctggcaactcgcctttctgaagagggcgttgccccgcatgttatcgagaagatgctggggcatgagcttggcggcgtcctgactgtgtacaataagcatgactggatagcagaacagaaagacgcctacgagctgtacgcagaaaagatattctggcatatcaagaagatttcgggttga

SEQ ID NO: 225137 - DNA, 285 bp, Klebsiella pneumoniae
atgagtaaatgtagcgctgatgaaaccccggtttgctgctgtatggatgttggcacgattgttgacaacaccgactgcatcgcctcctacagccacgtattcgccaaccgcgctgaagccgagcaaacgctcgccgcgttaagcgaaaaagcccgcaatgtcgaatctgagccgtgccaaattaacccaaccttcactgacgttgacggcggtgtgcagctggatatcgattttgttttcagctgcgaagcagaatccctgatcttccagctgggcttacgttaa

SEQ ID NO: 225138 - DNA, 1323 bp, Klebsiella pneumoniae
atgagccagaaaacccgctttacccaatctgcccttgcagtggctgtcgcacttgtttccacccaggcctggtcagcaggcttccagctcaacgaattctctgcatcggggctgggtcgtgcctattccggtgaaggggcgatcgctgacgatgctggtaatgccagtcgtaacccggcattaattatgatgtttgaccgcccgaccatgtcggcgggcgccgtgtttgtcgacccgggcgttaatgtttcgggcacctctcccaccggcaagagcttgaaagcagacaatatcgccccgacggcgtgggtgcccaacttccactttgtcgcgccgattaacgaccaatttggttggggggcgtctatcacctctaactatggtctggcaacagagtataacgatgattatgcggccggcagcatgggcggtaaaaccgacctgaccaccgcgaacttcaacctgagcggcgcctaccgcctcgacagcaactggagcttcggcttaggctttgacgcggtctatgccaaggcgaagatcgagcgctatgcaggcgatctggggcagattgtcgcaggctctggcgcgctgccgccggcgctggcgggccaggtagcgaagatcccggccgacacgcagatcgcccatcttaatggcaacgcgtggggcttcggctggaacgccgggatcctctatgagctggataagaataaccgctacggtttaacctaccgttctgaggtcaagatcgacttcgacggtaactaccgcagcagcctgccggcggcctataaccagatcctcggcaacttcggcctgccggcgggcaccagcggccagacgaccaatggttcgctaacccttaacctgccggaaatgtgggagctgtccggctataaccgcgtggcgccgcagtgggcggtccactatagcctgacctacaccagctggagtcagttccaggagctgaaagccaccggcagcaacggccagacgctgttctataaagaggaaggcttcaaggacgcctatcgtcttgcgctggggaccacctattattatgacgataactggaccttccgtaccggtatcgccttcgatgacagcccggtgccggctaataaccgctctatctctattccggaccaggatcgcctgtggctgagcgcgggtaccacctacgcgttcaataaagatgcctcggttgacgtcggcgtttcatacatgcacgggcagcatgttgaaattaaggaaggcccgtataccttccgttccgaaggaaccgcctggctgtacggcgctaacttcaactaccgcttctga

SEQ ID NO: 225139 - DNA, 762 bp, Klebsiella pneumoniae
atgaattatcgcctgtcggcgcttgcgcttggcgccacattgctggtgggatgtgccagttccagctctggcgatcggccgcaggggcgctcagacccgttagaagggtttaaccgcacgatgtttaacttcaactttaacgtggttgatccttacgtgcttcgccccgtcgcggtggcatggcgcgactacgtcccacagccggcgcgcaacgggttaagcaattttaccagtaacctggaagagccggcagtgatggtgaactacttcctgcagggcgacccctataaaggtatggtgcattttacccgcttcttcctgaacaccattctcggtatgggtgggcttatcgatgtggccgggatggcgaatccgcagctacagcgggttgagccacatcgtttcggcagtacgcttgggcattatggcgttggctatggcccgtatgttcagttgccgttctatggaagctttaccctgcgcgacgaaggcggcgatatggccgatggcttgtatccggtgctctcctggctgacctggccgatgtcgatcggtaaatgggcggtggaagggattgagacacgtgctcagctgctggattccgacggcctgctgcgccagtcttccgacccttacattctgatgcgtgaagcctacttccagcgtcatgactttatcgccaacggcggtaagctgaccccggcggacaacccgaatgctcaggctattcaggatgagctgaaggatatcgattcacagtga

SEQ ID NO: 225140 - DNA, 930 bp, Klebsiella pneumoniae
atggatgaactagacaataacaaattaaaggcagaggatgacgaaagagaagtggaaagtgaggaaaatcagcgtggtgaagagatcgaagtaaatgaagatcgccttccctcgcgggcgatggcgatccatgaacatattcgccaggaaggggaaaaagagatggagcgcgatgcgctggccctgctatggtcagcgattgcggccggcctgtcgatgggggcctccttgctggcgaagggaatttttcacgtcaaactggaggggatcccgggcggttttttgctggaaaacctcggctacaccttcggctttattatcgtaattatggcccgccagcagctgttcactgaaaatacggtcaccgccgttctgccggtgatgcataatcccaccctcggtaacgtcggtttgctgatgcggctatggtcggtggtgctggcgggcaatctcatcggtaccgcggtggccgcatgggccttcaattatatgcctatttttgatgagccaacccgtcaggcctttgtcagcattgccgaagacgtaatgaaaaacagtccgacagagatgttcgccaatgcgattatttccggctggctggtcgccaccatggtctggatgtttcctgtcgccggcgccgccaaaatcgtggtgattattctcatgacctggcttatcgccctggcggataccacccatattgtggtgggctcggtcgagatcctttatctggtgtttaatggaaatctgccctggagcgactttatctggccgttcgccctgccgaccctggcgggaaatatctgtggcgggaccttcatcttcgcactgctgagccatgcgcagatccgtaacgatatgagcagcaagcgaaaagcggaagcccgcgcccaggcggcggagaaagggaaaaaggccgaccgggcataa

SEQ ID NO: 225141 - DNA, 1197 bp, Klebsiella pneumoniae
atgcaaatatccacacaaaatacactaagccttataaatattatcattaaatcaatttttcctgatttagctatgcatatgcaacgcactgcatatatatcattaattattgcaaaggagcttaaccttcataaaaataaaatagaaaacatttacattgcatccaatatacacgatataggctttattgataaaaaatggtcggtcacagcatccagggatatcgttgagagtgaatatattactgagcatgaagcgaatggtgtgatgatgctgaatgaaatatctatttttgagccagcgctaactattatcggacaacatcatatatcatgggttgcaaacaatccagaaaaataccctttggaatgtcatattttgcatatggcagatgcttttgagctgttcacacagtcccagcttgataataatatatcttatgaagatataaaaattgatgatttcattgaagaaaataatcagttcccgcctgaactgattacagctttatataaagttataaaacacgatattttatggtatcgccttgcctctacacaactggaacagacgcttgaagacatcagtccagtcaaaaaaaacataatctcaactgacgatctgctggaagtttgtcagctaattgcaaaaataatcgacacctatagtaactttactatgtctcatagcattaaagttgcaaaaatatcgcgtttcattgcggagaaaatggaactcccgttggaatcacaaaagcaaattcagatcgctggttaccttcatgatattggtaaattatatatacctattcacatactggaaaaaaaaggcagactgactgcgtctgaatatagtctaatgcgaatacacagttacaagacagatgagatgctttctcaaatagagcctctgcgaaacattaaacactgggcagcaaatcatcatgaacgacttgatggtagcggataccccaggggactggtggcatacaaacttgatttaccgagcaaaatactggctatcgctgatgtttttactgctatggcagaagacaggccctatcgtaaaggaattaaaccagaaagaattctggacattattgatgaagaagtgcaaaataaccggctcgaaaaagtggtctttgatgttctcaaatcaaatatcaaaagtgcatattctatcatcaacaacgtataa

SEQ ID NO: 225142 - DNA, 300 bp, Klebsiella pneumoniae
atgaatatcgtatttctgggtattgatctggctaaaaatgtttttcagctctgcgggttaaaccaggccggcaaaccggtttatacgaaacgaactggccgaaaagaattgctccagacgctggcaaatattcctgcatgtctgattgggatcaaagcgtcctccggggcattttactggcagcgtgagtttgagaaactggggcacaaagtaaagttcatcagtcctcagtatgtaaaaccctttgtccgcgggcaaaaaatgatagtaatgatgcacaggccatcgcagtggctctga

SEQ ID NO: 225143 - DNA, 300 bp, Klebsiella pneumoniae
atgaatatcgtatttctgggtattgatctggctaaaaatgtctttcagctctgtgggttaaaccaggccggcaaaccggtttatacgaaacgaactggccgaaaagaattgctccagacgctggcaaatattcctgcatgtctgattgggatcaaagcgtcctccggggcattttactggcagcgtgagtttgagaaactggggcacaaagtaaagttcatcagtcctcagtatgtaaaaccctttgtccgcgggcaaaaaatgatagtaatgatgcacaggccatcgcagtggctctga

SEQ ID NO: 225144 - DNA, 531 bp, Klebsiella pneumoniae
atggtcatctgtctgaatacgtaccggcaggtgctagcccggcacccgcaacctttccatcacaccgaccacatcctcacctttcagcgactttccggcatggatcgccagacactcccgactaaaattatccactacagtcagcgcccggaaatgtcgtccgttaaacaggttatccgacacgaaatctatactccagcactgatcgacaccggtctggaccggacgttgctgacgatgtgctgcactgacatgcctacgcgggcgctttttgcgcaggctgaggccttccagacaatacatccggtgtgttttcttgtggttaacaggctagccttcccgccgcagctgaatatgaatacgcgggcaaccgtagcggatccgggtttccgctatttcccggatacgcagggttatcgcccgatcatcctgccggctctgccagtggtaaacggttctgctctgcatcagcagtccgcattcccgtcggacactgatacggtaagcctcccgcagaaatgcaccgcctga

SEQ ID NO: 225145 - DNA, 231 bp, Klebsiella pneumoniae
atggacttctcccgccccggaaaaccaacggataacccgtttattgaatcattgaacggcagtctgcgggataaatgcctgaacattcactggtttctctcgctggaagatgcgcaggacaaactcgacaactggcgcagggaatataatcatgagagaacgcattcatcattaaatgacatgagtccggctgaattcatccgaagtctccggaaagacgaagatctctga

SEQ ID NO: 225146 - DNA, 1680 bp, Klebsiella pneumoniae
atgaactcactcagaaaacaaaaggtcataaattctgcactgtgggccgccgccggggatgctgttggctggatttccgagcttaccgatgaaagtggcttaaagcgtaggattaacgacacttatcttctcaagcctgttagttggaataggaaaattggggggtactcaggagtaacagtgagtctcccagctgggacatattccgatgatacgcaattaagattagctgtatcaagatctatcagaagtaatggagagtttgatacagagtcatttgctaaaatagagcttcctgtttggttgtcttatgccttaggtgcaggtagagcaacgaaattggcggctaccaaccttatgcggaaagataccaattggttttctaacttctacaaaaataatggtatcgattacactaattctggtggaaatggtaccgccatgagaatacaaccccatgtatggagttgtaaaaacttatctgataggaaatatgcagcttctgtaattaaggattcattagttactcatggacacttattagcaatctgtggagccctcttacatgctgatgctctacagtatgcgttaataaatggtaagccagcaggcccgttagaaataaatggattcatcgataacttcacatcgataccttctgtcattcatgaaatctatgagttgaacaatttctggcttcccaattgggagattatgtcaggtaacaaattacctgaagaagttgagagaattcgattggaatcgaaagaatacctttcaaaggctcttaatgcagctaaagaaaatagtgatatttcagataagtataaatcagcaattaatgcgttggaatgcaacaaagactctaggagaggcgccgcaacgaatactgctattgcgagcagtttactttgccatttttataaaaactcatccccatatgaagcaattatctcctgtgtcaatgtattaggtactgatacggactcaattgggagtatggctggagctattttgggatgttataacggcattccagaatgggacattcaagatagcaactatataattactgaagccagcagattaaatgacatagcggaaggtgttgtaaccaaaaactttaactatccgaatataaacaaatggcagtcaccgcaaacacagagtgatacattagttaaaaatcaagatggcatatatcatatagttggattaggaagagttaccccattaaaatcaggaatttggaaaactaaaaaccatgagtggcaatggatgcaactcgaatacggacagactgttctattaaaaagtaaaatcggtgatataaaaatggccgatcctactcagattcgtgaaaatgacgggtctctcaataatgttattgcatctgaacaaacagtaaaacctattgagccactgattcaaagtgaactaagaagtagtccgaaatcagaaacaagccaatataagtttgagcaaaatagcttcaattatgaagatcctgataacttcgatctcgatgacataactacaagtttaattaagaatggctttaatgaacgtgagataggtcattaccttattaaacttgcagataaaaaagggctcgagtcttgcattgcttttgctgcaataattggtaaggcattcattaccagaaagaaaaaacagtaa

SEQ ID NO: 225147 - DNA, 666 bp, Klebsiella pneumoniae
atgactattgaacagtatattgaagacaatggtatctcagagatactacatttcactactgaaagaggattaacaggttgtgctggtacaggtttagttttatcccgtaaagctctgaacgcggaacaatatttaagctatatatcatcaccggtgtcaagtgaaagaaaagaagcacaaaatacgtttaataaagatgaagattggttggattacatcaatctatccataagtgaaataaatacaagttattttaaagcagctaagcgttggttcataggtgaggatagatggtggtgtattatggccttcgaccctattatactaactcaccaaagggtatattttacaaccacgaacaatatctatacatctgtaaaaagaacgctaggcattgcggggttgcaggctatgtttgcagagactattacaagatggaaagataatgctgtactaagaaatggtcgcccacaaagattgactacctgtgagcaagctgaagttctgtatccaaacccacttgatatgaaatttctaaaaagcgtttacgtacaagatcaagagcaggcagcatctatacatggaacactgaggagctttggttttcattcggtaaatgttattatttgtccagataaatttttaggtgtgcctaacacgttctaa

SEQ ID NO: 225148 - DNA, 1398 bp, Klebsiella pneumoniae
gtgaaaattctttctaaccatagagctacacctgagcagctgcctatagtcagtcgaaatactgcaggaatagtggttattcgaggtgcggcaggtagtggaaaaactacaagtgctttacttcgacttacggcaatagttaatgcgttaacttatcgacgaaatcttaataatgacaccacacctataaaaacattagtattgtcatttaatagaactttagctggatatattgacggtttacttaatgacagtattcaggctaaagcgatcccagtgcatgttgaaaacgacacatttgctaattgggctcgaaggcatctgaaaacacccataatatctgattctgctcgtgactcttatcttcttaataaatgcttaagactcggaattgatttaagttttattctcgatgaaatagactatttccgtggccgcttccgtcatcatgaattagataactacttaacaactgagagaactggtagaggattgtcacctcaggtaaccagaccaactcgccagtttttgattgacgtagttcgctcctatgtacaataccttcaagataaccagttagatgattggcatacgcaatgtgagaaaatgatagccagagaatgtttaggttatgatattattgtagtggatgaaacccaagatttttcagctaatcaaattcgggcgatattaaatcaccttaatgatgattactatttaacatttgtaattgatactattcaacgcttatatccacgtggtttcacatgggttgagaccggattagagatgcgtaatgcggcttactttagattaggagaaaaccatcgaaatactgtagaaattgctgaatttgctgcgtcaatcactcatggattagcgattgatgatgatgggagtatcagtgacttcacaaaagccacaaggcatggcccaaaacctgttgtttgcaagggtttatattcacagcaagttagatatgcaattgattatattcatcacaatgttgaccttcaaaatgaatcagtagcctttcttaagcctaaaggcggtcaatggtttgaggaaattgaaaaacagttaaataataataacctcccattcattaccattactaaaaatagggtttggtcacgcggaccagaaaatatcgcattatcaacaatgaactcagcgaaaggtctcgagtttgaccatgtaataattttaggcttaagcattacaaatatgcaacatcagcaagatgagaatgatgataagttacaacaactaagaaggttacttgcaatggctattagtcgagctagggaatctgttgttattggatataaagaatccgaaaaatcagatttagtggactattttacccccggtacattcgatgaggtagatttataa

SEQ ID NO: 225149 - DNA, 951 bp, Klebsiella pneumoniae
atgaacaactggccaaacccctttattgaacagcgtgcagacccctttatcctgcgccatcttagccactactactttattgcctcggtgccggaatacgaccggctggagatccggcgcgcggtaacccttgaaggattacgcgatgctgagccggtcgtggtttggcgcgcgccgcaaagcgggccgatgagccagctgatttgggcgccggagctgcatgaaatagacggtaagtggtatatctattttgccgccacccatactcacaatctggatgcgctagggatgttccagcatcgcatgttcgttctcgagtgcgctgacagcgatccgctgaccggccgctggcaggaaaaaggccaggtggtcacgcctttcgataccttcgccctcgatgccaccacttttacccatcaggggaaacgctggtatctgtgggcgcaaaaatccccgcatatcgaaggcaactcaaacctgtatctcgccgaaatggctaacccgtggacgttaaaaggcgagccggtcatgctgagcaagccggagttcgactgggagtgccggggatttaaggtcaacgaagggcctgcggtactgatgcatggcgataagctatttatcagctattccgccagcgccaccgatgaaaactactgcatggggttgttatggatcgaccggcaggccgatccgctgcagccggcaaactggcataaagctccgcagccggtgttccgcaccagctatgaaaaccgccagtatggcccaggtcataatagttttacccaaacgccggaaggggaagatgtgctggtgtatcacgcgcggaattacactgagatagaaggcgacccgctgtatgatcccaatcgccatacgcggttaaagctggtcagctggcgggaagacgggatgcccgacttcggtattccaccagcggatacgctgtag

SEQ ID NO: 225150 - DNA, 1407 bp, Klebsiella pneumoniae
atggcagagaacacgctttcaataagagaaaagattggttacgggatgggtgatgccggatgcaatattatctttggcgccatcatgctgtttgtgaactatttttacactgatatattcggactggcgccggcgctggtcggcgtacttctgctctcggtgcgagtcatcgatgcggtaaccgaccctatcatgggcgctcttgccgaccgcacccgtagtaaatatggtcgctttcgtccatggctgctgtggatcgccttcccctacgccctgttcagcgtcctgatgttcaccactcctgagtggacctacaatagcaaagtcatctatgcgtttgtgacctactttctgctgtcgattacctataccgcgattaatattccctactgctcgctgggaacggtgatgaccgccgatccgaaagagcgtgttgcctgccagtcttatcgtttcgtcatggtgggtatcgccacgctcctgctgtcattgacgctgctgccaatggccgactggttcggcggcgccgataaagcgaagggctaccagatggcgatgaccgtgctggcctttatcggtatgtgtatgttcctgttctgcttcgccaccgtgcgcgaacgtatccgcccggcggtgcagacgaatgacgaactgaaaaaagatctaaaagacgtctggaaaaatgaccagtgggtgcgcatcctgctgctcacgctgtgcaacgtctgtccgggctttatccgcatggccgccaccatgtactacgtcacctgggtgatgggacaaagcacccattttgccaccctgtttatcagcctcggcgtagttgggatgatgattggcagcatgctggcgaaagtcctgaccgaccgctggtgcaaactgcaggttttcttctggaccaatatcgtgctggccgtgttctcctgcgccttctatttctttaatccacacgccaccacgctgattatggtgctctacttcctgctcaacattctgcatcaaatcccttccccgctacactggtcgctaatgtccgacgttgatgactacggcgaatggaaaaccggcaagcgcatcaccggtatcagcttctccggtaatctgttcttcctcaaggtcggcctggcggtcgccggggcaatggtcggtttcctgctgtcatggtacggctacgacgccggcgcgaaagcgcaaagcgcctccgcgctgaacggtatcgtgctgctattctcagtcattcccggcgtcggctatctgatcaccgccggcgtggtgcgcctgctgaaggttgaccgtaccctgatgcgccagattcagagcgatctggagaagcgccgcagcaactacagcgagctgaacgaataccaggaactgaaaaccagtgaacacgtaaggaaagcctga

SEQ ID NO: 225151 - DNA, 1386 bp, Klebsiella pneumoniae
atgaaaacagaacagctgatccctctctgccgtcgctaccacgccatgctgctgcatagcgatgaacagacaatctctattgcggtggttaataccccgccggcggagttaatggaggcgctacgcttcgcgacgcaaaagcggatcgacattgaatgctggagccaggagcagatggataagcgtctgcaggcccaggaaaagcaggcgcaactggcgcagaacgacgggccggaaaatatcgccgaacgggtcaaccagatcctcgaacaggccctgcgtcagcgggcgtctgatattcatatcgagcccacggaaacgcacttacgcatccgcctgcgggtcgatggcgtccttcacgccctaccgttgctggctcccgaactggccgcaccggttatcgcgcgactcaaggtcctggccagtctcgatatcgccgagcaccgtttaccgcaggatggccagttcgcgctgaatcttgcgggacgaccgctctcttttcgcatcgccactctgccctgccgctatggcgaaaagattgtcctgcgccttctgcatcaggttgaccaggcgctggatctggaagcactcggactctcatcctcccagctggcggcctttcgccaggcgctgaaccagccgcagggtctgctgctggtcaccggcccaaccggaagcgggaaaacggtgaccctctacagcgccctgcaggccagaaaccgtgagcaagtgaatatctgtagcgtggaggatccactggagatccccatcgccgggatgaaccagacgcaaatcaatccccgcgccggactcacttttcacagtgtgctgcgcgccctgttacgccaggatccggatattgtcatggtgggcgagatccgcgatgccgagaccgctgaaatcgcgctcaaagccgcccagaccggtcatctggtgctctccaccctgcacaccaattccaccagtgaaaccctgacccgcctgcagcaaatgggcatcgcccgctggatgatttcctctgcgctctcgctggtcatcgcccagcgtctggtccgcaagctgtgtccccactgtcggcgtaatgccggcagcgccgccgacctgccgcacagcctgtggccccgcccgctgccacgctggcaggcagcgggctgcgaacattgttaccacggatattacggccggctggcgctgttcgaagtgctgcctgttacccccgggctacgccaggggatagtccagggacttaacgccattgagattgaatctctggcgcgagccgcagggatgatgacgctttttgaaagcggctgtcaggctatcgaacagggattgaccagcctcgaagaggtggtgcgggtgctggggatcccccatggcgactaa

SEQ ID NO: 225152 - DNA, 846 bp, Klebsiella pneumoniae; identical to SEQ ID NO: 94120

SEQ ID NO: 225153 - DNA, 1443 bp, Klebsiella pneumoniae
atgaaaagtcatactccgttgtgcgatcagctcataggtagtgcggtaaatgcccttaatcaggcacgtattgacgatatggttgtaaaactctctcatcaggatattgcgtttgttctggctcgtgaacagatgcagaaggtacgtgattttatcgcttcgccgggcaatattcttggcagcatgaacaccaaacatggcgaaatagccgagcaggttgaggtgggcttacggaactctgagcaggccattaaagaggggctacaagatgccaccacctttcgagctacgtttgagggagtgggccgcaacgcacggatggattatctgattgatggcatagaggttcagtcgaaattcattaacggcactaacaaaaatctgatgcatatcctgaagcacatggatgagtactccaatttcggcaaggatgggtcgttctaccatattccgaaagatacctggcaggagatacaggacgttcttgacggcaaacccgttgaaggactcaaatcgaccacgattgaggcgattaaagcaaaagtcgctgaaattgagagtgaaacacagcggccttttgctgaagtggtgcgtccgggcatctctgattataaagatgtgcaactagggaaaatcaatgagacgctcgataagcacgatcaggagctcgccagtcaaaacgacgcgaagcgcactgaaatcatcgatgaccatcagcattcactggctgaagggatgcgcgcaacggcgatgggggccgctgtgggtggggcctttgcgctcggaaccgggatatatcgcaaataccgcgacggtaaaaatatcttcctcggcgactttgatgcccaggactggcaggacgttgggctggatacgctgaaaggtgtagctgtcggtggcgtatccgccggggcgatttacaccctgaccaactgcgcgtcgatgggcgctccctttgccagcgcactggtcactgcgaccaaaggtgtggcgagccttgccctctcttatcagcgcggggagattgacctggatgagttcaccgatctagggcttattgtctgcgcagagtcggccattgttggtgccatgaccgtggcaggacaggccttgctccctgtgccggtactgggggcgctcatgggctcgatttccgggaagtttatggtcaccgtggctaaaagcctagacggtaaagcacgtcatgcattacaggcacgcatggatgagttttcccgccggttaaatactctcgagcaagaggtgcttaatcgtatcatatccgaatttgccgccctcggcgaactgacggctgctgcctttaatgtcgaaaataaccttcagttgctggaagcaagtatcacacttgcacaagtgcatggcgttgaaaaagacaaaatcattaaaaatgcggatgatctggatgcgtttatgacggcctga

SEQ ID NO: 225154 - DNA, 966 bp, Klebsiella pneumoniae
atggaaaacaaaagcatatatcattatacaggttcacttggtttattagggataataaaggaccaaaccattcgctgtactaacttaaaatttctaaatgacagagaggaatataactatctttatagtgtatatgtaaaaagacataaagatgacactaacggtttattggaacttctaaaggatgttaataataacatgaaggagttgtataagatagtatatgattcatttggaatgtttattgaattaaatcagagagattcatatgcagcctgttttactactaataatgatagtattcagaactggatggcttatggacggaatccagtaaactacagcattgagtatgcaaaacaggatgtaaataatgcaacactatattgtggtcgttctaatcaaaagaaaatagtggataaactttgtggagtgagagaaaacgaactcattgctggttcagagttactcaaatattttgttcctcgcttttgtaaagttgagtatggtgtagagcacttcccagataaagttttctctaaattcttaagtgatatacttagtgaaatgaatgctgcagaaagaggtactgatggtctttttaataaaacaatagaatctaaattctcacgtctttataacgagatgattttttctttttcttctacaaaaaaagaagagtggaagcatgaaaatgaatatagaatagtgctttctgaatccacaattttcgatggaaataaaaccgtgcgaaagacaggcgcgtgtgattttatctcctggagagatagtaatggaatgcttatcccttttgctaactttccaataagcaggaggcttataaagagcgtgacttatttggcgcaaaataaccctcaaagggtaaaggaatcattggaattattgagaagtttgtatgaattagattttgagataaaagaatcagaatgtagtctagttatttga

SEQ ID NO: 225155 - DNA, 408 bp, Klebsiella pneumoniae
atgcgtaactggagtgagcctaaaaagaataaagcccatatcgagctgatcccgatgatcgatgtgatgatgtttctactggttttctttgtcctgattagcctgaatgtgatcccggctctgggcttgaaaacgcagctgccgtcggccggcagcgcccaacagcttaaaccgcaaaaaaaagccattatcaccctcggcaccggcgaccagctgcagcttgatggccagccgctgcccctgaatgcgctggtcaataccctgaagcaacagcagcaggaaaaccaaaccaccaccattatcgtgaacagcgataaagaggttgcggtggaacgcctgatcgccgtgatggataccctgcgtcagggtggtttcttctccatttccattgacacacggaagcagtga

SEQ ID NO: 225156 - DNA, 900 bp, Klebsiella pneumoniae
atgtccagattcagtaaacagctgtgcaaacaacttgtcactcttgctcgtcagggacggggaagttataaaactgtggctgatcgctcaagaattgcagaacgattttctgagagactgtctgatctgaatattcagattagggacgtgaaacacattaaaacttcacatattgaaaaatatatggaaagcaggaagacggacaacctttctctcagaacccttcagaatgaaatgtccgcaatcagatctatcttgctatcagccggaagaaataagcttgctgaccctaatcatattagtttgagcaatcatgcgctcggaatttccggggcaaacagagatggtacgaaactacctattacagacgaaaaactcaacgctgtagtcaattttgctcaaagaaaagacgaaggcgtagctcttgctgtgcaactttcccgatatcttgggttgagaacagaagaaaccgttcagtctgcaaagtctttaaaaacatggagacaagcattgattaataatcatgaacgtgtccgcattgtatttgggacgaaaggcgggaggccgagagaaacaacagtttttaatcgtgaaaaagttttatcaattcttgataaagcaattcaatatatcagtgaacataacggaaagctgattgataaaccctctctgcataccgcaattgatcgctaccgaaatattgtaagagaggcagggatgaatggtaaaaatgcgccgcacagtttacgttatgcttattcacgagatgctgtaaatcatcatattaaaaatggaatgagtcgcgatgaagccgaggcattagtttcaatggatctgggccatggagatggccgggggcgttatatcaaacaagtttattttcgtaaggaaacagaatag

SEQ ID NO: 225157 - DNA, 831 bp, Klebsiella pneumoniae
gtgggactgacgcgttctgcggcgggaaaagcgctgtcccgtcttgaagactacctggggacccggttgtttcatcgcacaacaagaaggctttccctcacaacggaaggtcatgaattttattcccgctgcttacagataatcgaagatgtgcaggaagccgaagccagtatccggcatgaccatccgcttccccgtggcacgcttcggctaacagtttccgaaggatatggcaaagcgatagtgattccgtttctgggctcgttgctggccacatcgcccgaactgagcgttgaggtcaattttacggaccggattgtcgatcttgtggaagaagggtttgatctggctatcagggtgggcgaagcggtgaccagcactgaatatgtgacgcaggtgatagcgcgcgccaggccgcgtctttatgctgcgccgggctaccttgaaaagcagggcgttcctctcagtacctccgggctggaaaaacatcaacgcctcatctacggtcttggcaccactaccaccgcgtggaacttcatcgataaagaaggtcagtcggtcagcgtcaacggcaggattcacgcccggttcgatagtggcgatgccatccgggtcgctgcgacagaaggtatggggatcggacttctgcctccctttgtcgtggcacgggaactgaacgaaggcaagctggttgaagttttgccgtcaataagcgcggcagagcttgccgtccatgtcatatatcccagccgcaggtatctaccggcacgaattcgcacatttattgatgagttccgaaaatacctgaacgctaaggaaagtgaattctaa

SEQ ID NO: 225158 - DNA, 939 bp, Klebsiella pneumoniae
atgctcccggaacaggcacaaaacgcacttgatggctggatcactgccgccgcccccgtggtgaagaaactgtatggcgagacggaaaccgaatggccagaggttcgccggcaatatatgcatggcatgcttaatctctttccggccatccgcggcgtttcctacaatacaacaatgttgggatccacccccgctctctgcgcgacgccagatgatgttgagaccgagcgtacagtcctttatatccacggcggcggttacgttcacggaggcgtagaagcctaccgcggccttacgggacgtctcgccaaccagctgaaggcgaaagtctacaccccggcctaccgccaggcgcctgacttcccgttcccggtgccaataaacgatgttttttctgcctatcgcgccctcctggcctgcggtagcgatccgcgaaagctcgttctggtcggtgattctgctggcggggcaatggtggtaaccatgatgcgtaaggcccgtgacgcaggtattgcgctgccggtggcgggagtcgccatctccccatgggcaaacctcacgcacagcggtttttccgcaacggtgcgcgatggaatagatccgctctgccgcgtagcgtttctcaatatcctcgcgcgcaccttccttgcgggtgcactgcctacgcatcccgatgcgtctcccgtttttgcagatgttcacgatctggcgccgatcctgattcagatcggtgaaaatgaagtcatgctcagcgacgcgatccgtctcgcgtccaatctgggtgaagcgcgggtacgcacgtcgcttgaggtctggccgggaatgtttcatgtctggcatttgttggccgggacgttacccgaagccgaccaggctctgcgtaatgcggtccgtttcctcgacgacgcgctgaggatcgctgaagctagcgggaagtaa

SEQ ID NO: 225159 - DNA, 849 bp, Klebsiella pneumoniae
atgtctacccccgcttcttatcgtctcggaaatgtggttattacccgaattactgaacagctttttagcatgccgctggctaaattattgccggatgccgcaggcgttcgttttcctgcagggatgaacgcgcaaacgccgatcgaaatgagcgtgcatagctggttaatcgactcgccgcagggccggatactgattgatacggcgaccggcaatggcaagaatcggccatttagccccttgtttcatcagctctcttcgccatggatggaaaatttaaagcagacgggtattcaacccgatgatatcgattatgtattgcatacccatttacacaccgatcatgtcggctggaacaccctctgggatggggaaaaatggcggcctgcgtttaccaacgcgacatgggtttgttctcaatctgagctcaattttgtctcatctccggcagctgctgcgcgcaaaatggtatttgatgacagcatttcgccgattgttgagagcggccgtctggtgacggtagcggattccctgacggaatttctcccggggatcctgttttaccctactccggggcatagcgtcgggcatatgagcattgccgttgaaacgacagagggaacggcgattttttgtggcgacctgatgcatactccgctgcaggtgtctcatcacgccctgaattccgtattttgcaaggatagtttacaggcgaatcagtcccggaagtggttcttaaactttgccgccgaacgtcaggcgacggtattcacaagccacttttcagcaagttctgtggggcgcgttaccggcacagaagagggcttcgtgtgggaatttgaacggtaa

SEQ ID NO: 225160 - DNA, 1332 bp, Klebsiella pneumoniae
atgaatattcgatccggtgctagtcaagaggggaccacggtgggcgcatgcgcctaccctgttgggttattcctcgcctgctttgccttttcctatctcgatcgtcaaataatgagtattctggttgagccattaaaggctaccttacacatttcagatattcagataggtatacttcagggattctcttttaccctttgctatgctaccgccggggtgattatttcccgaatggtggacagtgccaatcgggttagattaattgcggtgtgcgtggccatttgggcatgttcaacgatgttgtgcgctaccgccggtagctatacggagctgttgatctggcgcggtggaacggctattgcagaggccgctctgagtccggccgtgttgtcgctgttcgctgatatgtttattgccagccgtttaactcgcgctaccggaatctttatgctgggcccctatattggcagcggcctggcactcaccgggggcggaatgttgttggggtggttaacccgcgaaatgggccatatgcccggtttggcggcaatgcatccctggcaatgggtctttttaatcgtcgggttacccggcatattactctccatattggtttttttcaccgtaagtgaacccgcccggcggaatcatcaggcgagtcagacatcggtggaaaagggaacgcctgcgttccgcgacgtacttaacgaactgctggtgaagaaccgtttttgcttgcctttttattttgcctacacctgcctcattatgctgttttattcgctgacggcctggttcccgacggtcatgatgcggcactttactctcacggcgggctatgttgggcaaattaccggaccggtatatatgtgtgcgggggttgtcggggttctgctggccgggaaattagtgcgcgcggcgctaccggcaaacctgctacgagactcgctcaaagtgtctgcttgcgcgtgcggattgttgattattttctccgtactcgcctcttgtatgccattttctacggcgattatcttttatgccataacgctgttctgcgccagcatcaccatggcgctggcccccattccgttacaaatagcgatccccaacagaatgcgcggccgcgcgatttccctgctggtttttatgactaacctgttgggcgggggcattgggccgtttctggtcggatatttaagccagaaatttcacggaattgacaatgcgcttggtttggggctggcgatagtgagcgtcagcgcggcaacggctgcgactctgttttatactcttgccatgaagcgcagtgctacagctgtcagccatgattaa

SEQ ID NO: 225161 - DNA, 1011 bp, Klebsiella pneumoniae
atgacctcaccacgttcgcttatcagtgctaccgtcgattttgataaagagggatttcaaaccggcgtgctgatgcttccttattcgcacaacacctccgcctatgggcgtattcccgttccgatcgccgtcctgaaacaaggagaaggtccaacggtcctgatgaccggaggtaaccatggcgatgagctggaaggccccgtcgcgttgatgaaaattatccaggaaatggcagcctggaaaattaatggcagaattattgtgattccggggcttaatttcccggcatttcagcagggtacacgtacttctccgatcgataatggcaacctgaaccgaatgttccccgggaagcggaacggcagcctgacggaaatgatcgcgcattatgttgatacggaattatttccgctcgccgacattattttagatatgcatgccggcggcgcatcatttaaccatgcgccggtgttattagccgcgctgccgaaaaacgcggcccagcatcgcgactacatcaagctcgttaacgctttcaatgcgccgacgaccatgatcatggatctgctgggagaagatcgtacatacggcgctgctgcggaacgtcacggaaagctttttctctgcggtgagtttgggggcggtgcctcctgtaacccggataatctgcagattgtcgagagtgggctgagacgcgttttacaggcatcaggggtcacgaagcatgcccccgtcgcctcacaaaatgagacgcgactgatgaaggtagacggcgccggacattatctattctctgccgggcgaggggtgtttgagccctgttttaaacttggcgatcgcgttaaacaggatcagcttgccgggcgactctataacctcgatgccccctgggaaccggcaaaagagcactatttttccgggaccggagagattatggtcacgcgcacgttttctcatgtcgtcgccggtgattgtattgcggtgatcgcttcgcctgccacctggtattaa

SEQ ID NO: 225162 - DNA, 906 bp, Klebsiella pneumoniae
atggagctacgccatttacgctattttatcaccgttgccgagcataaaagcattcgcctggcctctcattatcttcacgtcactcagcccgctatttcccggcaaatacaggacttagaaactgaagttggggtcaaactctttattcgtcatcctcgcgggcttactctcaccctggcgggtgaagcgttttatcgtgatatcaaaaaaatgctcgctggactggatctttctgtagaacaggcgcagcgcatcgccagcggttttgacgggcatctgcgacttggatttgtggaaaacagcagctgggatgggattgtaccttccacgctgcgtcactttaagcaggttgtgccgcgggcaacgcttgaactgattccgctgaacacgccggagcagattgcattgattgaaaagggcaagctcgatggcggttttgtttatgggtttggcgccatgtctgaacagtgtcagtttaaaacgttgtatcagtacgatattcgcttagcgctgccaaaagcatggccggttgaggataatctcgacgttatatcgctacatcgggtggcgcacttaccgtttatcacctccttccgccgggtctatcccgcctattacgatcacgttatggccgcctgccacagcatgggaattacccttaacgtggtacaggaagcgcaaacagagtccgcaatactggcgctggtcaatgccggtattggcgtcgccctggttaattccgccactatttcacgtcttccggtaggggtgcgactagtccgtttgtcagatctaagtattatgatgccattaaaattcgcatttctggcagaaaataactctccgctggtgaaacgatttttagattcactccatgagtcattaaatatcttacattatccttag

SEQ ID NO: 225163 - DNA, 894 bp, Klebsiella pneumoniae
atgctggataaacttaccggaatgcgggccttcgtggttgtggttaagacaggctcttttgtcgcggccgcagacagactcggtatgtcgcctcagatggtggcccgccatatcgccacacttgagaagcagcttgaaacgcgcctgcttaaccgaacgacgcgcaggcaaagcctgacgccggcaggctcgctgtactacaggcgttgtgaaacaattttacaggccatcgacagcgctgaccgggaagcaagcagtacgagcggagttcttgcaggtacgctgcggctgaatgcgccggtaacgttcggccgttatgtcctggtggattttttgagcacatttcttgagcgctacccgaaaatgcgtattgaacttgttcttactgatgacgttattaatcctgcttcagaagattttgacctggtgatacgaatcggcgagcttgataagaaactccggcttgcggcaaaaccgttgcctgcataccgatttattgcatgtgctgctcctcaatacctgacaaagtacggtcatccagaacaaccttctgatctgaaacatcatgagtgtctggtttttgcaccctggtctgcggggttaacccattactggccttttgccagcactgaaggtcctgctgaagtgatggtaaactctcgcctggcgattaacgactggggagcaatccttgaggcggcattaagaggcacaggtgtgctgattggttatgaaaaagagctcaggcgacttatcaacagggaaaaactcgttcctgtcctggagaacttcactattccctcacgggaaatgcatttgctctacgacccttcacgggtaaatgaaagcaggtatcaggtatttattgacgaaatgattgattatcttagctaa

SEQ ID NO: 225164 - DNA, 330 bp, Klebsiella pneumoniae
atgcacatttatattgtcagaatggaccatccggacggcagcggatggaatacctttgtgcgcgagcatgtgatttatctgaaaggtctgatagaacagggcaaactgttagcgtccggtccgctcaaaaacacgccactgcgggcgggatttcttattttcagggctgagacgcgcgatgaagtccagtccatgatcggtgcggacccttttgcacgtgaaggccttattgcccaccttgatatccagcaatgggacccgctgttcgggcagctcagcagttactcaagccataatgcaagcggggatttgaaggatttaattgattaa

SEQ ID NO: 225165 - DNA, 378 bp, Klebsiella pneumoniae
atgatgacactgaagtaccctgaacccgccattcatgagcacagtggcggtgcgcttttcaccctgtcgcctcagggggagcccggcgtgctcccggcgacacatcagcatctggtgaggctgcgggcgatgctcaggcagcgcctgaccgggccggtcaaaatgacgtgtcatccgcaccgggtgggactcagcagcagcgtggccatctatcttgagggaaagctgaagcaggcggtgaatattcttatcaccgtgacgggacagacgagctggccgcaggaagaggagtatgcgcatccgcgctggtatatcacggtgccggattcggctgatctggtgtatctgatgctgtggatcaacgggcttgacgtataa

SEQ ID NO: 225166 - DNA, 639 bp, Klebsiella pneumoniae
gtgacgctggtcgacctggggcatctggcgcgtgagggctacgaggcgcagatggccctgaccatggtctcgatgaccaacatgatcaacaacatcgcggagcgtgaccagttcctgggccgggatattgtcttcacggtggatgaggcgcatatcgtgacggtcaacccgctgctgtcgccctacatgacgaaggtggtcaagatgtggcgtaagctcggtgcctggctgtggctggccacccagaaccttaaagactacccggatattgccgaaaaaatgctgaacatggcggaatggtggatttgtctgaccatgcccccggaggaggtcaaagatatcagccgtttccgcgcgctcacgccggagcaggaatcggtgctgctgtccgccagtaaactgtcgggttgttatacggaaggcgtggtgctggcgaaacggatcgaagcgctgtttcgtgccgtgccgcccagtctcttcctggcactgggcatgacggaaaaagaagagaaagccgaacgccgggcgctgatgaatgaatttcactgcagcgaactggaggcggcaaaacgcgtcgcgcagaatctggaccgtctgcgcggtctgacggagaaacaacaggagcctgccacggtatga

SEQ ID NO: 225167 - DNA, 2250 bp, Klebsiella pneumoniae
atgctttcactgtttacgcgtaataaatccaccgaccggcagacgccggttgatgacggccagtccgttcaggcagataaaaccctgaccgcggccgtgaagggccggcaacccctgaagcgccccgggaaaatgacgcgccgggatgaggagaaggtttatcacgccaatccgtccatcattgactttttgccctgggcagaatttctcgatgaagagcagtgtctcctgcttgatgacggcgtgtcggtgggggccgtttatgatgtgacaccggtggcgaccgaagggcgaaccgaagagcgcctggagcagatccgggactcggttgaggatgcacttcaggacagctttgatgaacatgacgtgaatccctgggtcgtgcagttcttctgccaggacgaggacgacactgacgcgtacctggacaggctgcgcggatatgtcaaaccacatgcacagcgcacggcgtttaccgacgcctggctgggtgaaatggagcgccatattcgcagtatctcccggcctgagggactttttactgactcgctgattaccggccagccgtggcgcgggcagcagcgccgcacccggatggttgtttatcgctggcttgggaaaagccgggatccgatgccgccggtggcgatgctcaaccaggtgtgcgaccgggtcgttaatgccctgggcggggcggggatccgctgcacccggcagaacggcctgcaggtgcatggctggctgctgcggctgttcaatccgtcaccggactgggtggagaaaaccacgctctatcggcaggctgcttacgcagacccgcgcgagacacctgaaggcaccgtgccggtcagcaatgattttgccgaaaccctgtggttcacgccgccggtctccgacccggaaaacggcgtgtggtggattgacaacaagccgcactgcgcggtggcggtggaaaaactgcgtacaccgccggagccgggcaccctgaccggcgagaaaaaccggggtgaaaagaaaattaatgccctgatggatatgtttccggaagggaccatggtgtgcatgaccgtggtggtgcagccccaggaccggcttgaagagcagtttaaccggctgtcgaaaaatgcggtcggtgagaataccgagtcgggccgcgtccgccaggatgtgaagacggtaaaagagtatctgggcaaccggcacaagctgtaccgggcggggatcaccttcctgctgcgcggcgatgacatgaccggcctgaagcgcaagcggctggagctgtccaccgtattgctaggggccggtctgcagccggtacggccggagtttgaagaaggtccgctgaacagctggctgcgggcgctgccgatgtgctttaacccggacagcgacaaaaaacactggtatacccgtctgacatgggttcagcacctggcaggacttttgccggtaaccgggagggaaaccggcacggggcaccccggcttcagctttttcaaccgcggcggggataccctgacattcgatccgctcaacaagctcgaccgcacccagaacgcgcatctgctgttgttcggcccgaccggggcgggcaagtcggccacgctgtgtgccgcgctctcccagctgatggccgtccatcgtccgcggctgtttattgcggaggccgggaattcgttcggcctgctggccgacttctttgacagcctcgggctgacggtgaataaaatcagcgtcaaacccgggagcggcgtcagtctgccgccgtttgctgatgcccataaactggtcgaagagggcctggccgcccaggccgtggatgagagcgacctgccggatattgacacggacgacgatggcgaggatgacaagcgtgacgttctcggtgaaatggaaatctccgcgcgcatgatgatcaccggcggcgacccgaaagaagaggccgaccttaagcgcgccgacagggcgatgatacgtgaggcgctgctgatggcggcacatgccacgtataaggaagggcggcagatgccacgtataaggaagggcggcagatgctgccgtctgacctgcagaaggcgctgtatgacattgcctctgacaacgatgagggcgtcatcaatgtccgcaatgctcagcgcaaggcgaaagcggcggaaatggcggaatccctgggcatgttcactcaggccgggagctttgaagcggagctgttcaaccgcgaaggagagctgtggccggaagcggacgtga

SEQ ID NO: 225168 - DNA, 399 bp, Klebsiella pneumoniae
atgtacagaacggttttcattctggccctgagctgtgtaatgctcaacggctgctcaacctccaaagaggaaatgctgccggcgggcgataacaccatgcttgaactgtggaacggggctgacggtggcggcagtacttcccgccagtctgcggcggcccgcgacacgctgcgacgcccgctgacgggcagcgaaacgcaggccgaccgcagctacagccgtactcaggaaagcgaaatcacccagcagtttccccggctgcccaaccccgatatggtgatgtacctgtatccccatctggcagacggtaacacaccggtgccgggttacagcaccgtgtttccgttctacagccagacgcagtatgccatgcctggcgagcgtacggaggccctgtaa

SEQ ID NO: 225169 - DNA, 1503 bp, Klebsiella pneumoniae
atgcagattaaatctaatgccctggtgaagtttatcgtgccggccgtggtgattgccgggctggccgtggggctcaaaagctgcaaaaacgaaccggcagaacaatctcaggcaaaacagagcggcggccccctgcataatctctcgccggatgaactgaaggcgctgggggtggaaggcgacacgccggaggacaccctgcgcacgctcatcggccggctgaacgatgtacgtgaccgccagaaaacgctggataagcagaacgcggatttggtgaaagaaaacgagcggttgcgccggcgcaatcaggacgtttcaggacaggtgaatgaggccgttaatggtctgcgcgagcagtacgacaagcggcaggcgcagcttcagaacgaacaactgagtctgacggcgaaaatccaggaactgaccgacaaactcaaaaagcctgacaccgagaaaaaaacggcggacagcgatatcccgctggggctgggcctggacggtatgggcagcagtaccggggggacggcttctcagggcagcgacggcatgatgtgggtcgcgccgacggaccagaaaaagacggacccgagggatgcggccagcggcaaggcatcacctcagttcccgacttcttttctgggtgaaaatgagctgacccgccagaaagcggcctatgaggagaaggtgaagggacggacgaatgaaaaaggggcggaagagagcgccgagccggtttacacgctgccggaaaattccacgctggtcggcagccgcgccatgacggcactgcttggccgggtgcccatcaacggcaccgtgaccgatccttatccgtttaaggtgcttatcggtaaggataacctgacggcaaacggcatcgaactgccggacgtcgaaggggcgattgtttccggtacggccagcggtgactggacgctgtcctgcgtgcgcgggcaggttaacagcgtcacctttgtcttttccgacggtacggtgcgcaccctcaccagacccgacaccagtaactacgctggcgggcaaaataataacgctcaggctaaacaggataccggcaccagtggcggtatcggctggatctcggatgaaaacgggatcccgtgcattggcggcgaacgtaagtccaacgcctccacctacctgcccaccatctttggcctgtcggctgccggtgcggcgggagaagcgatgagccaggggcagtacacgacgcagaacaacgtgaatggcatttccgccaccatgaccggcgacgccggacaggcggcgctggggaaagccatttccggcggcatctcggaaaccaccgactggatcaaacagcgttacgggatgacgtttgatgccatttatgtgccgcccggagcccgtctcgccgtgcatatcacccgtcagctggccattgattatgaagataagggccgtaaggtgcgctacgacttcaccctgccgggtggcgtcagcgacaacagcggactggactga

SEQ ID NO: 225170 - DNA, 951 bp, Klebsiella pneumoniae
atgagtaaaaacccccactaccgcgccgggctgatggcgctgtccttcgccctgctgcccctggcaatgctggtatcacgtcctgccggcgcagatgagctgatgaaatgggagcgtattccgctgcagatccccctgaaggtggggcaggagcgggtagtctttgcggacaaaaacgtccgcgttggttttccgccggcgcttaacggcaaacttcgggtgcagagcaccgggggtgccgtctacctgaaagccgacagcgcctttccgcagacgcgggtgcagctgcaggatgtggaaagcggcgaggttctgctgtttgatatcgccgccggtgaacaagggccgactgagccggtgcggctggtctacagcggagatgtcagcacgctgagtcacgccggcgatgcggccggtcagccaggtggtgcagaccgggctgcttccggatcaggctcatctgctcccaccggcagcgatgatggcacccaggcaaagcgtaaaaaaatccgctacagcgcccccatcccggtgctgctgacccgatatgccgctcagagcctttatgctccggcacgtacggtcgaggcggtcccgggtattcatccggtcaatcctcatctgccccgacgtgtcagcacgctgtatccctctgaaccattaacggtcacgccgctggctggctggggtgtggcaaaccgcagcgtggtggcactcaggctcacgaacaccggcagccgtaaggtcgttctggatccacgctcgctgcagggacagtttgtgtccgccaccttccagcaccgctgggtcggtccggccggcacgcctgaagacaccaccacggtgtatgtggtgaccgccggtcgtccggagagcgcattcattgctgagccgtctgcactgcgtaaagcgacccgcacggtaaaacaggaggcccgccatgcagattaa

SEQ ID NO: 225171 - DNA, 660 bp, Klebsiella pneumoniae
atgagccgttttcgccatgcggtaaaagaccgcgaccagcatattcagacgctgcgcatcgcctgcgccgtgctcgcctttttccttttattcacctgtgccggctggatgctggcacccagcaagctgaccgtgcataacccgccggatttacgcaccggcagcacgcgcccctggtgggatgtgccgcccccgaccgtttactctttcgccttctacatctttcagcagctcaatgcctggccgaaaaatggcgaggtggactattccgccaaaatcaatgcgctgtcgccgtatctgacgccgtcctgtcaggatttcctgaaagcagatgcgaagaaacgcggtgatgccggggagctcaccgaccgcgtgcgcgtggtgtatgaagtgcccggtcgcggttaccagtcacagagcgtgaccgtacaggatcgcgatcactggattgcccgcctggacgtggtcgccgatgaatatttccatgccgagccggtcaaacgcgccctggtacgttacccgcttaaagtggtgcgctgggaaggtgatgcggagcgcaacccgttcgggctggcgctggactgttatgccggtgtgccccagcgtctggaggcggcaccgcctgcacctaaaccggagaagtcaggagtgtttcagtga

SEQ ID NO: 225172 - DNA, 357 bp, Klebsiella pneumoniae
atgcagaccattcgttttttacctgaccgtctcaacagtgagcccgtggtgtttcgcgggtttaccacccatgagatggggctggcagcccttgccggcgcgggtgcgggtctgctcctgtcactgccgtttatcccgcttgccggatgggttgtcgttcccaccggcctgctggtcatgccgctgctgctcgtctggttcggcggccgctggatggccaggctcaagcgcggtaagcccgagaactggctctggcagcgactggagacgaaaaaacgccggctggggatgggcaatccgaaactgattgtggatgcccggggctggtcagtgaaacgtaacaggagagcctcatga

SEQ ID NO: 225173 - DNA, 387 bp, Klebsiella pneumoniae
atgcaccattctgagtctgttgttgcccgcctgcgccgtctcgccagtcgtacgctgacccgcgccggtacgcttgccctcctgggctggctcacctgcaaaccggcctttgcggacttgccaagcgttgaagcgcctgagtccggaggcggaagcgggctgtccggacaaatcaagggctacctgcaggacggcattgttatcggggggctggtcgtggcggccgttgcctttatcaacgttgccattgccgccctgcacaccttcaccgaagtccgcaatgagaaagccacctggaccaaattcggggccattgtggtggtgggtgtggtgctgctggttgccgttatctggctgctcggcaagtctgccgacattctgttgtag

SEQ ID NO: 225174 - DNA, 243 bp, Klebsiella pneumoniae
atgcccatgacatccgaacaaacgaacgcgtttaaagccggctccggcagtcttgatgtgaacatccttcatctgctctgcatcggggcactgctggcatttctttttttatgggccgcgtgggcgctgtcggatgtctggaccggctggagtaacaccaaagtgcgggacgcggccctggggcgttttgccgtccgcaccgtgttgctgttgcttgtgtgtatctggatgtttgccagttaa

SEQ ID NO: 225175 - DNA, 348 bp, Klebsiella pneumoniae
atgaactcaaatcgtccggccatgcggcgcaacagccgtgtcccgggcatcaccggcctggtattgctgacctttctggcgtcaggtgctgcacaggcatccgagaaagacgagcttgcgtctgttcagcgtcagctggaccaggctcaggcgtcgcttgaacgggcccgcgtggcggcagcacaggccgacccggctgaccgtggccgctttttctttgattaccgtcaggccacatccgatctcaacaccatccgcagcggcattgaccgctatctggagccctcccgcgcgcaaccgcgtgacccgtcttatgtggccggtaattaccggcgggagcggccctga

SEQ ID NO: 225176 - DNA, 687 bp, Klebsiella pneumoniae
atgccaaaaacagacctgaatgttccgtttgatgaaaaagatgaagtcaagcggctgggtggacgctgggatcccgaaaataagacatggtttattcctgatggaatagcgcaggccccctttgagaaatggataccgttcagaaatgttcgcgccccgtactggtatattgcacaaacaatgggtacgtgctggaaatgtcatgagggtacgttgttaacagcaatactgttgcctgatgggcatgaaactcttgaagcggaagaagatgaagttgacgacaatacaacgaattcggacaccatgcagacatactggctggcacaggataaacctgcattcatattttatatagatgatatgccccgggaagtgttgtcgcagctcggccgggtcaggcattatctgtcaagggattacagtaaaaccacagacagccgttactggatgaatcactgccagcactgccatgcaaaacaaggtgatttccctctgcattgcgaaccaaatggcttttttgtaccgttggaaattcgccatggtcaggatattgagctacatacgataaaaaccgcctttactgctgcatgtggcggcatctcacatgaccatattcatattcattttggcgactcaggggtgtcaaccgctggtgaaatgttaccctggatgaaaatagtaagctga

SEQ ID NO: 225177 - DNA, 759 bp, Klebsiella pneumoniae
atgactgaggtaaaacgtcccccacagcagcagacgctgccggaacgcaagcacggcattctgtataatctgctctggggctggccatgggccctggcgggcgtggtgctgtcctcgctgctgctgagcctgctgattgaatatatcggcatcgccttcttctggccggaagccggggcggcgcacagtgaagcggtcatgaacaccgagctgggatggctgtccacagagttcacccgcagcctgctgctgtctgagccatcggtgacggttgtgcgctgggtgagcaccgcctatcagtgggcctttgtggacagtggcttccttgactgggtccggcagcagtatgcgcaccagatgcacagtgacaatgccgtcacccgggaaatcaacagctggagcggctggcttgccgactacctgcgtgaatacctgctggccacggtatggatcagcattatcaccctggtacgcgtcaccatcctggtgctgtccgtgccgctgtttgtgctggtcgtggtggtggcgctggttgaggggctggggcggcgtgatctgcggcgttacggggcggggtatgaaagttcttttgtctatcaccatgccaaaaagctggtcaaaccggccgctgtggtgcccgccatgctgtacctttcctggcccactgcggtttaccccaatctgctgttattgccggcggctgtcctgctgggtatcgccgtgaccgtgaccactgcctcattcaaaaagtatctttaa

SEQ ID NO: 225178 - DNA, 1473 bp, Klebsiella pneumoniae
atgaaaatacttcccgttatctctcccaaaggtggagaaggcaaatccacgtttgctgcttaccttgccggttttcttgccgatgccggcctgaacacccttcttgttgatgcagactattcccagcccacagccagcagtatcttcgcgctggagcatgaatcccctttcggtctctatgaattgctgatgcagatggtcagtgaccatacgcaatgcatttcgcagaccaccataaaaaatctcgatgtcatctactctaacgacccggacgaactgttgccgaccgctatgctccacgctgcagacggccgtctgcgcctgcgtaacatacttcagcatcctttctttaaccgttatgcggaaaaaatcatccaggagcagctgccggctctgcagacgcagattgagaataatcagcaggtgctgggagaggacgacgtgccccgtaacatgcagggtcagccggatgccttacgtatctgggccattgaggttgccctgagttcagaagagggtaaaaaactctatgatcctatccttgacgggctgcggtcagcggtacgttatgaccgtacttactttgacaaaatcgtggcgtcgctgctgccgctgctggaaaaactgaccaccggcaagaccgccgagctgctgtcgccggattatcaggacattgacgacacgcggccgatttttgactgggaacagatcatccgtaaaaaagccgtggtgtatgtggggctcgatgcgctcagtgacagtgaagtggcgagcgcggtcggtaactccatgttcgccgatctggtgagtgtggccgggcacatttataaacacggtatcaatgctggcctgccgggcgggaaagaagggaagtccctgattaacctgcactgcgatgagtttaacgagctgatgggggatgagtttattcctctcatcaacaaagggggtggtgccggcatgcaggtgacggcctatacccagacgtcttctgatattgaggcacgcatcgggaatgcggccaagacggcccaggtacagggtaactttaacaacctgattatgctgcgcgtcagggagaaccgcaccgccgagttgctgactacgcagctgccgcaggtggagatttacaccaaaacgctggtctccgggcaccaggacacggcggatgtcaatgcagaccaggacttcacctcaagcacccaggaccgcgtcgggacggtaaaagtcccgctactggagccggccgatatcgtgacgctgccaaaagggcaggcgtttgccctgctggaaggcgggcaactgtggaaaatccgcatgccgctgcctgccggggatgctgatgatgtgctgatgccggaaagtattgagaaaatagcggaagagatgcggcgcagctatcacagcggcgaatcctggtggcgggatggtccggccctgaacgtgccggtcacaggaggggcgaatgactga

SEQ ID NO: 225179 - DNA, 483 bp, Klebsiella pneumoniae
atgggactgaggcctccggaacctcttacccctgaacacaacattgctgagttttgttgtcaggatcaggttctttctgagtggttgaagaaaaaggcgctgaagaaccacagaacgggcatttcaagagttttcgtcgtctgtgctgaaaacacgaatagggtaattgcgtactactgtttggcatccggaagcgtgcacagaaacaccgtacctggagcataccgtcgtaatgcaccagaggctttaccggtcattgttctgggaaggcttgcggttgacgctgcctgggcaagaaaagggctgggagctgcgctgcttaaggatgcgatataccgaacagaacatattgcaatacaggttggtgttagggcgcttcttgttcacgccttaaatgatgaagttagggaattttacacaaagtttggattcgagccctccattgccaatgcgctgacattattatttccgatcaaaacatga

SEQ ID NO: 225180 - DNA, 537 bp, Klebsiella pneumoniae
atgagaaaaccacagcaaaccttcgaccttgaaattcctgacgattataaattggcgtcagtcctggagcgtgatcgggcggactttgaatcgacaaatatctggttttacgttggtgctgattaccgggatagacgttttgcaaaggtcggaatcacgatgggagacttaaggtctcgttcttacagctcaagcaaccctgattattacctcttctgcggttttcagtgcaaacatgatacaaccagggcagatctcaagaacattgaacgcgatgttttaagctatctagacgaatactacccaaatcgcgccccccacagagagtcgcgacgcttatcagaatgtttttatgatattaattttgaagatttttttgtcgatgttcatcaatacctgcatgacaagcactataagcactttcagattatgggtttccaagatggagagagttatgcgctgtcatggctgttcaatagctgcttaccatcttcagtggtaaatcatttcctaaacgctattaggcagtgtagctaa

SEQ ID NO: 225181 - DNA, 663 bp, Klebsiella pneumoniae
atgaccaccagcagcgaccacgcttacccgtcagcgttgaggatggtcactggtatcgcccctgtttacccgccagcgttgacggtgaccaccgacagcggccacgcttacccgccagcgttgaggatgactaccggcagcggtcccgtttacccgccagcgttgaggatagccaccgtcagcggccacgtttacccgccagcgttgaggatgagcaccggcagcggcccctcttacccgccagcgttgagggtagccaccgtcagcggccccgtttgcccgccagcgttgaggataagcaccgcggcggtcccgtttatccgtcagcggtcacgtttgcccgccagcgttgaggatgagcacctgcagcggccccgcttacccgccagcgttgaggatgagcaccgtcagcagccccgcttacccgccagcgttgaggataagcaccgtcagcgcccccgtttgcccgccagcgttgaggatgagcaccggcagcggccacgtttacccgccagcgttgaggatagccaccgtcagcggccacgtttacccgccagcgttgaggatagccaccgtcagcggccacgtttacccgccagcgttgaggatgagcaccggcagcggccctgtttgtccgccagcgttgaggatgagcaccggtag

SEQ ID NO: 225182 - DNA, 1137 bp, Klebsiella pneumoniae
atgacagataaaaccaaactggttgctatctcacgaaccgatgacatgagcgctctggatgcactcaagctcttgcggtttcgccggtacaatacggccagaagtcagttaagggtcacgagtgtctggtctgcatggtgcgccaggcacggtctgacccccttcccggtcacagcggttgatgtcgagcgctatattaatgggctgaatggatccgttaaaatggcgactatctctcattttattgcatgcctttcaagcgttaacagcagcctgggttttccagacttccgcaacgttctgataaaagcactggttcaggtatggcgggcgcgggagaatgagaaaaaaatcgtcaccggtcaggcccttccatttcttatatccgatctcaatattcttcgccggtcgctgcataaaagcgatgacctgagagacatacgggaccttgcaatgatatgggttgggtttgaaaccctgctgcgtaacgtggaaattcgaaggattaaaaccggcgacctgaaatggcaaaatgacacgtcctgttaccttctggacgtcatgcggaccaagacaagcctttcaagtaacctgacatttcagctctcaccacaatgcagtcagcatgtcagacggttgattgagacggtggaatacaccgataccgaaaccttcgggcaccgttttctttttcagcctgtaaacatccatacaaaccgatatttcccgtccaccagcagtaagctatcccggggaaaatccatagacaggatgctggtcaaagcaggattcagtgaggggttactgacgcagctacagaatgaatcaaaggtatcacgggaagatgttggtatgctgtcctctaattcactgaaccaggcatttgcacgcctctgggggattgccgggaaggtcggcgacagtaaccgacagtccgggcggtaccggacatggacaggacacagtgtgcgtgtggggggagccatagagctgtttaaggccgggtactccctggaaaagattaccgagatggggaactggtctgatccaaagatggtcttccgttatatccgtggatatcttgccagtgaaaaagccatggtaagctttatgcgtaatcatctggacgacatatag

SEQ ID NO: 225183 - DNA, 948 bp, Klebsiella pneumoniae; identical to SEQ ID NO: 203824

SEQ ID NO: 225184 - DNA, 933 bp, Klebsiella pneumoniae
atgaaagttgtttcattgttctcaggcgcagggggattagaccttggtttaaaactgtctgggctagatatcatctgggcaaatgatatctatgaagatgcagtagatacctataagaaaaatataggtgagcatattgttctgggtgatgtatccaatatcagttcatctgagataccgaattgcgatattgtggttggcggatttccatgtcagggattctctgtcgcaaatatgaatagaaagtctgaagatcctcggaataaattatatttagaaatggttcgtattattcgagataagaaaccatcatattttatagctgaaaatgtgaaaggtattttatccttggataaaggtcttgttatacaaaagataacaagtgattttgaatcgttaggatataatgttaaatacagtcttctaaattgtgctgattatggtgttccacaaactcgaatgagagttattatattaggcgtaaggaaagatttgcctgatattgaaaactttccaccgcctaagactcatgaaaaagatgggataaatctacctaaatggatttctgtaggccaggccttgaaaaggtttactgagccgggggggaatagtgagttcaaaaatcatgagcattcgttgtataagcttacattcaatgggcatctaggacataggtttatggatccagataaaccagctccgacagtaacaggtcgtggagatgagaaaggtggtgtagttgtattacaccaccctaataatgagagaagaatgactgtcagagaaattgcggcagttcaatcattcccggatgacttctttttctgtggtagtaagacgtctggatatcgacaaatcgctaatgctgtcccaccaaaactaggtttagccttaggtaaaatgttaactgagcatcataaaacgatagaatag

SEQ ID NO: 225185 - DNA, 1257 bp, Klebsiella pneumoniae
atgtattcttttgttaaaccatttcctcaatatcgttggagatgggcttcgatgacaccatccgaaagtttgaatattccagaagtctactttggctgtttacgtgttctttcattgaatgaaggtgaacatgtaaacagtaaacatgtttttgaattactacaacaagtagaaaaagatattaaggattataatgacttaaacgtgtcattagcacgttctgaaaacaggaacctttttagaaactccggtcagtattggaaaaatacgggtaccttgttaagcacagaacatggaatagaactgactgattttgggcgttcttattcttcagggctaattactaaagatgaattttctgctattgtaattaagagtatggagcttcctaatccatttattgaagatgatgaagttatttctgagtggtatcatgaaggtgttaagattaaaccattagaactaattttatgtattatttatcacctttacaatttcaaatgcgaacatggatatttaaccactaaagagttaattgaaatagtgataccaatggttggtaacaaagccaccgcttacgacatctttaaagtaatacttgattgtcgacatggcacaactttaggacctgattcttggatagctaatgaaaaatctaatgataaaagaatagccagggagtttctgctttttctcgaaaattatggatatttaaattcgagacaatctcagaatgaaagggcaaccaatctaaatcaagagttttatctaacagactaccagtattctttagctaaatcactcattgattctcctgagatatcatataaatcaatgtcgcctgaacaagttgtaccgaaacttgcagaagctacagaggtaatcgctagaaaacgagttctcacagaaatcactttacgaccaaaacaggctgagttcagaagaaagctgatggaggcatattcagggaaatgtttattgtctaatgcaagtgtaagtgaggtacttcaggcatgccatattatccctgtgaaaaacagtggtaatgattctgttgaaaatggttttattttgcgctctgatctccatcttttatacgattcaggccatataaaaatacatgaagatggcaccgttacattatctgattacttgaaaaaagacactttttacagaaaaaccttacccagtaagataaagttaccgtcattccttaatattgaaaacatacgaattaggaatgaatacaatatgtga

SEQ ID NO: 225186 - DNA, 288 bp, Klebsiella pneumoniae
atgcccctttgtaccatggttgaatattgtaatgcactaagtgaggcgcttgagcatcaaggggagtttcgaggatgcgtagaggcgatgctgtacaaagataagctatatggtacatttgagcgcaaagatgaagagccaggcccatttaaagtatttgcatatttacttcttgaaaaatggtttatatcaccggaaggagatgtgtttaaaaccgataccgaagttcaagctaagttaaatgaagagataatcaaatacaatcaaaataaaatcagaccgcgatga

SEQ ID NO: 225187 - DNA, 921 bp, Klebsiella pneumoniae
gtggaatattttagcgataaagagaaaggctccgtagcgagaacgaaaaatgatgtctctatgatagtctggatcgggcttgtttcttacattaacacactgataaataagggctattttgggaaaaattttccagaagaatgccctgacggacaagggtgcattggtacaaatgaagatactttcaaagctgcactacaggcggagataccaaatataggatggccattgggagtagctcctgaagatgtagatcgatatgcctacaggtcaagaacacaagttacgttcattcctgactatctagtcgtcatggatttacttcaattttgctataaacatgttgcagttcctatagaaggtaatgattaccactcgtactaccgccatactcatattcatgattttgatattgttgctggcagaaatgaatttctcgaaaatgttaacgtcatttttgcccgaaatggtatggcctatgaacttcaaaactcaggtgaaattatccggcttcttagtcctgaattagtccaaatgatgttcagcgtgaatgttccttcggaagttgagttaaagaatttacttgttcgcgcaaatgctaaaatcgtaaattttgatgttcaggttcgctatgacgcagtgaaagaactctgggacttctgggagaggctgaaaagtgtacacaatccatcaaataagagaacatcaactaaacaattacttgatgacgctgctgcgacacctgaatttagaaatattttggaggttgaagctaaatatttgaccgatattggtaacgaatattttatacgtcatgcggaaatgaaccaggtaaaaattcaagagagcgatcatattgaatacctatatcatcgcatgtttagtttaattcatctgcttatgaaaactttcacccattaa

SEQ ID NO: 225188 - DNA, 1278 bp, Klebsiella pneumoniae
atgttctttgagagatacattctaaggctcactaatgaattcacggaaaacaaaatcagaaatgtgttagttgtttctgctaaaccaataccagaaagattattgctgcgtttcaataatgagattgaaaatagccagcttccttttaatgtgattttttgggggccgaatgaattaaataaaatagtatcaaagaataaaaaagtagtaaatgaaataactaaaaacctcttttctttaaggctctcatctgctatatctaagccagttagaaattggaaaatagaacgagatgaaatactggaaaggttaaaacattgctataacaaaggccagttttcattatttttgggcgctggagtttcaagtagtgctggaatgccagattggaacacattattgaattcattgtttgtaacttaccttacccaagaattcaatggtgatattgcaatgagtgacaaagatcttaacgatattgttggcaggttaaatggtattaacgaaccgtcagcactgatggctgcaagataccttcgcaagggattttcaaaaactgatggggaagcaaaagaattcataggggcagttactaaaaatctgtataagctgcgaaaccataattaccgcatggattctgaattaataaaatcaattgcttcgatgtgccttcctcggcgaactggtgccaaagtcaaatccgttattacttataattttgatgacctacttgaaagacaattaattagtaactcaatcctacatagatgtatttataccaataatgaaagcctcgatcctgatgaacttccggtctaccatgttcatggattcttgccagaagatagaaaacactatgatgggttagataaatcaactttagttttctcagaggaaggctaccaccatatttattctgattcctaccactggtcaaatcttgttcagttaaattcattcagagaaaataattgcttaatggttgggttatcaatgacagacccaaaccttagacggttattagatatttcttcaaaaaacattgaacgcagcaaacattttacatttatgaaaagaatttcctcaagtgaattctgctatgaggagaataatgggaaaaaactaaaagtaattgaaaacatcgaatctgctgaaaaattccttgagcgtcaccacactttgaatgaagaattaatgaaagaattaggtgtgacaattatatggtatgaagaatacgatgatatcccaaaattcattagggaagtgacgaaacattaa

SEQ ID NO: 225189 - DNA, 564 bp, Klebsiella pneumoniae
atgtcacattgtcaaaatctacaggccattctggctgaactgatggcggatgctcaacaaattgacggagaggaagtcaatgcgcttggcgaagcgattatgcaagccaaacgtgtcttcgtagcgggggccgggcgttccggttttgcagcaagggcattcgcaaatcgacttatgcacctgggttttagtacctggtttgtgggcgaaccgaccaccccatccattcagccgggggatttgctgatcataggatccggctcaggtgaaacagccagcctggtcacaatggcacagaaagcgcataagcagggagcgaagattgccacgctcacaatctatccggagcatactattggcaacatagccgaaacgatcattcgcattcctggtatcaccgcgaaaagcgaacatgccacatccaaggccgaaactatccagccgactggttcctcttttgaacagcttagctggcttatttacgacagcgtagtgatcgcgttgaaggaaaaaacggcgcagactgatgcacagatgttcagtcgacacgccaaccttgaataa

SEQ ID NO: 225190 - DNA, 633 bp, Klebsiella pneumoniae
atgaaactacaactggcactggatgaactaccgttagacgaagccctggcccttacggaaaagttgcgtcaatacgtggatatcatcgaaataggcacaccgttcgtgattgcggaaggcatgaatgcagtacgcattttccgccagcattttccggaaaaggagatcctttcagatgagaaaattatggatggtggctatttcgaaagtaaactcgcttttgatgctggagcaaattatgttaccgcgcttggcgtcacggacatactgaccgtgaaggcctgtctacgcgcttcggaagaggcggggcgtgatcttgttattgatatgatttgcgttgatgacctacccacacgtatccgcgagctggaagctgcaggcgtaaaacatctcgccgtgcataccggggccgatcaacaggcggcaggacgtcagccgattgaagatttgaaggtaatgaaacagcatgtaagccactcgcgtatttccgtggctggggggattaacagcaataccatcgggcagtacgttgctcttaatccagatgtgattatcgtcggctctgccatcacgcgggcaaaggacccgattgaagaagctcgtttaatcaaaaccgccatgcagggcctctaa

SEQ ID NO: 225191 - DNA, 1005 bp, Klebsiella pneumoniae
atgcaacggctcattaacaatcccgataaagttgttgacgacatgctgaacggttttttgcgggtgcacgaaagtcacgtggcgttaagcatggctaacccacgagtgatttttagtaaacgtagcctggaagaacccgagcgtgttggcctcgtcagcggtggtggcagcgggcatgaaccggcctttcttggctatctgggtaaaggtctgcttgatgctgtcgcggtaggtgaagtgttttcctcaccgggacctacagcttttctggaagcgattcgcgtagctgatcgcggtaacggtgtcgcctgcctttttggaaactatgcaggtgattccatgaacgtacagatggcactgcggctggcagaagatgaagggcgacatgttgccattgttaaagcacgtgacgacattgcctctgcaccgaaaaatgccgcggacaaacgacatggtattgctggcggtgttctgatgtggaagaccgctggggcggttgctgcaggtggagggacactcgaagaggtgatcgccgtcgctgaacaaacagcacagcacacccgtagtgtatgcgtcggcctggcaccctgcacaattccggcagtgggaaagccgaactttatcatcgatgccggcacctatgagttcggcattggtcaccatggtgaggcagggcaatttgtcgcgcccctggataacgctcataaaattgctgaatccatggttgctgcactactggatgatttcgaccttaaaacgggatctgaatttgccgtaatgctctccggacttggtgccacaccgctaatggaacagtacctgatggcagcaccagtaatcgaggcgttacaacgacagggacatactgtctggcacacttatgttggcgattacgttacttccctcgatatgaatggtctttgcctcacacttctacagctcgatgaaaatctgaaatcccatctttcatctccggcctctgcgttgggcctggcatctttataa

SEQ ID NO: 225192 - DNA, 663 bp, Klebsiella pneumoniae
atgtcttttttaaataaagatggaataactattgccataaaaatggtggagattattcaaaataacaaggcctggctcagcgaaatagatggtgcagctggcgatggagatcacgggatcaatatgagcaaggggttcacttttgcacaaaataaatttgaccccactatgaatatgagcaaagccttccaggttatcagtcaggtcctcctggaggagattggtggatcaatggggccgttatacggtacctggctccattctcttggctatgaatcggccagtcatgaggtcattgatgcatctgtgctgaactccatgttcaccgttgcccttgcggaactgcagaaacttacctcagcaacgcctggcgataaaaccatgctggatgccctggtcccggcgacgcaggctttaaacgcagcactggcggaaggtcaaggctgcgtggccagcctgataaaaatgaagcagggtgcagaaaatggatttaactccacccggaagatgtatccgcgtatggggcgggccagccgtctcggtgagcgcagcctgggtcatcctgatgccggggctggctcctgcatgttgttgttatgtgcctttgcggatacagcgatttcactgataaataaggaggctaatgatgcaacggctcattaa

SEQ ID NO: 225193 - DNA, 1140 bp, Klebsiella pneumoniae
atgcaggctttacattttggtgccgggagtattggtcgtggatttatcggtgacctgctcaaagagtccggttacgacctaacctttgttgatactaacatccaacttaatgaacaaatgcaacagcaggggggctatgacatttatacaattgaaaaaggatatcaactaaaattcatacctattaagctggctctttctcccgtgacacagcgggacgaggtgattcgccagtgcataacagccgatattattactactgcagtttgggcggataaccttggtaaaatcgcaccgctgttgctcgccggattgcaggcgagacagcgggcaggtaaaccaaaaattaacgtcatcgtatgtgagaacgcgctgtttaacggccatatactccgccaagaattacttaatcttggggaaaaagaagtggattcactggcttccttcccaaataccgctgtcgaccggatggtgctttccgcggaacgtaatggcaaaaatgttattgatgtgggggaggattttgaactggttattgagcgccaggcactgaccaaccctgaaagcaaaccaattttaggggcaacttacacagataacttgcaaaaatatctggagcgtaagctttatattataaatggaggacatgcctgggctgggtatgtagggcatcttaaaggttatgacacgatgcctcagatattctctgatagtcttctggtagatgaaattaaagaaagtatgcgcgaaacggcaagattgttgcatgttaaatatggtttccctatggattctctggaaaagtatatccagtttgtggttaatcgattctgtactccaggggtcgttgatacagtaaagcgtgtttgtcgctcccctgtacgtaagctcgcgcccggcgatcgcctgactggtccttgcgaacaatgcgaagcagctggcttaccgacagattatttagttaaaggaatcgctgctgctttgcactactacgacccggcagatgaacaaagtaatgaattaagaaattatattaaaatgcacaatatctcccaggccattacgcattttacgggcatcaaagaaaatacgcgcatccatgatgaaatagtgtttaattacgcctcaatgatgaattga

SEQ ID NO: 225194 - DNA, 816 bp, Klebsiella pneumoniae
atggaaacaaaactgattactgaaaaagatgttaaaaacagctggctctactactacattgttgcggaaatgggcatttcctatgaacgtttacaagcgctgggatttactacagcactgctgccaatattacaaaagctgtacccggatcaggaggatttaaaacaggctataaaacgtcacctggtcttttataacaccgaggcagtatacggcgcaccgattaacggcattgttattgcaatggaagagcaaaaggcacgtggcgcagatattgatgacgacaccataactggtattaaaacaggcttaatggggccgatggccgggatcggtgattctatagactgggcgacgctgaaaccgattatttttggtctggcggttacactttcaactaatggtagtgtgctgggggcttttttccttctcctcctgcctttgattcagattatcgtaggccgcaagcttgcggcctacgggtaccgggcaggacaagcctcaattcgggaaatattgcattctggccatatccgcacattaattaccggggcaagtacgctcggtctgtttatgatgggagcgttgtcttcgacgtatgttcggttaagtactccacttgaaataaattttggttctgaaaataaaccgtttgttcttcagcaggtcatagacaatatcgttccgggtattttaccactgctcgctgttttcggtatttactggtggttgctgaaacgaaatcaaaacttcacggttattatgctggtaattattaccgtttccattgccggagcttttcttggcatattttaa

SEQ ID NO: 225195 - DNA, 738 bp, Klebsiella pneumoniae
atggtagaaatcgcaatttttactggattctggtactggatttgtaaaacggatattggctacgcggtaacacatgcattacgccagcccttattctcatctgttcttattggtttaataatgggtgatataacacaggcggtaataattggttcagcgatccaaattctctatataggcctggttgcagcaggctctaatttaccggcagatgactgcctggcagggcttatcgcaattccgcttgcgttgaatactggtttatcgccaacgctggccattgctatcgccgtacctatcggtgtgatgggggttttcctcgatcaattcagaaaaacgattaacgctatatttgtgcatatggcagataagtatgctgaggagggtaatgtccgtcaaattaaactttgcgctgtcgtgtggccgacggtactaggtttctttatccgatttcctgtaccgtttcttgccaatatgtacggtaaggacagtatcaattccttcctgaacagtgttccggagtggctgattcacggatttagcgtggctggagggttgcttccggcgctcggctttgccctcactatttttgttatcggcaaaaaagagctactgccttggttttttatcggttatttcctcgtgcagtttagcggcattccagttttcggtgcggctattttcggtcttagcgctgtgctgcttatctcgtactaccagaacaaaaaagaagcgtaa

SEQ ID NO: 225196 - DNA, 510 bp, Klebsiella pneumoniae
atggtagagattatgaataatattaaactcgtaagaatagactttcgtttaattcacggccaggtcattacaaaatggcgaaatatcatctcggctaccgaaattgttatcgtagatgataagttatcgaaagacagttttctcgctgacatctatgtaatggcagcgccgccaggcgtgagagttaacgttctttctgaggaagcattcatttctggggtgcgagcgggccagtacgataatggtaaagataatgtactgctgctgttcaaatcgattggtaatctgcgccacctgattgaacaggacgtgaatttaccaacggtacaaatcggtggcctgggtggaggcgtgaatcgccgcagcgtggtaaatgggatatccatcgatgatcaggatttgcaggatcttaagtttattcaagagagggggactgaagtatatttccaggttaccccggaagaagtcaggttaacgctcgacaaagcaatttcccggctggagggatga

SEQ ID NO: 225197 - DNA, 423 bp, Klebsiella pneumoniae
atggaacataaactaatgccaccctggcttgtggtcatatctcatggcaatttttgtaaagaactggtaaatagctgtgaaatgattttaggtaaaatacagaacatatatagcttttcgctggaacctggcatggcacctgaacagttgctggagaatgtatccgaactgctcactcatgcaccagaaaatgttgttatttttacagacatttacgcaggtacaccatcaaatgtatctgcgatctttgcaaaacaaaaaggatatcaggttatttgtggaatgaatctgccaatgcttattgaagccgaaatgcagcgtcatgacgtcccatttgaggagcttatcgaaaaaatcataatggcgggaaatgatagtatcaaaaacatcacatcgataaccaatggtagagattatgaataa

SEQ ID NO: 225198 - DNA, 807 bp, Klebsiella pneumoniae
atggcgtcaacacagtggatctctctcaatagaaaaaccattattgtcacgggtggtagctccgggattggagaaaagatagcgcagggtcttatgcagaataatgcgcaggtcgtagttgcagaccttcagattcctgcacaggagcagagaattgacggcgtcgactatcaactgtgtgacattaccgatcgcgatgccgttcgtggtcttatgcagggagtgatacagcgatatggtcgtattgacggcctggttaataatgccgctgtaaaccgtgctcgtctgctggttgatttttacggcaaggcacccgggtatgagcttagcgatgaagattttgaatttatggtttcgataaatcaaaaaggtacatttatctgctcgcaagaaagcgcacgacagatgatccgacaaaaagcaggagtcattatcaatattctttccgaggcgggtatcgaaggctcaagagggcaaagttgttatgctgccaccaaagcggcagttcagggttttactctttcatgggcgaaagagttaggcgcttttggcataagagtagtcggtgttgcaccaggcattaacgaaccaacgccgatgggaaatatggagcatcgaaaagcactggcttatacacgtggcatggccgagaaggatatcgttgaagattacagacaaaaaattccattaggccgtccgggacggttgacggaaatcgcggatctggtgatatggctggcttcggacaaagccagctatattactggcacgacgataaacattaccggaggtaaatctcgcggttaa

SEQ ID NO: 225199 - DNA, 2640 bp, Klebsiella pneumoniae
atgtcagctaaagaagaactttatcataaactcaatgccacctggcgaactcctctgagcagttttaccacgcaggattgtttacgctttacctcagccagtcgtagcgttattagtctgtatctaaaccaattatgtgaggaaggttatctgcgaaaagaatcctcccgtccggtgcgtttctggttaacagaacagaatatggtgaaacataaagaacagaaggtatcagcgaccttcagctcacttattggggcgacgggcagcctgaaaacagcagttgaattatgcattgccgcggtaaattatccggatggtggccttccagtgttagtcactggtgagagcggtgtagggaaaagctatctggcgcaacttttgcatcagtatgcctgtgatacaggcacagtggcacccggaacaaaacttatagaacttaactgcgctgattatgccaataatcctgaactcctttccggagcacttttcggatacgttaaaggagcatttaccggcgccgaccgtaataaaacaggtctgcttgatgaagccgacggcagctttttatttcttgatgaagtacaccgcctttcggctgaaaaccaggaaaaattattcttgtttatggataaggggtatttttaccgtctcggtgataatcatcagccatgtagatcccgtgtgcgttttgtatttgccaccacggaaaacacaagtaatgtactactgaaaacatttaggcgtcgtataccagttaccgtaatgttgccgtcgtgggagtcgcgtccatttactgagcaactcgcgctcatttcgcattttttttccaacgaagctaagcgctttcatcaggacatccatgttgataatacccttatttatcagttgctttctacgccggcgcaggggaatattggcgaactgaagaaccatattaaagtcctctgcgcctccgcatgggcgcaaagaaagaatcacggaatatatattgagagtgcgactggcagacataatgaaaaagacagagtgactttctacgccgataatgaggagcagggtacaccattacttgcctcgtacttctcggggcagggcgacaatctgctggaaaacttttgccgcactgcaaatgtacaattgtttattcgaaaactcgaagaaccgtcaggcaagtaccagaccagtcgcttttatcagggaacgctatggcagttaacaatagaaacattagcagaattttatgaactgacaggagtatctgtcgacccgataatggagaaagctgtatttcattgcctgcagttgtcattaaatgagccggttgcgatggatagagtcaattatctaaacgagataacagcatattctccgttgcgagcacgtttactggcacaggaatgtgttacgcttttcgcttatcatttcccgcccacgcaaataacattgatggagccgttgctcacagccatattctaccatcaggtcgaacctgagccattgattcagggaattatagtcgcccacggtagcaccacagcctccagcattgctggcaccgccaataaactgcttgaaggtttttatctaaaagcgtttgatatgcccttgtcggttaataccaagggcattatcgatcgccttaaaaagtggattacttgtctcgaacggcaaaacggaatgataatcatggttgatatgggatcattacaggatatctacagcgagataaaactccacatacagggtgatctgttggtaatgaataatgttagcacggcaatggccctgaatattgcagaaaaaattcagaaaaacttacctatgaaggaaattattgacggagttaaaggggcgtgggaagttgaagcgcgatattattccggaattgttgagggtaataaaattataatttcctgcatctcaggtgagggggttgcccggcaactccaggaaattatccgtcgtaacattatcgatgaggctattgatgttgtcacgatggagtatgatgacctgaaatggaaaattgcaaaagctgacagtgctttgtatggtacacgattgcttatcactacgactgaaatggacgccggatatattcctcaaataaacacacgaaaacttatcagtgaaaaacctgaactactatggaagaactacttttcccagattatgcctgttcaggctatgcaaaaaatggtagatgagattgttattctattcacactggagggcatagccagccatctatcctttcttaatccacgaattattatcgatgaggtcgagaatgttgtgaagtttttcgagttagcatacggcattcatttcgaaagttatcttcgcataaatctgtttatgcatctgtcggcaatgatcgaacgattgctgacacacgaggggctatcgcaccgtgatgagtttgagcttacgcaacatcagcagtcatttatggcactgatcccaggggcatttcgctccctgataaataaatatcgatttaccctgaccacaactgaagccttaatgatttatgaattgattgaaccatggactagcctctctccggttcaatctgaagtgttgaaaataagtaataacagtgtgcaagcacaaataaactctacacacaaattataa

SEQ ID NO: 225200 - DNA, 150 bp, Klebsiella pneumoniae
atggggtatttctattgtcacccgaccgtggctagctgtactaatgattgcatcactactgtttttgatgccaaaccctttggctggctactgattatgctttcagcaaccatgctgttctttattgtcattggaatcatcaaacgataa

SEQ ID NO: 225201 - DNA, 204 bp, Klebsiella pneumoniae
atgacgaaacaggaatggattttacgactacgacgctgtacatcggaggacaccctggaaagggtgatagaaaaaaataaatattccctgtcggatgatgaacttgagtacttcaatgccgcagtggatcaccggctggcggaaatagcgatgggaaaattttatgataaaatacccgctggcgtctggaaatatgttaaataa

SEQ ID NO: 225202 - DNA, 1095 bp, Klebsiella pneumoniae
gtgacaacggtgaaccaccccaggtcgtcaccgctgcagcggcgggtactgattgtgctggccgccctcgatgcgaaacgtccggggccggtggcgacgcgggatatcgagcgggtgctggagcagggcggggacgccccggtgtacgggccgaacctgcgcgcctcctgccggcgcatggaagccgcgggctggctgcgcacgctgcgcgccccgaacctgcagctggccgtcgagctgacggaggacggtcgctgcattgcagaaccgctcttccaggcagaacgcgaggctgaaacggcacgacaacgactgacagacgtccggcgtctaccgttacgccagacggctgccggtgacgcggtggaactgcagctgggtgatggtcattactccctgcgggaagcggcctacgtgatccgtctggacggtaccacctgtttgcagctgacggatgccggcggaatacgccggataaaagagggcgatcccctgcaggtggccagctggtatcagacctgttttgatgcaggcctgccggtcatcgtccaggtgaatgagagccgggacggatcgccaccacacaaggaatatgagcataaaatgaaagtaactgaacccagactgaatacgctgatcgataacctgaacaccctgatctgtgaggacagcctgctcacgcgcaaggagcgtgaaacgctggtactggccgtcgccgccatcggcgccatgaaagcgcgcgtcggcatgaaaaagcccgcgataccggcatcgtcgaaaccgaaggaagagaaacaggcacctgtacctgacccacgctttccgaatgcccgccaggcctgggtggctgaagaggaaactttattactggatgcgctcgatggcgtcccgaatgatgatattggtaagcatcttttctggctttccgagaaactggggagaacgccgttcagcgtcgcctgcaaaatcgcgtcactaagacatctgacaaatggctggaaagagcagttcagggaagtttcggataaaattcgcttgtccggcctgagcatcagtgattatcttaagcagaacggcacggtccataacgcctga

SEQ ID NO: 225203 - DNA, 249 bp, Klebsiella pneumoniae
atggatgagaaagaagtgaatttttcactcagttatgagcagctgttgcaggaagccgaagagtcgatacagaaatgtgatctcagcaaggatggcccttactaccctcaggagctgagtaaagcaacggacttcctgcaattctggcacaggcttgcgaatcgtgactattcaggcgtgggaaatgatgagcgcattgaggccgactggcagcgccagcacgctctcgtctttaaaagagaggaatga

SEQ ID NO: 225204 - DNA, 1572 bp, Klebsiella pneumoniae
atggctgccaggcaaaacattccagcacaattacgcttgaaggaaatacagattcagagcctgaaagggatatcaaactgtatcatcaactttcctgcagataagaaagttacagctattatggggatgaatggatctgggaagtcaacgatcatccacgcccttgcctgctgttacaaaccccgtactgttacttcgaaagaaaataaccgattctctgatttttttactcctcatgaggataacaactggcgtgacagtggttttactgcctatttttatgtaggaaccctgaataatcaggggaatagaataattttcgagcctacgccagcaccggatgacaccttcacacagctttattccaaagtcgcccgctggcagccagtttatgcacgtcgaccggtcaaggaatccctatacctgggacttcagacactcggcactttatctgatgatctcgctgcgtcccgacatgcaaagtacgttagccatgatttcggccctgcccccctcaaacaaaaaatacttgattctatgtgtcggattcttgaggctaattactccgatttgatggtctgtactacccaaaagggctacacattctataaatttaccaaaaatggtatctcctatactgagcacaccatgggagccggtgagaaacgtgtatttgaagtgcttaaagctgcacatgacccctctataatgccaaatggattgcttctaattgacgaactcgatgttctcctccatgagaaagccttcaaaaagttggtcactgagctcatcgacatagcggatgagtcgctgctggaaattgttttttcgactcacagggaatctgtcgttcagttcaagcgagcgatcaatattgttagtatttttaatatgggtacagggattagggcatttcccggtgtatctgctgatgcgttacgtcagttgactgatgttccgcctgaaatggtaagtgttttcgttgaagatgaactggcgcgtacggctatcaatgtccttctggagcgggaggctctgacagataaggtggacgttcagctctttggtgctgcagaaaactctgctgttgtgcttgcgggacttctgctttctgaccgcgatattggaaaggtgatgtgcgttcttgacggcgatgtgcaccgtacgattcaggaaaaacttaaaatcattcagaagtgtctgacaggaacggacagggtgataaaacagcaacgacgtgacgtgttgggcagactctttgaatttactcttcagacggttcatcaaaaaggtgctccggagtttaaccataaatgctggttcgaagctatcgatccggcaacagtatcggcggatgaggccgctgagtatgccaaactaaggcagttttcgatgtcaattaatggattagctgactggcatgattattacgacagactgaataacctagcacggaaacacaacatcgaacataccattctgagctatatcagcaaatactcaacagcatgggataactatatttcagctgtacgtcaagagatcattgaacgagctagtgaactcgaatga

SEQ ID NO: 225205 - DNA, 981 bp, Klebsiella pneumoniae
atgaaatttaaagacagaaatctcagggctctcgcggaatgtatcatcggagataataaggcatttctgtatcgctcaagcagccgtatcactgagtttttccaggactgcgacatggaagttgtgcatgatggatcaacacggtgggcatggacagctatgaggctggaagagcttctaaatgagccgcagcccaaagcccactctttaccggaaaggtttgttcatgtgctcaggtgtctaatgttaaaagaggatgccatggatgacgatcccgggagattaaaagcccttgaagaactgaataagccattgttgcgggagggctatgaagccttctatggagaagataacctgctgtatatccgtcacaatggcaccaaaacagtatcaataagcaataatcctcatcggcccctcacgcctcacgaaataaaacgaaggacattactgacaacgtttcttgatacctgctctgaagatgaattgatagaggaggtactccttcctttattccggcagctcggcttccaccggataacagcagcaggacataaggataaagcgctggaatatggaaaagacatctggatgaagtttattctaccaacacagcatgttctttatttcggtatacaggcaaaaaaaggcaagctggatgcgtccggcgtcagtaaatccacaaattcaaatgtggctgaaattcacaatcaggttctgatgatgcttggtcatgaaatatttgacccggagacaaacagaaaggtgctggtcgatcatgcctttatcgttgctggcggagagattactaaacaggcgagaaactggctgggtggcaaacttgatgccagcaaaagaagccagatcatgtttatggaccgggaagacatccttaatttatatatcgtaagtaatcttcctttacctaatgctgcgcttgactctgatgaagctgcgtggggcgacgatattcctttctaa

SEQ ID NO: 225206 - DNA, 417 bp, Klebsiella pneumoniae
atgaagaaaacctggatgctcgacactaacatctgctcgttcattatgcgcgagcagccggcagcggtgctgaagcgcctggagcaggcggtgctgcgcggtgatcgcatcgtggtctcggccgtgacgtatgccgagatgcgcttcggcgccaccggcccgaaggcctcgccgcgccatattcagctggtcgacgcgttctgcgcgcgcctcgatgccatcctgccctgggaccgggccgcggtggacgccacgacggacatccgggtggcgctgcacctcgccgggacgccgatcggcccgaacgacacggccattgccggccacgccatcgcggcgggcgccgtcctggtgacgaacaatgtgagagagtttgcgcgggtgcctggactgacactggaagactgggttatttag

SEQ ID NO: 225207 - DNA, 231 bp, Klebsiella pneumoniae
atgcgcacagtttcaatatttaaaaacggcaataaccgcgccatccgtctgccccgggacctggattttgacggcgtcagcgagctggagatcgtccgggaaggggacagcatcattctgcgtcccgtccggccgacctggggctcgttcgcgcagctggacagggccgatccggactttatggcggaacgtgaggatgtggtcagcgatgaaggacgctttgagccatga

SEQ ID NO: 225208 - DNA, 816 bp, Klebsiella pneumoniae
atgactgttcgaccaaatgaagttgctgcacaggcacttcagatactgaaagaaaaactccatgactggcgtgatggcccggatatagcctggcgttcaacgtggcctgtgtttgagagactgatagcccgtcacgatgaaatgaaaccggtctatgccgaactgcaggaactgcatgtcattgaaggtcgactctggatccttctggaacagtgtatttttgcaggaacatttgcaacggccgataatcatgcaggcttacgcgcggactacagcgagcttcaatccctgagtgaggacatcccccgcacggctttgcggctggaagcgatgctgcggcgcagaagcgacatacttaaccgaagcggaagtttcaccatagacaggctgctgcgtctgacagatttccttgatgaggcaggccgtgaaaatagtttataccgaagctatattcaaccacgacttgaggaactgaacggatttgatctgaaatactggccagatattgccgacctgctgcaggtactgggtggtgaagataccgaagtacagatcctggacgaggcgactgcaacgattgtttctgcacggcgtgcatcgttaacggatttttttaaggatttttttggccggctgcataacatttctgacggttcaaggtatgggctcaagaaggatttcagattatctgatagtgcgatcgccaccctgagtaatattctttgcgatcggcttcccgacgaaatgatggatgaaggatatgtcaaacgtgtcagacaacgtttgagagaacaaggggttacattagtctggtaa

SEQ ID NO: 225209 - DNA, 264 bp, Klebsiella pneumoniae
atgatgaatacttttgacgacccgggtcatgtcgcagcagaaactgaggcggcgctcaaatgctggatcaggaccgacagtatcctgtacagacgaatctatgaagcctggtattgcaggttaggggagatggcctttgacagttctcgccttgaggtgagatcctgcacagcgctgctggatatgcacatgctagccgttagcggtccagtcgccacggttttccggtatctgtgccgtagctatcggtccggtaatgcttag

SEQ ID NO: 225210 - DNA, 2241 bp, Klebsiella pneumoniae
atgacacaaacaccggaagtaaaaccgcagggaaaacaccttgatcgcgccgttatcagcaaggacgaagaccgctatggatactcgcacattgccaccgaattagcccatgctattcagggtatcggccgtaagggcagtgccgtcattggtattgaaggtgcctgggggacggggaaaaccagcctcctgaatctgctgcgcgcggcgctggagaaacagaaagaagaccggacttatgtactgagcatttccccgtggcttgatggcagtgatacgtctctggtggcgtctttactgcttcccgtcgccggcattattgcgacagaagaagaacgcctacttcctgccggtgaactggcggaactcaaaaagaaagaggcgctgacccgtaccgcccggacgctgatggactatacccgggccaccgcacggaacctgtcacctcttgctaagtttgccgcgattatccccgggatccccgacgccagcggtgccctgaccgctctgtcggaatcgcgctggctaaaagaaaaagaaaaaaccacgacacaaatgcgcgccgaaatctcagagaaaatcgcggagttggatctgagcttcattgtcatgctggacgatctcgatcgcctcgaaccagcacaggccgttgaagtgatccggctggtaaaatcggtcgcggattttccccgtttccgttacctgctctgttatgacaaagcggtcctgtcagaggccatccgccagggacttggtgtgaccgatggcagcctgtatttacaaaaaattgtgcaaatttcattcgggcttccacgtccggaatcctttgtactacgtcgggaattccgcgatgcggcggcggagttataccgcatggtaaatgaccggccaccggaggctgacgttatggaagacctgacgagggtggcggatatctatggcggcgcgctgaaaactccaagagaggtgcagatcgttttgaacgcgctgaggttccgctacgccggtatgcgagactacgtgtatttcccggatctgtgcttcctgctgctgcttcgcaccacaaacccggggctgtatgactgggtggaggaatacctgtctgaacgggccgtggtggaatccggagatggacatatcagtgataaggaaatggaggttctgacaaagagtctgaacgctcatctgatgaggtattttcctgccagggcttattctgcatcggaactgagcgaatgggttccggggatttccggtggactggcgcaactgccggtcagtctttttaaccgaaccgcagagggggacagtgccatgttgaccgcgggaaaacggctgggtagcctgccatactggcgctactacttcgccttctctgcccctcagaatgtcctggagccaaagatttttgaggaactctttgcgctcgcccgccagcctgaacagcaacaggcacttgcgaaacagctgcttggatatatccaaagcaagaacttatccacccggacctggtttgaacatattctggcccagatgacgaagcccctgattgagagcagaacgtcggaagaatgttgcggcctgcttcagttcttctttgacaccggcgatagcatgctggaacgctatcgggagaataacgagtggtttgtcctgcatgacctggatacctacagcgtgactgatcggctcatcacgcggatgttccgggaaaacgcagaccacacagcagaattcctgtctgaaaaggtcaaaaacgggcaggcctggtactggatcgcggaatatgttcgtcaccttctgtggcagcatggcatggccggaaacagagaaaaacacgagctgcagccgtggctgccgttggaaatattaggggcagtacaagaggccctggctgaaaggctgaacggcgacgaagtcaccgaccggctggtagattttccacttatgaattcatacgtctgggcctggcgtgatatcagtgggaatgaagccgtacgcaaatgggtcgacactcaaacccaggacgatgaagcgtttctgaaactgcttttgcaactgcgctatcatggcgtcagttcagtcgctggtcgttaccgcgccctggcactgtcaaatatgacggaaattctgggggatgttgacgcgatcactggacgaatcacccgcatcaaagaagctggtcattgcacagaactcgttgctcagatcgagcaatcaatcgagagaaaccgtttttaa

SEQ ID NO: 225211 - DNA, 177 bp, Klebsiella pneumoniae
atgttctccccgcccggaaatgtcacgccggagggtttcttcgggatagacggcctgcggatttttttgccggcggacgattttgagacgctggttcaggaattggttacacgctgcggcgacgatgttctgaccgatgtcctgaacggtctgcgtggcctgtatggggatctgtga

SEQ ID NO: 225212 - DNA, 912 bp, Klebsiella pneumoniae
atgctcagccagcttaacctgcgttttcataaaaagctgatcgaggcgctgaaaacgcgcgccggtcgggaaaatacttcggtcaacgccctggccgaacgcttcatcgatgacggtctgaaaacggtcgcgcccggcgacgggtattttcagctcattgccgatccggaagccacggtccggcagctgtaccggcatatcattcttggccagaccttcggcacatcagtgctctcccgcgacgagctgcgctttatgctggttcacgccagggaagccttcctgcgcgggcataacaggctggcgaccctcccggccctggatacgctgctcgacatcaccggcgacctgctggcctggcaggtggaacatgaccgtccggtggatggccactacctgaaggggatcttccgcctggccggggaaaactggacggaagaatttgacgccttccgggcagagctgcgcccggtagtggatcagatgtatgccgaacacctcctgcgtccgctcgaaagcgactgttttgcactggcgcaggtgccggacgcagtgctggcagaaatcttcacccagccgcggctgaaagccgttttcccgctgatgctgcatgggctggcctggaacacagaacaggccagagcgctggcacaggagctgcgtccggctatcccggccgtaacggaaaccatcggggcaggcacgctgcgtcttgagatccgcattgacggccagcaccccggagaacgcccgggggcctggtacaacacgccccgtttgcacctgctgatcaccggccaggacttcgtggtgccgtacggctgggaagagttctccgactgctgggcctgttcagtctgtacgcccgacatccggaagccctggcgcacggtcaccagggggagcgcgtga

SEQ ID NO: 225213 - DNA, 303 bp, Klebsiella pneumoniae
atgaatacatattcctttgaaagcgagcgcatcccggtttctcttgaagcagtctggcgagcactgaccgctctcggccatcaacagctctggctccgccctcctgaaaatcacggtgtaaacacctggctgattgtcacctgggacggtctgacggtggctgaacgtatcctggtctcaggctcctggtggctgaccggggatgccagcgccatcttcaccaatcctgagaggattgttccgggcgatctggaagaactcacatggcagtcagtgcagctgcgaatgaaggaaggattctga

SEQ ID NO: 225214 - DNA, 921 bp, Klebsiella pneumoniae
atggatgtttttagttattcagctgtatctttaaatgaaagtgaaaaagaagaactgtcggcagtggtaagagacattcatagcgaatgtcccggtcaaatacagagtcgctatctttccagaataaaagagataaaagataaaattactaatagtagaatcgtgaaaaaattcaattttcatgaacccttgcttatcagcaatctacctgaatttgaaaacatagaactaagtaaaattctcctgctaacattaggtgagtcaatcggccgatgtgttgcatactctgattataatcaaagttacgtcacagatattcgtcctaccctgacctccagagagctgagcagcagttctgaattgctcacgatgcataacgatttatgctttgcatcagacagatgcagacccgagtatctggtattggtgccacatatagcgaatggtgacatacctaaaaccctactggctacatcagcacagttggtggaattttttacaaaagaagaactctctattctacaaagtgaaatatttgaaatgcgtgccggtggaaaattattatggcccaatgaagaaataaggaaaatgaaaataattgagaaggaaataaatggaagaatcaagattaaacttaacttctccaacataaaaccggcaccaggcctgagcgagcccttgtataaacaggccgaaaagttactggagaaactagcttcgctggcgcttcgtgtgggacgcgaaaatggacacagcattcaaaaaggggaagcattaatcattcctaataattatgctgttcatggtcgtgatgtttttacatcagacaacatccagcgtcttttattacgttcctatgtcgtgtcacagaatgtcgttgattcgttttctggtaacaccatgatatccattagaaactaa

SEQ ID NO: 225215 - DNA, 1167 bp, Klebsiella pneumoniae
atggaaaacgtaattatttttggtggcggtcatgtgggttcgacacttgcagtagacatgttcctgagaagaaatgaaaccaacctcgaccctcatctggtattaatgcactacggaaatcatctgtttctgaaaaattcagggaaaagatcattcagatgtgaaaatatcatgacaggggaagtcaatgaaacggtattcccttctcaaaatgttcatgcaataaatcacgacatcagacatctgatgcaaagtgccgttgcaattattattactgtaccggatattccattattacgtaaggtgctgattgaatatctggaagcgtgtccagtaaatccaggagcgactgtagcatttgttcgcgcaggtcagggcggacagctcgtccttatggacaaatggcgtaaaagctcacggttgaataaattgcatttgctgatggtagaagacagtttttacggtaccagatgcattgataatatcatcgagtttaaaaggaaaaacatcactcgagtcgctacacttagtgaaaaacctgatgaagcaatggattgtgtcaatcaactgtttttcgggccatctgtgcctgacaatcaacatcagtttgaacgagtaagacctctggacttgcagtttgacccactgggttacattattcatcttgctgttgctctggataagacaaatctcacaaaaacggcttctggaactcaataccttcattatagcgatggtgttcacgaggaaaatgccggtctcattaattcacttgatcacgaacgagtagcactcgctcgttcttatggtgctgagacacgactatttaccactatgttgactgagcaatatgggcttcctcaacaacctactttctttgaaatggcaaagagcacaaaaagtatctatcgttcattatcagaaaaatcactcaactcacttaaaacaggccgtatgattcaggaggactatcctgggttattaacgatgagttggtttgccgaaatctctggtgaagactttatgatcacccgggactatgtcaaccagattactcaaatgctacaggccctgaaggtgaatacagatggcctcgattattatcataactatctgaatgctctcaatttaaataaatccgacctgatcggcatgctttcgaactaa

SEQ ID NO: 225216 - DNA, 966 bp, Klebsiella pneumoniae
atgaaaaataacaatttcacaccagcctcatcattcggtaaaaataccagtgtggatgctaattattatcttgaacatggatttgcagatgtcagggaattaatttcaaaagaaatggtagaatatcttcgtgatattaataatcaaacaaaaagcaatagcgcattcgattcattcaaaagaaatacatataatgtagcaatcgaagatgaaaaaattctgtcctttatacgcacagaaaagtttgccgatcttgttaaaaaacttggttatgaagattgtgtattcactgatgggataatttttgaaacggacagtaattctgttggtttcgactggcatatcggtgtgaccagtttcaaatatatctatcctgaagacagagccttctctatttggatagctcttgatgatgttgatccggaaaagcaggatggggggatgagtcttctttccacacaggcattctccggtcatgagttttacaagttacagtcaaaagtaacaaaatctcttaccgagggaaaatataaaatcccggcgatatttaaaaccgtcctgggaccacggttcagaactgaggaacaaaaaaaattcaaagagctttatccatttattcaggaaaaaatcccacacctgttcagtgaatctctttatatttcagggtttgcacgtaatttattcgacagtgaatcggtacgttaccgtcttgcgcccggggatgccattgcatttgataaagatgttttccataaaagcaatcgatttttacccggacctcagttatcacgtcgtgcatttgtcatgcgctttattgatgtaaaatctcgttacaatcaggtgaattcagataaaactgggggcgatgtttccgttctggttaacaagatgattgctggtaatggtaatcactttgatatacaaaaaggaactgttatcagaactacatcagaggtaaaaaaatga

SEQ ID NO: 225217 - DNA, 903 bp, Klebsiella pneumoniae
atgattacgtatatcatcaaaagaacgggtaatcgatacattgatatcagcagtggtaagacaattgatgcttattatccaaaaggagacatgaataagcgttcctgtcttgccgtcaagcacaaaattatccgctgcgaatcatttgaaattgagacagatatttcaaaagatatcacgtcgactgaagatgcttatcttcgtttacagcttctttcatctcgtgaatacaaaccaaacgaaataaatctggaaggcatttttcagcatcttcccaatgtagcctggaccagtgcaggcccggtattccctgagtatgtacaacgtttacgccatattattgcggaggattatcatcaacttaccgtatttagcgtggataaatttccaagaatggttgactacatagtcccttcaggtgtgcgtattgccgatgctgaccgggtacgtctgggagcctacatttctcagggaacgactgttatgcatgaagggtttatcaactttaatgcaggtactttagggcaatgtatggtagaggggaggatcaccccaggggtaaccgtcggtgatggaagtgacgtcggcgcaggagcctctatcatgggaaccctgtccggtggcggtaaacagaaaaatcagataggtaaaggctcattactgggggctaatgcagggatagggatctctctgggagattcctgcattgtggaggcagggttatatgtgacgtcagggacgaaagtgacgctgccggacggatccgtcgattatgctcgtaatttatcaggcaaaaataatcttctgttccgacgtaacagcctgactggtagtgttgaagtgctgacaactgacagcagtgtatggggaggtgttaatgccgttcttcaccagaacgactga

SEQ ID NO: 225218 - DNA, 744 bp, Klebsiella pneumoniae
atgccgttcttcaccagaacgactgacacccagaatacttccgcagaccgcgtcgcactggttatcggtgcgacggggggagtcgggcagagaagtgttgatgacttgctgcagaatgggtttcgggttattgcagttggtcgtgatcgccgtaaactgggtgtgctcgtcgccaggactgagctttacaaaaacaagcttcataccatctgtgctgacattcagtctactgaagatgtgaggggtatccgggaccgaatagcggagtttggccatttggatttgctgatacttgcagcagggatcacctgtaataaaaccacaggggcaacaggacaagaaatacagaatgtaataagcagtaatctgcttgggcctgtttttgttataaatgacttgttgccattcctattgagagcggaatcaccgtcggtgatctgcctctcatcaagagcgggaaaaataggcttcgcggataagggcatttatggggcgtcaaaagcgggtttacagctctatatggcagccttatcgtcagatccagcgcttaataaaattcgttttaccgtattatgtccgggatggattaacactgcgatggctattgaaggtggatgccagagagcaagcaactcaatacttcaacctgaagatatttcctcgttgatgatctggcttgttaactctcctgaaagagtcagaatcaaggaaatcgttatcgaaacgtctcctgatgagcattaa

SEQ ID NO: 225219 - DNA, 1212 bp, Klebsiella pneumoniae
atgaaaaaaaatctaattcatattattggaggcagtgggccaactcgtccatactactgtctgtttttaacatcgttaatattgactgtagccaggggaataacattaccttttcttgttgtatttttacattttcaaagagggtttggggtagatgaaactggttatattattacagctggaataattttagggctgtttttctcacctctttgtggaaaaataatggaattactgaactgcaaaaagtgtattatcctggcactgctactattcagcgcaagtaacattttcatgtctgaattgaggagtcaatatttaataatatttttttatgcgctactaaatttagcatattctttatacagtgtagtacttaaagttgtgatttctgatgctgagaaaataaacaaatcaaggctattttcgataaattacaccatgacaaatgttggatgggttattgggcctttactagggagcctttgctctggactcgatggtcgcataatgttctggatctcaggagtaataggtgttttgctcgcttcatttttcattttatacaaagtgcgattaattgaggagaagcaattaacaaaaaatgctcagtacgctcctgttgagacagatcatcggaaccactctaataacactttatgtttgataattcttgctggatttatttattctttttgttatggcagattttcatcaagcgtaacacaggtgcttactgtaatatttgacaaggaaaccacctaccaaattattacgtcgctgatggtaacaaatgcgctttttgtaattttactccagatcccattaggttcaagggtatctaaagataacgttgtcttaagttcttttattggtagctgtagcttaattattggcgtgatgctcttcgcaggatctttcggacatttaactatgtgggtcacaggaatgatattctttacactgggagaggttctccttaatccggtgcagtatttgatgctggattctttaaagacaaatacgagcaaagccagtctcttttcattacagatgcttaccggtgtgggagctgctatcaatccggcggcaactgggtggcttgtagagaatatcagttcaggatcaatatttatggtcatcgcctttgccgctataactggtttttttctcgttgcgctggctttaaaagactggagaagatatgcataa

SEQ ID NO: 225220 - DNA, 597 bp, Klebsiella pneumoniae
atgcataatttatttttccttacctgtgcttcgttattgttcattcctggacctactaatattttgatttttaattcaggatatagcaatggcttcaataaagccccatctttgatgttatcagaatggtctggttatatcatcagcattactttatggtctatcgctgcaggattgttttttagttcctatgggtgggtggatatcattactaagattgcatgttcattgtatctttttgttctttcgataaaactatggttttcgggacatatagaaaatgcaaaaaaggtaattattaattcaaaaacaatattttatacaacctttctaaatccaaaatctttcatttttgcaacgataattttccctgtaaaaatcacagatgatttatttttatactctgagattttaatacgttttaccatggttttgtttacagcatcggctttttggttgtgttcagggaattttataaagaatgaaacagatggacattcagtaaaaatagcgattcgatatttttccgttctgacattaataagtttcagtgtctatatattttatcagggtgtgataaaaatatcatggacttaa

SEQ ID NO: 225221 - DNA, 1269 bp, Klebsiella pneumoniae
atgaaacacattgtagttatcaatagttctgaattcagtggtgttgagttattagataaattgcttaaagaaaaatacaaagtcagctactttcgtaatcttgcttacatacgggactgggactcctccagaacggacgatgttcttcgacgtcttcataatgttattgatctacctaatacacatacaccagaaattgtcagagatgctgttggtattttaaatgacagtcaaccggttgatgcacttatttgtatcgatgatttttcattagaagctgctgcctgtgcagccgagcatataaatgtaccattcagcagtgtgaacgctgttaaaacaaccaaaaataagttattgtcacgccagattctcgaaggaacagataaaaatgccccttgggttattcatgaacgtgattatcataaacttccgtctgttctggcgtccgtagaattgccggtaatagtcaaacctgtcacatcagcttcaagccggctggcatacattattaaggaacgggctcagattaacctacttattaataatatcgaagaagaaatcaatgagttaccatcatcctataccgatttctttaaccgtggttttcttgtagaaaaatatttaactgggcctcttgtttctgttgagatcggaagaatgggtaattcttattacccatttatggtaactagcagaattcgttgtgccagtgataacgttattgaactgggtagtgttatgccttcttctcttaatgataaggaggagcaggaatgttttaaactggcaatatccgcactggataaaataggactcgataatggtatttttcatatcgaaatgatttacactaattccggccctgcaatagtagaagttaatggcaggctcggaggtcgcaccattccggttctttatgaacttgcgactggtaatagcatgtttgaacatcttatcaatatttctcaacgtgctgaaccaaaagcagagtccgtttaccaggggcaaaaagcggtttcgtttttctttaaagcggaacaatacggtaaagtactggacggtacatccagagcgttaccacaaaatctcgcaagttatattcaatcttttgaatttatgaagaaacctggtgataccttgcaaaaaggtgagattctgggatggactattgtttcagcgcggcaggaagagatctggaatgtactccatgagctgattcagtttgttgaaagttcttcaggcgtggaagttaaaaagcctttaatataa

SEQ ID NO: 225222 - DNA, 558 bp, Klebsiella pneumoniae
atggagcaatcttcagtagaattaataaaattaacaacgccattttttcaaataatagtaacagtaatactaattcctcttataaaaaaaggatatgaatcgcgaagaacatttttttctcttcctctacagaaaaaaatggacgctatagcctatttaaaaagacaccaatcgtcagatagtagattagaaaaagccaaacataagatcatcatgggaggatatcgattatttaatgatgtggaattatcaacgggaattattgaattttactgtgagaatgaggaaaaaaacgccaggttttgtaaagcagtccttagtgagagatcttatattacttttgagaatggtgtaattaaagcaagtaagaagaaatatcatataaattttatgatatatattataacagcgttactgtttgttaattatcattatgttgattctacaacggtcatttacaacgcccaacttccggctgagccttttattatattagctataattttgtatagctacctgtcattgctggtgttatatagatacttatgcattctataa

SEQ ID NO: 225223 - DNA, 576 bp, Klebsiella pneumoniae
atgaaaacttgtattccatatattatcaaatcatgcaaagagaaaaagaaagaaggggggaatatgataaataaaatacacaatctagaaaacgtcatggatagtacttttgcaactggccattcgacctggttaagatatgtgttaagaaatagtgtatctacgctgggtgatttaaagatcgcggctaagcaagtatgttcaagcaatgcagcgaaagacgaaagtacagaattggaatgtagcattgtagtctcatattgtagtactttacaatctatctcaattattttgcaggttgccgtggaacttgagacgttacaccagaacgatgcttttctaaggtcaacgtttgaatatcttaaacgcaatgggatttatgatcacgatataatttttgacatggttaagaaagtatctctaactgattgcgaaataattcacgagtctattgttaaagcgcagtttggggtggagttattggaagcacgtattagtttcggctcgagaaattttcctcttcgtaatgatatcaaacgattttatccatatttactacgaaaagaagttttttaa

SEQ ID NO: 225224 - DNA, 324 bp, Klebsiella pneumoniae
atgagagttgttagcgagcttacctgttacctcgggaggattctgctttacacgatcaagaccggtccatgcattgagctgcatcattttgccgttacgctgcagacgccggttataacgttccataaatttgaaaatatagttggctcttacgcgaggcgttttactgttgtagtcagcaataccttcaaacacgttccctttacggtcaataattttccggtgcagccaccatgtcccaacccaaaaagaagcacaggcgtcataagcgagctcacgtcaggtaattgcggggaagtgggatttcacctcagccagatttga

SEQ ID NO: 225225 - DNA, 3342 bp, Klebsiella pneumoniae
gtgaatgaatcatcaataaaaaccgaaaatgtgttcctcttctggagagccattgaagccttaacccctcaggatattgataaggaaaatgcccgcgacaaactcaacccggtttacaaagtaggcgcaggatccatgcttccctgggatgacccggaacatacccgtaaggatattgcgcctggcaaagtgtggcgctactccgctcaggcgggggtttatcatctgagcgagatttccaaaatgctggaggataaaatcggtgcccatgaagcggtacctgaagaacgtaaatcagggaaatgcaggctttttgatattggtttcaatgaagaaggcatcccccagccagccacgttcatgttatccctgtcagcatggtcggcggctcagatactcaggcatgatcgcggcgtttatgctcttcatgctcccctttgctccgatgtgtccgacctgcccgcaccaaacgacagcctcccgctggtggatagcggtttttacgattttgataatctgacccttcatctcatgcagtgggtggacaatgaggcttatcgattacaggaggagggacagaaggccgatacaggatggttgaagacgcttgagaaactggtcatcgcaaaactgtatttcccggaagaagccatggatacgacgatcgtcagtgtggttaagtgttccctgaccaggaaggcgaaagttatccaggaagacagtgcaaagaaagacaataaaaagaaagaagcggtgcccgatgacctcattaacagttttttcattcaggaactgcgaaagctcgacgcggagtggaggcaaggagggggtggggccggttttaaagactttatcatggcgataacccgggataaccaacagcgcctcgatatacgcactgaagaaggcctggattttgcttttgagaaactgttgcccacacagccaccagctggctcctggccttcaaagtacccgctggcattcagccagcagctggccgtcaatgaaatctggaccagaaatcacactgaaccgggtatttttgctgtaaatggtcctccgggaacggggaagacaacactcctgcgtgatgtggtggccgcagtcgtcaccgatcgggcgagtaaactggttaaactcggagactctgcatttaaagccaaagacagcctcaaatacaatgacaggctgataccctattattcgcttcacccgtccctggcggggagtgccatcgtgattgcatcgtccaataacggagccgtggagaatatctcacttgagctccccgggatggaagcggtaccggaggatgtgtcagatcgcagcgattactttggcgggctggctaccgtaatacttaacaggcctgcctggggacttctggcggcaagactgggcaataaaagtaacagagagcagttcgttaacacactgtggtggggaaatctgcagaaaagtgaaaaaggcgatgaagcacctccggagaagttttcacccgaacgtggagaggggctgaaataccatctgaatttactgcgaccgccccgaaaagtcagagagcctgcactgacctggactgaggctgtcacacgttttgaacaggcacaggcggtggaggaagccgagcgtcagcaactggtcaccagttcagggctaacgcataaaattgagtggctcgaagaacaacgaagagtgtgggaagaaaggaagcaaaccgcaacgcttcagattgaggaatgccggaacgcgctacaggcgctctctgacagactcgccgcgatggaaatgaccctgaccctgtccagtggagaacgggacgaactcgatcagcgcatccaccagcatgaaaaaaataaacccggccttctggctaatctcttttcgctggggaggatatcgaaggcatggtgggatcgttatcaacggctgacagacgaatcagatgctttgcggacgacgttgactcagcaacggcaggaactgcagctggcgcaatcagaaaaacataatgcagacaatgaactcaggagccttgagcgtgagctcactcaggtgatcagcaacggtcaggcggtctgtaaagagcaggaacagaataataccttgctgaagcaggctatatccgatctgggagcctcctggccggagcggaatgcaacagatgaacatagggaattgtcagcaccatggcttcatgagcgctggagaaaggcgagggaagatgtgtttatcgcagcattagacgttcaccgggcgtttattgaaaataatcctgtaaaaatggccgccaatatagggcttgcaatggactggttaaaagagcgaaaactgaccgaaaaacaggcgggtctggctctcgactccttatctctggtcgtcccggttatatcaagcacctttgcgtccatgccccggatgttcagggatacaggtcaggaagcgataggctggttgctgattgatgaagccggacaggcacaacctcagcatgcgattggggctatctggagagcaaaacgcacggttctggtaggtgacccaaaacaactggagccggtcagcggtattccgtccactgtagagggggcgctggcaaaacattataagatcccgtcctgctggtggcccggaaaagtctcagcacagatactggcagaccagacgatggacgttggcacctatctgcccgacccggagtcagaacagatttgggtaggctgtccgttacgggttcaccggcgctgtgatgaaccaatgttcagtatcagtaaccatattgcctatgacgggctcatggtccacgggaaaaagccgggcctggtggatttccctgaaagcggatggctggatgtgaaagggaggacatgcgagggaaactgggtagtggaggaaggggcggcggtggaaaagttacttttggcgttgcgtcaccagtattcactcactcctgacgacgtgtttctgatctcgccattcagggactgcgccaagcagcttaactggatcgcaaagaggctgggattcaggatggacagaacggggaccgtacataaaacacagggcaaggaagctactgtggttatcctcgtgctgggaggcaacataaaaagtcagggggcgaaagcctgggcggcggaaaaacccaatcttctgaacgtcgcggtaagcagggcgaaacaacgcatttacgtcatcggcgaacgtgcattatgggagaagcaaccttacttttccacgctgtcccgggcactgggaaggctggatgtgccggtgagcaacagcaacccgcgtgcgatgtcatatatggaagagtacttaaccactgaatggcgctga

SEQ ID NO: 225226 - DNA, 288 bp, Klebsiella pneumoniae
atgatgtacgaactgtttggttttgaacttgccgactttagagagctcttctatgtcttttgcctgggtgtgcttgtctaccgctactgcactgtcgggcacaaatacccgcttttcagttgccgtaagaaagagcctgatacggctgaaagggttgaaaccggggaatcccgtgaaacggattatgataatgagtttcctggctacagacaatcagatatcaatgacccccgttcaactgaatattatttttttgaacaagaaattaatgaaagacatcaccactaa

SEQ ID NO: 225227 - DNA, 3915 bp, Klebsiella pneumoniae
atgagtaattacactatttataccattggtgatatcgattttgtttatacggcttttaacgggatcgcgctgattttttcctctcatggttccaatgaatggctcagatttgctgcctatgcagcagcaattggactcttctataaatcaatgaaatgggttcttgctcccacaaaaaatgatgtcccgatcttctcctggatcatggggttattgttctattccattgccgtaattaaagccgatgtcacacttgaatcggttaaaacgggggaggtcaggaacatagacgatgttccggtctttatcgcgtctaccggtgaactgacaaccggattactgcacggtctcattacggactggcgagcagcgtttgacccgcttacgccggtgggccaggtcagcgatacgctcgatgacagcctgacgctaggcccaatgaccaaaatggtcaaatatatggagtggggtggggaatccagtggattctgtcaggctttcccaaatacgatgagcgggagtgaaaaacctgttacttttgatgtctgcagaatcatccagtctattgcacgcgattgtattaaaacgacccaagactcagaggtcaatacaccactcagaggggtggcgttgaatgaaatctatgccacagatcttgcgtcagtaatgaacgtgatggattcaatgacggccaacagcctgaagacagccagcgttccaatggtgacatcgacaggtttgcagtatgcgtcgtgtacagatgcctgggcggcggttaaagccgcattcgactcgcctcagggcgcgtcaattatgcgtaatttgggtcagatgaatcagtttgtagcaccgcagcaggaggatagcggccaacaaaccgattttatcggaggtgcagccaccacgctttttggaagtgccggtcaggctcacaatatcacgactgctgcatttgtcctcaaccaaatagataaaggtgtgttgcagtatcgtaagtcgttgggtatagcggctgactaccagcttttcgaagcgagcatgaaacgtaccaacgccatggtcagtcaggggcaactctggctgaacatctcaggcgctgcaatatcgtttctggaaatgttcagctacatggttgccccctttgctctgattgcgatcctcttcctgggaggtgaaggcataacttcagctgcaaaataccttcaactgatagtcttcgttaacatgtggccgataacggcggtcatggtcaatgcatacgtaaaaatggtgttaaatcagcagtttgacacatggtcatcactgggtgtacagaccactatgaactgggcgaatatggggagtattcaggagacgtacggcagttacctgtcagtagcttcagcgctgtattgtatggtaccgatgctgacgctgttcctgttgaccaccagcatccacccgatgatgggggcgttgaaaaatgtgacgccggatgctcctgccaatactggtcatgtcacaccagaagtgtggtcggcgggtaatgcgggtaaacagtcctttggtgaccagacacacacagcagccactgcaaccggtggaggtatgtcatctggcgggcttctggattctccgaccaggatgatgccaacgcttgggttggggtcatcgttaagtgataccgttaacgcagcagggcagcactcgatagggaccgaccgattatcgacactcagctccagtgaggcatttaatgaaacctggaccagaggaatgcaaggcagtcggacacaaactgcgggtacgacaaaccagggaagtatgagggctatggaagatttcgtgaccgggcttaccggtaacatttctaaagatgtaggaatatcagcagatgctcttaaatcaaacgttttctctgctgtactcggtgcgaatggtgatcttggaatgaaatttggtgggggtaaaggtgggggcaagcctgcgcttggggacgttatgggggcgtttgttgcaaatttaagcgctcgtttacagaacaactctcaactttcggacggggcaaaaaaaggtctcctggatagcctctctaatatgtccaaaaccggaagcggtttttcaaaggacatatcaaagatagcgtcaaatggtatagagaataacttctccgattctgacagctaccagaaaatggcccagaggatgcagcaacatgcccaggctgtcactaataaagagagtaatgcattcagtaagacaggtgggcaggcttcccagctttcaatgagtagcaacctcaacatcgacggggctaaactatcagacaccctgagtaaaccagcaaccgcacaatctgtaggtgactgggcacaggcctcgggattatcccgtgaagctacagttggcaaatgggaggcgatgaaagcgacattaaacagcagtaacacgctgggagaccagagaaacggtaatgatgcctttgttaaaatgatgtttaacgaagcagagaaactgactcatatggatgcaggggagacggttgcacataatctgggcgatatccagaaaacatcccagatgctcaaaaatgcagtcagtatcatgggggccaatgccggtatgattgcgcccgcgacggaaaaactggatcagtttgtcgcactgggctccggtggaaactatgccagcggacatgaacagcagcaaatcgcacctgacacgtccgcagtgcctactgccggacaggtttctggtaatgttgcgaatcagcaagggacggtaactggtggactcgctcagcgggagcaggctgcgcaagtacaaccaacaacacaagttggcggcatgacagctaacaaacttaatgaagaagaagccagaggaaatgtagctaatacctacggggctaatatcagaaatgtccatacagacaatgatactaaaaaccttaaagccgtcgatgattcgctgccaatgggaaatacagcagagaccattaacaaggcgaaacaaacggcagatacagatgcagctattcccaaggcagtttcaaaaattcaaagcatagctcttggcgatcctgaaaccagcgatatcaatgccccgactcagcaagcaatgagggacatgcaatcgcatgatatgccgagaagtgctgagagtttccgcccgtccgggaataaagaaaaagatgcgaaagacgccttaagccagtcggcgttacacgcggaagttgcccgcaatcagaccggagaggccagagaaaacagtcttaaagaagctgatgcatggcgttctgcattcaaccagatttcaggtaataattattcaccatccgatgtagaccgtgttgctcggttagccgtggatggtaaaaataatggttatgaaaacggactttcggacgtcgttaaaaacgcggtcagcaaggcgggcactacggccagcagagtaccgactggctctgctgattatgagctgggtggaggtatgcgcgacagcaacagtagaagtccgaatctgttagataaagggcaggcagccagagaacaggtgtttgatggtaaccgtacagtagcaaaaacgttaaccggagccggttcagaccgttatgtcggtgattctatgaagttagaaaacggttcatccggtcaaacgctcatcggcaacatgagcaataatatgcagttacgacaggcgctcaatttagctgacaacagccctggtatgacggacgagaaattaacccgtcttcaggacgcgcaggacaccgcaatgaggactgtccagagtaaattagctgacgacccacgatatgggccagaagcggccgccgcttaccctgcgtttatcgcaagcctaccggaaaggctcggtaccacagaaggcaaggattatgcgaaagccttcctggacaagtaccgaaaacactaa

SEQ ID NO: 225228 - DNA, 627 bp, Klebsiella pneumoniae
  misc_feature (5)..(14): n is a, c, g, or t
atgcnnnnnnnnnnttataatattttccaactggtagaaggtgaccaggcgacaagcactaaagttcagaaatggctctccggtgtttacgatgaactgtcgggtaatgtaaataccttcaaggagcagattgacaaaaatgtcgccagactgcctctggatgattcatcattcgaagggtttgactatggtgaatttgaaattcgctggaaccacccaatgacctataaattactggatattatccagaccatcaacgtcctgactcgtcaggcacatcagttgtggttatacggtcagatatcacaacaggttcatgaccgaattatcctgcaactcctgagctcactgcgggttgcgatggacaacatcactaaaatactgaacactgaaaaccgcgtgaatggaaaatacgacgcattgccattcatccagagcattaagcggtttaaatcggtggaactttatattgccagtctcgaaactaaagcccctcttcagtccggtcacagtaacagttctgctgatgctggcagtgagccgacattaaaacaagaagaagcagctggctccggtaaaccatctgacaaaacacaggcttctgccactcctgtttcggtacaataa

SEQ ID NO: 225229 - DNA, 234 bp, Klebsiella pneumoniae; identical to SEQ ID NO: 94204

SEQ ID NO: 225230 - DNA, 162 bp, Klebsiella pneumoniae
atgaagctaccgcgaaacgccctggtctggtgcgtattaatcgtgtgtttaacgctcttgatattcacatgcctgacccggaaccgcttatgcgaagtccggctaaaggacgggaacagggaggtcgcggcaagcctggcttacgaatccaacggtaagtag

SEQ ID NO: 225231 - DNA, 1080 bp, Klebsiella pneumoniae
atgttgatgcagcatatcggtgtcggctattttgggtattaccgagcaactgcttatgcgatgaaacactctcttatgcccgagattgcgaagttaagaatgaaggctctgaacttctgggataagcacgggatccgtgccgcagctgatgcttttgacgtatcaacgcgaacactctactggtggcgccggttactgcgcaccggtggtccagaagcactaattccaagaagcaaagcccctctggttcgccgttcaaggcactggcatcctgatgtactcaaggagatcaggcgtctgagaactgagttacccaatctcggcaaagagcagatttttgtcaggctgaaaccatggtgtgaagcgcggcattttacctgtcccagcacgtcaaccattggaagaatcattgctggtgctcacgataaaatgcggatgatccccgtacgcctcagcgccaggggcaaagcccggttgataaaaaaacgctcagtgaagcccagaagaccaaaacaataccgcccggtaaaaacaggcgaactcatagggatggacgcgattgaactcaggatgggggacctacgccgctatatcattaccatgatcgacgagcacagcgactatgcgctggccctggcggtcccttcactcaacagcgatattaccagccatttcttcagcaaggccacaaagctctttcctgtcgctatcagacaagttgtcactgacaacggtaaggagttcctcggtaactttgataaaacgctacaggaagcctcgattaaacacatctggacctatccgtacacaccgaaaatgaatgcgacctgtgagcgatttaaccggacacttagagaacaatttattgaattcaatgaattgttgctttttgaggacctgaatttgtttaatcaaagaatggctgaatatctggtgctgtataacagcaaaaggccacataaatcactcgaactgatgacgccagtggactatattttacgtgagagtaaaaattgcaatatgtggtggacccatacatctccttgcaaattgcgcggtaagaggccatactggtgttga

SEQ ID NO: 225232 - DNA, 1089 bp, Klebsiella pneumoniae
atgctcagccagcttaacctgcgttttcacaaaaagctgatcgacgcgctgaaagtgcgtgccggtcgcgaaaatacttcggtcaacgccctggccgaacgtttcctcgatgacggactgaaaacggtcgcaccaggcgacgggtattttcagctcatcgccgatccggaggccactgtccggcagctgtaccggcatatcattctcggccagactttaggctccgccccgatcacccgggacgaactgcgcttcatgctgaaccatgccaggaatgccttccagcacggaaaggacaggctggccacgcttccggccctgggcacgctgctcgatatcacccgcgacctgctggcctggcaggttgagaacgaccggccggtggacggcccctggctgaaagggatcttccgcctgaccggtgaaaactggatggaagagtttgacgccttccgggcagcgctgcgcccggtcgtggatcagatgtatggcgaacaccttctgcgtccgctggagagtgactgctttaacttcgccgatattcccgacagtgcactcgctggtatttttaccctgccgcgtctgaaagccgttttcccgctgatgctgcgcgggctggactggagcggggagaaggccagagacctggctcaggagctgcgccccgtgatcccggccgtaacggaaaccattgaggccggtacgctgcgccttgagatccgcatcgacggccagcaccccggcgcgcgcccgggcgcctggtatgagacaccgcggctgcatctgctgatcaccgggcaggacttcgtggtgccgtacggctgggaagtgttgtccgaaatgctgggcctgttcagcctgtatgcccgctatcctgaagcgcttgcgcacggccaccagggcgagcgcgtgatgttctccccgcccggacacgtcacagaggaagggttcttcggtaccgacggcctgcggatttttatgccggcggaggcctttgcgacgctggtccgggagctgagcacgcgatgctctgaaggcaatcttgcggaggccctgaccgggctgcgctgcctgtacggagatctgtag

SEQ ID NO: 225233 - DNA, 2187 bp, Klebsiella pneumoniae
atggccactgaaaatgcactggcccgcgccggctttgaaggcccggtactgaaggctgaagatgaccgttacgggtatacggcgatagccgaagggctggcccgcagcatcagcgccctggatgaaaatgtcagcactgtgattggtatcgaagggcagtggggctccggcaaaaccagcctgctgaatcttctgacggacaagcttaaagctcaggtaccggccaacacgcagatcgtggtcttctccccctgggtcaactcaccggatgaaagcccggttaatgcgctgatgatgaccattgcggccaggctggcgaagctggatacgtcagccatggcgcaggctggaaaggttgcgcccctcgcagaggatatcctcaactacgcgcagcagacttcacgccggcttgcgcctgtgacgcgattcgccggtaattttattccgggtctggggcttgtcgcagacggtatggatgccctcgcgaacaccggcctgagcgggcgggaaaaaaccgcggctgaactccgggctgacattgaagataaaattgccgggctgggcgtcagctttatcgttgtgattgacgatctggatcgtctggagcctgcgcaggcagtggaagtgcttcgtatggtacggtcggttgctgacttctcacgattccgctacgtgatgtgctatgaccgggacgtcctggcgcatgcggttgaaactggcctcggtgtgcagaacggcaaacgctacctgcagaaaattatcccgctgtcgttcagcctgccccgaccggaaaacttcgctttacgcagggagtttcaccggggagccatgactatctggcaggaagtctccggtcctgtaactgataatgagtcttcagaactcctttctcactatgtggatgtctatggtgaggggctcagtacgccccgtgaagtcaatcaggtactgaactctatccggttccgctatccggggctgcgtgattatgtattttatcccgacctgtgcctgcttcagctgatttcagtggttaaccctctcttcgccggctgggtcgagcactacctcaccgtatggtctgtggttgaaaaccgggacggcattgcacatgaagacgaacagaaagccctgattgctgaacttgcagaggcgctaaagaaatttggcgcgtcccgcgccgcttcggtatgggagctgcgtgcctggatgccaggaatatccgggtttgaatatgaccatctccggttgtttgaaactattccccttcaggatactgaacgctaccgccagaaacgcaggctctgcagcggtgagtactggcgctattacttttcatattcttcaccccagaacgttatgtctgatgaagatatcagcagcattatgaaacttgcagcatgtaattatgcggggctgaaaaaacgtcttctggacagtgtgaccagtaatggtgtgtcatcccggacctggtttgaacacattctcacgcgtctttcgccttccgttacggtcggagcagaaaccagcgcaaaacgcaatttggtaaaattcttcttcagctgcagtgaccaggttctgccatggtacagggcgcgggatatcttctttcggcaggaaaaaatcggtatcgatggccttgtcagccagctggctctgcagatgattaccagggaccgcaggcgggctatcagttttatatgccggtgtttccgacaaacccgtgcatttgtctgggcgacagtctttctgcgcaatatccgggctaactccgctcagggcgacgctgttttcacccaggatgaaatcaccattttctgtactgcgctcagtgagcgactgcaggaaaagcacatccaggaaaaaatgcctgatgtaccgtatctggctaccttcttgtatgcatggcgtgacatagcaggcgagcaaaccgtcgcgcagtggatctcaggagttgatcagtctgatcgtgattttctgaagatgttgcttaatctgcgcacggcagtcagcagcagtaatcagggtgattatctgcggcttgacctggatgtgatcggtactgtttttggtatcacagggcttatggagcggtttgaggatataaaagccaggcaggaagccagcctgacgggtatgataagcgggattgaagacgccatcttacttaataaaaatactatctga

SEQ ID NO: 225234 - DNA, 423 bp, Klebsiella pneumoniae
gtgttgggatatgctcctgctgacggactcagtgaagcccatgcggtgggactttacagccgtgtcgcggtgtttcaggatgaaagcggccagcagggactcagtcaggtgctgctgactcttcgcaccgagaatacgcgggcgctgccggcaggcgcttttgaacagtttgaaccgccgaactgtattgttcacattctgacacctgacccagggttcggcgtaccaattattggccagtttaatttcctgtcaatgggcttccgtttccgggaagaatcctgctctctgcactgttacaccgtggaggactcccgggtcggggccacccagaccctgacggaagtagcggaagcgctcgtcagtaacgttgatgcccctctccgggcctacgctttacaccttcctgtcacaagtcagtaa

SEQ ID NO: 225235 - DNA, 1341 bp, Klebsiella pneumoniae
atggttgattcaacaacagttaacggaagttcagattcacagctacctcaacggaactggaatgccctgttccgtggagattatgcactgggggcttacaatgcctgcgtgggagacaacggttgtccggacctttatttctacgctgatggtttcgctgacagcgtattcctgctcattgatgcccttacctcggggcaaaaagcaatgcttgatacgcttatttatcctatctgtttcaatctgcgacactccgtggaattaacgataaagggtcagatagaggatctcagccggcttgcgaaactaagaaaacagccgcttgcgcccgatacagaagtagacaaggtgctgaatcagcacgatattttgaaactatgggcttttttttcaggccatgcggttgcgtttgatcggcgttataaggaaaagctgtcagcgctggaacctctcattcgctgtattggtgaaacagatcccaccggtcagacatttcgctacagttacagtacggaagccaagaaacatctgacagatgtcagtgttatcaatgtattagttctgcgtgaccaatttcgtgtcattcgtgagcaactggaagaacttgccgggttgactcagtggctggagagggaatactccaccggcgttttcaccaaaaatctcagtcgtgaagatcttcatgctatcgccgttcagttgccgccacggcattcatggtctgatccggctgcaggccttgatgacatcatacaaactatcaaatctgaaaatgacatcggcagcagggaactgacggaggcattgaacatgattcaaggttgcagagatttggcacgaattatcggtctgcctgtaactattccgggtttggctatgagtgatttgctaattctcaatgacttctggaaagtggcatgggatcgggatgctctggaggatgaattacgtaacgatatatccggagttacagataccccggtagtacctgtgaacctgttcgaggagatgatgcatgaaatgaaaatgatgagagataccaaatcctctcttgccagtttcatgcagtgggcaacgccagagagagtcgccggactacaggcattaatggaggtccggagttttcgtttcagtgaagaacatgaccgttgctacgaatattataaagaagagttgaccgctgctttttcagatactgcgcaggcgattgaagctgagttatcagagatctggtcccaaagtattggagggcgtaactatccttcgcgtgtgatagacaacctcaaacttgccgggtttacacacgaaagcgctggccttgaggaacacctcttctcctga

SEQ ID NO: 225236 - DNA, 933 bp, Klebsiella pneumoniae
atgccgcagaataccccaatgaatacagtgctgcctctcatttccactccccggcttggtagctatattgccacgtttaaacctgtcggcgataatgagctgtacggaacctacgtctggagccagcttgccggtgggtcggtttacccgcttttgcaaaatcttgaaatcactctgcgtaatgctatcgatgctgaagcaagaaggcgttttggcgaaaaatggtgggacaaccctcagttccgatgcgggaagataatcacaactaccgctttttacggaaaaattctgcgtgccattaaaaaccttgacgatgcgtggaaaaagagccaacggaagaataaactcccgactcacccacttccgcagtggagccatgatcaaatcgtggctgcgacggacttcagtgcatggcatttcattctgaataatgattttgcggcacctaactcaacacaaaaccggcattacctgtggcccgtttcaactggcagggttttcagacagtacagcagagtttctcgggttgagaaaaaagcccgcacaactctccaggacctgatcgttgaaatgcgagaataccgtaatcgactttcacataatgaacctatatgggttaaagcaccgaatgtatctgacgctgccaccgcaattgacactattcgcaataaaatcaggaaaatagagtctttgataggcatcatatctcctgataagcaccacataatggataaaatggggctgtttagtcatgcgttgcgtatctgctcagtacaggaactggcaatccataatttaagccaaacctattgccctctgacacgacgacaaaaacgtaatcttcgtggcgtgatttccttagcaggaaaactaaaccggtcacaaatgtttgagtaccacaaccggatatatgcgctttaccaggtcagataa

SEQ ID NO: 225237 - DNA, 705 bp, Klebsiella pneumoniae
atggcgactgaacagatgaaacaggtggttaatttctggggctttttatctcagggatggccttatgccggggcgctttcaatagtctggatgactcatctactgaccagatcacgtgaaaagaaagcgataaaagaaaaagcgcagcttgacgaaatcctggcggagaaaaaacggctgcatgagcaggagctgagtgaccggaagcaggcgtcagagttacgctttattggttcgcaactgatatttattcttgaatcgtttgcagtcaattgcgcagacattgctgttgataaagggaaaatacaagaaaatgatgctccgcgtgcagaaccggtgatcattccgagcgcaaagatccctgaaatcagtctggcgggagtggagggagactggcgagcgctgcgggcatgggacatgtatcggatcatggaacttccggtaatgctgcttgatgctcgcatccatattcgtaatctttccgacgcccttgcgtacggtagcagcagttctgaactactctctatccgggcccgttatatcacaccgctgggcctgcgggcatcttcgctggccagatgcctcaggagacagtgtggttttcctgcatcacctctttccgatggaccacattcagtttccctggtacttctgaaagagcgaaagcgccatgttaaacagactttaacatcccagccagggtaa

SEQ ID NO: 225238 - DNA, 741 bp, Klebsiella pneumoniae
atggaaagaaccatgattgaactgcacaaagttaataaatggtatgataaacatcatgtgctcaaggatgttaatctcaccattaatcgaggggaacatattgtcctgtgtggaccatcaggttccggaaaatctaccctcatacgctgcatcaaccatctcgagcagattcaggaaggtgatattgtcgtaaatggcgttaaaatgggcattaatggtaaaaacgttaatgagatccgacgcgacgtgggaatggtctttcagcagtttaacctgttccctcaccttacggttctggagaactgcatgcttgcgcctttacgggttaagggcatgttcaagaaagaagctcgtgaagttgcgatgcaatatctgaagaaagtccacatcgataatcatgcgcataaatatccagcgcaattatccgggggccagcaacaacgcgtagccattgcgcgcgctctgtgtatgggaccgcagatcatgttatttgatgagccaacctctgctctggatccagaaatggtcaaggaagtgctcgacacgatggtctcgttggcagaagacggtatcaccatgatctgtgttacgcatgagatggggtttgccaaagcggtcgcgcatcgcgtcatattcatggatggagggcaaatccttgagagcgcagctcctaagaagttcttctccgaaccagagcatcaacgcgcacaaactttcctgagccagattctggcacattaa

SEQ ID NO: 225239 - DNA, 843 bp, Klebsiella pneumoniae
atgaaaagtcatcgcttttggtgttccctatttaatttcattaaaccggggaaagtatttttgcttattgggttgatctcatcgctcctttgcagcaatgcaaacgctgacacattagacagtatcaaagctaaaggaagtatgacgtttggaattgtcaccgatcaacccccgtatggctttataaacgacaaggggcaaaacgatggttacgatattgaaattgcccgctctatggctaaagaattgggtgttacccccaagtttatccctgttacggcatcaaaccgtattccacttctgttaacaggaaaggttgatatgcttatctgcgtgctgggaatgtatccagatcgagctaaagtcattcaatatctaaaaccttatgcggcttccgccgttcagctgtatgcagccaaggatacgaatgtcaaagcattatcagaactgtccgggcataacgtcgcggttgcacgaggaagctctgtcgataagatgttaacctccagcgccccgtctggtactaatattcagcgatttgacgatgactcctccgctatccagtctctcgtatctggtcaaagcgatgtgctggcaggttacagcaattatttccttcctttacaaaaggccagcaaagacaaatttgagattaaagccacactggaagttgagtatttagggattgcagttcgtccgaatcagaaagcatatactgactgggcgaataacttcctcgatgtcaataaaacccaaatcctcagtgactataaaaagtggtttggtgtagatcgtcctgaattaccttctgaattaccaggtatttcattctcagcgaagtaa

SEQ ID NO: 225240 - DNA, 648 bp, Klebsiella pneumoniae
atgatcagaagcttaggagtcaatgacatttttttcctgctggaaggattgaaatggactgtatatctctcgctaatagcatttgtatgtggttctgtggcaggcctaatcatagcgctaatgcgtgtcagtcgttttaaaacgctgtggatccccgcatggtcctatattgagatatttcagaacaccccattattaatgcagcttttcatggtgtattacggtgttgcactgttcaactgggacatcaacgcctgggtcgcggcggctattgggcttacgctccatgcgagtgcctatctggccgagatttggcgcggctgcattcaggtcatcccgcgaggacaggatgaggccgcacaatcactgggaatatctttctatcaccgaatgaaagacgttattttgccgcaggcttttaatatctccttacccgggactgtcggctttatggtaggcctcattaaatctacatctctgaccgcaatcattggttttactgagctaacccgctcggggcaggtgctgtccaacaacatattccagcctctgatggtctatagcatggtgggcattgtgtacttccttctgtgctggccgctctcgcactggagttctgttttagaacgaaaaatgcaatacaactga

SEQ ID NO: 225241 - DNA, 669 bp, Klebsiella pneumoniae
atgcaatacacttttgactactcagttgtttttgagtcctggcaacttttactcaaaggagcctgggctactattgaactctcttttatatcagggattttgtctttgtttttaggcattattctgatggtgttcaggcgtggaaatcataaataccttaattttgcagcaaagtttgtgattgaaattgtaagaaacacaccttttctggtgcagctatttttcgttttttttggtcttcctctgataggcttaaaatttaccgtatcagaagctgccgtaacagcacttacacttaactccggttgttacatagcggaaacaatgcgggggggagttaattcacttcctaaggggctggttgaagccggtaaagcgcttggaatgaacaatttcagaatatttttcgacattattttaaaaccagcgttgcgttctgtttacccggcactgagcagccagtttgtgttgttacttttaacgtcaagtgtagtggcttctatctcagcaaatgaactcacctacaccgcacagttaatcgagtcaaactcattcagaagctttgaagtgtataccgtagtaacgggtatttatttcgttttggccttgagtttatcgttggcgttaaaattatttggtcgcctgtatttctcatatcctaataagtga

SEQ ID NO: 225242 - DNA, 489 bp, Klebsiella pneumoniae
atggacaagattttaaaacggcttaatgagctgagcgtaaccttgcctaaaataaatcaaccggtaaatagttatattgcaactaaaacatcaggcaacataatttatatatcaggtcaggttccccgtttaaatggaaaggatctttacattggcaaagtcggtgacactattgatgtagactcagcgtatgaagcagcaaaaatatgtgcaatcaatattatatcccagctgaacaatgcacttgatggaaatttaagcctggtcaaaagctgtataagactgagaggttttgtcaattcagtcagtgatttcaaacagcatccgcaggtcattaatggtgcatcagatttcatggttgaagttttcggcgaaagtggaaggcacgcaagaactgcaataggcgttgggtcacttccacataatttctctgtagaagtcgatgctgaatttgaacttcatgatgagatatcaagacagaattcataa

SEQ ID NO: 225243 - DNA, 1293 bp, Klebsiella pneumoniae
atggaaaatatgaatttcatcctgacttcgggtcttcgcggcgttccacccggcacagaagcggtttcagcgactgacattgccagtcgccgctggtcgccgctttccggcgaaatgtcgctacccttgctgtctcttgatgtaccgacctacggcgaaaatgttaaggccatgatgtcagtagtcaaaatgcacggtgcaatgattgccccccattgcaaaacgccgatgtcgcccgaattagcccaccgcatgatagatgccggcgcatggggaacctcagttgctgacctcaggcaggctgaagtgatgcttcggagcggtctgaaaagaattctgctggcaaaccagatagggggccaggcggcggtttcacgactttgccggttgttacgtaagtatcccgaagctgagctttatttgtttgtcgacagcccggacttcgtagatgccttgcacgcccgctatgaagaagagcctgaacttcccatgttaggcctgctgattgaggtgggctgtggccgcggcggcgtaatctctgaagcggaattttcttcggtcattgatcgcattatacaaatcaatgacgaccgcatcctgcttaaaggggtcgccttctatgaaggaacctgcatgcagcctgacattcaggctaccgaaaatcatctgaacgaactctttactcgggttgactggatgctatcagtcctgcaaggcgttgctggtgaggagaatgacctgatcattagcgcaggaggatcttcactctttgactatgtcattgaatatattacgcatgtaaagaaagcctatccccaggctcaactgttgttgagaagtggcgcctgttttttcagcgacaacggtaatattcggtcccggctgaaaaacatagccctgcgcggaaaactcggacaggaatcaacgcaaatcattgaaaatgctttctctcccacattacgcttgtgggctgaagtaatttctcattccggagaatcaaccgcaatttgtgggctgggcatgcgtgacagctcaattgatcagggattgcccgtcccgctggctctctggcgggacggaaaaaaagttgcagacatatcaggtacaagccagacggtaaaattaaacgatcaacatgctttcattgagatcagtaaaaatgaatttcgggtcggtgatgtcattgaattcggcatcaggcatccctgcacatgccttgataaacacgacgtcatttatggcttgaatgaaaataacttggttattaccgcttataagacatttttcggataa

SEQ ID NO: 225244 - DNA, 1638 bp, Klebsiella pneumoniae
atgaaacaagtaaacgatgctatcgctgagatgcgcatgcaaatcatgtggaaccgcctgatttccgtggttgaagagcaagcgctgacgcttgtcagaacggctttcagtaccagtgttcgtgaggccggcgatctgtccgccggcgtatttaacatcgccggggaaatggttgcgcaggctgtgactggcacgccggggcatgtaaacgcaatgggtgaagcagtagggcatttcatccgtgagattggtgaagaaaacatctttgaacatgatgtttacttcacgaacgatccctggaaaggaacggggcacctgcacgatttcactttcgtcagccccgctttccaccagggtaagcttgttgggtactttgcctgtacggctcacgtagtggatgtgggtggccgtggatttggacctgacgccgctgaagtttatgaagagggcatttttgtcccgatcatgaagtttgcagagcgtggcgttgtgaatctgagcatgattaacgtcattaagaataacgtccgcgaagcggatcaggttattggcgatctctattcactcgcagcctgcaatgaaatcggtgaaaaacgcctgagtgaaatgctcaatgagttcaacatcgaaaacattgagtcccttgctgatttcatcttcacccactcctatgaagccacgatcgcacgcattcgcgggttaccaaaggggaaatacagtaacgcaatgcgcgtcgacggatacgataaacctgttgacctggttgtcacgctgaccgtcgaagacgataccattaccgctgactttagcggcacatccggacccagcccgctggggattaacgttccgctaatctacacaactgcctatgctgcttacggcattaagtgtgctcttgcaccggagatccctaacaacgcggcctcgttgcgtcccttcctcgtaacagcaccttccgactgtattctgaatgcacagcgccccgccgctgttgcagtccggcatgtgctcggacacttcgtccccgacaccgtgatgggtgcggtacacaaaattgtaccggacatgatcccggcagaaggcgccggagccctctggaacattcacctttcagtgcgcccgacctctcaacgtgagcctgatgataagtcgctgttccgggcagagatgctgatgttcaacagcggtggcagtggcgcacgccctgctctcgacggcctgaatgcaacggcgtttccaagcggtgttcacagtatgtctgtagaggcaactgaacatgtgggcccggttgtcatctggcgtaaggagctgcgaaataactcgggaggtgagggaaaattccgcggtggccttggccagattgtcgaattcgctgctgcgcccgaccatgagttttactttaacgccatgtttgaccgggtacagaatcctgcacgcggacgtgatggtggtgaagatggccaggcaggcaaggtgtatctggatgacggcacagcaatgaagacgaaaggccgccagttcgtgccaaacggagcccgtctcacgattgagttacctggcggtggtggttatggcaacccgcaggatcgtgaagatagtttgcgcgacagcgaccgtttaaaccaatacacgtgctga

SEQ ID NO: 225245 - DNA, 2100 bp, Klebsiella pneumoniae
atgaagagagatttagcgagagtcggggtcgatattggaggcacctttacggatgtcgccctggaatggaagaatcagctatattccaccaaggttctgacaaattatacttcgccagagcaggctatcattgatggcatcggtcaggttattgctaaggccgggatcagccttgcggacatagactcaattattcatggtaccactttagccaccaattcattgattgaacgtcgcggtgctaaaacagcgctcatcacgacaaaagggtttcgcgacgttattgagatgcgaactgaaaatcgctttgaactctatgatctgaatattgttatccctccagctctgattccacgccacgcgcgctttgttgttgaagagcgtgttaacgcagcaggtgaggtcattcttccactgaatgcttctgatgttgagagcgtcgttgatgcaattctggctgaaggctatgaaagtatcgctgtcggctttatgcactcctatctcaatgatgagcatgaacgtgccgtgcgggactatattctctcccgcgcccctcacatgtccgtctccatttccgcagaggtgtccccgcagatccgcgagttccagcggttcaatacggtctgcgccaatgcgtacgtcaagccgcttatgtcttcgtaccttaacagactggctggccgcttgaagtcagaaggtgccacctgccccgttttcatgatccactctggcggtggcattatcactgtagagagtgccgcagaatatcctgttcgcttactggagtcaggaccggccggtggcgcgatttttgccgcgcacattgcggagagatacaacctgaaccgcgtactctcctatgacatgggcggcacgacagccaaaatttgcctcatcgacgatcgcacccccaaaaccgccaagacttttgaagttgcccgcacctaccgattcaagaaagggagcggtatgccaatctcaattccggtgattgagatgatagagatcggcgcaggtggtggttccatcgccgcggtcgacagcatgagtcaaatacgcgtagggccacacagcgcaggttctgaacccggcccggcctgctataaccgtgggggcactctgcctaccattactgatgctgatttaattttgggccgccttgaccctcatggatttgccggcggctctatcgttctgtcagaacaggcgtcacacaacgcaattgaagaacacatttccagcaaactcgctattggcgtagatacatcagccttcggcatctgtgaggttgtcgacgaaagtatgtcgaacgctgcccgtatgcacgcggttgaaaacggcaaagagctcagcgaatacaccatgatcgctttcggtggcgccgcccccctgcatgcatccagattgtgtgaaaagctcggtattcacgacctgattatcccgccgggtgccggagttggttctgccatcggcttcctgcgcgcacctgtagcttttgaatcggtaaaaagcgcctatatcaaaatcagcagctttgacagcagtaaggtgaacaacgtcattgatgagctggtcaaggaggcaagcaaacacgtttatgaagctgccccggatacaccagtatctatggatctcactgcatacatccgttacgtcggccagggctgggagattccggtggagttgcccattaaagattacggccctgaagacggactcactatcaaagctgatttcgagcaggcatacaaaaaattctttggccgcgccattgattatctggatgcggagattatcagctggtccctgcgcgccagttccgaacttcctcagaccagaaaatctgccttcaacccttctgttgttcccatcagaaccgggaaattcagaaagctctttgatgctaatcagggtgagtttgtgcaggcagaagttattgaacgtgctgagtttaaacccggcacctgcctctctggcccagcggttattgttgaaaatgaaacaacgaccattgtggcttcctcttacgacgccatcatgcaggatgacggatgcattctggtccgggcgaaaaacagctataccgggagtgcaaaatga

SEQ ID NO: 225246 - DNA, 780 bp, Klebsiella pneumoniae
atgaataatatccttctgaccggtgcggcaggacttatcggcagcaacttacgtgaacgactggcaaaacgtgcaacgttactccggtcaacggacgtaaatgccatcgaaacgctgtatgaaaatgaagaattcattcaggcggatctcggtgatgccggcacagcggaaaagctggtagacggtattgatgtgattctacattttggtggtctgtcaaaagaaactgatttcgagtcggtgtgccaggttaacattcttggtacacagcgcttatacgaagcggcgcgtaaggcaggcgtcaaacgtattgtctttgcaagctcagtacatgccatcggattctatgatcaaactgacgtgattgacagccaggttcctgtacgccccgactcaaactatggtctgtcgaaaattttcacggagggccttgcacagctttactgggacaaatacggacttgaaactgtcagcgtccggattggttcatgcgagcctaaacccacgacattacggcatttgaagacctggctttctttcgacgatatgtttcagttgatcgaatgttcactggatgcgacccgtgtaaaacatactgttatatacggcatgtcaaataacaaagcatccttctgggataatcgtcatgcagctcaccttggatattcgccgaaagattcagctgatgaccatgcagaagaaataagagaaaacaatattccacccgatatagacgacgtcacctcacaatatcagggtgggatttttgttaagctttga

SEQ ID NO: 225247 - DNA, 1191 bp, Klebsiella pneumoniae
atgactgatgcgatagttacgttacgaaaagaggtggtcgtcattggcctgggagctatgggtgcggcaacgctttatcagatggcaatgcgaggcgcagacgtattgggcattgaccgttatgctcctccccactcaatgggttcaagccatggtgccagtcgcgttacacgcgaggctgtaggagaaggcccggcctacgttccactcgttcgtcgtacacatgttattgctcaacaacttgagaaggaatacggtcagcctattctcgtcaagtcaggtaccctcatcatcggctcaccgatgcagggaaacacaccattgcacggtgctgatgattttcttgcggcaagcattcaaatggcggaaaggtttggtattaaacatgaactgctaaacgctgaagagataaaagcaagatttccacacttccttaaaatcaaagacacagacagagggtatcttgaacccgattcagggtatttgatccccgaaacactgatcgatgttcagttgaaagccgccgaacagcacggtgccgatattctcctgaacacgaccgttgaagcgattacgcaaaagggagacgaagttcatatcacttttggtcaaacactggtcatcgctcagaaagtggttgtctgtgccggcgcatggacacgtaagttgttaggtgcacctctggataaaatacttacggttacgcgtcagaccattcactggtacgacgccgaagattactcacgttatacgccagataagtaccctgcttttatctggtttgtaacggacaaactcgaagactattttaccggcttcccctgcacgaatcctgaggaaggggtaaagatggtagcgagcagggatgcacctgattttgatcatgaaggcatgaatccgaaagccgaaattgcggaatctgaatatttctataatcgccatgtccgaaacagtattttgggcgtgaaagaaacagttaaaaataatgcaacatgcgtttataccaatacgccagataacggatttattattgataccctgcctgacatgaataatgttgtcgttgtttccgcctgttctggccatggtttcaaacattcagcaggtattggtgaagctgtagcccaatggatctgtgaaggtcaaagtcacactgacctttcagcattcagcctgaaacgttttttataa

SEQ ID NO: 225248 - DNA, 723 bp, Klebsiella pneumoniae
ttgagccagtcaaaaccagacacactgaaagttcgaactgaagctgcgctgcggcagcgcattgaagaaggcgcgtttagtgcaggggagaagctccctaccgagaaacaactggctgttgagtttggtgtcagcaggactgtgatacgagaggcgatcattggactgagggcagaggggctgttacgtgcaaagcacggcgtaggctatttcgttgaggaactgaaacctgtaaatcaggcagttccgacacatttttttgctgacgcgacgcgactggatgcactggagttcaggatggccgttgaaatctacgctgcaggcctggcagcgtctcggaaatcctgggcacaggaagcgaaaatctgggaagcagctaaagagttcgaacgggttctctctgcaggagaagcaacagagcagtcagactggacttttcatcgatcgatctccgaagcaacgaataacaaggcattcacggccttctttgactacttaggagtatcagttttgccgcgccgttcactgccaaagcagtcaggagaacagcacattacccgtgaataccttcagagatcgattgctgagcataaagagatttgcgaggcgattagcagtggtgatgttgaaagggcgaaagaagctatgcagaaccatctgggcaaaagccatatgaaatacagcgccctgacggattcatcagaatctcagagcgccagctga

SEQ ID NO: 225249 - DNA, 954 bp, Klebsiella pneumoniae
atgaccagctttacatctgttgtgaatcagttgttggtttccgtacccgtttttggtctcatcgttgttggatttacactaagaaaacttaacgtattccctgaagagtatattaagccactgactggtttcgtttttagccttgcattgccagcattaatgttccggatgatgtactcgaattccgggcaaaatgttgaatatgggatacttgcagccttttttggaagttgctttattgtctttatcgtcggtaagtggatatcgtcaggaatctacgggcacgacacagtttcaagctcagtctttgcccttggcggcattttttccaacaacgccattctgggtattccaatagccaaatcactcctgggcgaagccgcgctaccttacgtagcgacgattctggtttttaacgggttaattctgtggagccttatcattgtttcaattgaatggggaacccacggtgcagtgtcttctaaagcactgagcaaagtcataaagagtgtggccagaaatccactcatcattgcgatcttttcaggctatgctctgtctaccgcccacgtccgtgttcctgacattattgatggccccgtccagttgatagggtctgcctgtgtgccggtgtcgctgatagcgcttgggatcaaccttgcctcctatcgcctggctgacgggctgaaagaaagctcactgatttgcttcttaaaactcatcattcaaccaatggttatatggggattagccattggtattgggctgccagcactcgagactaaggttgcagtgctgatgggttcattagcgattggcgtaaacgtctatcttatgtcagagcagttcaacgttcttaaggctgcaacagcatctggcatgctggtttcaaccgtagcctctgcctttacgacccctgtactcttagtcatccttgatgcgtattacagatag

SEQ ID NO: 225250 - DNA, 573 bp, Klebsiella pneumoniae
atgaaagtcactaaaattcacctttctttactcgaccttgcgcctgtttcagaaggccatagcctggcagaggctattcataactgcgttcgccttgtaaaggcggctgagattgccggttatcaccgtttccggatggcggaacaccacaatatgattgatatcgccagtgccgcaacaacggtcatcctgagcctctcaggttctcagactgagataatccatattgggtctggcgggattatgctgctaaaccatgctccgataattgttgccgagcagtttggtacgctcgaaacgctttatccgaggcgtgttgatctcggcatgggtcgtgccccagtaatggatcaggaaacgcttcaggctcttagccgtgatagtcgggtgagagttcaggaattcccggaaatgttgaatgagttacagcatttcctggctgaatcacatcatggccatcgcgtgaagcctgtgcccggagccggactacaagttcctgtctggctgctggggttaagcacattcagcgcgcagctggccgctaaaaaaagtttacccttggtgttcgcctaa

SEQ ID NO: 225251 - DNA, 558 bp, Klebsiella pneumoniae
atgaatgggcgtaaaattattgcgtttttatgcgtcatatgtacctcgggttgttattacactacgtcaccagtacctaagataaacaaagagttcttaaacaactacccttctttaatagatgcttatggcacagtcgaggataaagagttcactgcagcttggaaggacttcctcgaagccagtgccagatgtagagtgattcacaataattatgaaataaaagctaataacgcagagcaaaccaagctattacttggaacaactggcggtgttgctggtataactggttcgacactcatggctgctggctcaagcactgttgtcggtgggattgctgcagggatggctggtgtgattagtatgattttgggaaactctgagaaaggtccattaagtacaagctattttgttaagcaaaaggaaagtatagctcatcaaattcaacaggctgcagatgatgctaaaagtgcgaaagaaccgaaagatgtatatatgatcgcttctaatttatctgcatcttgtttggctgcagagagcttagatggcgaaaagtga

SEQ ID NO: 225252 - DNA, 1050 bp, Klebsiella pneumoniae
atgaaaagcactgtgaaaatatccagtattgagttagtcaatgctgactgcctgcaatatcttccatcgctacctgataactctatcgacctgatcgttacggacccgccttactttaaggtaaaaccgaacggctgggataatcagcggaaaggggacgaggattacttacgttggctggatagatgtttgtccgagttctggcgggtattaaaaccctccggcagtatgtacctgttctgcgggcaccgtttagcctccgatattgaaatactggttagagagcgttttaacctgctcaaccatatcatctgggccaaaccatcaggccgctggaacggatgcaataaagaaagtctgcgttcatatttcccggctactgagcggatcatttttgctgatcattatcagggcccttacaggccgaaagatgatggtttcgctgtcaaatgcagcgagcttaagcagcatgtcatgactccattaatttcatatttccgtgatgccagagagtctctgggggtaacctctgctcaaattgctgctgcaacgggaaagaaaaatatggtttcccactggtttggtcttagccagtggcagttgccgagcgaaaccgactatttgaagctccaggcattgttccagcaaattgccggtgacaagcatgctcgcaatgagctggagaggcctcaccaccagctggtggcatcatggcaatcacttaaccggaaatacgcagagctccagcaggagtatcagcgtctacgtagacctttcagcgtttctgtcacggtgccatataccgatgtctggacccataagccggttcagttctacccggggaagcacccatgcgaaaagcccgccgatatgttgcagcagatcatcaaagcaagcggcagacctagtgaggtagtcgcggatttctttgctggttctggttccacactaaagcaagctgctctgctcgggcggagaggaatcggtgttgaactggaaaccgagcggtttgaacaaacagttagtgaaattcgaaatttaatgttctaa

SEQ ID NO: 225253 - DNA, 849 bp, Klebsiella pneumoniae
atggcttggttaggcgttccatttaagcttttggaaggcgttgatgattcaatcagcctttcggtccgtgcattacctaatattgttttgaaaagtagtgattcagactatacatctctatggattactgctcttgtttctataattgcgggtcttattcctgcagggatagcatattatacgtttgttcaaaactctaaaaatattaaagtggagaggttggatcaacaggatttcctcaagaaagagcgaggtgagcagcaaaggtttcttcgtgaggaacgagccactcagattattaattcagagaaggataggaagtcacaggctgaaatagcaaagataaactttaatatgcaagttctttctgttaatcgtcaggtttggattaataatatcagagatttgatatcggagtatatttccattgctccagaaatatatgctgcgcagcacgacttcatgaataagcaagttttttataatgatgttgctaataaaaggcttgaggttataaatagtgggcatgattctaaatctctaactgacgcatataatagcgcggccttggatgttgaaaatgcaatgctcaaagttcgagagtatagggtgaaagagaaatatcttagttcaaagataaagctgatgttaaacccaaaagaggaatggtattctaaagttgttagtgtattggttgaaataaacaagataattaactcgttgaatacttcaaatctatctccaaatgcaagcgttcaacaacatttttataataaacttgacaaccttatgatttgcactcaggatttgttgaaatatgagtgggaaagagttaagaaaggtcagtga

SEQ ID NO: 225254 - DNA, 444 bp, Klebsiella pneumoniae
atgtccgatcctgtctctgggactacgattgcggctggtggactgatgggggccagtatgtttggcctggctaccgggattgattatggcgttgtgtttggtgcgttcgccggtgcagttttctacgtggccacagcagcgaatatttcacgcggaaagctggtggcttacttcatgacgtcattcattgttggagtcctcggcgccggactggtgggctcaaagctctcaagctggaccggctacagcgatcgcccgcttgacgcactgggcgccgtattgctttcggcgatgatcatcaaagtactgacgttccttaacagccaggacctgaatagcttgttcaatatgcttatctggggtcgccggtgcaattgtcactctgaaagcgccagtgaattatcaggtatccatcgagggcggtttccagaacaacgagaataa

SEQ ID NO: 225255 - DNA, 1407 bp, Klebsiella pneumoniae
gtgaattatcaggtatccatcgagggcggtttccagaacaacgagaataagcgggtccgccatgtcgagtatgaaatccagtatcgcgtttatggttccggatcagggtggacgagtaagccaggggtttacgcgcttaaaaacattaatggcctcggttttacagagcgttttgaactgtcctctcctgggctggtggaggttcgatgccgccgccgtaacgagcaggagaacaataacgcgagagacagcatgttctggcaggcgctcagaggtcgtttgctttcccgtccgacctcctacgcagggatatcaacaatagggatcacggtagaaaccggcggccagctggcggcgcagtcagacaagcgtgtgagtgttgtcgccacgcggaattatgatggcggtggtgacaggacaatcagcggtgcgttcctgcatcttgcccgcagtctgggatatcgcgacgaacagatcgacattgcggcgctcagtacgctggaggccacctactggacgccaaggggagaatattttgatcaccaggcaagcagtgacagcacgtcagcaaaggatattttcgacaaaatagccgaggctggcatggggtattttctgctatctgacgggttgctttctgtcgggagagagggagtcaaaagctggacagggatcattacacctcaggataccgtcgaggaaatgcagacgtcattcagggtcccgtcggaggatgattttgatggcgtggatgtgaaatatatcaaccctgtgacctgggcggaggaaaccgtacagtgccggacgccggaaaatccttttccgcgcaaaacggaggcatacaccattgatgttgccatgactgcagatcgcgcctggcgtatcgggatgcgtcggttaatgaaatatctccatcaacgccgaacgtatactgctacggcttcgatgctgggatggtgtcatgacttcggtgatcacatcattttgtccgacgacattcgaaccgggaaaacccaaagttgcctgattgacgcgatgatttacgacttccaggaaatcacgctgcacgtcacggagccactggactggagctacgtgaatcctcgctgctggatacagtttcaggacggtcgaccatcatcgcgaatgctcacgccgcaacgggtagatgatttcacgctgacggtgccgtacaacgacgacctgcatcccggcgactggattatggacgacccagatattgatctgccgaagttattgttctgcgacagtgaaaagggtgcgcggcatgggatagtccaggaggttgccccatcaggtgacagcaactgtcagattactgcacctgaatataaagaaattttctaccagtacgacgacgccacatactccggcgacgtcgcttaa

SEQ ID NO: 225256 - DNA, 678 bp, Klebsiella pneumoniae
atggggattaaaacggtgcttcaactagcggataccgatatccgttttatccggaagcattttaatgtggttctggagcgaacagtgcgggagctgcgcggcgagccatgccttgggcttgaggcgttcgcgccggtaaagcaggaaatcgtgtgcagccgttcgttcggcgaccgtatcactgaataccatgagatgaggcaggcgatatgcagctacgcctcacgtgcagctgagaaactccgtggtgagcaccagtattgcagatttatctccgcatttgtcaaaaccagcccctttgcgctgaacgaaccgtattacgggaacaatgcatcagtaaagctgcttacaccgacccaggatagccgggacatcatcaccgcggcgacgaaatgcctcgatgcaatctggcgagacgggcatcgctaccagaaagcaggcgtgatgcttggcgatttctacagtcagggcgtagcgcaactgcatctgttcgatgataacgcaccacggaagaacagtgaaaagctcatggaagtactcgatcatctcaatgcgaaggatggcagggggacgctctattttgcagggcagaggatccagaccgcttggcagatgaaacgagaaatgctatctccgcgctatacttcgaggttctgtgacctgctcaaagtcaggtga

SEQ ID NO: 225257 - DNA, 1221 bp, Klebsiella pneumoniae
atgggtagaccgtacgtaactttgtttggtgaaattatggacaaattcaaaccatacagtaaatcaaaagcccctatttctacgcttcacaaactagctcaaactttatccatctcaattgatgagttaaatgaaattgcagcactatcagaagatgaaaaatactcaagaaaagaacttccaaaagcagatggaagtaaaagagtagtctactcacttcatccgaagatgagattgttacaatctagaattaacaagagaatttttaaggaattagtgatttttcctccgtttctctttggttctgtaccgggtaaaaatgatggtgtaaattccaatatcaaacgcgattatatatcctgtgcaaaagctcattgtggagcgagaacagttctaaaagtagatataagtaatttctttgataatatccataaggatttagttcgtgatgtctttaatgatgtgttgaatattcgaggcgaagctttggaatatgtcacaaatttatgttgtaagggtgactttgtcgttcagggagcactgacatcaagttatatagcaactctatgtctttacgaacaagaagggtgtgtgtaccaaagagccctaagaaaaaatcttgtatacacccgtttagttgatgatattacggtatcatcaaaaatcaatggatatgatttttcgcaaatattaagtcatattgaaaatatgctttcaaaccatgatttacctgtaaataagcgtaagaccaaggtatttcactgttcatcagaaccgctaaaaatacatgggttacgagtggattacaattctccacgactacctggtgatgaagtgaaacgtattagagcatctctacataatctcaagaaacttgctgttaaaaataacaccaaaacaagcatggcatacagaaaagaatttaacagatgtatggggcgtataaacaagctagggcgtgttggtcatgataagtatgatttatttaaagagcagttattggcaataaaaccattgccatcgctaagagatattaagattgttgagtctgctgtaacaagtctcgaaagttcatgtttaataggtaatggcaacaaacattggtataagagaaaatataatcttacattatataaattaatcatcctgactcgttcaaaagcatttgatggggtagtcaatgcgtttaaagaacgattgaaaaaggtaagaccagcgtga

SEQ ID NO: 225258 - DNA, 942 bp, Klebsiella pneumoniae; identical to SEQ ID NO: 136204

SEQ ID NO: 225259 - DNA, 1224 bp, Klebsiella pneumoniae
atgaccctgctctccactggcaccgattatgacgcgctggcggccgccttccgcccgatattcacccgtatcgcccagggcgctgcggagcgcgaacagcagcgcattctgcccgatgagccgatccgctggctgaaagaagcgggcttcggcacgctgcgtatcccgcgcgagaagggcggctggggcgcttcgctgccgcagctcagcgcgctgctgatcgagctggcgcaagcggactctaacctgccgcaggccctgcgcgcgcactttgcctttgtggaagatcagctgaatcagccggattccgccgggcgcgaccgctggtttcatcgcttcctcgacggtgagctggtaggcagcggctggacggagatcggcgcggttaagctgggagaggtgaacaccagagtgacgccgacagagggcggctggcgactcgacggcgagaagttttacagcaccggcgcgctgtacgccgactggatcgatgtgtttgcccggcgcagtgataccgccagcgatgtgatagctctggtcagcacccagcagtccggcgtggtgcgggaagatgactgggatggctttggccagcggttgaccggcagcgggaccacccgctttaccggcgctcgggtggaaaccgaacatgtctatgattttgcccagcgctttcgctatcagaccgccttctaccagcatgtgctgctggcgaccctcgcgggcattggcctggcggttgagcgggatgccgcgcagggcgtcaaacatcgctcccggatgtacagccacggcaacgccgccgtgccgcgcgatgacgcccaggttctgcaggtcgttgggcagatcagcagctgggcatgggcgacccgggccgcggtcctgcaggccgcggaatcgctgcagcaggcctatgtggcgcacgtcagcgacgacgaagcattgattgcccggcgtaaccagctggcggaagtggaagcggcgcaggcgcaggtgatcgccagcgactggatcccgcgggcggcgacggagctgtttaatgccctcggggcgtcggatacgcgaactcgccttgcgctggatcgccactggcgcaatgcgcggacggttgcctcgcataatccggtgatttataaggcacgtaatatcggtaactggctggtgaacggtgaagcgcccacctttatctggcagataggcaatggtgagaaaacggcggggtaa

SEQ ID NO: 225260 - DNA, 879 bp, Klebsiella pneumoniae; identical to SEQ ID NO: 212091

SEQ ID NO: 225261 - DNA, 699 bp, Klebsiella pneumoniae
atgaaaccgacagtcatcagtcaggataccccctggggcgaaatcccttcgctgctgctccccgcctatggcgaaacctggctgatggtggccattgtgatgctgtttgtcgtcacgctgggagggctggtgggggtggtgttgtttaatgcctcgccgcggggcttgtttccgcacgcactgctgtatcggctgctgaactgggtggtcaatatgggacgttcgctgccgtttctggtgctgatggccgccattatcccgttcacttactggctgaccggcaccacgattggcatccccgccgcggtagtgccgatgatcgccgccggcgtcccgttctttggccgtctggtggagaacgcgctgcgcgagttgccggcagaggtcaccgcggtgggggtcgtctgcggcgggtcgcgctggcaaatcattgccagcgcgcagctcagtgaagccatgcccgcgctggtagcggcggtgacgctaaacctggtctcgatgatcgagtattcggctatcgccgggaccatcggcgccggcggcatcggctacctggccgtggtgtacggctatcagcgcttcgacaaccacatcatgatcgcgacgatcgttgccctgatcgccacgatccagttgattcaatttttgggtgaccgtctggtcaaccgtttacgccacacgcaggggaaccttgtatga

SEQ ID NO: 225262 - DNA, 342 bp, Klebsiella pneumoniae
atgaatactttacctgcaataaaccagtgggctgttcagttatgcccattgcccgtaactatctggcaaacgttgctaactcgtttactggaacaacactacgggctggcgctgaacgacacaccgttcggtgatgaaagcgtcattcaggaacatatcgatgccggtattacactcgttgatactgttaacttcttggtggaaaagtacgagctggttcgtatcgaccgcagggcgtttggctggttggaaccatctccatacttgcgagctgtagacattctgcgaatgcgtcgggacatggggctgttgcgaggctgcaaccacactgcagcaatgtga

SEQ ID NO: 225263 - DNA, 351 bp, Klebsiella pneumoniae
atgtcgagtaagacactgacagtgaatgatgataccgctgagccctggtgggggctgaatcgtaatgtcattccttgttttggtgcacgtctggtccaggaaggtaaccgcctacattacctgtctgaccgcgccagcataacaggtcagttcaataaagcggatttgctccatcttgaccaggcatttcctgttctgctgaagcaggcggagctcatgcttactagcggcaaactgaatccccgacaccagcatagcgtcaccctctatgcaaaggggttgacctgcgaagctgatacgctgggttcctgtggtcacgtctatatctccatttatcctactcaacgctaa

SEQ ID NO: 225264 - DNA, 222 bp, Klebsiella pneumoniae; identical to SEQ ID NO: 94026

SEQ ID NO: 225265 - DNA, 474 bp, Klebsiella pneumoniae
atgtccgaactgattttaccttcggtcttcccgatgaatgaacaacgtaccatccgtcgtgccctgcgattactggagaaatatcagcggcagccaagtgagtcgttcctagccgctagtttcgcgaaaaaatggttacagctctatttggcaaagcaggagcgcgaagtctttgttgttatctatctcgataatcaacatcgtctgctggagcatgaaacgctcttcctcggcacgattaaccataccgaaattcatcctcgcgaaattgtgaaatctgcactacgtcataatgcagctgcggtaatcatctctcataaccacccctctggcattaccgatgccagtaaagctgacagagctattacgtccaggattagagaggcgctgggtctggtcgatgtccggctactggatcatttcatcattggtgatggtgaagcgttgtcgtttgctgagcatggatggctataa

SEQ ID NO: 225266 - DNA, 1098 bp, Klebsiella pneumoniae
gtgagcgatagcgataatgagaattattatctaaaaaggattggtaaactgggcgctgaagaattagcaaggccagaagaatctccttatgagggcgggaaccgctttaccagtcctgagagcaaatttagtgtcgattctttgccagaagacgagtctgcgcaggcagccgaggattgtgatattgaagacaggacaggagaaacggcctcaggcaatccgatatctgaaagcagcaaaaacgccactggggctgatgatgctattaagcgtttgatgcaaaatatacaggctggggaaaaacgcaatgttaaaagtaaaagtcttcatggtggagattcttcatgtctacaagacgtcgatttaaagtggttgaagggggcggttaattcacgtgctattttttggttttgggcgtatatacgaaaagcctctgcgcgggagctttgtttacctgaaaacactgcggggttaattccggaatgggatcgaaaagaggaaaacttatactcttttttcagactccctggtaatccaactagttcagctgaaagaagccgggtgattattaccttcatgaatgaactttcttgttccctcagtccagaacaaagtaagaaaacattcgattatattcgtggtgtctggcttgtttttaatagccaggttcaaagccccaaatggttaaagaaaaatgataatgaaggcattgagtgggcgtggtcatatttgtcaaagaaaaaggatataaaaggaaatgttctgtcatggttcaaaccagcagatcttaatgagcgatatattggtgtaatgggcgcgattgattgctgggccataccgaataaattggatgtgggaaattatagaaaatttctggatgacaaagatgcactcctgaaaaaaatgagtgattcttttaagcaacgaaaaagaaggtctggaaaaaatgatttgacaatctctgccaaagccagcaaggaattatctgcgttagcagtggcacttgataaaaaagagattaaagttattgaaaaacttattcatgatgagtatctaagatataaaagcaagctttttgattacaaaaatccatcctaa

SEQ ID NO: 225267 - DNA, 222 bp, Klebsiella pneumoniae
atgaaacaacaacctgctaaatgcgcggtcgatgaatgggggaatctggtcaatgcagaagattttcgctctccctcattctggaaactgtactgcttccactgcaagagtccggtagtactggttcttgccccgaacgggcaggcatcgcattttctgcatgatgaaacctttatggcatcagcagatttcattgcatgcccgaacgtggaatgttcctaa

SEQ ID NO: 225268 - DNA, 573 bp, Klebsiella pneumoniae; identical to SEQ ID NO: 203832

SEQ ID NO: 225269 - DNA, 903 bp, Klebsiella pneumoniae
atgcacgatcttgtcaaggaatttataaggaaaagagccatttcagaggatatcgagttaaatgaacctttacatgatgggttatactatctcgaaaaactgaatgaaatcattgagtattgttgtagagacaacgaagctaaacttgtggaagaagtttattggtcatcaatgcatgatatgtacagaaggaattatgagtattgttgtggagtgttcggtgtctttttaattggtcagattccttcatgtgaagccttgtgcagaacagcaattgagggcagtgttaatttacactatataagtcttggtgattcaatggccaagcaaatatcatatttcaaaaatcacttagaaactgagcgcaaacaaaatcaaaattggaagcgtagtatagaagactcttcatattctgatgaagctaaagctgatcacttgcagagaattgctgataaagatcggattctagatgagtatgaatatgcactaaaaacatcacttgcgttaaacaatattgatttcgatgaggttgatctaaaatggccaagtatctttgatcgtttcaaagaaatagggcaagaagtagagtatagaaccatttatgctgccttatgttctcaggcacataatgatgcagaagactctctaaatagaataatgtccagaattacagcaaatgtaaatgggatggaagaagctcaatggattgaacaatacaacttttctctatatatggctcttactgctttagattatcacgcttttgcctctgcaatgtaccttgcgaagtttggaattgacgtaagagaaataatagagttaaagcataatatcattcagttaattctttatataattgaaaatggtcctcatctgatctctgagaaaataaaattaaagtga

SEQ ID NO: 225270 - DNA, 2991 bp, Klebsiella pneumoniae
atggcatcattgatagcacagaatgaagtcgctgctatttactatgctgtattcggtaaaagcatttccttgacctctatagattcttatgcggcaaattttgaaaaaggtgttacgacagaatcagggttgatttcatctttttttcagtccagtaatggcgtgcaattgtataatggtttgactgatagtgaaatttttcaaatcatctatcaaagagttaatggtacactcccaacaaacacccaaataaatgaatatttaggcaatggtaatagcttgtcagtagctgtagcctcagttattaatgatctcttaaattatagtggcactgacagtactattctgacaaaacaggctaattttgaaagtgcagtccatactttgctttacccggcagctactagttcagctttgggtcaaggcggcgctgattttcaggctataattcatgtgttaggcgccacattaaatgcagatgcgttaaattattatggtgcaaaattaaatcaaggtgcaactatagagcaaattgcacaattaaatataaatgggcgaagtggtattgcatcactttctgatgataatttcattaaatttttatttagtaatgcttatgaaagagcaccatcatcaactgaactgtctttttatcaaaaccttctgcaatcaggagcatccagaggcgaaatagttaaggatataatcaacgctttaaaaggcacagtcgatgccggtgatttaattgctcagactcattttaataatgctacggttgtatatgctgcaggagaactccctagtttacagtatcgtgagcaggctgcggcgatctatctaggcgtgcctgaacgtggcattgatgcttcaggattagatacttggagcaaggcattgtcaacaggccaatcctatcagtccattattagcaaattgatttcctcggcagagtttcagcgtaaaggtgcgcaacttacaggagaggacttcatacagcatgtatacactgccgtacatggagtggcggccactcaagcgatcttgaatcagtattcagcattagggagtgataaatcaataatcactgcaagcataattaatgatttgcgttcttccactgcgacagattcaacaactgtgacccaacagcattcttttgaaaatgatattgggaccagcttgctttacaaaaccagtgctatccttaccgctacagtaggcggcggcaatgcaaccggaacagtaaacaccaatacgaaccatcaaataagtaacgctgaaaccgcagttcttactaaggtacagcttaatgctaacgcagcaacaaccgtcaatttaaaatttgccgaccatctggctaatctggagattggtggggggagcgccgctactgtaaacctgtctgacaacggtgtgaaccctggggttaatattaccgttgataatggtagtatcactttaaatgctagttccggtgcagataaggtgttgttaactacagatgctgttgtagcctcagctacaggtaagtttaacctagggacgggcaatgactctctgaaatggttaggtaacggtacgggtacaagtgcgaatactgtgagtacttctttaactgctaatggtggtgatggtgtcgatactatttctgctaacctactcaccaaaaatattgcggtaacgggcacaggaataaaccgttcagtaactattagcactaactcttcgcagttcactagttttgagaaagttgatctagcgggttatattggcaaggccagtcttagtggtactacaactggtgcaactgctcctgcaaatcacacttttgactttggtattctgacagggaatgcttcaaacgagtctgggctctcacctggtctgctgggttcccttacgcaagcggccacatcaacaatcggttctcaggggtttgtgctgtctggtcttgctgaccaggtgcatgttattaacgccgctggaggaaattctgcacagttggaagttacgggtgatgcaactgctgctagtagcgtggatatcactttcctgcaaaacgcaactaatcattttgatgtcaacttcactgcaaccagtgattctgatatcaatgcggggtcactatcattgatcagcagtagtagtttgcttggtgggacagcactatctacagtgaacattggctctggtggtagcggggattttgaaaatacgttgactcttgccggaacaaacgcgcaggttcagaccatcaatgtcactggtgaccatgccttaaatctgaccgttggttctggttataacaacgttcatgatatcattgcttcgtcgaataccggggggctggatcttaatgccaatgtaggtggtacaggagatggtataattacccaacttcttaaaattctcccgctaagtgcggtaactgttcctgttgtcgatactttattaggcctgttaggtcttaatagtggttaccacatgagtgttcaaggaacatctacgaatgatagttttaatgtgctgggtaataccgtgatatcgggtggtgacggagagaaccagtaccaacttaaatccagtactattaactcaggtgttacgatttctgatttcagtagtctgaaagatactatctttgactccacttcaggcctgacccttagcgatgatacttcaggtacggcagttgcggattacgggactcgttctactgatgttgttgatgcgcttcttggcacattggtcggagggattacgggaggggttgttgcgttactggggcagatccttggagtcggttccgatggttcactgactgataaagtcggggttgcatcagttgtatggtccggacagtctaatactgctagctcctacgtgattattgacaacaacgatgaccataacctagatgcttctgatacagttatttacctgtctggtcaaagtcaccaacagctggttgatactcttcactatgcataa

SEQ ID NO: 225271 - DNA, 1608 bp, Klebsiella pneumoniae
  misc_feature (133)..(142): n is a, c, g, or t
atgctccagatctatgaccgggtactaccgtcaggtaacgaaattacgcttttaatgctgactctgatcatgcttggcatgtttgggatgatggcgttgttagagtatgcgcgaagcatggtagttattcgtnnnnnnnnnntgcgtttgaatttgcgtgtttacaccgctgcgtacgaagagaacctgaaggataaatcagctgatgccgggaacatgttgaatgatttgaccaacttgcgccagtttttgacggggaatgcgctgttcgctttttttgatgccccatggtttcccatctatcttctggtaatttttcttttcaatccttggctaggcctgtttgctttcatcggttcgttgctattggttgctttggctatcataaatgaaatggtctcaaataaaccattgtccgaggccagcaagctggcattgcagtcaagaagtttggctagcacaaatttacgtaatgccgaagtgattgaggctcttgggatgttacctaacataaagtatcgctggtacgaattacatcagcgatttcttgataaccagcgcattgccagtgaaagagcaagcagcgtaacgtctataactaaatttgttcgcctgtcattgcaatcgcttgttctggggctgggaggatggttagcgattgatggtcatattactcctggaatgatgattgccggctccattcttatgggtagaacactcgcacctattgagcaggtgattaacgtgtggaaaagttggagttcagcaaagctatcctataaacgccttgttaaattacttgatcagaacccaccgcgcggtacaaacatgtctctacccgctcccgaggggactctctctgtcgaaaatgtttccgcaacacctcctggctcagagagtggagccgtgttgcataatgtttcgttttcaatccagcctggcgatatccttgggattattggtccaagcgcctctggtaaatcgacgcttgcacgtttaatggtggggatctggcctgtcagtgaaggaattgtgcgtcttgataacgcggatatttatcagtggaacaaagacgaacttggcccctatatcggttatttacctcaggatattgaattatttgctggcacgattgctgagaatatcgctcgattcaacgaggttgatgcagaaaaagtgattgatgcagcaaggcttgctggcgtacatgaacttatattacgtttcccgcatggatatgacactgtgatcggtaacggtggggccgggttgtctggcggtcaaaaacagcgtattggtcttgctcgtgcattgtatggcgacccatcgttaattgttcttgatgaacccaactctaatcttgatgatgccggagagttagccttgaaccaagcgattgccttgctaaggcaacgtaagaaaacggtggttctcattactcatcgtaccaatctgctctcgatgaccagcaaattactgttattggttagcggtaaggtgaacgcgtttgggctaactaatcaggtactgcaggctctgtcaaatgcgcaaaaggctcaggccgcacagcaacaggctactcatgcggtaaatagtgatatacattaa

SEQ ID NO: 225272 - DNA, 1332 bp, Klebsiella pneumoniae
atgtctgtacaggtcaatatgtcgaaggaaaaaaatactgcacaatcatcaacggatgaacgcaagtttactcgtctggggtggctggttattggcattggtttggcgggattttttatgtgggcgagtctggctccactggataaaggtgtggcgtcccccggttctgtcacagtctcaggaaaccgtaaaactattcaatcgccagcggggggggtaattaaaaaaatagatgtaaaagaaggagacaaagttaaggctggtgaagtattggtgcaaatgagtcaggtccaagcgcaggcccaagtcgactccttaaaagaccaatattacaccactctggcaactgaagggcgtttactggcggaacgggataatctgagtaagattcacttttcatccgtttttgatactatcaaagataatccgcgggtcgcggaaattattgctttgcaggtacaacttttttcttctcgccaacaagccctgcgcagcgaaattgatggctttaaacaatcgatagatggcattcgttatcaattaaaagggttgcaagactcccgcgctaacaaacaaattcagttgagcagtatccgtgaacaaatgagtagcatgaagcaactggctgctgaaggatatttaccaagaaaccgctatcttgaggcgcaacgtcagtttgcagaaatcagtagtagcattgacgaaacgatagggcgtattggtcaactccagaagcaactcctcgagtcgcagcaacgtattgcacaacgctatgctgattatcaacgcgaagttagaacccaacttgcacaaactcaaatggatgctaatgatttcaagaataagcttgaaatggcaaattatgacctcggcaatacctccatcgtttccccagttgacggtactgttgttgggttgagcatttttacccaaggtggggtggtaggagcgggggaccacctgatggatattgtgccaagtgaagcttctcttgtcgttgactcccggctcaaagttgaaatgattgacagagtctataacggtctacctgttgagttaatgtttactgcatttaatcagaacaaaaccccaaaaatacctggaacagttacattgatttctgccgaccgtttagttgataaggggaccggggaaccgtattaccagatgcaggtgacggtgacacctgaagggctcaaaatgctgcaaggtgcggatataaaaccaggtatgccagtagaagtatttgtcaaaacagggtcgcgttcattactgagttatttgttcaagcccattttagatcgcgctcatacatcattgactgaggaataa

SEQ ID NO: 225273 - DNA, 1383 bp, Klebsiella pneumoniae
ttgaaccaggttaaacggcagatttatgttctggccataagttcattgatttttatgtactctgcgccagcccattcgttagggatcctggatgcctactccctggctctggagaaagatccaacatttcaagctgcaattaaagaaaaagaggcggggaatgaaacagagaacatcggtagagccggtcttttaccgaaagtctctttgaattaccaaaatgcccctcgtaactggcaaacacaaaaataccaagcgagtgatatttttggcaacgtcagtgatgtgactaaacgacagcaatatcggagttatgctgggtcggtaacattgacgcaacctctttttgattatgaggcatatgcaaaatacaaatcaggtgtggcacaatcacagatggcggatgaaaagtaccgtggaaaatattttgatctagctgtgcgtgtgattacggcctatgtcggagtggcctacgccaaggaccaaatcgctttagccgaggcgcaaagggatgcttataaagagcagttagcacttaatgatcgattagtcagtgcgggtgagggaactgtcactgatgttgctgagacccaggctcgttatagcctggcagaggcacagcttattgaagctcgggatgcattagattcagcacagcgtgatcttgaagttatcatcggtattccgcttgagcaattgggcgatctgcagaccttgcgcgaaagcaaatttcaggtgataccattacaacctgctaaatttgaggagtggcagcaaattgccatgaagaataatccgctgcttatgtcatcccggcatggggttgatgcggccaaatatgaggttgaaagaaaccgtgcaggttttatgccacaggttcagctctatgcctcgcattcagaaaatgattctagcagtgacaatacggtaaaccaaaaataccgaacggatagtataggtgtacaagtgactatgcctatttattcagggggaggtgttgctgcatctacccgtcaggcggcggcgagatatggccaggctaaatatgaactggatgctcaagtgggtagtgttattaatgacttacgtaagcagttcaatttatgtatcagtagccaggcaaaacttctcgcttatgaatttgcagttaaatccgccacaacacaggttgaggcaacgcgtaaaagtgttcttgcgggccagcgagtaaacgttgatgttctgaacgccgaacagcaactttatagcgcgcggcgggatcttgctgaagcgaaatacacttacattaagtcctggatttcactgcttagtgactccggaactttgagcgaaaaggatattttgcaggtggctggttatttttcttcacagcgcgtaaattag

SEQ ID NO: 225274 - DNA, 330 bp, Klebsiella pneumoniae
atgacgtttcataacgttaaaaccattgagcgctatttcagcgcagtgctacatactccacccgtctggccggttaagccgctgggcattattgcagactggagaaacgacctcgtgcaccgtaacggggtggatgaacatgatgtgccaagagatatatcagcgcagcagctacagaatgctcttctgagagtgtctaaccttatagaggcagcacacagatccctgtcccaggaggtggactatttcggaaactggcgtagtgaggaaaaccgggaaattattgcttcggcgctgaacatatcaacagacagcgatgtatctcaatga

SEQ ID NO: 225275 - DNA, 330 bp, Klebsiella pneumoniae; identical to SEQ ID NO: 200279

SEQ ID NO: 225276 - DNA, 234 bp, Klebsiella pneumoniae
atgccagaattaaacaaagaaatttataacgaacttgcagaatcaatcacatcacacatgatgactgaacatgactttcaccttggccagtttgaatctgaagccctgcttgatgaattactcaagaaattaataccgtcaatttataatatggctattgacgacgcaatgctgtcactacggggcgcagctgaaaaaattgaagaggaattagatttaaggaaaataatatga

SEQ ID NO: 225277 - DNA, 363 bp, Klebsiella pneumoniae
atgagcttcaagactgatttaaatttgatgcgtaaggaatggcataacgcattttataccgggaacatcgaacaactggactatcttgagactgaatggtttatatcaaccaatggccagaaagtgatttataagaaacaccagttacgtaaggtaagcatgcgccctgcggaacaaaaattattatcgttaacgagaagggagtatgatgttgaaattcgggagttcaaaggtattgcatgtgtatctggtaaagcagcattagagaacgacgatgagacagtacacatcggatttgttgaaaactggattatggtcaacggcggctggaaactacaattcgttacgttcgaagaactataa

SEQ ID NO: 225278 - DNA, 897 bp, Klebsiella pneumoniae
gtgaataattttatcagccacgatattatggaaaaatttcggcgcgaacactttcaaaaatcgccttttgtactgaccggtgttgacgccagtaagctggtgagctggccggcactaaacaaaacactggagaaagacattcttcattaccccagagtaagacttgccaatgataactggcctgaaatgaggggctatggcgggtttgtcagatattcctacagccagtccggagacaggacgccccacataaacagacatcagttatataagtgcttaagcgaaggagcaacacttgttcttgatcgctgccaggcgttttttgactcagtggataacatgaggcaatggttgtcctctcagctcgagtgttcatgtagcgccaacttgtatgcagcctttacgccgacacccagttttggcctccattttgataaccatgatgttcttgccgtacagattgaaggtagtaaaagatggaccgtacataagccgacatattcatatcctctggagcatgaacgtagcttcgactttattgctcccaatacggagccagattttgtgtttgatgttgagccaggccaggcaatctacctccccgcggggtactggcacaacgtctcaacccagacgaaacgctctcttcacgtatcctatacaataataagacccaggcgtctggatatattcagaacgctacttgatgaattatcacgtaatgaatacattcgcgcccccattgagtttggagacaagctatcggatgatactgttcttcgcgagttgattaacgaggaattaaagaggtttgatatacagcttaatgaaacgatgttaaaaattcagtgtaatgcgcttacctataagcatattaacctggaattgcttgattaa

SEQ ID NO: 225279 - DNA, 1602 bp, Klebsiella pneumoniae
ttgaattttattgaaaaatatgtttttggttactgccgtgtaatgctgataagcatatttcttatatcagccttcagcagtgcgttattcgtcatgttcggtttgttaattaaaagcgttattgataacaaagaatccttggccgattcaacgcttctggtttttttttcattctgttttcttgctatacgattttttatgcctcttggctatagcttatgcgagtttctggctcagagattaagtatcaggctgagctataccttacgcgaaaaagttgttgacaggatactgacatcacagaatgatatttttaacgagaaaaaaccaggcgaaattaacaaagtgtcagaaagtatgattacgtctgtcacaactcttacccgaacaatatgtacagacataataccgctgttaattcagctggcgacgatagtcgtcactatcgcagtttcagttaactacatcatctcagttgaatttatggtgatgatgctcgcttacctgtattttgtcatcagaatgactcaacgcagactaccgatgatgagggcggtagccataacggccaaaaaggtgtctggtgggatgttcgatctcatgcagctgctgccggttgataagtcatttcatactacagacaagagcagaagcaggttcatggggttcgtgagcgataatatttcgaaacaagtagcggttcgtaatgagttcttctttttcgggattagctccgctctactgtcggtttttttctgtgggatcatattattttctgtctatgtgctgattcaaaacggcaatattaccagcggtagtctggtaatggtcgctaccttcttgttccagatattcctccctatgaaccaggctggatttattttccgtcaaatcaaaatggcccgggctgatattgatttatattgcaccgaaacagaggatattatcccgtcaaattcccgaccgtctcccctgcccctggcgcaggataaaacatacgtacgcatcaggagtgatctttttgataccactattgccctgagcaaaggtgaaattacgtttcttgtcgggccgaatgggtcaggaaaatcaaccttcggaagggtgctatccggcaacagggacagtagcgatatcctgttcgagataaacggcagggcatgtgacagaactgagttgccgtatccgaatgtactgtatgtgccacaggacattgagctcctgcccggcactgtagaggaaaatatctcgcacttttccgacagaactcacctcactgcgatcactgaatggctgaagaggttcgagttcgataagccactcgaccatgttatccgtggttttggcagtaatctttcaggtggccagaagcagaaattaggtgtcatgctctcatatggcaggccgtacagcctcatcatatttgatgagccaaccaaagggtttgatgaatcaggagtaaatgccttccgtgaatatctgtcgcatgagaccagagacaagtatgtactggtgatcacacacgatgagcggttactgggttctagcccggataccggtattgtacgaatgaacaacaacaaggaactggcctgtgaataa

SEQ ID NO: 225280 - DNA, 699 bp, Klebsiella pneumoniae
atgctgcaacacagtatgaaaagtacctcccttcattccccgctcgaagtagcctcacgtgaggcaataatgaattatcaaaatactgatgtgctgctgaaattcagaaaagagtgggatgtaagcccggaagaagcagaattcattttcgctgaaaccaagaaattcatatggcttgcttcaacctctctcagggactgtttcaacattaaagtacacgaacaattcaccattattgatgagatgtggcatacgttcattcagttcacagatgcctataccagtttctgtgaggattatcttggtggatatctacatcactacccaagcacgaatgacatgattcgaaaggaactaaagcatgttaatgagacgggaataacttacagagattaccgttataacgaatatgttaatcagattcagcgcatagagcgttctttaggcgctgaaaccgttaccacgtggtatggccattttgctgtgaaatacagcatggaaaatttaaatgccctgagaaagccacttgcatcgtccgctgacggtacgtacatcaaaaaaatcacacctttacttgatatgcctgctgataaattcattaaaataatcatgaggcgtgacgtatggatggataatggttcaacttgcgggtgcagcggaaagggatgtggtgcgggatgctcctgtaattcccgttga

SEQ ID NO: 225281 - DNA, 201 bp, Klebsiella pneumoniae
atgtgcgtgatcagaactctcaggatgcaagttatccgcttcaatgaaatgacgagtgaacttgccagtaaggaaggtgaaggtgatttaagtctggagtattggaatgaaggtcataagcgttattttgagcgtgaaggcacctattctgaagaaatggaacttatatttgaggaatttgaacttacagagattttgtaa

SEQ ID NO: 225282 - DNA, 639 bp, Klebsiella pneumoniae
atgttggaagtgtggggaaggaaaacatcgtcgaacgtccaggccttaatgtggtgtattggtgaactggaattgccctatcaacgatatgatgtagggcataagtatggaggcacagatactgaagacttttacctgttaaatcctaatcgaaccatacccgttatcagagatgacctggggccgcctttctgggaaacaggtgcgatcctgcgttatctggcttgtcgttacggacatgagaccttctggccaaaggatttactggaaagaacaaatgttgatcgctggactgaatgggcaaaaattagtgttgcaatgaattttaatgaacccattttctggagagtagtccgtacgcctgcgcatttacgagatccttctgctatcaaaaaggcagtcgaatcttttgaaaagcgcctaatgattgccgaaacgcagctatcgcgttatcaataccttgccggtaatgattttacacttgcagatatacaatttgggcatgtgctttttcgctacttcgacatagatatttgccgggcagaacttcctcagcttagaaaatactacgaaggcttgcgacaacgcttgccatatcgtgagcatgttatgatttcttatgaggaacttagagtttaa

SEQ ID NO: 225283 - DNA, 480 bp, Klebsiella pneumoniae
atgaaaattaaattagtccttgggttaattctttccttactggtagccaactgtataagattatacattttacagagtgaaaagtatcttaatctcacctgcgagtcaactgtacattttactgacaattcccatggaaaggactttttatttaatggaacaattatatttgattttgagaagtccagaaatgggtatttttatcttagtggcacaacagggaataaacttgaaaagtatgatttctcacgctatatcaaatttgagtataaacatgaggaatcgaatagatatagtgtgaaaatagccaacatccaaaagatgggccatgatactgttcctgacagttttgttcctgttatttattcagagcttaacattgctgacaaaccatcccttttcatatccagaagtaatgaaaacttgctaacgctgggtactattgtctcccctcttctgaactgcgtacaaaagagttag

SEQ ID NO: 225284 - DNA, 546 bp, Klebsiella pneumoniae
atgaaaaacatgtccttaaaagtaatgtctctggctttcatcatgactgcctcgtctgctgcattcgcagatgttaacggtggcagtggtactattcatttcactggtactgttattgatgcgccatgttcaattgctccggaaagtattgagcagactgtagagctcggttctgtggcattaagctccctaaaaactgcgggttcacattcccgtcctgcaaccggcgaaatcaaactggttgattgtactctgacttcagtagaaggtgacgagaccaccacttattctaaagttggtgtaactttctccggtactccggatgcaaccgttgctgcactgctggcaaacgattccagcgctcagggtgttggtgttcgtctcttggaccaagatggtaaagctattgaactgggttctgaaactgaatatccattaggtaacggtgcgaccattatttatcaggcttatgttgaagcaaatggtaatactgtcactgccggtgatattcgttctgatgcaactttcaaactgaactacaaataa

SEQ ID NO: 225285 - DNA, 2493 bp, Klebsiella pneumoniae
atgcctgataacatatccttactgaacttcagatattcgcctgttaaaatcagtttaattattgcggctctgtctacagcatctcaaccagccagagccatagagtttgccactggcattcttaatatggatgataacgacaaagtcaaccttaaaaaattcgaacgagctggttatatcgctcctggtaagtatcgattatcagtttcactgaataacaacctcttacatgatgacgttgatatcattttcgtttccgtagacggaaacgaaaatgcgagaccatgcctccctgttgagttggttgataccatggccattaaacctgaacatttaaacaacataatatcgcataatgggtgcatatatgtagaagacattgattcggttaccacgacaactaacctatccaggtccgcattgaatgtttctgtacctcaggcatttttacaatatagtgacagtaactggacacctccttcacgctgggacaatggtattccagggtttatgcttgattatgacattgctgcgagcaaaattaattataaacacagcgataatacacaagattattccagctatggtaccgccggagtaaatgttgggccgtggcgtatacgtggtaattaccagtactcaaactataaaagaggcaacctgcgtgataccaactttgactggacacagctctacctgtatcgttccttcaatgaacaaggtctgaaattacaggcggggcaagtctatctaaattcaagtctgtacgattcgtttcgatataacggtttatctgttcagagtgatgaacgcatgctgccacccgccctccgcggttatgcaccacaggttagcggtatcgctaaaaccaatgctcgtgtaaagatcacacagaaaggccgcactctctatgaaacgaatgtaccaccgggaccttttgtcattagcgatttaaatcaggcagtacagggtcttctggatgtagccgtcgaagaggaggacgggagcgtacaatatttccaggtcaatacagcgagcattcctttcctgacacgacaaggttctatgcgctataagttattttctggtaaaccagtttacaacacgggcaaccgctatattggtcctgaatttatgagtggtgagatttcgtggggcgcatttaataacacctctctctatggcggttttatagcaacgaatcaaaactaccaggctgcgactgcaggtatcgggcaggatttacacttgctcggtgctctttctatggatgtcactcgggcgcagagcaagcttgaacagcagaatacaaaatccggatacagctatcgcgttaattatgctcgtcagtttgccagtaccggtagtcaaatctcttttatgggctatcggttttcagacagtaattacctgtccatgagtgattatcttgactatctgaaaattaacaaactttatcagcgagatcgcgaaacctataccgtcatgggtaatcaacatattccatgggtggacgtgaatacctatctgtcatatacccatcgtaattactggtacggggatagttccaacagtatgtcactttccatgacaagaaactttaacgcctttgatttccgcaacatcacaggcacgttgtccgtgtctaaaacacgttaccgggaatcagatgacagacagatttactttggtataagcatgccaattggtacgggtcaacaaatcagttatgacagccaatatggtgaaggcaatcgctcacataccgtttcctactataactccagtgagcgtgatcgttcctatcgtctctcagcaggaggtcgggatacagacatcagttcaggtagcgctctcgttcgaggtagttatcgccagcgtacacagagcggtgcgtttaatgtgaatgccagccaaaaaaatcgtgcctatcgttcagtcagcgcagactggaacggctctgtcaccattacaccttatggtgctgccttcagcgaaagtcttggaggcgaaacgccgagaatgctggtttcagctcatggagtgtcagatgtgcccttcaatggtggcaatgcaaaaacaaaccgtttcgggattgctgtaataccaggtggcagcagctttgaaagtaatagttatgccgtcgatattcgcagacttccggaaaatgtcgagatggaaaaatccatcttccagagtaccctgacggaaggggcgattggctataaatctcttccggtaaataaaggataccgtgtgatggcgacgattacgctcgcagatggaacggctcctggatttggttcgccggtgacagatactgtcagtggcagagaactcggtattgttggccctggtggacaggcctatttatcaggtatcgacgataatgcaaccgccatcgtggatctgggtaatggaaaaatctgtaacattcacttcccaaaactcaccggtacagcattaacaacattactattgccgtgccagtaa

SEQ ID NO: 225286 - DNA, 741 bp, Klebsiella pneumoniae
atgaatactattgcaaaaaaaatacctttattgttgacatcaggtctgctttttatatcggctacaggactggcagctgtaaacctggatcgaacccggcttgtttataatgcggccgataaatccaccgccataacattgactaatgaaagtaaaacactgccgtatcttgcacaatcatgggttgaagatgacaaagggaagaaagcggatgagatgctgatcgccctgccccctctgcaacgcattgaagcaggcgataaaagtcaggttcggatcgttaaaggtgtaaaagctgaaagcctgcccaccgatcgtgagtcgcttttctattttaatacgagagaagtgccgccaaaaagcgagaaaaaaaatgttatgcaagttgcgattcagagtcgaataaaactcttctatcgcccacagtccatacaacgtagcagccacgttaatccggagcaaaaaattacccttcagactgtcggtaaccaactcacaataacgaatccaactccttactactttaccgctctggcagttaaagatagtcagggaaataaaattaaagaggtggatggtgagatggttgccccgcactctgatcggaacatctctgtcgcaggactacgtctcgggcaacgcatatcaatttcttacattaatgatttcggtggtgtgatatcaatgttatatcgctgtgagaataatatttgcaaatttgaaaaaagtaatgagggataa

SEQ ID NO: 225287 - DNA, 579 bp, Klebsiella pneumoniae
atgaactacggcagatgcagactgacactgatgatgcttctgtttgtcggaacgcatctggcgcacgcggccagcgaccttgaatatcagggtttcaaaggaaacataaatttccagggtatagtacaggaagccggttgcacgctcgattttgactcagatgaacaactcatcatgattggagaatcaaattcgcgtgaaatatttcatgaagtcccgaattctcttgtcattcaccttacaaactgtgagcgccgtgataataatgcctttgatgataccaatgaactgaagacgacctggagtggtggtacgctgatgacaatcacccttgatggcgaaacgcttcctgatgatcctaccgtgtttatgttacacccacgtgagagtcatatgggactgaaaatactggatgatgacagtaatcagatcttacccgatatacacagtcatgtgattcgaacagataaaggaggaaatcacatccgtctcagcactcaggttgttcgtggtgagggagtggatcattaccgcgggcctttaacgggaacattaacttttcatttaaagtattattaa

SEQ ID NO: 225288 - DNA, 921 bp, Klebsiella pneumoniae
atgatttttttcagtacgtctacgctggcactggagtgtcataaagattccatatcgggaagtaccagcgaactggttaatattggtagcgtaaaaatccccaatgacgtacctgatggcactatcgtatggcgttcagaagtattaactaacaattttgtttgttggtcaacaacatctaaaactgatgagtatgtatatatttatacatacccggaagtcagtggcagcgcggcaatgcctgaaggggttgcgtttggtattatatatgatggcgttgacttaggaaccaatggtgacaaaacgcaaacaagtttatactttaccaaaagcgaaaaagggagcaagtatgctaaaaccctaacaatgagctatcaaatttatatcaaaaaaacggctaacttatccagcagcattgtttttgatactgatgaaatagcagttttccaactcgatggtgttggtggtattaataacaatgccgggcttaactatcgttatacgcttacagggttaaccaattttgttgctcttgaatgcagtgcaaatattcccgaagttaccgatgtcgattttggtgagctaaaaccctggaacagcacgggctctgttattaccagaaaggacttttcacttgcagtttcgcgtacctgtgatgcgcctttttcgcttgatgcactttttacaccgactggtactgtcgttaacaacgatagcgttgacctgggcaatggtgcattgctgaaaatatacgatcctgatactggtaattatctagtctttaacgaccttacggactttgttgatctgacaacttcgaaaagtcagacaaaaacttaccaggctgttcttgtcagtaacggtgaagcaaaaacaggcgagtttgaatcagatatcatatttacggtaaactataagtaa

SEQ ID NO: 225289 - DNA, 600 bp, Klebsiella pneumoniae
atgagaagcaagttccttgataaaattgcatctgtcaataataaaaaagagttgattattgccagcaataaccctttcatcctgacaggattggaatcgttaatcgcccctgatttttatgctgttcgctacatacaactccaggatatcaataaactatcattaaacaaaaaattattttctgttgcgatagtattaacaggagccttaaccgcctcccagcttgctgagattattatactataccggcaggtggaaaaagccaggatacccactcttctgttttctgagatttacaaccattatctttctttattcacccgcttagccggcgggtatgtgatatacggtaaacaagacagagtctctcttccctatgaactaagctgctttatggcggctgaccgttataatgattatccctcatcaaagcggatgagtgatatcgaagcatatgtattagcatacacactgaaaggtaatactgtccccgatatatccagaatgctcaacactgcaattaaaacgatttactcccatcagcgtaatattatgaagaagcttggtgttaaaaaaataaaatggatactcattcactaa

SEQ ID NO: 225290 - DNA, 465 bp, Klebsiella pneumoniae
atggatcgccacacactcccgactaaaattatccactacagtcagcgcccggaaacgtcgtccgttaaacaggttatccgacacgaaatccatactccagcactgatcgactccgctcaggaccggacgttgctgacgatgtgctgcactgacatgcctgcgggggcgctttttgcgcaggttgaggccttccagacagtaaatccggtgtgttttcttgtgattaacaggccagccttcccgccgcagctgaatatgaatacgcgggcaaccgtagcggatccgggtttctgctatttcccggatacgcagggttatcgcccgatcatcccgccggctctgccagtggtaaacggttctgctctgcatcagcagtccgcatccccgtcggacactgatacggtaagcctcccgcagaaaatgcaccgcctgacgcttctgagccggcctcagaactttttttga

SEQ ID NO: 225291 - DNA, 843 bp, Klebsiella pneumoniae
atgaacgggattagttggaaaggctcaaataagcaagttgaaaaacaattggtggcacaatttgaaagtctagggatagattattcaaatcccggtttttatgatgatcctaatttcttgaggcaggaaaaaaaggacccacgctttctcgaaaaatatgctttgtatgtagagtctaaacattatgaggatgagtacttagaaagggcgaagaaatctataataatttgtgctgaatccttacataaggctattaagaaagatggaagacttggagcttgtgttgacgtgtctagtatgctgagtcgaatgctggaagaattgggtatttggagttatgtaaccaattcagcggttaagattgatttccctcagtcatcaaaaattgagaccatctggttttggtcaccctccgatggaagtgggatggcagcagcacatgccattgttgttgcaccaccttttgcaatcgtagatttaaccatcaaaatgcaaccgtaccaaccaggagtcaataggtatcttccagaaatagcattggttacagattatactaacggtcaatgggaacctgaagacgttattgagcatgacaccctaaatatgtacggtttaagcggtgatgctgctcgtaaagctattcagagccaactaaggccaatgtatgaagtgatgaatacattcccgtgccggatagcaacatttggagaaacccatattaagtatacgaccattgctatcggaggttcattagaacctctgagcgggatcttaggctataaacctaatggccaaactgcactagagatttttcaaaatgatattattcctcgattaagttga

SEQ ID NO: 225292 - DNA, 885 bp, Klebsiella pneumoniae
atggcagcaccaatgcttgcattcttcgcaacaggaggtcttccaaacagagtgaatgaggttgttcttgctgccgaaaatagtaggaaccacagcatctcagaccgctgtctagttggtgatactgataaattacctgatttttcggaatgcatgcctgctggaaataatgatgctgtagcattattaggagacagtcatgccgctgcgttgagaggcggcgtaaatcattatgctaaactaaaagggttatcggtatatcagataacgaaatcttcatgccctaatcttatcgatacacccagatttttaggtaaaaaccctgcgcatgcaaccttgtgtaataactttaacaataaggcaattgaatatattaaaagtaaagataacattaagactgtgattattgcagctttttgggatgctggaattgataataaagataagggacttgggtatcatcaagtttccggtgataaaacagaagataatttggtggccttaaggttagggttggaaaatacaattaaaagtctaaaggcaagtggtaagcagatcatattggttaaggatgtgccattatttgaatttgatgtggtcaaagaggtcgctaataacaatattgtattcagacattatgttggtgatttgttgaaggctaatcatgacttaaatggattatcaggaaggtttgagccaaaattggaaaatgttgatgcggtcatcgatagtttatcttccagtgatataagaataattaacccagaaagcgaactgtgcaataactctcaatgtgaatacgtaaagaataataatgctctttattatgatcgacagcatttaaatgattacggtgccattgaagcattgaaaagtatttattag

SEQ ID NO: 225293 - DNA, 990 bp, Klebsiella pneumoniae
atgttggcaagtgtcaactttctttttttaggttcattatctcaatatcaatctcattttattaagtgtaaaagaataatattattggccaagattgaaatgttatcgaagtttctttcttttatttttgtattgattgcgattttttatactgagctaagaacttcagctgtaatattaggtttgattttgaatgctattcttcgcttaagtatgatggtcatctttggtgaaaaaaagtggaggccaacctttgaattcaatacagatgtttgtattcctgtgtttaagtatggagtctttcaactaggttcacaaatccttaatcagttaaggactcagttagatgttatcatcattggtaaggtcctgggaggagagtccctaggactttattccttagcaaaagatctcgttatgcagccattgaagttaataagtccggtaataaatagattggctttacctagatttgctgaagtgcaaacaaagagcattgaattaggaaacgtttttttaaaagggacttcaataattattatatttagtgcgatcacattcttaggtatcgctcttttctctccttcaattgtgacgatattatatggcgctaacagaattcaaattgtaaatatattgccctttatgcttatctttgcagtgctaagacctatgggcggactaacgggggctattgcacaagctaacggaaagaccaatactgagtttatgtggaacgtggtagcaacagttatagttgctttgacgacatcaactatatatttcttccctcacttatggtacgtatcgctaaatttatctatttcccagcttcttataagtctaatggtttttccatattttattaagtcggttgttaaagttaagtttgttgactatttattgaggtggttacctataaccgttgtttttacaatgatacttttcttgttttataggtttgatctatttattagacctttttggtga

SEQ ID NO: 225294 - DNA, 1407 bp, Klebsiella pneumoniae
atgtccaagcaacagatcggggttatcggtatggcagtgatggggcgcaatcttgcgctgaacatcgaaagccgcggttataccgtctctgtttttaaccgctcccgggaaaagactgaagaagtgatcgccgaaaatccaggtaagaaactggtcccatattataccgtcaaagagtttgttgaatcccttgaaactccgcgccgcatcctgctaatggtgaaagccggtgcaggcactgatagcgctatcgattctcttaagccctatctggataaaggcgatatcattattgatggcggtaacaccttcttccaggacacaattcgacgcaatcgtgaattgtctgctgaaggctttaacttcatcggcacaggtgtctctggtggggaagagggtgcgttgaaggggccatctatcatgcctggtggacagaaagaagcttatgagctcgtggctccaattctcgagcagatcgctgcccgtgcggaagatggcgaaccttgtgtcgcgtatattggtgctgacggtgctggtcattatgttaagatggtccataacggcattgagtatggagatatgcagctcattgcagaagcatattcattgctcaaaggtggtcttgctctgtctaatgaagagctggctacaacctttactgaatggaatgaaggtgagctcagcagttacctgattgatatcaccaaagacatcttcattaaaaaagatgtcgaaggtaaatacctggttgatgtgattcttgatgaagcggccaacaaaggtaccggcaagtggaccagccaaagctcactggatctcggcgaacctctgtctctgatcacggagtctgtgtttgctcgttatatctcttcgcttaaagaccagcgtgtagccgcgtcgaaagtgctgagtggtccgcaggctcagcgagccggtgataaagctgaatttatcgaaaaagtacgtcgcgcgttgtacctcggtaagatcgtttcctatgctcagggcttctcccagttgcgcgctgcttctgacgagtacaactgggatctgaactacggtgagatcgctaagattttccgcgcgggatgcatcattcgtgcgcagttcctgcagaagatcactgatgcttacgagcaaaatgcaggcatcgctaacttgctgctggcgccatacttcaagcaaattgctgatgagtatcagcaggcgttgcgtgatgtagtggcttatgctgttcagaatggcatcccggttccgacattctctgctgctattgcctactacgatagctatcgttccgcagttctgccagctaacctgatccaggctcaacgtgactattttggtgctcatacatataagcgcactgataaagaaggcgtattccatactgagtggatggaataa

SEQ ID NO: 225295 - DNA, 300 bp, Klebsiella pneumoniae; identical to SEQ ID NO: 225142

SEQ ID NO: 225296 - DNA, 699 bp, Klebsiella pneumoniae
atgcagagcagaaccgtttaccactggcagagccggcaggatgatcgggcgataaccctgcgtatccgggaaatagcggaaacccggatccgctacggttgcccgcgtattcatattcagctgcggcgggaagactggcctgttaaccacaagaaaacacaccgaatttactgtctggaaggcctcaacctgcgcaaaaagcgcccccgcaggcatgtcagtgcagcacatcgtcagcaacgtccggtcctgaccggagtcgatcagtgctggagtatggatttcgtgtcggataacctgtttaacggacgacgtttccgggcgctgactgtagtggataattttagtcgggagtgtgtggcgatccatgccggaaagtcgctgaaaggtgaggatgtggtcggtatgatggaaaggttacgggtgccgggcaagcgccttccggtacgtattcagacagataacggcagcgagtttatctcgaaaagtctggataaatgggcgtatgagcacggggtcacaatggacttctcccgccccgggaaaccaacggataacccgtttattgaatcatttaacggcagtctgcgggatgaatgcctgaacattcactggttcctgtcgctggaagatgcgcaggacaaactcgaccttcatccgcaaaaatttttctgtggtcctagagcaaacggtacgtga

SEQ ID NO: 225297 - DNA, 342 bp, Klebsiella pneumoniae
atggagtacgagtcgctccaccaggctatctgtcagcacgctgagcgggcctatgaaaagctgcgtaaagagcaccagtattgccggcatatttccgtttccatcaaaacgtctccgttcgccgttaaagagccttactacggtaacgtggccacggagaaactgcttacacccactcaggacaccagggatatcattgctgccgccacaacggctctggagcgtatctggaaggatgggcaccggtatgccaaagccggagttatgctgaatgattccaccgggtctggcgtttcgcagctgcagctgttcgacgaacgcccgcctgcctcacagtgctga

SEQ ID NO: 225298 - DNA, 147 bp, Klebsiella pneumoniae
atggttctggacgggatcaacaactcagggctgggtaaagtatggtttgccggtagaggaattgccccggaatggccgatgaaacgtgagatgctttcatcggcatataccacgcgctggaaggagctgccggttgcccgtttctga

SEQ ID NO: 225299 - DNA, 1212 bp, Klebsiella pneumoniae
atgcctaaatataatatttatacaaagattgaatcgaatgtttcagcagtcgaccttttttacgatctgaatgtttacagaactgatgccagtaataaaaaacatatactactgtcagtggcgcaacaaccagtaacatcaaattatcaaactcagtctcatgaaacgaatgacacagaggatgggttgtctgtaatctacataatggaaatgaacttatatcgcaagcacggaggtaagttgttttctgtgctttcctcgcctgcgaaaaagatgtacacacttggtgaaatggcatcagagcaagcatattctaaaaataagcgtgaaaatgtttgttattttgagacaaaggcgcagacaaaaccggttaatgataagggtgaggataatatacatactgtgcagattacctgtcagaaaagagcgtttattgcaaaagagtatcctgtaggtagtcctgatgatcccttcgataaaaataagatagaacatcagatcctttcgaggatgaatcgcagtagttatccaaatcaaggggatactagtttgtgtgggccagcatcatttttttattgcctgttaatggatagacctgatatttataaacaagcagttaatgagctttggttgtatgggaaaactaaaataggtgcgttaaatatagttccaagcaatagttgtcggcatcctatgggggctttctatgatgcttatggagaacgagtgaaggggatcgattggataaccctcgcttctttaagggactccgaaaattccattatgagttatgacgaaattgatgaccaggcttcagggataacattatggggagcgcttactgaatggtttgtaagtgctggttatcaaaaagagtttagtaatgtcgggctatcgcacgtaaatctgaaagaactaagtaccctcaatgagtatattagaaaaggttgtcgagttgttactttgatatcagctggtatacttgatggatttgactccactgtcacggctaagaatcattggattgtttgggatggacctataaccacacagtatggtgaggtcatttcattaacgactaaggaaaatgagttagttcaattgaaattattctcttggggtaaggtaaaaaatcagattaagaggcatcttgctctttcagatgtaatgggaagcatttttggaggggtggtgtttaaatcactagaatag

SEQ ID NO: 225300 - DNA, 807 bp, Klebsiella pneumoniae
atggtggcaaatactaagtcaactgaaaagttgcaaatcagtaagataagtaagaaggtaactgaatatttcggtgctattaataccataattaataaatataatctttatagtgttaatagaaaatgtcattttcttgggcaaggggctgttgaatcagaaagtttgctgtcaatgcaggaggttagccagcaacaactgatagagaatggtgtccacaaaggtggtgcaattgttggcctatccaccaaaaaagaatcggatctcgggcattggtatggagagttggcggaagaaaaagatgattatttttctggtaaaaaatacaattcaaaagggaaccttatcacaggatcttacagctggatcaatgggaattgtggtgatgttgatgcccagaaatacagagggcgtgggtttaaaatgctcaccgggctcgatacttattctagctattgggtatatcgagggtggctctcaataaatgactttgatagatactggtgggatgaccctcaatataaaaagaaaaacccacccaaaatgaaaaaacgtttcccccagatagactcgccacaaaaaataacagaaaatacttataactgccttgatgctggaggcttttttatcgttggatttagaggtaaaacggtgaggataatggatggggataaaaatggcaaagtagatgataatcaggttattgaaaatgtcacctctgcaataaatggtggctataaagggctcgcagagagaaaaagttttacgaaaaaagctaaggaagtgattggtgatgacgttgaataa

SEQ ID NO: 225301 - DNA, 759 bp, Klebsiella pneumoniae
atgacgttgaataaatttttattaacttcatttatatattttatggctacatttaactcttggggagtatattacaataccattgaagttgacggttatattattggtctcaataaaactaaccaaggaatgattgatgtatatagtgacacctcgaaacttttcgcttcatgtgtaattaaaaattggaatggcaaatactatttaggagctggtatactctctttgacaagtgataaggtcggcgtgattgttgctggtagcaataggtatttaaaagtaaaggagctggtgacttgtaataacaagttcgtaaatttatatgaagtagattatgtagatcgaaaattatctactcttgtcgatgttaacttcgataaaaaactgatcctcgctttagtgcctattgatgcccaatcaggggcgcatcaagctataatatcaaattttgatgggaaaaagaatattatctcagggaaaggtttttggaacccacgtgctaaaggtgtgaatatttcggatgatacatttcctgtaactgatgatttttatatcgggaaaatatcagctaatggaaagtacgtttctcctaacgagcttgattgttctgtaagttcttttccaggagtatgggatataataaaaaaaatgaaggtgatactccctgatgatgcagtgattgacagtaaatgccgacagcttttttcgggagataaaacacttgatgaattgggtggaaaacttatcaataagaattga

SEQ ID NO: 225302 - DNA, 522 bp, Klebsiella pneumoniae
gtgataaaaaaactgctgttaaacttttttctgttttattcaatagctgttgttgctaacgacagtataccttcgaatgcacttaaaatatgtctgtttcagcactcattaattgatggggttgattattcatcaatagatactagtgcagtgataacagatagcaactattctgcagcaggcgaagtgcgctatgttgattataaaggaactattgttgggtatgggaattctcggtcaggaatggccttttataaggggagtaaatcatatcctttatcgaaattaaaggttattgattttggactgttaatcaaatcaattccgaaggagatagattattctgtttcagaatgggggtacattagattaaataacaagagttttatttgcgttaatgtgccgttctctggtgttggggaaagtggaaaacatcaggatataagaaatgcgtttgtatatgatatgaaaggtaatgatatttactacacagtagggaatgtcagcagtaaagtacaatag

SEQ ID NO: 225303 - DNA, 873 bp, Klebsiella pneumoniae
gtgcagttcagtgaattaacaaaaatgacacaagatatttggtcatttgtatggccgccactggctatatgtattattgcctactttgtagcacattactttcacccagtcgggaccaaaaatgtattacgtaacgccgttgcaagtgctaaggcttacgggataaagcttgaacgtactcgcgcgatccttgaaccttacggccttacaaagttagtgcctgttatttccgtcattgtgctcgcaagttttatgtttattttgaatgggccaatatctaacttggttgaaaatattccaccatatatttcttatcagcccgatctacttatctctaagactatgtccgaggatcaacagcttgtgctgatccgaaaatatccaatgacacatggacttaacgaagcatattatttagcgagtgaaaatactgaattagaaaataaaattgagttcaagtacgatcgcgttacattttggtatcaggcacacctattacttaaatttgcatttgttttttcagttataatgctagtcattagtctaaaaaatggactttccaaaggaaaacaattcgcaaaattttttttaatgtcagtttttctctcagtgttatggatcatttgtttaactagtttgctttatcaacaggagcaagagatttatgatgaatcgcgtcggataatcctttttctgaataaagatgcaacagcgattctggcatatcccattaatgatgaagaaaggaaaaagttatctcccacatggaatcaaagagaagaacgttggtggaaaatatattttttcgatagtgatcgtttaaaatggatacagcgtacattatatccttacgactcaagtaaacggcgttag

SEQ ID NO: 225304 - DNA, 1260 bp, Klebsiella pneumoniae
atgctccccgctggtcagcgctatcccctccggcgcgctgaccagcagtaccgattttttgaggtctgtcagctgctgctccagcagggtaatttgcgcctggagatcggccgggttcgcggtcgccttctgcgcgtcaccggagatggacatcatctgctcccgggcttcggccagattgctgaccgccggctccatatccagcacctgcccctgagcctgcacctgtccgtccgcgctgataaatatccctttctgtgcccggatagctccccggctgtcggttctcagctcaaagccttcgccgcgcggctgcctgtcactgtccaccaggtgccccaggttcagctggcttttaccgccgtactccgtgctgaccttgatatgttctttcccgcgctcatcgtcgaggcggattttgttgttggccggggtgcgcaggacgttacgtttgtcattgcgaatggtgacgtggtcgccgtgcgccgagtcgtgcagcacgcccgcgatatacggccggtcggggttaccatcctcaaagccaatcgccacctccgtccccgccagcagcggcaggtgcaggccgtaagtgtctccggcatacggccgcgactggcggacccacaggctctcgaacccggtttcccagcgcgcccggtcaaacagcatattcacccggtagcgtccgtgtttatcgatatgcccgtaggtgtcgttttcccgggtgctggtcacgcgggccggcagcgtcccggccatcaccggacgcgcgccgggctcaggccggtagccgacgtccgggctgtccggtatgccggcaaactccaccgcaaagtcggcatcgcgccgggcgtggctgtgcatcgccgtgacgagcacgccatcagcaaactccccggccacctcctctccgccggtgaccttcagcacctgtcccgggcagagcgtcgggcagctggtggtggcctgcatccgggtctggccgttcagataacgctcatggcgaagccgggcgtaaaacgccccggactccggcgccggatggcggtcatggacattccccgcggtcaggtagttatctccccagtggtaagcctcaccaaaggtggtggtctccccgcgagtgacatccacctgcgcgttcatgtccgccgtcgcctcgcggtagttgtagtcgcgggtactgacctgctgctccacgacgcggtggcggcatgccatctcccacaccgcgtccaccccggccgactgctgccctga

SEQ ID NO: 225305 - DNA, 153 bp, Klebsiella pneumoniae
atgcaggaagatgagttcttcaactcccgcgtcgtgcgcgacctggatgccttcaaacaagaggcggatgtgatcatctctaaccgtatggcggaagagctggcggatgtgactgacaaggtatacacccgcgatctgtttggtaatgattga

SEQ ID NO: 225306 - DNA, 546 bp, Klebsiella pneumoniae
ttgcaaaaaggtgattactctgttggtgtgacctggcaacaggcaaaagactattgtcagtggttaggtaaggagtctggtaaaaaatttgatttaccaacagaggcgcaatgggaatatgcagcaagatccagagggcaatacattccgtttgcaacgaataatggtgagttcctgcccggtaaaaacatccccagccaggatgagctgagtgaatatactgatggagcaggtattcctatttatccagtggggaaatatcccccaaaccccctgggtctgtatgatatgggacttagtggctcagaatggaccaatgactggtatgcgtcagattattactctcattctccggtaaacgatcctcagggacccgtaaaggggaccgaaaaagtcctccgcgggaatgttggcggtgacagacaatacgctttaaccgtgttcagacaatcagatttgccagttccaaagatcaataaagacgatgattatgaaaaatatggtgttggtccgcagtatgttttccgttgcgtcatcaataaataa

SEQ ID NO: 225307 - DNA, 648 bp, Klebsiella pneumoniae
atgggctgccctgaaaaactaacttccgttataagaatggggattaaaaccaacgatttcgtttttcaagagcggtttatagacatggattgtattaaaatagtatccgtatgtcgattaacggagaagaaagggctggaatatgctataaaggcatgcaaactcctcaagcaaaaaggatacaaatttacctataagattattggttacggggaattagaagcgcatttatcaaatttaatcaaagagttgcaattaactgactgtgtggaattgactggctttcatcctcagtcaattgtaagaaaaattctttcagaaagtaatatatttttacttccttctgtcactgccaataatggtgacatggaggggattcctgtcgcgataatggaggcaatggcatccggattacccgttataacgacataccatagcggcattccagaacttgttgaaaataatcactcaggctggctttgccctgaacgtgatgttcattcaattgtagatgcattaattgctgcgatagaaaacccaaatttatattcctctgtggctgttaatgcacaaagtaaagtatatgaatgctttaatgaacataaagagtttattaaaatgtgttcactcctggagagggttaaatga

SEQ ID NO: 225308 - DNA, 174 bp, Klebsiella pneumoniae
atggacggactttccgcaagcatcaaagatttgatatccggtaatataaaaacacatattgattatttaatatctaattacgatacaattaattttgaactccaaagtaaggtccaggaaacgcgagagattgggcatgaaatagtttctaaaattgttaagagcataggctga

SEQ ID NO: 225309 - DNA, 219 bp, Klebsiella pneumoniae
atgaataaaaagtgtccgcagatgcttgtcgccttttttcgtcatattcatcagcatttgtctgtcgccactcgaatgctggcgtggaaccagacccagccatgcagcaatgtggcggccattcttaaattcagttcctttgccaatagcagcaacaacggcagtggccgttttagggccaatgcctttaactctggcgatacgctgacaggcttctga

SEQ ID NO: 225310 - DNA, 1245 bp, Klebsiella pneumoniae
atgtatggcttaaccgcagcatatttttatgccgtctgttttgcggcaatgctggtctatgacggattaacctcgcgctggggaatgggctttgcctcattgctgattaacttttccaatattgtctttattgtgacgctggcgcagctggtgctgtgggataaacgtcgcgccgactccatgccgggcccgataaacgcgcttaatttattctgtttctgcctgttagccgccttactgtgcgcagcggtcggcgcgctggggtcggtggatgttgaacgcgccaccttcgttccccagctggcggactggtttagcgaacagttctcaacggcggtattaatcctgccctttattctgaccctgacgctgccttcggcattaagcggttttcgctttcgccagctgctgccggtgctggcgctggtcctgtcaattgcgcttggcgtggcggtaggcggcgcgggcagcattaccttcccgttaccggctttgatctggtgcgctgtacgctatccgctgccgctgacctgtctgctgacttttctcactggcatcggcgaaatactgctggtcgctaattcgttaattcacttttcgccagatgcgcgaatgcagccgtggcagctgttctccacccgcctcggaattgccgccatgctgattagcccggtgattgtcgcatccagtgtcgaagcgattaacacgctggtgaagcagctggccctgcgcgccgattttgactttcagacccgcgtctattcccgttccggactgagcgaagcgttgaagcgtcagacgctgccggcggataagctgctgacggtgatggtgctggatatcgatggcttcaaacgggtgaatgatgctctgggccatgaaggcggcgattgcgtgctgacccagtttgcccagcaggttcgacagctggtgggtgagcaggggatggtggcccgtatcggcggcgaagagtttgcggtggccgccgtcgtcgacagcgcccagcagggctatttgctggcggaaaagatccgtcacggtgtggagtcgcagcctttcggcctgggccagaacccgatccacctgaccatcagtctgggactggagacgcgcgaggtaggccacgcccgcatcaccgagctgtttaaccagctgctgttggcggcggacgatgagatggtgaaagccaaacagagcggtcgtaaccaaatttgtatgccgacgctgaccgaaagcgcgccataa

SEQ ID NO: 225311 - DNA, 135 bp, Klebsiella pneumoniae
atgcttttccataccattcccaggccgatcaacatcgacgcgaagagggcgaacagggtggttgagataaaaatgctggccatggcggtgcctcagaaagtgcgtatgcagatcattaggcacggtgtcggatga

SEQ ID NO: 225312 - DNA, 510 bp, Klebsiella pneumoniae; identical to SEQ ID NO: 183854

SEQ ID NO: 225313 - DNA, 1125 bp, Klebsiella pneumoniae; identical to SEQ ID NO: 183853

SEQ ID NO: 225314 - DNA, 1209 bp, Klebsiella pneumoniae
atgacatggcaatccttcaaacaggcctggcttatccggttctggtctcctgtcccggcggtcattgccgcgggcattctctctacctactattttggcatcaccggcaccttctgggcggtgaccggcgaattcacccgctggggtggtcagctgctgcagctgctgggcgtccacagcgaacagtggggctattaccagctgatacatctcgaagggtcgccgctgacccgcatcgatggcaggatgatcatcggcatgttcggcggctgcctggccgccgcgctgtgggcgaataacgtcaaactgcgcttgccacgcagccggatccgcattgcgcaggccgtggcgggcggcatcatcgccgggttcggcgcacggctggcgatgggctgcaacctggcggccttcttcaccggcattccgcagttctccctgcacgcctggctgtttgccatcgccaccgccatcggctcctggtttggcgcccgcttcacgctgctgcccctttttcgcatcccggtaaaaatacaaaaggtgtccaccgcctcgccgttaacccaaaaaccgcagcaggcgcgccgccgtttccgcctggggatggtggtctttttcgccatgatcggctggggcctgctcaccgccgcagaccacccggcgctcggcctggcgatgctgtttggcattgcctttggcctgcttattgagcgcgcgcagatctgctttacctccgcctttcgcgatatgtggatcaccggccggacggtgatggcgaaggcgattatcttcggcatggcggcgagcgccatcggtatcttcagctatgtgcaattggggatggcgccgaaaattatgtgggccggtcctaatgcggcgattggcgggctactatttggctttggcatcgtgctggccggcggctgtgagaccggctggatgtaccgggcggtggagggccaggttcactactggtgggttgggctgggcaacgtcatcggctcaacgctgctcgcctggtgctgggacgatatcgccgccccgctcgccacccactggcagaaagtcaacctgctgaacgccttcggtccctttggcggactactggccacctatctactgctgctgatcgccctgctgctggtgatcgcctgggagagacattttttccgccgccaggcggcggtccggaccgtgaaggagagcgcatga

SEQ ID NO: 225315 - DNA, 636 bp, Klebsiella pneumoniae; identical to SEQ ID NO: 182412

SEQ ID NO: 225316 - DNA, 1248 bp, Klebsiella pneumoniae; identical to SEQ ID NO: 127352

SEQ ID NO: 225317 - DNA, 1767 bp, Klebsiella pneumoniae
atgagccggagtgaaacgcagataacgtggatggccgaaaatgtgctgtcatgggagacggtcagcggacacatcactcagcgggatctgaaccgatattatttacttgacgtttatcttcaggctcatttttcagattatgtgttgctccccggatggtttagtgaacattcgcatcttgcccgccctgaaaaacgcgattttattgcctctctgaaacgatttcttctgtcttaccgtcccgccggaaggttaaccattttccgttatctcaatatgttttttatatggcagtcagtcaatcagtatgactatggcacggctgaaggcgttgaaatgtatattaaacatctcatgaacgatattcgtcggcgaaaaatttcagtcaggatggcaagacactacttgtccgtggtcaaccggtttttgcttacgggcgggcagattcagaggcggtatgaatatgaattcttaccgaaaggaacgtatcagcagcagggaagggatagctataccaggaatgaactttccgagatcctgaggcagttgtcatccatgaatgagttccttgcgggatgtatccgggagcatatcgctaaatcggaaaaaggggtgcggcatttctcaccgtctttgctggcacctgtttatgaagcgtatttccggtatccgggagagaacggggtcagcagggcagagatcatcatcagggacgttctggaaaattactttcttacttctttttttctgttctgttaccacacatggggaaacacctctcaggttctgggtctgacgcgggatgatatacatctggatgaaaagggtatcagcactgattatgtttataaggggagagcgaataagtatatacgtctgacgataggtaaatcggagtatgtgaccaaacgtgcgggctattactggtttctgtcttttatcaggctcagggacgacatcgttaactatctggtttccgcagataactttcctccggtacaggcgctgtttctgagtgagccgcaggtgaaattccgtaagctttattctcttaatcccagtcatctgactaaattttctaactctgagggggcgtgggccacgatgcggcagcttaatccctcgcttccatcaattaccgtttctggcttgcgcaaaacgtctgagcagtatacggacagaacattaaagaatggtctgattacggcggaaaaagcacagcataactggggcacttacaggcggaattatgctgcaggtaacccacagggggcgaaggaaaacttcagtgctgcacttgatacgcttatgaatcaggggattgcgacacgtgcgttatccgagcgggtaaaagttgctgatgagctggggatcgatctgcgtggaagcgatgagggtgtggatcttttattgaatggcctgggatgtcgatcgcaggagccgcctacagatattgaattgcgctttataaaaaagcaaaaacgatttggccggacaccaaaggcttgtgcggatttttctcattgtgtcgaatgttcaaaaagttgcgttgtggaaacgctggagtctgtatggctcctgctgtcattcaggcatgctatcgagtatggaaaaccgttgtacatcggttcggtcaatgctgtggagcgttatgaaacgttactcctgaagattgatttacggcttgggctggtagatgaggcgatcctgaaaaaagcgcgcgttaaacttcagcgagaaggtgtggctccggtatggcagatttga

SEQ ID NO: 225318 - DNA, 2118 bp, Klebsiella pneumoniae; identical to SEQ ID NO: 127351

SEQ ID NO: 225319 - DNA, 429 bp, Klebsiella pneumoniae; identical to SEQ ID NO: 26632

SEQ ID NO: 225320 - DNA, 630 bp, Klebsiella pneumoniae
atgagccgtgagcaggggcaggagctgttgctggaggtgatgcgctacacccgcgcgctggcccaggagggcgttaccctgtttggcgtcggcgaactggggatggccaataccacgccggcggcagcgatcgtcagcgttttgaccggcagcgatgcgcaggaggtggtcgggattggcgccaatctgccgctggcgaaggttggcaacaaggtggaggtggtgcggcgggctatcgccgtcaatcagcccgacccgaatgatggcctcgacgtactgagcaaagtcggtggtttcgatctgctggggatgaccggtgtcatgctgggggcggcgtcctgtgggctgccggtggtgctggatggctttctctcctacgcggcggcgctggcggcgtgtcagatagcgccggaggtgaaaccgtatctgatcccgtcccactattcggcggagaagggggcgcgtatcgcgttggcgcacctgggtctcgaaccgtatctcaatatgggcatgcgtctgggagaaggcagcggcgcggcgctggcgatgccgatcgtcgaggcggcctgcgcgatgtaccatcgcatgggcatgctggcggcaagcaatattgtgttaccgaaggggtaa

SEQ ID NO: 225321 - DNA, 1614 bp, Klebsiella pneumoniae
atggcaacggattccaatattttccagttagtaaaattatcagaattgttaattagtgttaaaggtaaaaaaccatcaaatttagggggtaaaagcgcactaagaaaaatcccatacatagatataaatgcttttgaaaacaaagtgttggattttttctgctctgatgagaacatcgtccgctgttccaacgccgatgttttaatggtttgggatggttctcggtgtggctatgtaggtatgggaatgaacggagctttaggctcgacactcgcatccttatcaatacctttagtggaacaaagatacctctattattttctgcgctcgaaatttgagtacttaaatacaaacacaagagggataggtatcccccatattgatccattatatttagggaatatagatttcccgttaaccaccattgctaatcaaaaattaatagcagataaaatttcgactctatacgatcatattgatgatggtattgaaaaagcaaaatctgcgctcgaaaaattatcagctttatggaaaaacaaaatttctgatgccattactgggaatgttacgaatgagtggagaaggaataataaattatttaaattattagaaagtgacctcgttagtattactgaggaacttacggattcattttttccgtccttgcccaatgattgggcttatatcaaattagacaatgttctcgaaagtgtaaattatggtacgtcaaaaaaatgtgcctacgatagcactgggattggtgtgttacgaattcctaacttaattgacggtgtaatatctgattctgacttgaagtatgcggttttttcagatcaagaaattgaaaagtttagtttagaaaaaggtgatttattactaattcgatctaatggtagtctctcattagtcggttcgtgtgcattagttgatgataaagacacaagttatctttttgcaggatacttacttcggcttcgtccgataagtgaatttatacatccaaggtttttaatgtatctactagcatcgcctatgttaagaatgcaaattgaaaatgtagcgaagtcaagtagtggtgtcaataatattaacgcccaagaaatacgctcgttaattatacctatttgttctctagaagaacaaatggaaatagtaaatattcttgatggtataaaggatagtatcaaatctcagcaaaactatttgaatttacttattgataaagctgggttaactaaaaagaatatcttggaagaagcttttactattgggtttgaaagtcaacctattgaaactagtgatattgataaatatattgataatataaaaactacgaaagctaaactaattgctgaagcgaagaaacgtaaaccaaaggcaataagaaaaaatatgacaaacctgtctattcttgagattttaagacaatctaatgaaaaaattactgttaaacaattattctcatcctcaaaatacaataaggatgtttctcctgagaaggttgaggctttttatcttgaattaaaggatgcaataaatagtgggaaaattatcatcgaagaagttagagagaatggtttaaaaaccggggatttgataaagtttaaggaataa

SEQ ID NO: 225322 - DNA, 1653 bp, Klebsiella pneumoniae
atgaaactagataaattatgggtaagtgagttcaaaaatctcaaaaatatcaccattgactttgatcaaaatgaattggtaacagtgataattggctggaatggagctggtaaatcaaatgttattgaagcgctagttattatattcagagacttggatttacattatccacctgctttctcatatgacctagaatatgtatgcagaggacggaagatatatatagaagctagggttaatgatgataaaaaagatcgatacaaaataaaatgtcatccaattaataaaccaaatgagagtaaaaatctcagtaataaggagttttttgaagatggagataagaaatatctaccaacaaatgtctttggttattattccggcccaagtgatcggctggctactcacttttatgaacatcagcgaagatttagagaacaattgatttaccctgaaaagttcaatctaaatgaaaatactctaccgctgcgtccgctattctatgcgcaaaaggttcacagtaactttgtattacttgcattttttttaagtgaagatgaaaaaattaaaaagtttttaaaagaaaaacttttcatcgatggtctagaatctgtaatgtttgtgataagtaaacctgattggaaaagcagtgaaggagatcctagattctggaatgcaaaaggtgttgttcagccatttcttgaacgactttatgaggcatctcttgctcctatggatataaaatttacactgccacatcctttgaagaaaaatggtgagaatgtcgatgcattgtttctctttttgaaagatctcgatgcgttaaaaaatgtaggtaatcatacttcagataaagatttttttaagttattagaaagtatatatttttctagccttatccatgaagtacagataagagttaaagttaatgagaagaatggtactaatgaacttcttacgtttagagaactaagcgaaggtgaacaacagttaataactgtattaggacttttaagatttacaagggatgatgaatctctttttctactcgacgagccagatacacatttaaaccctgcgtggagtatggaatatataaattatttagaagaagtggcaggattcaacctcgatagaaaggaatcacaacaaaatgatggttctaaacaaaagattgaaaatagtcatatagtgttagcaactcacgatccggtggttatttctacactaaaacgtgaacagatacagattatgaaaagagatgaaaatactcttgaagtatatgctcattctcctctttatgaccctaaagggatgggcttttcaggtgtgctgatgagtgatatgtttggtctcagatcggacctggatcctaaaactttagaaaaattagatgagcatgctatattacttgccaatgagaatcgtactgctgaggaagaggttcgattcggtgaattgaaagaagagttagatatgttaggctttttagaagcatattctgatccatatttttccgcctttgtaaaagcttggggtagaagcgaaagaattgaccaatatcatcaggtatctctaactgaaagtacaagggatgaattatcaaaaatgagcgatgatattctttctgagttgaagcgtgaagaagggaactaa

SEQ ID NO: 225323 - DNA, 924 bp, Klebsiella pneumoniae
atgcattttatcgacaaagatgaaatagagattagattaccagatgattggcagaataaaattgatgaagtttggttatacgtgcaagaaaaaattcaagaagctgatgctgctgttagggttaaagctgctcaggaacaatggtctgatgataaattatcatgtgagttaaataaatcgattgcaagcgcgcgtaagaaggctatcaacgctaaaagtgatgtttgggggcaacttagcgagatcctctcggagttgtcatttggcaagtgctggtattgtgaatcaacggaacttagatcagataatccaattgatcattttaggcctaaaggaaaagttgctgaatgccctgatcatccaggttattggtggttagctttcgattggtcaaattatcggtattcttgcacatattgtaactctcgtagagttaatacagatactgctggcggcaaacaggatcattttcctattcttcccccttacacttggaataaaagaagagaagatgagtttatagaaaatcctatattacttgatcctactgatattgatgatgtgaatttactaacattcaatattaatggtgaagcatgtcctaatgttgatgataaaacatcacctttgtataaaagagctaaagaatctgtggatttgtaccacctaaatcatactcccaccaaaaatgcaagaaaaagagtatatcaaactgtaagaaggctcgtttcgaatataaatagtttgagcgcccagaacttcgaagcaaacaaattaactataaaagatttaaaaacgcaactacataagatgattagggtttcttgcccctcgacttcattcaattctgcagctagaatatatctccgggagttttataattctcatgcttgggttaaagacatgcttgataggggttattaa

SEQ ID NO: 225324 - DNA, 1482 bp, Klebsiella pneumoniae
atgtcaaagtttagcgttgcagatattgttaacagagtatgggggtatgcaaacgtacttcgggatgacggtattagcaacggcgattatgttgagcaacttactcttcttatttttttgaaaatgaatgctgaacgcgctgagtctggaaaaataaataaaaatgagatttcagaagcttggagcatgctgactacattgcagggtaaggaattattagagaagtattctaatcttattaagctttttggtgaaaaagatggccttttaggaactatattttaccaaactcaaaataaaattcaagatgcaagtaagttaaaaaaattgatatctttgattaattccgaaaagtggataagctctaatgtagatgttaaaggagctatttatgaggggattttacaaaaaagtgcagattctgagaaaaaaggcgctggacaatactttactccaagagccttgattgaagctattgtagaagtaatcaaccctaaacccaagcaaacaatagcagatccggcttgtggaaccggcggattcttaacagttgcacatgattacatttataacaaaataaatcaggctaacgctgaggaaatcagctttttaaaaaaacatactttcagtggaaacgaaatatcaaactctgttgcacgtttatgcgccatgaatctgtttttgcatgacataggtgtcttttcctttcctatatcagtatctgatgctttagaacggaaaccttcaaaaaaagttgatattgttcttgctaatccaccatttggtagaaagagctctttttctatcaataaaggtaaatctaaaaatgatgaaagatatgtcagagatgatttttgggcagaaactacaaataaacagtttaactttttacagcacatatgtagcatgctgaataaagatggaaaagctgctgtcgtttttcctgataatattctttttgaaggcggttcgggtgagaaaataagaaaaagttttctgtatgactataatttgcatacgatacttcgactgcccactggtattttctatgctcagggtgtcaaggctaatgttctgttttttgataatgccaatgaccttttatatcctaaaactaaaaaagtatggatttacgatttaagaacaaatattcacagaaccttcaagaataataaattgtctcgtgctgattttgatgagtttgtcaacttctattgcgctgaaaacttcaatagccgtaagagcaattggagtcctgatacgactaaaaatagtagtccagacggcagatggagagatttctcatatgaagaaattcttttgcgtgataaaaccaatcttgatattcaatggctgaaagaagaaacgtctgactcgctggtaatgcatacttcgtcagatgaattagttgaagatataattgaactactttcgtctgcattgagcgactttaagaaagtcgagaaaattattagtaaataa

SEQ ID NO: 225325 - DNA, 270 bp, Klebsiella pneumoniae
atgcgcaaatgcaatacaacagtcacttcattactgctgtccactccggcactagcggtagatggcggatttaacaaggcgaatgaaacactgagcaacacctcaaccggtctgctgggactggccgcagtcaccatcacgctggcaactatgtgggtgggctacaaggtgctgttcgatggcaagagcctgcacgacatgcgtaacgtcatcatcggcgcgatcctgattgtcggcgcgtccggcttcggtgcctactgggcgtcataa

SEQ ID NO: 225326 - DNA, 645 bp, Klebsiella pneumoniae
atgctttccaccactgcctttctggcactggcggtgcagtgcgccgccagtattcacccgtccacgtcacttgatgtcgcacgggtcgaatccggtttccacccttacgccattgctgaaatcctgccagacagtcggggcgtgatttctcattttcccacgagcctgccggaggcgatccgcctcaccggacggctggcagcacggggcagacgctattcggtcggcctgatgcaaatcaccagttccaattttcgtcactatgatgtgaacgcccgcgatctgctcgatccctgcgtcaatctttccatctttgaacgcatacttactgactgttaccagcgtggtggcaccctgaaaagggcgctaagttgctattactccggaaactttgaaactggcctgcgatcagaatctgcctttaaccagaccagctatgtgcagcgcattggttatgccgttccgtccacacaggaagaccgcccgcgtgcttctgatagaaacgcgccgctacctgttcattaccctgccgttgtactgcgcggggagcctgccgatgcctccagggctgttctgacttccctgcattatcccaacaccgtcattcgcggcaccgttcctgttgccattcatgaggaaaaatga

SEQ ID NO: 225327 - DNA, 588 bp, Klebsiella pneumoniae
atgatcccttcactgaattacgccgtactcaccgatgccctgcaggctcttaataagggcaatattcatcactgtgaagagctcggtttcacgtttgatgaaatgaatgccctcagccagctctcgccggatgcactcttttcgctgagccgagctgccgtgccttttatgacggtctcggtgcgccacgatgttctgcatcagctgctggctcactctggtcaggaagaacagcgccgacaactgattgaccgggccatccgactgggcggctccatcgcactgctgaaccactattttggcctcacctccaatgaagtctgccttcgccgtcggttgctgggtgtcaacgtgccgtatggcaggactcctgaaccggatgaaaagacagatgcggctatttggctgcaatggcaacaatgccgggtagacaatctcgaatcacctgacgcactgattgctatgatgcaggtaacagaagccctgctgccaaaaggcgaaggattgtcactcaccacggtctggaagcgtatcgagctatgcgaacaggacgctgccgatgacaggaggacgccacatgccggatga

SEQ ID NO: 225328 - DNA, 477 bp, Klebsiella pneumoniae
atgatcggagtagtaaggttttcagaaccaatgaagcactgggaagcaatttctctaccagtatcaagaagcatctatgagccaatgcggtgctcaaataaatacctctatcacaacccttgcaatataaaagatttgttggctattgaattctctcaacaggaatcctacaaacgaaaatatgaaaattttcgccgtaaagatcatgtactagtacgccttattatttcggttcgctatcttattcatagagttttattttcgttatccctaacactattcagtaggttcttcattagtctctcagatactattctcctcatccatatttacgagagaaaatttcatagtgagctaaaaattagtttaaccattttatttttaaactattttctttataaaagaatatacatgtatgcattaccgataacatacaggaataataacacagtgaatcgtaatttaaattttgcatag

SEQ ID NO: 225329 - DNA, 141 bp, Klebsiella pneumoniae
atggattacatttccctaacctttcttctccataactctaggtggctaaatttagttagcaacctaacttgcctcttgacagaaagtttgtctatcctgactaaatcgaaccgtaccgttcgttttagtcaggagtcgtaa

SEQ ID NO: 225330 - DNA, 942 bp, Klebsiella pneumoniae
atgcgacatcataaatataaggccgtcatgaaatacctgccggtaataacaggcgtgttattactgagtggttgtcaggcggtgttactcgatcctaaagggcaaattgccattgagcagcgggcactgataattacggcattctgcctgatgttagtggtcgttattcccgtgatcctgatggcggtgatattttcctggaaataccgtgcctcgaataccgcggcgaaatatacacctgactggtctcattccaataaagtggaggcggtggtctggacggtacccgtcctgattatcctgtttctggccgtgctgacatggaagtccacccatgcgctggagccatccaggccactgacctctgtggtgaaacctgtcgagatagaagtgatttccctggactggaaatggctgtttatttatccgcaacagggtattgcaaccgtcaatgagattgtattcccggtaaacacccccgtgaattttcgtatcacgtccggttccgtgatgaacggattttttattccggcactcggcagccagatttatgcgatgccgggcatgcagacccggctgcatctgatcgccggtgagacgggaaccttcaacggcatctcgtccagttacagcggaagagggttttccggtatgaaatttaaagcgactgccgtaccggataataccgcgtttgaacagtggatcgctgatgtgaagaaatcaccgaatatgctgctcagtccggctgattttgaaaaactggctgagcctgacgaaaaccacccggttgagttcttctccgtcgtcgatccgacgctgttcagctacgtgactcaaaaattcaaaacattcaataaaggcgctggcatatctgatgaccagttcagggcccggaacaatatctctctttcagagagcaggggagttgatttatgtttttag

SEQ ID NO: 225331 - DNA, 1269 bp, Klebsiella pneumoniae
atgtctctcaacgacacgaaaatccgcagccttaagccttctgaaaaatccttcaaagtttccgattcacacggcctatacctcctggtcaatccaggcggctcacgtctctggtatcttaagtatcgaattaacggtaaagaatcccgccttggtttaggcgcttatcctgatgtatccctttccagcgctcggcaacaacgtgacggtatccgcaagttgctggcgcagaaaattaaccctgctcaacagcgtgtcgccgacagggcttctcgctcgacggaaacagcatttgaggccgtggctctgaactggcataaaagtaataagaagtggtcgcagaataccgcagaccgccttcttgccagcatgaaaaatcacatctttccggtaattggccatctgcctgtaacagaactgaaacctcgtcatttcattgacctgctgaaagacattgagaagaaaggtctgctagaagtcgcgtcccgcacgcggcagcacctcagtaacatcatgcgccatgcggtccatcagggatttatcgacaccaacccagcagcaaatcttgatggcgtgacggctccccccatgagacaccactatcccgccctgccgctggagcggctgcctgaactgattgaacacattgaggcatatcgtcagggccgtgaactgacccgtcttgctgtcctgctgacgctgcatctgtttattcgctccagtgagctgcgctttgcacgctggtcagaaattgatttcagaaacagaatctggacgatacccgccacacgcgaagccattgtgggtgtgcgttattcagggcgcggtgccaaaatgcgcactgctcatatcgtgcccctctcagaacagtccatcgctattctgaaacggattaaggaaatatccggggcttatgaactggtcttccccggcgaccataacccctacaggccgatgtgcgaaaacaccgtgaataaggcactgcgccttatgggatacaacactaaacaggatatctgcggtcacggctttcgggcaatggcatgcagcgccctgatggaatccggactctggtcaaaggatgctgttgaacgccaaatgagtcatcaggaacgcaacagcgtgcggatagcttatatccataaagccgaacatctggaagcccgcaaagcgatgatgcagtggtggtctgattatcttaatacttgccgggaaacctatgttcctccatatctatatagtaaaaaaattagccatgaggctacctga

SEQ ID NO: 225332 - DNA, 798 bp, Klebsiella pneumoniae
atgtttaaatggccctggaaagcagatgatgagtccggcaacgcagagatgccctgggagcaagcgcttgccattccggttttagcccatctttcgtccactgagcagcacaagctcacgcagatggctgcccgttttttacagcaaaagcggctggtggcattgcaggggctggagctgaccccgctgcatcaggcgcgcattgctatgctcttttgtctgccggtgcttgagctgggcattgagtggctggatggcttccatgaagtgctgatctaccctgcccctttcatcgtcgatgatgaatgggaggatgatattggtctggtccacaaccagcgggtggtacagtcgggacaaagctggcaacagggtcctgtagtgctgaactggctggatattcaagactcttttgatgcgtcaggctttaaccttgtggtgcatgaagtggcgcataagcttgatacgcggaacggcgaccgggccagcggcgtgccgcttatcccgttgcgtgaagttgccggctgggagcatgatctccacgccgcgatgaacaacattcaggatgagatagatctggtcggcgaaagcgccgccagtattgacgcctatgccgccaccgatcccgcagagtgctttgctgtcctctcggaatattttttcagtgcgcctgaactgttcgcgcctcgcttcccggccctgtggcagcgtttttgccacttttaccgccaggatccgctggcgcgtagacgtgagaatggcctgcaggacgaaggcgatcggcgcattgttcactaa

SEQ ID NO: 225333 - DNA, 324 bp, Klebsiella pneumoniae
atggcgctggccgcaatggacagcgagccggtggcgtggattcgtgaatctgcaattacagacactagtgatggtgcgtggaggcctattattgtgatggaaaataagcgtactgtggcgaatctgtctgagtcatggggtactagttacattccgctctatagccacgcgcagctagcgccggtagtgccggatgcatacgtgcgcgatgagagcggaagaatgatgcttaatggcgtctgcgagccgaaaattggctttggtacaggctggaacgcctgccgcgccaccatgctcgcagcaaccccgcaggaggtgaagtga

SEQ ID NO: 225334 - DNA, 696 bp, Klebsiella pneumoniae
atgactgatatcaccgaactggcgcaacgtatgaaggccgctgcagagaaagcgactccgggcgaatggtgggccgacgaagttaaaaacgaaggatgctacgggtctggcgatgactgtgtggatggattcacctcatacgcaatttatggctctgacgggcaaaccctctttgattctctcaacagtgacgctgcctgcatcagtgaggaatacgacggcgaggggcatgtggcatgggatgagacggcgcagcgtaatgccgaattcatcgccctggctaaccctgccaacgtcctcgcgctggtagaggcgctggagaaggcgcagcaggtagacgaagaactttgcaagcttctgccgccaggtgctgagtacatggacccaccagacggtggcgatatcacgccgcttgaaggagtacgtcgaatggtggccgattatcgccagcgcatcgccgagctagagaattacgcagaggccgaggcagtcggggcggacaaagttgcagaaaacgctgtgtattggatgaagcgctgtaaagaattggagtcccgcaccgtgaagctaccacagcgtcacagcatgctgcttcgagaagacttcaatgaggattatcacacagaaatggcctacaaggcggatgaagtacaggcatcgctgtccgccgctggcatcaaggtggaggctgagtga

SEQ ID NO: 225335 - DNA, 1077 bp, Klebsiella pneumoniae
atgagcatagttggagattatttctttgagttccctgcgtctcgcggcgttcagggcggagcgattgtccttatgatgacagtgccagcacgaaccttggcacgcgtcctcgccagtgataattacggagatactttagaacgctcacagcgtgaaattaacccagcgcgtgctaagaaattctatgaatatctggttaatgctcacgaaaataaagagcccttcattatcccaccgctggtcggtaactgtaactctgagattgagtttcaggaattcggcaataccaacgttggtgttgtgcgcttccctatggatgcagaaattaagctattcgacggccagcaccgtgcagctgggatcgccgaattttgccgcacagttggcgaaccaatccacgtaccactaatgctcacacataagctctcgttgaaaacacggcagcagttcttttccgacattaacaacaatgtttcgaagccatctgcggctatcaacatggcctataacgggcgcgataagaacgcgcaggagatggtcagctttatcagttcacacgacgtcttttctgaagtcaccgattttgagcataacgtcgttcccgcgaaaagtgataagtgggtgagcttcaaagccctaagtgatgccacggcaaaattttcaggttcctgctcaaaggatgatcttgaaggcttgtggaatgcgtggctaatgctgactggtttagatgatattcgccaaggtacgaaccagacagagtacaaacgtgaatacatccagttccatgcagtgatgattaacgccttcggctacgcagtgcagcggttaagcgaaggccggggagttcgcggggtcacactgatgattgaggacctggtaatgaataccggcattgccgagcgcgaagattttttcctcatttcatcatgggacgggatttgtgccagctgtgagaaagccaggccaacggtcattgcgaatgtatctgctcaaaaggcggctgcagcacatctgatggatgccatcgtgaataaaaacttgtctgttagccgcggtaaggaggccagccatgactga

SEQ ID NO: 225336 - DNA, 786 bp, Klebsiella pneumoniae
atggctaaagactcaaagctggtatatggcgcgagtggcaaaacgaacgttttgacgttcgaacctgaaaacctgcacctggttaccgacaaaacgcacccgctttacgatgagcgtatccacctgcctatcagcgaggcaatggtgctgaacatcatggaccagggcgttcttgagccgattatcgtctggaaagacccggagacagggctgtcttgtgtagtcgatggtcgccagcgtgtgcgccatacactggaagccaacaagcgactgttgaaagagggtaaagaaccgttactggttccagcagtcgctaaacgtggctccgccgttcgcatggcgcaggcgatggtaagtgctaacgaaatccgccaggcagatacgccgctaggccgagcaaagaaaatggctgatgcgctggagcgcgggcacgatgaggatgatttagcgctgatgtttggcgtgagtgtccagaccgtacgcgcaactctgtcactgctggatgccacccaagctgttcgcgatgcagtggagtccggaacggtcaccgttacacaggcgcgtcagttggcatcgcttaaacccgaagagcaacgggagaaggtcaagcagatcgagacagcaaccgccggcaccacgggccatgaaaaagcccggcgacagcgccaggttcttggtgaagcaaagccgcgtatcaaatcacgcaaagaaataacaaaagcccttgagggtgccagcggtgaatacgctgatgctctgcgctgggtgcttggggaggcggtatga

SEQ ID NO: 225337 - DNA, 300 bp, Klebsiella pneumoniae
atggctaagaccgcaaaacaactgattaaacaggcgtacgaaatagccaaaactatgccaccagaacagtcagcaatcatcaaggaactggctaccgtcctcgatgtttcgaatgtagctctgcgccagacgcgcaccgaacgtgacgcccttctcgcagaggtcaaatcatgggcgaaagagtgtgatcgtctgaccgagcgacacaccaagaagcgcacaaatctgcatgtcctcgaagcaatgcgcgacttgaaagcaatttgccccaccagcttccgtaacgtggaggctctctga

SEQ ID NO: 225338 - DNA, 2109 bp, Klebsiella pneumoniae
atgagcacatataaaacgaaaaatcctttaggttccgccgccgtaaaggacctgtacgataacgctgaaaacgtggataaattcgttaacgacaggacaaaagaggagttagaggaccggttaggtgtgcttcgcaaaacctggcacggcatggagatgatcttcagccgctttatcgactacatcactggtcgcggcgagcaggcagttgcagccatcggctggcaggagcttggcaactgggctgttggtctggctgtagataatcgccagcaaatcgtctactacaatggctcctggtacaaataccttggtgagcttgaacacgtcattgccggagattctcctgagaacgatggcggtgtgtggtcggctgcaaaccccacagggaaatggtcgaacatcggtgacgcggctcttcgctcaaacctgggttcaggcgaaggctttgctttggtggggcaggtatcatcatttactgctctgcgctctgttgttccttcatatgaagggcaaagtattttattgcgcgcccatcctgtcggttgggccgcaatgtctcacggccccgttggtggcggagaatttatttcaaggcgaggctcagctgaggatgatggtggttatatatgcgtgccaacaggtcaatctgagtactactggcaacgcatcccaaaaaaccccggcaaagtctgcgcgacagagttcggtctttatgatggtgctgctcttgacgacatctggaccagtgcaattaactattgcattaagaactccattggttacttctcaaccccgtcactggggcctgccgggtatacgttagttggtgggctggagttcattaactcaactaacgggcttatcattgaaggccccggaatgggaacgaagggcaacattccagtaattacccataccggcgcaaacgtcgccctgacgtttaagcgtactacgcaggctcagagcctttttaatgcggtcattctcaaaaatttcacagtagttgggaatgctctcgctactgcttttgtcaggttttctgatttttatggcggttcagtatttgactccgtaattcgagattacactactggaacagcaatagatgtatacaacgacaaaggatggactgaagttatcagggtagataatgtcgtcgtcaggacgtcacagcgtgggatctggttccactcaaaccctgcatctactgacgatcaaacgctttcgttttatggcgccagcatttccaactttggcttccagcacggaatcactgcggcgtcatatggcatctatgtcggtgacggctcacgcgcagataatttatataactgcgatatcgacatgatgggatggtgggaggtcggcggtaacagcacggcactttatgcagctgataaagcgcgcgttgatggttttgccaacttccgatacgacggttttgccgcaagcccaattacatcaagctctcaaccatgccgtcttgtgaggaaggctggtctgacaggctacattaagctgaattgtaaaaattacaagcaccaggctggtcttggattaacttctggagttacgcaattaacgatccgtccgtggctggcgcttgcagaggcagttgctggtgtggctacgccgcatccaactctccctggtgagtcaataatctctacagccggattgaagtgtaagctggaaggtaccctgtttaaggggcagaactctgtagtatctgttgttgggttgcctccattccatcgatacaaagtgacattgcgctgcggattgtcgagtaccgctcagcagcaatatattgttaacattccaaatggagctaacggtggcatcaccacccgcacggattcagttccttctgtcactaccagcaccgccacgacaataagcggcaccaccgcaacaagtgtatcaaactcaacggcgaagaataaaaacttcgagccagtatttattactaatgctggaaatcttcctgataatacatttagcgaaacaaataagcagggattcgatattcatctggatggcacacaatcaaacgttgttaatgatgagtatcctgtatccattgaaatcgaagctatcgattga

SEQ ID NO: 225339 - DNA, 270 bp, Klebsiella pneumoniae
atgtcattcaccctcacgcaaaatttgaagtcgtttcgtaccatcccatacctgaatctcgttgagccgcttagtgccgcgcctgtagctgtgacatataccgcaaaaggggtcgacagcatcaacgggactaccgcgacggtgctgtttgatacgcaggctgaggggctggaggctacaggtcagctctactactctttcgagtttactgaccttgcaacaatttttgaggatgcagaaacggcactaaaaaaagagatttcagagtaa

SEQ ID NO: 225340 - DNA, 549 bp, Klebsiella pneumoniae
atgttgattggctacgcgcgggtgtctaccggcgatcaaaacctcgatttgcagaaaaacgcgctggttcgagcagaatgtgagcagatttttgaagacacagcgagcgggaaaaacgccagacgccctgggctgaggcgtgctattcgtcgtttaaaaccaggcgattctcttgtggtctggaagctggatcgccttgggcgtagtgttcgtgaccttatcactctggtttcagagttgcaggataaaggtattcactttcgtagccttacagacagcattgataccagtaccccagcaggccgctttttcttccacgtcatgagcgccctggcagaaatggagcgcgaattaatagtggagcgtacccgagccggattagccgctgcaagggagcaggggagagtcggcggccgccgccgggtaatgactgaagaagtggtggagcggtgccgccgaatgctggagaacggcgctacccggcagcaggtagccgatgtgataggtgtagacgtgaaaacaatctacaagtacctcccggcgacttga

SEQ ID NO: 225341 - DNA, 1593 bp, Klebsiella pneumoniae
gtgctagtatccagcaacgttaccatgcagtttggcagtaagccgctgttcgaaaatatctccgttaaatttggcggcggcaaccgttatggtctgatcggcgccaacggcagcggtaaatcgacctttatgaagatcctcggcggcgatctcgaaccgacgctgggcaacgtttctctcgacccgaacgagcgcatcggtaagctgcgtcaggatcagttcgcctttgaagcgttcaccgtgctggatacggtcatcatgggccacggcgagctgtgggaagtgaagcaggagcgcgatcgtatctacgccctcgctgagatgagcgaagaagatggctacaaagtggccgacctggaagtcaaatatggcgaaatggacggctactcggcggaagcgcgcgccggcgaactgctgctcggcgtcggcattccggttgaacagcattatggcccgatgagcgaagtcgcgccgggctggaagctgcgcgtcctgctggcgcaggcgctgttttccaatccggatatcctgctgctcgatgaaccgaccaacaacctggacatcgacaccattcgctggctggagcagacgctgaacgatcgcgacagcaccatgattatcatttcgcacgaccgtcacttcctgaacatggtctgcacccacatggcggatctcgactacggcgagctgcgcgtgtatccgggcaactacgacgaatacatgaccgcggccacccaggcgcgtgagcgtctgctggcggacaacgccaagaaaaaagcgcagattgcggacctgcagtccttcgttagccgcttcagcgccaacgcctctaaatcgcgtcaggccacctcgcgcgcgcgccagattgacaaaatcaagctggaagaggttaaagcctccagccgtcagaacccatttatccgcttcgagcaggataagaaactgttccgtaacgcgctggaagtggaagcccttaccaaaggctttgatgaaggtccgctgttcaaaaacgtcaacctgctgctggaagtgggcgaaaagatcgccattctgggcgccaacggcgtgggtaaatccaccatgctgaaaaccctggtaggcgaactgcagccggacaacggcagcgtgaaatggtctgaaaacgcgcaaatcggctactacgcgcaggaccatgagtacgagttcgaaaacgacctgacggtcttcgaatggatgagccagtggaagcaggaaggcgacgacgagcaggcagtacgcagcatcctcggccgtctgctgtttagccaggacgatatcaaaaagccggcgaaggtactttccggtggcgagaaagggcgcatgctgttcggtaagctgatgatgcagaagccaaacatcctggtgatggacgaaccgaccaaccacctggatatggagtcgattgaatcgctgaacatggcgctggagatgtatcagggcaccctgatctttgtctcccacgaccgtgagtttgtcagctcgctggcgacccgcgtcctggagatcactccggaccgcgtgatcgacttcagcggcaactacgaagactacctgcgcagcaaaggtatcgagtaa

SEQ ID NO: 225342 - DNA, 1302 bp, Klebsiella pneumoniae
atgagtcaaggcctcaacaatgatatcgccgtcagcaaaacgcgccgggtagtgaaaaacctgcgctggtgggtgctggtcctgtttttacttggcgttaccgtcaactacatcacacgcaactcgctgggaattatcgcgccggaactaaaagcgaccctcggcattactaccgaacaatactcgtggatcgtcggcgcgtttcagctggcttacacgattttccagccgctgtgcggctggcttatcgacgtcatcggcctgaagcttggctttatgatctgcgccaccctgtgggcgctggcctgtatcgcccacgccggggccggtagctggctgcacctggctatgttgcgcttctttatgggtggggccgaggcggccgctactccggcgaacgccaaaaccatcggcgaatggtttccgaaatctgaacgcccgattgccgccggctgggctggcgttgggttctccatcggcgcgatgctggccccgccgatcatctacttcgcccacgcctccttcggctggcaaggggcgtttatgtttaccggcgcgctggcgctactgtgggtagtactatggtgggccttctatcagaccccggaaaagcaccccaatctcagcaaaagcgagctggagtacatcaaacaggataacgaagccccgccggtaaaacagcccttctttaccgcgctcaaaaccgtctcgaaaaataaacgtttctacgggatcgccattcccgcctttatggccgagcccgcctgggcggtgctgagtttctgggtgccgctgtacctggcgaaagagcacggcatggatttgaagcagatcgccatgtttgcctggctgccgtttctcgccgccgatctcggcagcgtggtcagcggctacctcacccgcctgtatgttcgctggttcggctgtacgcgagtgaactcggtgatcgccagctcggtaaccggcgcgttcctgatgctctccctggccctcgtcgccatcacccgcgatccctatatcaccatcatcctgatctccattggcggcttcggccatcagatcatctcctgcatgctcagcgcgctggtggtggagtctttcgacaagggacaaatggcgacggtcaacggtatgcgcggctccgcagcgtggatcgccagcttcttgttctcgttattaatcggggtgaccgccgacaaaatcggcttcaacccgctatttatcgccatgggattctttgacctgattggcgccgttttcctggtggcatttattgctgaacgtcgcgccaagcgcgcctga

SEQ ID NO: 225343 - DNA, 798 bp, Klebsiella pneumoniae
atggcaaataaatctactcctttaaaattatttcgcacacattataaagtggctgaagttgctaagatacttagttgtgaagaagaagatattttgtatctggccggggagaacgattttttgttctcagcctatgtaggcagggagggtaacttctcaaagcatcgagtaagaaatataagtgaatttattaatcatattgattcattggataaggacgatgagggttatagttatattagtcaatatagcctcataaaaatatatgaagtaaaaaaagataaaaatttagttattgcacgtatcaaaggttattttaaatatccgccaaaagtccaaaaagactttatcttttttagtggtcaatttccagattacccttcacttctcgttccagctgggaaagtgttttcaaataatgttaaatttatccagatggactggaaaaattcggatggcttttttttggagcatgatgggtatcttgaaagcgaggacgttcgaaagcttaataacatcattaataatgagtcatcgtctgctgatgtatataaaacgctatcaattgctcaacaagagcgacatgcagcaaaaagaaatcaagttttgagtgtggccatttatctttataaagaaaattcgaatgttaaaaaagacaacgctacagcgttaacagagcttatcttcacccgagccgatgaattttggcctgataagaaagaacctccgttgtctttcgcagtaattagtaagttgatttcaagtattttcaaaaaacctgtttttacaaataattaa

SEQ ID NO: 225344 - DNA, 201 bp, Klebsiella pneumoniae
atggcgctcactgatactcgccctagtgcagactcactaattgatatgaagtatatcacctctgattgcttgtttactgataagtggatttataagctgatctctcttggtaaattcccgaagccgattaagttaggacgtatgtcaaggtggcgtgctggtgattattatgcctggagagatagtcacacatctaattaa

SEQ ID NO: 225345 - DNA, 885 bp, Klebsiella pneumoniae
atgactaatatgacatctattaaactcccaatggagggtaaatccttttatccttctcttaaatgcgaacaagttacggtattagatacttataaggtcagtatcttcaatgaaggatatggtgattctgcatgtataataagaatcatcgagatctttatgttaaataaactgcgtcataaaggagaggaattacgttctttaacagggctaacaatccccgatacggaagcgactgccgatgaaatcaatctcttaatgagtcgacttgaggtgctatgtcagcgtgaagaagaagagttatccttccgacaaaaggatgttagctctgccgagtacgcattaaaaaatgcagggttgaatgttaactccagaacagtttctgaagtaaaaaacaaaaatgccgtgaaaggggcgcgtgatgcctatgaacgacagtacaattctgcatttttacgacagaaagagcagcaaacgcgggtaagtctcttcagaggattcggaagtttgttacttgaagaggctgaacatatcgggaagaacattagtaaaaaataccttaactcgttttccagaccgttaacttctcccgctgagtttattaacgttttaaacgatgcgactttagttcgggatgtgagatttatcttggatgctctatgtgcactggataatgcagttgagcacattcttaaatgttgtgcatacccaaatgaccgttacgaactggaaagaggtgggataagtcgaactatggcctatcgggagtactatcgcgctgaaaatgccattcttcgctccgtagtaagcgatcgtgaatatgcagagcatgctgtgaaatataatcagctctctgaatacaagaaaaaaatatttcgtaaataa

SEQ ID NO: 225346 - DNA, 1005 bp, Klebsiella pneumoniae
atgtacgcattcaaagccgaaaggccggacgctgcacgccgttatcacagtaaattcgtatctggtacaaattaccaggaatcttcaaatagacggttttcattaagcaaaccaactgaaaatattttgcgaagctcaattcttgagtctggttggttaatcaataatatcactttgcgtgacgttaatgctatttcaggtaatgccattaatattggagccagcgagttacatacaggacgggttcacggtggcagattccataagatgttagcgataaatggcactgaattttttctgtccgaaactgacacatgtgcacgaatcagctatttagatatgtcacatatttatcatacaggtgctcagggcgaatttgataaatcggtcagtgcgttttttagtcaggcttatgcacttgatatgttgcgggttggttttaatggagaatcaattgccgatacgaccgatccagagatgaataaaaaaggtgaagacgtaaatatcgggtggcatgcgctggcaaaaaactatcagggtggtcaacaagtcttaactactcctgtaaccctcggtgaaaccggggaatggaagaatctcgacctgcttgctaatcacctcattacagagctgattgccgaaccttatcgtgaagatccacgcttggtggttctcgtgggtgccgagcttgctgctaaacagcgacttaagctcttcaacgcggctgatcgcccggctgatgtggatgctgcgcaaatggcagtcagttcggttgccggacggtttgcttttatcccgccgttcatgccgggaaaacgtcttgcggtcactacgctggataatctgcacatttatacccagtcccgaacccgatcattccgggctgagtttgatgatgagaaaagtgaatacgttaattcttatcttcgcaatgaaggctatgcgctgggggagcctgagctttatgccgctgtggatgagagcgctgtaactttctccgactga

SEQ ID NO: 225347 - DNA, 573 bp, Klebsiella pneumoniae
atgtcaggatttagatggatgttcaataaactaaattcggttataaatttcttgcgccttgccaattgctcgggctatattcgcaccgttgccgcaaaatcggcaaccgggcgtggaaacccgtgtaatctgaaggcgacaccagacgcgccacgcgtctttttttgtgtccgtgtctttgcacacctattgcttttacagcggtttctttgccgttgtagctatcgagtaatggtggctcaggcggggctgacttcggtcaggccggtatccttcagagccggtatttccacccccgtctgggctaccaccagtgggcgtggaaactccggtggtagcgttaaccgctatctgaaggagattgccgccatggcttcgatccctacattgtcacatccagaatttacctttgtttttctcgcagtgcgccgtactgattatgccgcgcgtccattcgctgtgcgtactgttgcaacctgcgagcgtgctgcccgcatgaaactcgttgccgattttgtactgagcttcgccgcacgtattccgatgaacaatctcggggaggtgagcgcatga

SEQ ID NO: 225348 - DNA, 240 bp, Klebsiella pneumoniae
atgagtcatttacccatccctaaccacggttgcaccttgactgaagcaggcgagaaccgtcttttacgggctgcgctggcgagcgagttcctggccgaagttctgtcatttcctgcgatgagtgggcagagaacagtttctgctgagggagccgcagcaatcatggcctgtattgcagaacagctggagggtgtggtgagagaaaccagtaccattaaaggagaaaagcatgaacgctaa

SEQ ID NO: 225349 - DNA, 411 bp, Klebsiella pneumoniae
atgaacgctaatctcgtagtccattcacctgagtttcgggcggcatttctgcgttcctgcattgctgatgcctatatttccctgatgcagcggattaatggagaagctgtgtatatcgaggatggcgagcgtatcgagctgacacctgatcgtgtggccatgaatattctttatcatattgaagcaccctggattaacgaattcggccaggaagaggggcatcgtctggcatgtgacgttctggagcgaatgctgtcacccggttacatggctgaaaatattcgcctttccgcatttggtgtttctgagctacgtgaagtgtaccgggacatcgttttcggtgcgcccgatggagaagtacctccaggtttcagcattaccactgcgggagtcggggaggtactgttatga

SEQ ID NO: 225350 - DNA, 2436 bp, Klebsiella pneumoniae
atggtctctgaggttctggcattacctgaagtacaggataaacccgctatgccagccaggaaaaaggtggcgggaaaagagaccggagcagaccgctatcagaaacttaaaaagctgtctcaaaacggtgaatcagcttatctgaccggaaagggattgcagggttactctttaccgcttcttactgctgccatcaatctggcggggatgacttttccagccgggtcgctgctgctgcctttaactgacatcaccgggaatgttacaggcggtcagcttattaactctgatggtgataaaagtcttttacccggcagtcagctgtcaggtgcttttattgccgtggctgatgttccgtctgatgctccggaacaggtcattatcactgaaggatatgccactgcgttgaccgtcagcctcctggctgacggctggatcgttgctgccattgcggccacaaatttggtaaaggttgctgagcaaatccgcattcgatggccggaaacccggattatcctggctggagataacgatcttgtagacgggaaagagaacactggccgggtatgggctgaaaaagcggcgaaagccgtagatggttgggtaacgcttcctccggtacgtcataaagccgactgggatgattatcgtcaggaaaccgggaaggaaagggcgcgtgaagccttccgggaggaaatgacgttgcacggaaaagggcaaaccagattgccgcaggggttcaggctcacgaaagaatatttgtggtatgacaagctggtgaacaaatcagatggtgacacagagatccgcaatatcaagatttgcagcccgctgcgtgtgacagctatcaccagcgatgctgacggcagcaattatggccgcctgctggaatgggaagacaccaacggcattagccgaaaatgggcaatgccgatggaaatgctgggtggtagcggagaggaactgcggcgcgtactgctggtcaatgggctttcttatatcaatatcaacgggatggccagagcgcatctgatggaatacatctccctgtgcaagcccgacagaaaagtgacctgcgtaaataaaacaggctggcatggcggcgtttatgttcttcaggatgaagtgatcggcaaagagtcacagtctgtcattctccagacttccagcgttcaggggcgtgattttcgtgttacgggcaccacgaaagaatggcgggaaaatataggccgctattgcgtcaataatgcccgactggcgtttgccgtaagcctggcattcgccgcgccgcttctgaagctggttggtataggtggcggcggttatcacctgaaaggtgaatctacagacggtaaaaccacgaccatgaaagtggcggcttcggtgtgcggtggtacggatttctggcatacatggcgtgctaccgggaacgcgctggaaggaacggccagccgccgcaatgatgccacactgatgcttgatgaaatccgcgaggtggatggcagagaggcggggaatattgcctacatgctggcgaacggccagggcaaagcccgcgcccgaactgatggttcggtacgggaaacaaaccgctggaatttgttgtttctttccacgggggagctgtcactggtcgagcacgccgccaatgccggagagcgaacctacgccggggttgaagtacgcatgatccagatcccgagtgattcgggcaagcatggagtatttgaggatctgcacggctttagtggtggtaaagcgctggcggagcatctggaacacgccgttattctttatcatggctcacccttccgcgactggctgcattgtctgacagccgatctccaggaactgaccagccaggcgaaagcgctgctgaaggactacacccgcaggctgaccccagcggatgcaggaaatcaggttgggcgcgccgttacccgttttgcgctggttgctatggctggagaacttgccacacaagccgggataaccggatggcctgaaggtgaggcgttcagggctgctgagtgttgtcttgcctcatggatggctgatcgtgggcataccgcgaaccaggaggataaaaccgcactggagcaggtcagggattatatgacacgtaaccagttcagccgctttgctgactggcacgacgacaggaaccgcccactgtcgatgatggggttcaggaaagtggacaagggcgacaacgtgacagagtccactgtgaccttctacgtattgccatctggctggaaagaaatttgtaaagggttcgattcacgaaaggtggcccgattgtgtgttgaggcgggctggctgaaagccggggaggacgggagaacgcaaaacagcgttcgcctgccagaaatagggcttaagcgtgtgtaccagtttaatacgcaagtactgggtagcaccgatcccgaatag

SEQ ID NO: 225351 - DNA, 273 bp, Klebsiella pneumoniae
atgcgagtgatgaaaatttactgcccggagtgtatgtctgcggcaacggtgaggaaaacaaaccgaaagcaccccaaattatcagatgtgtactgttattgctcaaatgtagagtgtgggcatacgtttgtgatgaacgtttccttctcacatacgattagtcccagcgctttgagcggtcagggacggattaaagagctaatggatgccctgccaccggacgagcgacaaaaagcattagaactcctgttggcagccaaagagagccagtga

SEQ ID NO: 225352 - DNA, 981 bp, Klebsiella pneumoniae
atggaagataaagattacactgaagttagagagttttggaaaaatgaaattattgcgtttcttgctttaacttgcctaaagggtgttgggtattggacgcttcgcaaaatctatcaatcaaaaattggatttaagaatatattaaaagataatacggctgatgctttggctggatatctaagagtctctttgccaaaaaatatatcttgggaaacattccaacaagatctttggatgaaggggttagagagagcccgtgaacttaataaaagtggcattgttctgacattttatgatcagacaacatttcctcaatcattaaaaaatataagcgatccaccattttggatctttgttcatggtaatcatgatattcttaataagaaatctgttgcaattgtgggtacacgaaagccaacggatgatggtatttttttagtaaagctaattgtggcttcgttatattccaaagatattgcaacagtcagcggtttggcgacaggaatagatcaatgctgtcattatgaatcgctgagatatggtatcccaactattgcggtattgggtaatgggattttcgttgaatatccgaaaggttctaaagatttatatcgtgaaatagtctctaatggtggggctattgttactgagtatctgcctgaacaaacatatagtgcagaaaattttgttaggcgtaatagaattcaagctgctttatgtgattctctagtaccagtcgaatggaagattaaaagtggaacatcccatacagttgaatatgcttttaagtatgcgaaaaagatagctagtccatatcttcctactacttatgaaagtagacctgaattgaagtttgctgaagaaaatagaaattctttatcttttttaatgccttttgaattgaatgagatgagtgattatattttgaaagataatcatgctttaaaagcacagccgacacagcagagcttagatctctaa

SEQ ID NO: 225353 - DNA, 1230 bp, Klebsiella pneumoniae
atgagcaaaataaagggtgtaattcttagtgttgaagatactctcttgcctaaaggaaagatcgatagcgaaatctttgctgaggtagataaactaattagatattttagagttaaaaacattgagtttgtagttttcactaacagggcttgggttgttggggagcaacgaacccctttagaggatttgttacaaaagcattggggggagtttaaatatctttgtcgagctaaagataggagtatcccaggaaagccaactgcggatgctacaaaatatgttcttgatttgatgggttgggaaagcacagaaactttgtacattggtgcttcgataaacgacatgcaaacagcagtcaatggtgagttactctttttaagagctacatggtgggcagacaaaacagattacggcttcgagttttcaactcctaaagatattgctagatttatagatacgttctgtttgagggagcatctttggtgccatgaaattcacgatggcgattttaatttctatgcccttgctccttttagcacaatgaaggaagagtatactctttattctgaagatgctcgtgctgctgcaaaacatggattaggccatcctgagttttggactagcgccttaatatccagtctctattttagtggcattcacaagatgattaattatgtaagtgtctatccggggcataaggaaggacatgggaataatatcatggatgaagctatttcaattttcgggaaatgttttcgcaagacatatatccctgatctcatattaagacataccacttctcaaaaatctcaaaaagcgagaaatgcagggattgcaattgaccactgtaatcaacttaatacaatttgtcttaattctcaaccgcatagaaatccaagaactacctataaaaaaccacctttaggccctggtaaaacagtactgcttatcgatgatataacaactcgaggctacagttttgagtcggcaagagcatatatacagaaaacaggggcgaaagttatccttgtttcttggcttaaaactattaatactgatatctcaacattaggtgagcttcacgattttaatccctatcaagctaatcatttcgataatgttccattgggtaaatcacacagctacagagctaatattgttgatatccttgcccctgctgagctcacccgcctgttttctgcctatcagcagtgggattggcctgcttaa

SEQ ID NO: 225354 - DNA, 1158 bp, Klebsiella pneumoniae
atgagcagaatttttaaatcactcattaccagtgctggtcgggaaaagatagccgctgcaatcgttagcgggggtaaggttgttttttcccagatgtctgtcggtgatggtggtggcaggccaactaccccaaatgatgagcaaagctcattagtcaacgagctgtttcgaactcagttaaacagcctgaaattatcggataccgagaatataatcattgctgaaatgattatcccgccagaggtgggtggttttaccatcagagaggcagccttgtttgatgacgccggtgtttgcgtggcggttgccaatgtcccggaaacgtataaacccgcactggccgaaggttcggggcgctttaccattctccgtatctggctggcagtcagcagtactgaggccgttgagctggttgttgatccggggattgtattggctacagtagaggatgttatcaacgccaatagcgaggtcaaagactatacagacaagcagctagacgagcatgccaaatcaagagaccaccctgacgctactctgacgaaaagggggtttactcaacttagtaataacatcaacagtgacgaccagacaaaagcagcaacaccacaggccgtaaagctggcgattgaatatgccattcgtgaagcatgggagctggataaccctgtcggcacagtgaagttttacgcgcagaacgttgaccccaatgaacgctatccctggactgagtggaagtataccggggataaaaaaactatccgcgtgggcagcgccagcggcgctgatgtgggcacaaccggcggcagtgatacggtcagcatacaggaggcgaaccttccggcagtgcaaatcaacgtcagtggcgaaatcagtgaccacccggcgcagacgctgaccacaaaacctgccggtaagcacaagcatggcggtgtggccagtcgggaaaacccctgggagattggcggtgatatcagtcagaaatttaaccccgccaacctgggcgatacggatgaagtggacgatcacgatcatgaaattgtcatcccggaacagcagcatgaattcagcggtaaaacggacaacctgggaggtggcacggccatcagcgtcgttgaatctcacatcctgcttatgtgctggagccgtgttgcctga

SEQ ID NO: 225355 - DNA, 159 bp, Klebsiella pneumoniae
atggttatctggaagtggggtaattttatctacccatacgtaatatttagttgggggacggtaatgcagcaggtttttaattctgatacatggattgcagttttgattgtttcaattattttaggtttcaggttttatgccatgaaagatttggagtga

SEQ ID NO: 225356 - DNA, 2034 bp, Klebsiella pneumoniae
atgaccagactgccagaatcctcattgtgggaagaagagattgagcttatttccagaagcgagcgcgtttctggagggctggacggcgttgcaaaccggccattaaaaagcctggctaaccgtacgcggtatctcaaagaccgggccagcacaacagatgaattgatcgccgaaaaagtcagtgcgataaagacctttgcagacggcgcgacgctggaatcaccgcgcgaagagattttgtatggcgcttaccgccttgtatggaccggggaatttccaaaaattgttcctgcggcgtctaagccagaaaccacgggtggggtgggggccggaagctgggcgtacacttcagacgcagctattcgctcaaacctggcttctcttgagggttttagcctgattggtcaggtatcgtcatttgccgaactgagttcaattaccccccgaagtgttggacaaagtgtattattgcgcgctcatcccgccgggtgggcggctatgtcacatggccccgttggtggtggagaatttattgcccggaaaggtacagccgttgatgacggtggctatatttgtgttcctacaggtcagactgcgtattactggcagcgtatcccaaaaaatcccggaaaagtatgcgcaacagagttcggtctttatgatggggcgatccttgacagaattttagataacgcagtcaatttctgcattaaaaactcacttggttatctttctgtcccggcgcttgggcctgcggggtataccttaataggcgggctggagtttattaactccaccaatgggcttgttattgaaggtccagggatgaccacaaaaggccctgggccgattataacgcataccgggaacaatatcggtatgacatttaagagagcaactcaggcgcaagggttacttaatgccgttgttctcaaaaatttcaccgtgtcagggaatgccctggctaaagcgtttgtgcgcttttccgacttttacggtgcatcagtgtttgattctgtaatacgtgattatacatttggaacaacgattgatatttataatgacataggctggactgaaactgttcaaatcgataatgtcatgtcccgcacatcgcaaaaaggtatctggtttcattcaaatcctctatcaactgactggcagactgtatccttttttggtgcggttatcagtaactatggttttcagcatggaatcggtggtgcttcatatggaatatatgtaggggacggctcgcgtgctgacaatctttataattgcgtcattgatatgacgggttggtgggaggccgggggaaacagcacggctatttatgtcgcagataaagccattttagaaggggcggcggaattccgttacgatggttttgccgctagcccaatgcattcttcaactcaaccctgtcgactcatccgtaaagacggatacgcgggacatgttaaattaaactgtaaaaattataagcatcaggcgggtatcgggctgacggtgggagtgacttctttgactatccggccgtggcttgcgctgactgagtcgctggctaaccttgccactccacacgcaacgctgccgggagaacacataattactacaccgggcctgaaatgtaaattgaccggcaatatcatccagggtcaggattcagttgtgcaaatccgtagccttccagcgtggcatagatacaaagtgacgctgcgctccggcttgtcaagtaccgcacagcaacaatatattgtgaatatccacagtgataataacgcaggaacagtaacccgcacggactcagtacctgaagctactaccaatgctgtgacaggtaccagtaactacagcacgaccttatcaaataagaatttccctccgttttatctgcgtaatgcgggtggtcttcctgacaatacattcagtgaatcataccgacgcggttttgacctggtgctgaatggaactagtgcgctggttacagaggcacttgtacccatatctatagagattgaagccatagattaa

SEQ ID NO: 225357 - DNA, 594 bp, Klebsiella pneumoniae
atgaatagcctgttaccgccgggatcgtccgcgctggagcgcaggctggcgcaggcctgttctggcatcagcgatttaaacgtgccgctgcgcgacctgtggaacccgtggaagtgcccggctggtttcctcccgtatcttgcgtgggctttttctgttgatggttgggatgagggctggagtgaaagagaaaagagaacggttataagtgagtcgttccagctccatcagcacaaaggaacgatagccgcaatccgccaggtggttgaaaaaatgggctattccttctctatcgaagaatggtgggaggtggctgacccggcaggaacgttccggcttgaagtggatgtgaatgatattggtatcacatcccaaatgctggatgagctgacccggctgattaacgatgcgaaaccggtcagtcggcatcttgcgcaattcaatatatccacaagggtgcgcgggaatattcatgtcggctcaacactgtgcagtggcgacattatcagtatttatcccgcagattatgaggcggaagaaaacattacttacaacggcgtgattttccacgacggcaattttaactacgggtaa

SEQ ID NO: 225358 - DNA, 675 bp, Klebsiella pneumoniae
atgtttaatgtggtccgccctttgcaagttccggaaagtttgatatctcaaagaacgtataaaagtgaagatgttattgtcgctttaagagctatgtttcataataagtgttatctatgtgaacaagattctttagctgatcctgaagttgaacacttcattcctcatgataatgatccattacttaaattcggctggagtaatttatattatgcttgtagacgctgcaatggaattaaaagtaattcacatgtgaacttgctggattgtacattatctaatggcaatgtttccgatgatattattcattttgctggcaatgcagctgtaggagaaattctgattagggcgagcaataataatccatcccccgaagttattaatacagttaaattgcttaatgattgttttaacctagagaatacaagccttagaagagtctcgaaagaaagtttaatggaaaagctacttgttgaattaggtcgctatctgcctcttagagatgttctagcaactaggttaagctctcaggatgacattcagttagctaaaaaaagtttggcaataatgtgtgctgataactaccctttttcaatattttggaagtggcatattttaaaagatgtgcagcttaggcaacggtttccagatttgagagtagagcttggtttttaa

SEQ ID NO: 225359 - DNA, 1233 bp, Klebsiella pneumoniae
atgataaatataatgagcagaattagccagttgactgatgaatataaaagaaacattgaattaaatgggaagaatttaattatagttggtaataatggctctggaaaaactctttttcttagagctttaaatgaacatttaagtgagatagttagggagcaatatgttactacaatagcagagatggaaaagaaattaaacgaacatacttctgcagtgaaaaattttcaggttgatactgacggatataatagtttcatgagttcagttattgggattaaggcacgcctcgaaaaaaagaaaaaatatgatgttgtgtttgcttcgacaactgatattgtaaaccgcctaagaaaaaatcaattcattcttaagttttttaaagcaaatagagagtttgtcagttctgatgagaatcatctaacaagtgttgaaaacctgtataaaacatttaactcttcgacggtaaatgaacaaaatacaagtaattattttgaatcgtatttagtgtcaatgtcaaattacgcattacttgaaaaaggtgccggcgaaattgatgaatacaatagagttaattttattcttaattcgattcaagctgatttgtgtgatttatttgaagataatgatcttatattgcgctttaatagaaaaaaactcaagatggagattattcaaaaaaataagataccatttgggttagatgagttaccatcgggttttgcatcaattttagctgtatatgctgagttgattatgttatcagaattaagtaagcaggataaaaatgaggtgacgggtattgttttaatagatgagatagatgctcatctacatgtaacgttacagaaaaaagtatttaatttctttgcaaatagttttccaaatatacagtttgtaatttcaacacattcaccttttgttgtacagtcagtatctgatgctattatttacaatttaagtaataatgaacagatggaggacttgtcaatctattcgtatagttcaattgtcaaaggattacttggcgaagcaacaaactccgatgatttagaaggtttgcttgcggaagttggagtattgtcaaaaagtaacgattttggtaatagatttgatgagattatggagattctggaatctaaagtcaatgtgttagacccaagagctaaagctatttatttgggggccaaatctcgtatggtggattggcgagagggggagcagaatgtttaa

SEQ ID NO: 225360 - DNA, 537 bp, Klebsiella pneumoniae
atggctaacaccaactgcatcactgtacttacagcacgcggcatcaacgaaattctgagtaccggggggagtcaagcatggagactagatgctagtcatgcagccaagcacgaatatctagtttgtgtacaaaattcgaaggcggactggggaacacaagaagccaagcatcaccatgcatttatggtcggtcgaatttcgggagtcagcagagctccagaaaatcctcaccgctggatcattaatattgattcttatgcggaaattgaccttccggaacaatgggatggtaaccgaaaccccgtttcttaccgtaacctcgaagacattggcatcgagccaggcaaactggaatttaaagctgttccaaaattatctccgactaatgtaatcatcggaaaagcaggtgatgagtacgaagaagtagaagaagaacaagaaagtgtaaaaccgttaacacttaaagaagcaaaggctgggctagccctctattttggtgtcaatgaagagaacattcaaataaccatacaaggttaa

SEQ ID NO: 225361 - DNA, 189 bp, Klebsiella pneumoniae
atgcaggactattttttggagtcgttgaagctccagcggattgatttttttgtgaagcttgtagctgctagtaagtgtgacgatgaagaaaagcagctggctatccagtgggtttctgagttgacggatgagctgatggcaaagattcgtgctcatgaatacagccgctccatggatcttcccagttag

SEQ ID NO: 225362 - DNA, 231 bp, Klebsiella pneumoniae
atgatgcgcaaagcgtgtattgaacttatagcggggactaatgccgcatgcctagttgcaggcgaactaggcactggtcgctgcctttacctggttgtagtaatggaagacatattcggtaagcctacaactgaacaatggcttaaatccctaagactttgcgaggccaaggcagttgaacttaagtatgaagttacccgcattcgcggccagagtctggccggtttgtaa

SEQ ID NO: 225363 - DNA, 633 bp, Klebsiella pneumoniae
atgatacaggtgaaggctggcgagaatacagggggtagagaggctatccataggttgatggctgcctatgatttcaagtccagacagcagctatgcgatcacctaggtgcatctaaaagcaccatggcaaacagatacttaagggacagcttccctgcagaatgggtgattcaatgcgctcttgaaacaggagtttctttactctggctaactacaggacaaggcgaaccaggaacaaaaattgatgataaaaaaagtatcaatttcgtgaactccagcaaggtgaaacctctttctgagcttgtatcgccagagatcgacaaagctagccttataggaggttcgttggttgaagctgggaaggccatcattgatagcagcctacttccccctgactcaagcgagctgcttcttgtaaataccaatggcgattcatatttagttgaccgtaaccagacaccaccagtgaatgggatgtggttggtcgatatcgacgggataaaaagcattgttaagctaactcgccttccgggaaacagattagttgtgcatcaagatgattcttcgtttgagtgcagcctggatgatatcgaggttgttggccgcgcattgaaaatcatcaagagcctttga

SEQ ID NO: 225364 - DNA, 1086 bp, Klebsiella pneumoniae
atgtctataacgaaattcagtcgagttcagcgagaagctatctggaaagcatatggtaaaagatgcttttatactgatgaagtacttttacttgatagttttgatattgaacatataattcctgaaaatattttagaacgaccagatgaatggattgaacttaaaaaagaactggggttagacgacggttttaatataaatggatacgaaaatttagttccagccaggcgaaggattaatggtaataaaggggcgacagttttacctaagcgggcgttaatgtattttctttctttctctatggaaaagaaaaagattgttgaggtttttattgaggactttgaaaagcaatctggcattgaaaaagcaaggcacttaatagctaaggcacttgagtgcaatgaagtgacaaaaagtgatgttgtaaactttgtggatcaagcccgttttggttttactgaaatatcaaaaaatatattagcacaatacccagagttagaatttgatttgttcaatgctgaagtgtttagtgaatttaaaaagaaggctatatctgagccggtgacattggttgacagttctgggaatgagttgattgtttcaacttgtgaagattattcttcatgtatcaacaagggttatgcagaaaagaataattttgatatcaaaatagcttcgaagttaaggtgcatttcatcacttattaatttcatttctgctgcaagcactccttctaaaagtcttatccatcaacttggactttgtgatatatcaatgatgtgtgcttctatgtttccagatctttctggagaatgtaattataaaaataaatataaaacctatcaggggttggtttcaaatggcaacgcaaaaattatgtcagtcgggactggatttatacatattgaaaataatttgatggggcaatatatcgttgaagtttgtcgtgggtgctttgatgataaacaatatgagcagatacttgtttttgagtattcatatgcgacagaaggtactttttcatatgctaatgcaaggcttatttcaagattgcgaaaaacaagtaaaatggcttttgtagattaa

SEQ ID NO: 225365 - DNA, 900 bp, Klebsiella pneumoniae
atgcaacactcagagatatgtcggacattaacggagaagattaacctgctgaaagataagcacgaaatgttaagttcgttgctgcctgacgtccgtttgctgtacggaacgcaaccggggccccggacgccggtgatgtatcagccggggatcgtttttctcttttcgggccataaaattggttatatcaatgagcggacttttcgctacgatacaaacgaatatttactgctgaccgtgccgctacctttcgagtgcgaaacctttgccaccccggaggtacccctcgccgggatgcgcctgaacgtcgatatcctgcaactgcaagagctgctgatggatattggcgaagatccactgtttcagcccgcggtcgcctccagcgggataaactccgcggtactctcggaggatattctgtgcgctgccgaacggctgcttgacgtgatggagcggccgctggacgcacggatccttggcaagcaaatcgtccgcgaaattctgtattatgtgctgacggggccctgcggcggcgcgctgttggcgctggtcagccggcagacccacttcagcctgataagtcgcgtgctcaagcatatcgaaagccagtacaccgaaaacctcagcgtcgatcggctggcggcggaagcgaatatgagtgtgtcagcgtttcaccataattttaaagcggtgaccagcacttctcctttgcagtatctgaaaaactaccgtttgcacaaagcacgaatgctgatgatccatgacggcatgaaggccagcgcggcggcgatgcgcgtgggatatgaaagcccttcgcagttcagccgcgagtttaagcgctacttcggtttgacgccgggagaagacgccgcgcgtattcgcacgatgcaggggatgtaa

SEQ ID NO: 225366 - DNA, 1035 bp, Klebsiella pneumoniae
atgatcagaattatagggtgctcgctctgctcgatcaccgagcacgaaggacgcataatccagagccgttctgaggattcgatcattaatgagatcgaagccattcgcgacaccgtgcccggctttaccggggtgatctccgatctcggcgggccaacggccaacatgtatatgctgcgctgtaaatcgccgcgcgctgagcagacctgccgccgtctctcctgcgtctatccggatatttgcccgcacatggataccaaccatgagccgacgatcaatctttatcgccgcgctcgcgaactgaagggcatcaagaagatccttatcgcctccggggtacgctatgacatcgcggtcgaagatccgcgctatatcaaagagctggcgacccaccacgtcggcggctatctgaagatcgccccggagcataccgaagagggaccgctgtcgaagatgatgaagccgggaatgggcagctacgaccgctttaaagagctgttcgacacctattcgaagcaggcgggtaaagagcagtatctgatcccgtactttatctccgctcatccggggacccgtgatgaagatatggtgaacctggcgctgtggctgaagaagcatcgcttccgtctcgaccaggtgcagaacttctatccgtcgccgctggcgaactcgaccaccatgtattacaccggcaagaacccgctgggtaaaattggttataagagcgaagaggtggtggtgccgaagggcgataaacagcgccgtctgcacaaagcgctgctccgctaccacgatccggcaaactggccgctgatccgtcaggcgctggaggcgatgggcaagaagcacctgattggctcccgtcgcgactgcctggtgccagcgccaaccctggacgaaatgcgtgaagcgcgtcgccagaaccgccatactcgtccggcgctgaccaagcacacgccgatcgcccatcagcgccagacgcctgccgctgcgggcgcgaaaaaacgcgttaagccgaaggccgtatcacgctaa

SEQ ID NO: 225367 - DNA, 330 bp, Klebsiella pneumoniae; identical to SEQ ID NO: 119089

SEQ ID NO: 225368 - DNA, 2745 bp, Klebsiella pneumoniae; identical to SEQ ID NO: 156463

SEQ ID NO: 225369 - DNA, 855 bp, Klebsiella pneumoniae; identical to SEQ ID NO: 119518

SEQ ID NO: 225370 - DNA, 300 bp, Klebsiella pneumoniae; identical to SEQ ID NO: 119517

SEQ ID NO: 225371 - DNA, 642 bp, Klebsiella pneumoniae
gtgtttaaatctttattaatcaacaaaacagatggacgctatagtgcgcaacttgctgaaatcgctgaaagtgaactaccgcagggggatgtggaggtcaatgttgactattcatccatcaactacaaagacgcactggccattacgggccggggcccaatcgtccgacgctttcccatggtgcccggcattgattttaccggtacagtgtccgccagttcacatcccgaatatcaggccggagataaggttctcctgaccggctggggtgttggggaaaaacactggggcggactatccgaaaaagcacgggtaaatggagactggctgacgccgctcccggctggcgctaacggcaaacacgtaatggcaatcggaacagctgggtttaccgcgatgctgtgcgtagacgcacttctgaatcatggtattaagcctgaagatggtccggtacttgttaccggtgccagcggcggcgtcgggagcattgcggccatgatccttgcatcaatggggtaccgcgttacggcgtctactggacgcccggaagaggctgcctggctctataaaacggtcggtgtggacgagattattaaccgttccgagctctcctgtcccggaaaaccgttacagaaagaatga

SEQ ID NO: 225372 - DNA, 579 bp, Klebsiella pneumoniae; identical to SEQ ID NO: 181696

SEQ ID NO: 225373 - DNA, 420 bp, Klebsiella pneumoniae
atgggcaaggcgccggcgaatggtctcagcgaggcgcatgcggtgggcgtttacagccgggtcgcagtgtttcaggatgaaagcggccagaaaggacacagtcaggtgctgctgacccttcgcacagagaatacgcaggcgctgccggcaggcgagttcgatcagtttgagttgccgttctgtaatggtcacattctggtgcctgatccgggctatggcgcccccgttgtttttctcaacaatgtactcggcctggggttccgcttccgggaaggaacctgctccatgcactgctacactgtggaggacgcccggctcggggctacccagacactgacggaagtggcggaagcgctcgtcagtaatgttgatgctcctctgcgggcctacgctgcaaccatcccggtaaatcagaggtag

SEQ ID NO: 225374 - DNA, 801 bp, Klebsiella pneumoniae
atgacgggcctcattaaccagcctcaagattattcagcaccacatttgccggtgtccatcgattaccctgccgccctcgccctgcgccagatggcactaattcaggatgagctacctaaatacctgctggcgccggaagtcagcgccctgctccattatgtgcccgatttgcaccgcaagatgctgctggcaaccctctggaacaccggcgcgcgtatcaacgaggcgctggcgctgacccggggggatttttcgctggcgccgccgtatccgttcgtacagctggccacgctcaagcagcgcaccgagaaagcggccaggacggcaggtcgtgcccccgcaggcagtcagatccatcgtctggttccgctttccgatcaccactacgtcagccagctgcagatgatggtggccaccctgaaaattccgctggaaagacgtaacaagcgctccggcagaatggagaaggctcgtatctgggagataacagaccgtaccgtccgcacctggcttagtgaagcggtggaagccgcagcggccgacggggtgaagttctcagtcccggtgaccccccatacgttccgtcactcctacgcgatgcacatgctgtacgccggcataccactgaaagttttgcagagcctgatgggccacaaatcaatcagctcgacggaggtctatacgaaggtgtttgcgctcgatgtcgcggcgcgccatcgtgtgcagttcgccatgccagaagccgatgcggtagcgctgatgaaacaacccacgggaatatctgcggcagcgggccagtaa

SEQ ID NO: 225375 - DNA, 717 bp, Klebsiella pneumoniae; identical to SEQ ID NO: 181688

SEQ ID NO: 225376 - DNA, 810 bp, Klebsiella pneumoniae
ttgaccaatgtacaggcagatattcaggttgatgccgggaacaatgcctggctgctgacgcttcctgaggtccgcatcgaaggggagttatttgaggagtgtactgtcgtcgccctccggactctgaaagattcctggtaccaccctgacggggagaattattccggtccccgtacgctggccggccgcgaatgtcagataagtcttttctggaatggcggaggatgggggaaggagcagacgtttgttgcccgctatacgtcagatctctgggatcgcaccccggaactggatctcactggaccggatttcatactggaaaaggtaataaagggacgaggtgttggctcatgggtaatgcagcagcttatctgctgggcaagaactctgccggcagagactccagtcaagagtatatggatttcccctaacgatgaagtaaatccggaaaacatgacaaggcgggacagcctgtggcacggagttggttttcgtttccgggaaggtgggcgacagtctctgccattgcgtgtgagtgaccttcagctgcctaaaggtcgtcactcgcacctgacggccgtccctgtacacaagggggtgggcgagctggtctgtgtcagaaatgagcaaaaccgggagcttaagagactgaaagagattaggttacaccaggcagaacgtattaagtttctgacagaacgacagtgggatgtgctgctgattaaaggcgtttctgcggttatcctgtcacccatctggataccttgctggttattcgagagattatcaggacgaaataaacatggttga

SEQ ID NO: 225377 - DNA, 921 bp, Klebsiella pneumoniae; identical to SEQ ID NO: 181686

SEQ ID NO: 225378 - DNA, 996 bp, Klebsiella pneumoniae
atggcgaccacagtaatagctgcttttaacgaatttatgaaagataccgtgaacctcaacaaggaagatgccgatgacgcacatgcaagtcgcgactggcttatcggcaagattaatgactttgataaggacggaacatttccggtgaactatccggacatacacattcccttcggttcttttgcccgaaggactaaaatacgcccgcttgacgatatcgatctgatgctcgggttatctgcggaatcggcaacacatacgatatacagtgatcacataacgctgaattctaccggagaaaacacgcggctgcaccagtataggcatactggagaaaataccatctgttctgtaaggatcctgaacgcctttaagaaccgactacaaggtgtttctcagtacgcaaaggccgaaatcagacgtaatcaggaggccgttacgctcaatctgagcagtaaagattggaattttgacatcgtgccctgctttatgtctaacgtagatgcttttggtaagaattattacctgatccctgatggtaaagggcactggaaaaaaaccgatccccgagttgatcggaacagggtttcggaaatcaatgttaaaaatgacgggaatgtccttaacgtcatcagagcagttaaatactggcagcggcggcccacgatgcccacaatgagctcctatctgcttgaaacaatgatactggattattataaaaacaagacagactgcttaaagtatatcgatatggagcttcaggcccttttcaatcatttaggcctttttgttaagtattctgttaacgacccaaagggtattcagggcgatatcaacaccctgtcgatggaggatcgtcagaaaatttcggatagatgctatctcgatgcgcagcgggctgcggaagcgagacagttcgagagggataatgatcatgaaaaatctatcaacaagtggcaggaagtgttcggccctcattttccagcttacgggtga

SEQ ID NO: 225379 - DNA, 933 bp, Klebsiella pneumoniae
atgaataccatttatacaaaccagtcgaccagggaaaacctggatctgctttatgcacaggctcacatttatgacggagtaaagaactggaacaggttgaatttattcctcagcgtcatacttccggtaatactgtctgctgctgtagcgtacaaccgcagcaaaggtctgctcgataccgaattagcatcctcgttcctaggggtatatggtctgctagtattggcctttaatattgccttgagcagttatgcgtccaagcaacgcaggaaggcagcttctatacaggagatttatgactgcagggtgcttggtatccgacgtaatgagcttaaagtggaagaggttgcaaaggatgaaatcagccgagccgcatcatattttaagcaccggccggaaagagctgaccgtcgatttgggaaggaaggatggtatgtaagcaaagtgtatgacgccccacagcctgtgatggctctgctgtgccacggaaaaaatctcggctgggatcgctcactcagacagattcttcattgggtgtacttttgcgcagtcatcatttttccgacaggaattctggtctatggtattgccatgaaatctaggctgaacgaagtgctcttctatattgtcttcattctgcctctcattcgctacttcttgttacagtttatggataacctgagcagcataaaaagaagtgagaagttaaaaaaatacgttgaaaaggaattatcaaatataaaggtgtccggcagagtggattatgatacgttgggttacaccctgagaaatattcaggatgaaatcttctcataccgggcttcctgcccccctgcgcctaacgtatttcagcgcgctatgaaattcagaaatgagcaggtttatgacgattatttcgagttaaatttaaaagagctgcatttatctgattaa

SEQ ID NO: 225380 - DNA, 1227 bp, Klebsiella pneumoniae
atgaaattaaaaaacagtgctttttattttgataaagttgattctttatctaagtttattaacttttcaacgtttataatttcatgcctgtcgatcgctggaattttcttgaatgctcattggctctacggcattgctaccgtaacttttgtaatacaacttatcacttggttcgcaatgtattatagaactgatttttcagcaaaagctatcgcaacaaaaagattagaaatgttgagggggattataggtgaggataacttttatcgtgaaaggctttatatagatggagatgcggaagataataataataatgataactatgagaaattaactctcctcatacaagaaaacgcatactggaactctattttatatatcaaaattttccattataagctatgttatcttttagtaactatattgtcactaatattgattattattataatgtatgcatcagtgactgatggtttagattttcaatacagtagaacaatttttggtatattagtcataaataatctatataatttattttctgaagtatctggttcgcttagggctcatcatgagatgaaaaaaatagatgacttcatagaaatgaataaacaaaaatccccaaggtatctctcttatatttattcaaaatacgagcatgaaatattcatagcgcctagtattaataaaggaatttatttaaaaaacaatgaacacataaagcgttcatggaacctgcgaattaataacaaaaataacttccaggacgaaacatttatcgatgcagttacaggactaacatcgttactacaatccattacagatgagtggaatattactggaggggcaaatagatatttacgtggtgtccaaacctatgccaatgacattgatataatcacaacagaaaaaggagctaatgaaatatgcaaattaatcagtcaagatttcaatgggaacttatataaaacaacatcaggaaacataaaatcattttattttacctttgtatacaaaggtattgccattgaaataatgggtgacccagaaaataaagatgaatttggatggtttgaaaacaaaaaatggaaaaaaaaccaagaacacatctttttaaatggcattaaagtaccttgtgtaagcttagtttatgaaattgaaataaataaacaaattggtaattataatgcattcagagatactaatcttatggatttttataggtga

SEQ ID NO: 225381 - DNA, 522 bp, Klebsiella pneumoniae
atgaactttgatgccgtacaggttgatataaacgatattctttcagttaacagacgctacgttattccccgaaatcagcgggacttcagctgggaaaaacttcagcttgatgagttctgggatgatatcaaaagaaatgttcagtacgagaacgggagcttcagccatgctgagtacttcctcgggacagtcgttttgtctggcacaaccgacagttcaatgctggaaattattgatggtcagcaacgtctttccgttataactattctgatatcactcatttcaagaaagctcagatctctcaactatatagagagcgcggatgatatagttaatacctatcttgtgtcaaaagcatccatcatctcagcgaaagcacatctcacagaaaaaatatctaaaagcaacggccgtgatttttttaaacttaaatgtcagtcgaaagaagattgcaatccaaaggttaaatctgatgaagacgaaaagataaactacgcatacacttactttgaaaaaaattag

SEQ ID NO: 225382 - DNA, 921 bp, Klebsiella pneumoniae
atggtggatgtccaattttggatatattggagaagatcagttatatcgttcattcaagaaaaaatagctgataaaagcgcgaccgtcacaccggaatcatttttaagtcaaatggaaaaagattcatcgctcttttttaaaatatgtgaaccacaagagagtgactggccaggcctgaatcagaaaaaaatatacagaatcctgcgaaatcttatcacatttaacgtaaccattcagaggcctctggtactggcattactcagagtacgagaaaataaatccacagctaaatatcttagcgaatcatcactgattgagactcttcagttcatagaggattttcagtttaagtttacaacaatatgtaaaatgaagccttccggtgtagatgctatgtttgctaaatatgcagcagaagttgcatcagcaaaaaacaagcaggaaatgaattcaaccctttctaatatggttaaggcttttacagaaaaaatgccttccgaatcggtgttcatcgaaagaatggtcaatcatctatggtattccaggaatgcatcttcgaaaaagaaacggaataacacagaacttatcagctatgtttatcacagactcgaagctattaatcgtgggtctgaagaggtgatgttaaaagatacaaatcttgagcacataggtcctcagcattcttttgatccggattatgttggcatgatatggaacttaatacctctcagtgttgatattaatgatcgttgcggaaaattgccagttgacaaaaaaaacgcactatacggtgaatctgatctagcctgtgtccgagatttcataagtttttaccgtgcacatcataattgggataaagaattagtcgtggagcgcagtcagtctctggctcttaaactttttaataatatgtcaaaataa

SEQ ID NO: 225383 - DNA, 306 bp, Klebsiella pneumoniae
atggtcgaaatcaacaccttccgggagacgaggatgacagacaattttttcatgcgtgaatcagcaaaactgtccttagatgaaattatggcaaggctcggagaactcgaagacacttgggataacaatgcctcttatgctggtatttatcgtcagatcaaggagcagggtcttgagagtctcactgaaaagcagcactggatttatgagaatcaactaaaaccaatgagcgtagagaagtgcggatataatcgtacctgtgaaagaccttcatatccaggaagattctgcgatcttcatcagtag

SEQ ID NO: 225384 - DNA, 969 bp, Klebsiella pneumoniae; identical to SEQ ID NO: 220303

SEQ ID NO: 225385 - DNA, 213 bp, Klebsiella pneumoniae
atgagcaggcgtggcaactgctgggataatgcggtggccgaatcgttcttcaattcgctgaaaaaagaacggatcagaaaacgcatatataaaaccagggatctggcccgggcggatatcttcgattacattgaagtgttctacaaccggacccggcgtcacagccacctcggcggcgtcagtccggaggcctttgaacaggcctcgtcgtga

SEQ ID NO: 225386 - DNA, 363 bp, Klebsiella pneumoniae
atgacgatgtgtcgggtgttgtgcgttgcccgggccgggttttatgcgtggctgcataacccggtctccgcgcgggataaagataaccagcgcctgctgacgcttatccgtgactcctattcactgagcggaggcgtatacggttaccgccgggttcatggcgacctgaacgaaatcggggaaatctgcggtaaaaaccgggtgggccgcattatgcaactgaaccggattaaagccgtgcgcggctataaagctccgcgtcgtatcgctggccgaccttcagtggttgcgcctaatcgtgtgcagcggcagtttacacgttactgcgcaatcaaaacaggcggatcaacagtatcccgataa

SEQ ID NO: 225387 - DNA, 921 bp, Klebsiella pneumoniae
atgaaagcattccgaacggatgaactgtgggtgcatttgtactggctgacggtactcgctgaagcgggaagttttacccgcgcggctgatcggctggaggtcagcaaggcagccatgagtcagaaaatcaaagagctggagaatatggccggcacagcactggtgcagcgcactacccgcagcgtccgtctgacctcggcgggcgaaaaactggtggacaacttgcgtgatccttttgcgcagattgagcaatcctttttacgcattcgtgatgaaaccggcccggtgagaggcctggtgcgtgtcagtgcgccggtagcctttgcgcgccagcagctcgtcccggtcattggcgattttgtccgggagtacccacaggtcactattcagttggatgtcaacgaccgtctggtatcactgactcgtgaaggttttgatttggccatccgtcacagccagacacttccggaaacccacattgcgctgaagttgtgtgacacgcatgcggttctggttgcctcccccgcttacctggcgcaatacggcaccccgcaaaagcccgacgacctggagcggcataactgtctgtactatctgcgcggacaggaaccgccgcgatggcatttccacaaagtgacgggcagagaggaaaccgtaatggtgaagggacagggaaactttgccactaacaacagcgaatccgtccgcgatgcggcattacagggactcggtatcgccctgctccctgattttagtgcgcgcgccgcgctggctgcagggacactaacgcaggttctgcccgcatggcgaacggtagacgcatttgccgaaagcttatgggtaatacgtccgcatactgcgcaggttcctaaggctgtgaccacgtttattcggtggctgcgggcgaggtttgcggagtag

SEQ ID NO: 225388 - DNA, 279 bp, Klebsiella pneumoniae; identical to SEQ ID NO: 216764

SEQ ID NO: 225389 - DNA, 2571 bp, Klebsiella pneumoniae
atgattacaaaattcaaattatctccatgctgtttagctcttataagtatcggtgtgttaaccatatcttccgagctatatgcaagagaattttttaacccagcatttcttaccgatctaaacggttcagacgtgagtccggacctttcggcttttgaggtagcaaattctcaggcccctgggaaatatcgggttgacatcatcatcaatggtaccgttgtcgataccaaagacgtcgattttttttctacggcagaacaaaaagcaagctatcttaacgaggcgggagaagagcttaaactatacccatgcttatcaacagaggaattaagtgattatggtattaaggtaaaagcaatctcttcattaaaaacaaacgctaatggttgcgtcattatcagttccattccagaagcctctgttgattttaactttaacttacagaaacttgagttgagtgttccgcaggccgcagtatcctcgacggttcgtgggtatgtttcacctgatgaatttgacaatggtattaacgcgttctatttaaattatagatataatggaaccagtagctacgcacgagataacggattatcagatcaagagaaccatagtgtcaatttactgccaggcttaaatatcgggccatggcgtattaaaaactacactacgtggaataaagatagttatgataatgatagcaatggtaaatgggatactatctatacctatgctgaacgaaatattatttcactgaaaagcatgttgacattgggtgaaagcacttcggatgctgatatttttgatagtgtgccatatcgtggtgcgcaattaaactcagacgattacatggatgcggaaagtatccagggatatgcacctgtagttcgaggaattgcgaaaagtaacgcaaaagttattattaaacaaagtggatatgttatttatcaatctttcgttcctccaggggcctttgagatcactgatctgtattcgacaggtggcaatggggacctcaatgtcacgatcgaagaagctgacggcactcaacaaaattttgttgtagcttatgcttcacttccagtattacgtcgtgaaggtagcttaaaatacagcattacatccggccaataccgctcctccgacggtagcgttgattatactccgttttcacaagcaacggccagctatggtttaccatacaacaccaccctatacgggggattccaggctgcttcgaaatatcaatcagtggccattggcgtcggtaacaacctgggcgtacttggcgctgtttctttagacgtaacacaggcctggtcgacgaagcaagatcaagataagatatcgggtcaatccgtgcgtatacgctacagcaaaaacctgaacgatataggcacaaatatagctattgcaggctatcgttactcaacgagcggctttaataccctttcagatgttcttgaaacatatcgtgatgactataaatactactacaacgatcgcgttaaaaatagaactgaaattaccgtaagtcaaagcctcggtgataagttaggctattttaacatcggcggtgtaatggaggattactggaatcagcgtcgcaggaataactcacttaacgtagtttacagcaatagctggagcggtattacatataattttaactattcccactcccgctcctcaactgactatgagggttacggtagaaactattctactgataatatcttttcgttcaatatcaatgtgccattgaatttctggatgcctaacacctgggctacttatggtttaaataccagcgatcctggttcgacaagcaacagtgttgggctttcaggtcttgcattggccgataataatttaagctggaaccttcagcaacaatacgataatcgcgattatagtagcggaaccgctggtgttgattataaaggcacctatggagagatttttggtagttataattatgatcataactggcagcgccttaattatggtataaacggtggaattgtcgctcatcgtgatggtatcaccgcagggcaatcattcagcgataccagtgctctcgttaaagcccctggtgttaatggtactcgagtagtgggtaacaccggcgtaaaaactgactatcgtggctacgctatcgtacctaatattacaatgtatcgtagaaatgatgtggtattagatactgaaacgatgcctaatgatgttgaccttgacactacggtagccactgttgtcccaacccgaggtgcgatcgtacgagcagaatattcagggaaaaaagggatacgcgcgctgctgcagctagtggatacacataataagtttataccttttggtgcaatggtaaatcttgcttccgaaaattcgacgaataataacagcgggatcgttagcgacaatggtcaagtttatctggctgggttaccgacaacgggagtactgcttgtcaaatggggaaatagtatatctaaacagtgtacggtaaattatcagttccctgggtctgaaaaggtcaatggtatcaaacagggccagtttatctgccgctaa

SEQ ID NO: 225390 - DNA, 618 bp, Klebsiella pneumoniae
atgcgtaattacttcctggccattagtactgcttttgctgcaatttatagcccaagcattttcgccgccagcgggtgcgtggttattgatggaaaaacttatgagttgaatctagcatctatgcctattgatcctgatgtggatgttggaactgttttgtatacggcgagggttgatacttcaggtcctaaactgacttgtccattaaatacagcaaggggaaaatattcctctcaaatgcttggttcttttcaaacattagtgggtactaacgcttatggcaatatctatgcctccggcatagacggcatcggcatccaaataagagatctggaacaatctgcaaaagctgttccctatgaaaccagtatggattctggtgcactctactactggagcacagataaaaagacacaaatccagtttatcaaaacaggaaaaattggaactggcacaagttacactggcttagcagctcagttcaagttagattcctgggttgttgccaagatatctataaagaccaaggtggcctggataaccaaaagttgcgtagctgaaccgaactccaggatacagaatattcaactggggaaactgacctgcccccaggattag

SEQ ID NO: 225391 - DNA, 882 bp, Klebsiella pneumoniae; identical to SEQ ID NO: 86315

SEQ ID NO: 225392 - DNA, 333 bp, Klebsiella pneumoniae; identical to SEQ ID NO: 86316

SEQ ID NO: 225393 - DNA, 609 bp, Klebsiella pneumoniae; identical to SEQ ID NO: 86317

SEQ ID NO: 225394 - DNA, 309 bp, Klebsiella pneumoniae; identical to SEQ ID NO: 86319

SEQ ID NO: 225395 - DNA, 339 bp, Klebsiella pneumoniae; identical to SEQ ID NO: 86320

SEQ ID NO: 225396 - DNA, 351 bp, Klebsiella pneumoniae; identical to SEQ ID NO: 86321

SEQ ID NO: 225397 - DNA, 783 bp, Klebsiella pneumoniae; identical to SEQ ID NO: 86323

SEQ ID NO: 225398 - DNA, 279 bp, Klebsiella pneumoniae; identical to SEQ ID NO: 86324

SEQ ID NO: 225399 - DNA, 297 bp, Klebsiella pneumoniae; identical to SEQ ID NO: 86325

SEQ ID NO: 225400 - DNA, 2574 bp, Klebsiella pneumoniae; identical to SEQ ID NO: 86327

SEQ ID NO: 225401 - DNA, 702 bp, Klebsiella pneumoniae; identical to SEQ ID NO: 86328

SEQ ID NO: 225402 - DNA, 1038 bp, Klebsiella pneumoniae; identical to SEQ ID NO: 86329

SEQ ID NO: 225403 - DNA, 696 bp, Klebsiella pneumoniae; identical to SEQ ID NO: 86331

SEQ ID NO: 225404 - DNA, 888 bp, Klebsiella pneumoniae; identical to SEQ ID NO: 86332

SEQ ID NO: 225405 - DNA, 1134 bp, Klebsiella pneumoniae; identical to SEQ ID NO: 86333

SEQ ID NO: 225406 - DNA, 1002 bp, Klebsiella pneumoniae; identical to SEQ ID NO: 86334

SEQ ID NO: 225407 - DNA, 528 bp, Klebsiella pneumoniae; identical to SEQ ID NO: 86335

SEQ ID NO: 225408 - DNA, 363 bp, Klebsiella pneumoniae; identical to SEQ ID NO: 86337

SEQ ID NO: 225409 - DNA, 666 bp, Klebsiella pneumoniae; identical to SEQ ID NO: 86338

SEQ ID NO: 225410 - DNA, 3219 bp, Klebsiella pneumoniae; identical to SEQ ID NO: 86339

SEQ ID NO: 225411 - DNA, 1533 bp, Klebsiella pneumoniae; identical to SEQ ID NO: 86340

SEQ ID NO: 225412 - DNA, 423 bp, Klebsiella pneumoniae; identical to SEQ ID NO: 86341

SEQ ID NO: 225413 - DNA, 432 bp, Klebsiella pneumoniae; identical to SEQ ID NO: 86342

SEQ ID NO: 225414 - DNA, 717 bp, Klebsiella pneumoniae; identical to SEQ ID NO: 86343

SEQ ID NO: 225415 - DNA, 369 bp, Klebsiella pneumoniae; identical to SEQ ID NO: 86344

SEQ ID NO: 225416 - DNA, 267 bp, Klebsiella pneumoniae; identical to SEQ ID NO: 86345

SEQ ID NO: 225417 - DNA, 183 bp, Klebsiella pneumoniae; identical to SEQ ID NO: 86346

SEQ ID NO: 225418 - DNA, 207 bp, Klebsiella pneumoniae; identical to SEQ ID NO: 86347

SEQ ID NO: 225419 - DNA, 678 bp, Klebsiella pneumoniae; identical to SEQ ID NO: 86348

SEQ ID NO: 225420 - DNA, 498 bp, Klebsiella pneumoniae; identical to SEQ ID NO: 86415

SEQ ID NO: 225421 - DNA, 270 bp, Klebsiella pneumoniae; identical to SEQ ID NO: 86413

SEQ ID NO: 225422 - DNA, 792 bp, Klebsiella pneumoniae; identical to SEQ ID NO: 86412

SEQ ID NO: 225423 - DNA, 885 bp, Klebsiella pneumoniae; identical to SEQ ID NO: 86382

SEQ ID NO: 225424 - DNA, 1545 bp, Klebsiella pneumoniae; identical to SEQ ID NO: 86383

SEQ ID NO: 225425 - DNA, 516 bp, Klebsiella pneumoniae; identical to SEQ ID NO: 86384

SEQ ID NO: 225426 - DNA, 279 bp, Klebsiella pneumoniae; identical to SEQ ID NO: 86385

SEQ ID NO: 225427 - DNA, 1404 bp, Klebsiella pneumoniae; identical to SEQ ID NO: 86386

SEQ ID NO: 225428 - DNA, 2064 bp, Klebsiella pneumoniae; identical to SEQ ID NO: 86387

SEQ ID NO: 225429 - DNA, 663 bp, Klebsiella pneumoniae; identical to SEQ ID NO: 86388

SEQ ID NO: 225430 - DNA, 1014 bp, Klebsiella pneumoniae; identical to SEQ ID NO: 86389

SEQ ID NO: 225431 - DNA, 642 bp, Klebsiella pneumoniae; identical to SEQ ID NO: 86390

SEQ ID NO: 225432 - DNA, 267 bp, Klebsiella pneumoniae; identical to SEQ ID NO: 86391

SEQ ID NO: 225433 - DNA, 1194 bp, Klebsiella pneumoniae; identical to SEQ ID NO: 86392

SEQ ID NO: 225434 - DNA, 630 bp, Klebsiella pneumoniae; identical to SEQ ID NO: 119593

SEQ ID NO: 225435 - DNA, 1005 bp, Klebsiella pneumoniae; identical to SEQ ID NO: 119594

SEQ ID NO: 225436 - DNA, 903 bp, Klebsiella pneumoniae; identical to SEQ ID NO: 119595

SEQ ID NO: 225437 - DNA, 1476 bp, Klebsiella pneumoniae; identical to SEQ ID NO: 119596

SEQ ID NO: 225438 - DNA, 282 bp, Klebsiella pneumoniae; identical to SEQ ID NO: 119597

SEQ ID NO: 225439 - DNA, 1494 bp, Klebsiella pneumoniae; identical to SEQ ID NO: 119598

SEQ ID NO: 225440 - DNA, 474 bp, Klebsiella pneumoniae; identical to SEQ ID NO: 119599

SEQ ID NO: 225441 - DNA, 1125 bp, Klebsiella pneumoniae; identical to SEQ ID NO: 119502

SEQ ID NO: 225442 - DNA, 795 bp, Klebsiella pneumoniae; identical to SEQ ID NO: 119503

SEQ ID NO: 225443 - DNA, 876 bp, Klebsiella pneumoniae; identical to SEQ ID NO: 119504

SEQ ID NO: 225444 - DNA, 852 bp, Klebsiella pneumoniae; identical to SEQ ID NO: 119505

SEQ ID NO: 225445 - DNA, 837 bp, Klebsiella pneumoniae; identical to SEQ ID NO: 119506

SEQ ID NO: 225446 - DNA, 660 bp, Klebsiella pneumoniae; identical to SEQ ID NO: 119507

SEQ ID NO: 225447 - DNA, 582 bp, Klebsiella pneumoniae; identical to SEQ ID NO: 119508

SEQ ID NO: 225448 - DNA, 327 bp, Klebsiella pneumoniae; identical to SEQ ID NO: 119509

SEQ ID NO: 225449 - DNA, 1134 bp, Klebsiella pneumoniae; identical to SEQ ID NO: 119510

SEQ ID NO: 225450 - DNA, 1035 bp, Klebsiella pneumoniae
atggaagccgcgggctggctgcgcaccctgcgcgcgccgaacctgcagctggccgtcgagctgacggatgccggccgtgcgctggccgccccgtttctcgctgacgaacaggcgcgtgtcctggcggagcagcgcgcgacggcgatccgggttctgcctctggtcccgcctgtccaggcagatgaggctgacgaccggccggtggagctggatggtcgatggcaccgggcgttgcggggtgactacgtgatccgtcttgacggcaccacctgcctgcagctgtggaatgcggccgggcaggtgacacgcctggaaggcgatcccctgcaggtcgccacctggctgcagtcctgtcacgatgcggggattgcggtccgggtacagattaatgagagcgccacgccggaggcgggcacggtggacgttaccgcgccggcggaccagaccggcacctggtgccgtcagctggacgccgcgctgcaggcggaggggatcaccgggctgactgaggatattcaactggccgtggtcagtcctgaagcgtccctgcggatgctgccggcaccggcgcgcctgctgcacgttctgcgcgacgcggacccgctcactgctgccacatacgaggaagacacggtggccgcgctggctgacctgctggcccgcgcggggttcacggacgaccaggcgcaggagctgcagtggcaccgcatccgctggccgctgatgagtcaggaagaagctgaccggcgcgagctgaacagcctgctggatgagctggaacagcgacagctgtactgcaaccgcgggcagctgacggagattgtgttttcgccagttcgcaaacccggagagcgctggactgaacgtctgcagtggctcctgatgacggatggattcgggttccgcagtccgctgtcgcgtgaagcggcctcacgggcgctgactatcctggccggttacacgggacgggaggtggcggagcatctggccacggtgatggtgtggaacgacgccggaacaggagagaggccctga

SEQ ID NO: 225451 - DNA, 231 bp, Klebsiella pneumoniae; identical to SEQ ID NO: 177980

SEQ ID NO: 225452 - DNA, 267 bp, Klebsiella pneumoniae; identical to SEQ ID NO: 125559

SEQ ID NO: 225453 - DNA, 987 bp, Klebsiella pneumoniae
atgaaaaagatagtcattattgcttccccgggatgccttgcttcaggctataccgggctggctgatatgttctctcttgccggaagagccatatcagctgctcgcaaggagccgtcaccctttgatatcatgacagcaagtccggacgggcagccagtgaccgacggaagcgggcggttactgaccgccgatgcggcactggcagatatcaattcatgcgatgcggttctgatccccgggtttgtacccgatgcatcaaacacgccgccacagctcggtaaactgggcagcatagcgtcatggatacggcaacagtacgtgcatggcgccctggcttgtggctcgtgcagcggagtgtttatgctgggcgaggcggggctgctcaacggcagaaaatgtacgacaacctggtggctgtacgatgagctcaagcgccgttacccccgggcaaacgccatctggggcaatgctctgactgaggataaccgtatagttacggctggtgggccgctttcatggattgatgtggccttacacgttgtgcgtcagcttgaggggacggaggctgcgcgcattgcagcagaatttgctgtagtggatacaacgcctcccgcaagggctgtttatatgcccaccgcgcacctcagccggccggacagtattctgcccggtgcagaattttttataaggcaggaagcatcaacgctgcttaccacaagagagctgtgccggcgccttgccatttcggagcgaacctttcacaggtgtgtaaaggcggaaacaggcgagtcaccgaaacagtttatcgacaggattaggtgtgaaatggcaaggctggcacttgaaacatctgctaaaaccataaagcagatcgcagctgatgcaggttacgcggatgaaggcagtttcaggagggtcttcagccggatgaccggcatgaatccggcattataccgccgttgggtgaaagaccgtacccgggaataa

SEQ ID NO: 225454 - DNA, 306 bp, Klebsiella pneumoniae; identical to SEQ ID NO: 134005

SEQ ID NO: 225455 - DNA, 330 bp, Klebsiella pneumoniae; identical to SEQ ID NO: 86400

SEQ ID NO: 225456 - DNA, 534 bp, Klebsiella pneumoniae; identical to SEQ ID NO: 86401

SEQ ID NO: 225457 - DNA, 789 bp, Klebsiella pneumoniae; identical to SEQ ID NO: 86402

SEQ ID NO: 225458 - DNA, 423 bp, Klebsiella pneumoniae; identical to SEQ ID NO: 86403

SEQ ID NO: 225459 - DNA, 291 bp, Klebsiella pneumoniae; identical to SEQ ID NO: 86404

SEQ ID NO: 225460 - DNA, 564 bp, Klebsiella pneumoniae; identical to SEQ ID NO: 86405

SEQ ID NO: 225461 - DNA, 378 bp, Klebsiella pneumoniae; identical to SEQ ID NO: 86406

SEQ ID NO: 225462 - DNA, 285 bp, Klebsiella pneumoniae; identical to SEQ ID NO: 86407

SEQ ID NO: 225463 - DNA, 216 bp, Klebsiella pneumoniae; identical to SEQ ID NO: 133521

SEQ ID NO: 225464 - DNA, 486 bp, Klebsiella pneumoniae; identical to SEQ ID NO: 188300

SEQ ID NO: 225465 - DNA, 795 bp, Klebsiella pneumoniae
atgaaaaatactgcttggaatgtgttggtttatagccatgctgacagcgcgactactattcttattacttatgctaaaagtgtacttgttctgctaattgtaataattattacattttcacttctttcatatttcattgcctcccgtatttcacttcctttagaaaagcttgctatatctaccaatgctaaagatataggggcttcgttagtttatattaaagctatcaatgcttggtatgccgaagctgatcgacttaaaaaggcactttttacgcatgttaaggtaatgatggaaagggttgattctttaaatgaggtggcgcttaaagatccccttaccggcgtgaacaatagattggggttttcaactaaaatacagaataacaagtatggggcaggagcttcagttattgctattgatgttgatttttttaaaaaaataaatgatagtttcgggcatggggtcggagatgaggtgcttgtttctttggctcagattattaagtcttgttgccgtagtgaagatattatttgtcggtttggtggagaagagtttgttgtttttctgccgaatacatctgtggtaacagcggagtgtgttgcggagcgtattaggagtgttattgaacgtactgttttccctaataacttgcgtgtcaccgtatctgctggtgtggcaacacaagatgatcctcttggtgggatcgattttttgctgaaaaatgctgacgatgctctttatcaagctaagagagaggggcgtaataaagtgattgtatatagcgctatttga

SEQ ID NO: 225466 - DNA, 267 bp, Klebsiella pneumoniae
atgcgtaaagcccgttttactgagcatcagatcatcgctgtgattaagtcggttgaagccggacgaactgttaaagatgtctaccgggaggccggtatttctgaagccacctactacaactggaagtccagatacggcggcatggaggcttctgatattaaaaaaatcaaggatcttgaggacgagaaccgacgtttcaaacagatgtttgccgacctgagtcttgagaaccgggcgctgaaagacgttatcgaaaaaaagctttaa

SEQ ID NO: 225467 - DNA, 2892 bp, Klebsiella pneumoniae
atgacagcaaagctacccaaaatcagttatcccgtaccatcaaacaaaaatggtcatgccttttcctctgcggaagagttgttatcgacgctcggaggggaaagctcaggactgtatctggtgggaagtcagggaatgtggcatggcggtatccatattactgatgccactattccctggtgcgccctgagtactgacagcgaagctgagaatgaatattgtcgtgagctctataaaggggaacaatttattcgttgtatggcggatggtgagatagtggcctggcgcgtcagtaaggactatgagagtgctgcgattgaatggtgcggtgaaaaactgttcctttccacttcctttgtgctggtgaaacattatatccagccgggtgatatggaagagagcggactgacatttttcactctgtatatgaatctggcgccttatgctgcttatcaacaacagggaagtctgtctgacagaaaagtggcaggcgtccagcgctattataccagtgccgaagatgtgcaggcagagcacgaagccgggaaactggataaagacacgcttgtcacgctgagtgacgctattgtcacccgcagcagagacaggcgtcagtttactgaagtgaccattgtcagtgagacgaaaaatacagcaggagacacccttgtcgctggcactaaagtctggacggtgtctgaccggggttctctgaaaacgctggcatcagcgcccgttccgtcctggtgggcaaaatgtactccggcttacaccactcagccggaaggggtggtgaagtgcacctcacgtacaaactgggcgtactatctgagccgggaagatgtgctgcactataaaaaggccggcaggctggcggcaggtttcccgctttcttacgaacctggtaatacggcgcagcaggtcatccgcccgggtaaagaacctgacaaggcggcaaggacattcagtctggtcacgctgggccgggataaggatacgctgaaaaagggcgaccgggtatgggtggtgtcggatggtgacagtctgacgccggttacagtggccgcatccggtaatgagcctgtttttaatgatgtatatgtaccttcggcgcctgtatctgtcagtgccggagacagcctcgggcatatgggtttttatcagctaccggaagaaaacggcaaacgctcgcgctaccaggtacatatagagtgcctgagcatggatgatatggagaatttcatcaccaatcccggaagagtgggggaagatgcgccggtgtatctgacctggaaagccgatgccccactatctgacaagagcgataccggaataacagcgggcagtcgtaaaacaaagatatcaggtgttctgacgctggcaaaagtccctggcgttgatgctgaggggaatacgctgtccggtaatcaggatgcggcatattatcagatacgtcctgaaggtggctggctggccgcagccagtgttaagaaagtttcgcagtatgcgttaggtgagctcggatttgtcacgctgaataaggcttcggaaagttttgacctgattgatggtataaaacatccgaataacgtggtgaaggggattctggagcagttatataaagcggcagaggatgaaacccgtacatctcacgcgctgaacaaatataactaccagcgtctgctgacgttgatagacagtaaccaggacgggcattaccaggagcaggagtatcttcaggcggtacataatatctcttaccgcgaccgcctgtaccgtgtaattgcaaaacacgccagtgaatggtactacggcaaggatgacccgctctggaagacatacctggatacattaaccacggatgcgccgttgtggaaaacgtatctggaaacgtttctggataagatgacgtggatgaagacggtatacgaaaagggcgtggcgctgggggcagaaccctggcatatgcatcctattgcatttttggacatgttcaaagacgcgaaatgtgattgcgaagagctctatgctgataaatttggagtagtcaaatatggaactcaatatggcccactctataaaggtgggattacgttagccagctatacccgatgggatggtttggtttcatcgggcaagataacgtctgatgaaaaaacaatacttattgccatgtctgagaatgagggcaatatggatgcagtgcaatcatatgacagtgaagtcattactgcgggagctatgcagaaaacagtaaaagatcaggaaaatttagaagggaaaggcgagttatcaactcaatttgctaaatttagagatgctcaccctgatttatatgcaagttacgcgaaatcatgtggctggactgttgaagggacagggagttcagctgttatttattatagtgacagtttattaactcagggaaataaaataacttccacagagttaaaagaattattaaggcagggttgcatagaaaatacatacaaccaaaaagtacataataaacctcttgccgcacttgtgaaggttttgacattgcctgaatatttagatattcaagttttagatttcatagaaagacttcatagcgcagaaaataaagtggttttaagtgcgggaaataaaaaaataaaagattttattaaaagtaattttggaagagctgttgtcctggatcattcggttaatcgcccaggatatgtagcacctgattttagtaaagccatcgaaaatttccataaaaataacccaactgtaagtttagacccccagacttggggtaatgaaagtgcatcatatgaaagcaaacttctggaagagtataaattaaccaggagaatgaccaattcctcccttcgttttaatacattaaaggcaaagttatga

SEQ ID NO: 225468 - DNA, 2358 bp, Klebsiella pneumoniae
atgaggaacaggttgataaacgatgcaaccagtttggtaaagcaaccgccggggcagtcacgctaccggatagacgttcatggctgtacagaatttcttgatgtgctgaacttccgttctgtggagtccctcagtcatccctggcgatttgatatcgccgtgacctcctctacgccggatattgccagtgaagcggtgctgttaaaacctgcgtcatttacgttccagacaccgatatttaccggggcgccggctgttccggtgcgtaccgtctatggcgtagtggcatcgtttgaacggatatccatgtcaaaagaggattccgtttacgcgctggcgctggttccgcgcatcgcccttctggactatacgaaagggagcgaaatctatctcaatcagtcagtcactgaagttgtggaaaaggtactgcgtaaacacggtctggaagggcctgatttcgagttccggctttcccgcgaatatccgtcccgggagctcatcacccagtggcgggagactgaccttgagtttatccagcgcctgctggcggaggtgggtatttactggcgctatgaaatggacagccgacttgaacaggacgtggtgatttttcaggacagccagcagcagtatgaatttggcgtcacgctgccactgcgcaaccaggccgggatgagtgacagcggacaggagagtatctgggatattcagactgcatataacgtggtgagcggaagggtggccacccgggactacaactaccgggaagcgctgacgccgcaggacagcacggaaagtatcagcagtcaggaagggatcaccgccggtgaaatttaccactacgcggagcctttcctgacagcaggtgacgcggaaagtactgagagcggtgcgttctttgcccgtctgcgtcacgagcgcattctgaacacgcaatatcatgtcaccgggcattcctccagccctcatctggcgccgggtcaggttctggaaacggacggctcgttacccgatgccgttaaggaaggtatcgtcatcaccacggtacgcgccagcggttcacgcaaaagtagctttacgctgacgtttgagggtatcccctacagcgaaaccgtctgttaccgtccggcgctgctcagtcgcccggtgatatccggctcgctgcctgcccgggtggaaagcacgcagaaaggcgacacctgttcctggctcgaccaggaaggccgctatcgagtgaaactggactttgaccgcaacagtaccgaacagggctatgcgtatctgtggctgcggctggcgaaaccgtatgccggtgatacatacggcttccactcaccgcttctcgacggaacggaagtggccgtcgtatttgacggtggagacccggatcgtccctacatcgcttatgccctgcatgattcagagcatccggaccatgttaccagagacaatcatacgcggaacgtgtggcgcacgccggcgaacaataagttgcggatggaggataagcgccaggaagagcatatcaagctcgccaccgaatacggcaaaagccagctcaatatgggccatctggttaacgcacagcgtgagcagcgtggcgctggttttgagctgcgaacggatgagtttggcgcggtccgcgcagccaaaggcctctacctgacggcggatgaacaggcaaaagcgcaggggcctgtactggaaatggcccctgccatcaaccagattaaccaggccaacagccagatgcaggccctgaacagcgccgccgaagcggccggggccctgatctgcgacatcaatacccagataaattttgtggccgacaaaatcagggacctccaatcggcggtgctgctgggtagcgcgccgcagggagtggcactgacctcaggcgaacaccttcagctcagcagtacccgcaacaccatgatcaatgccggtcagcatcttgatatcggtgcgatgaagaatctgtctgtaacggtggaaaaagcccttggtctgtttgtgcataaagagggggctaagctcgttgccaaccaggggaacatcgaaattcaggctcagcacaacacgatggcgcttctggcaaagcagcaggtgacgataaccagctgcgaggatgggattaccatcagcacgccggagacactgacgctgaatggcggcggatcgtatctgaagctgagtaaaaacgggattgagcatggttctgagggaatgatggtgatgaaggtagcgagctatctggtgccaggaagtggcagcagtctgccactggagacaccggactttaaaacgacggacgtgaaggtcataacaaaaaattccgccaaatggacaagtgaataa

SEQ ID NO: 225469 - DNA, 3840 bp, Klebsiella pneumoniae
atgagcgtgttgagctgggcaataggtctgtgcaaaaagacggaagcatggttggtaaagctccaggcaaaagataagcagcagcgtgcagagcaaaagctgaatcttactgaaggggagctaggtgaccgctacgatactttagcacctaaaaccatcaatgatgccagtatgagagagtatttcattgccctaaaatacgctttgtcgcagaaagatgtgagaaacatagccgttacaggtagctatggtgcagggaagagtacggttatttcatcatttatgaaatatcactgcgaagataagtacatcaatgtatctcttgcaggattcgatatgacagaaaatgaaacaaccatcagcccaaattaccaagaggttgaacttagtattctgcaacagattctttataaagaaaatagagagcggcttcctgactcaaggattgacagaataatagacagggggccccaacatgtcagagggacatatagcgccttacttaaagttattttgccaatcgcgggtgcatcatttgttatctatttcaaaacaattgcagaatttctgaacctaccgtcgagctggatcgggttttttaatgaaaactacctcttaaaagcctttgtgttaatttttctggcctttgtggcgctctactttataactgctagtgcttcccgaatcggtatttttgataaaaaactaaaactgagcaagatcgctctttttagtggggatgttgaggcaagcgatcaagagacaccatccctactgaataactgccttgacgagattgtgtatttttttgccaaactggaatataaggttgtcatctttgaagatcttgacaggttaggaacgcctgagattttcgttaagttgcgtgaaattaacaaaatagtcaataacaatattgtcgatggtaatccggtcaggtttgtttatgcagtaagagatgacttatttctaggcgctgatgccagaactaaattctttgactttattctccccgtgattccatttatggacagcagaaacgcatttactttattaaagaggaagatggcgcttgataagtatagcgataaatatctgaaagatatcgcagcatatataaatgatatgcgcagtctacaaaatttagtcaatgaataccatgtattcagcaatattgttgataacggaaatgataaagttaaacttttatcgctggtgttttataagaacatatacgccctagactattttcttactgacaagaaaacaggtgttttatattctttcattcgcgactatcgcactcgaaaacttcaccgtaattattttgacgctctggaagaaaaactagatattttgcaaggtgaaatagaacatattaataatgaaccaatgtatgatcatcgaggaattagagagaacatagtatgtcgatatatcccgaaaatgctctggaatggggttttttttggttcggggaatggatacagtaatttttatgctctgccaaccttggctttaatagatgatgagaatacttttttggaatttttatcgaaaaatgaagatttatatataggatactattttaataatcaggttaaatcactttcactttttgaaaagacattaagagatcaattaaaagaagaatatctgaaacgaaaagaaaaaatgggtaaagataaaaattcggcttttagtgatctgcaaataaaaataaagaaaattaaagactcaataaaattaaaaaataccctttcgctgcgagaacttacgctgaacattgggcgtgaaaaatttgaagacattgcgcaagggtatattgaggcgatggaggatcatgacttcgtctctgagcagcaactccatgctttgcgtaccgatatgcgcaatggtgggttagacgccttgtatctactgctgtccgatggtctggtgatgcaggacttcatggcctaccgctctattttccatgaagggtctatgaccgtaaatgataacgactttttgaaagccgttggtcaggatcttagctacgcaacctcaaacggtgaatattttattgatgatgagaacagagtcatcagcgaacttgttgaacataaccgtatttatgccgatggtgcacttcatcatcaattggtgacacatctgattgaaaacgcagatgaacatctggcgggtatgatcgcttcgctatttagcaagtctgatgagcatatacttgctgttttttctgagctatatagccgatttggtaaacccgatactttcgataaattaattgttattgcactgcaaaaatatggttatcttgacagaatggttgccatccttgctcgcctaccgggtaaaaaattcaccaatgatattgctatcagcgtgatagcctgtgtgtcgccagaacatgcgctagataaaccacaataccgccagcttattcatttgctgggttgccgcatcatctcacagctcaccgaagagaatcaggatgggttcatgcgtcatgtacaacaggcggatgcatgctatgatgaactgttcgaaccaataactccaacagagaggtattgcctgcagtttattgcgcaaaacagtctttatcagttaacccgacgcaatgttggcattgccgtttcatgtctgattgacaacataacccttgaagaggcggaaaggaaaccttggacgctcgcatatgagtataaactcagtgaggtttctaattacttctgtcaaaacattgatatcttcgtaagggaggtgtttatcttctccgctgaggatgccgagtgtatccgctacgttctgacccgcacctccctaagtgacgattccaaaggagatatcgtcagaaaaatgaccttctcatttgctgatctgtccggtataacagctaaagcagaatttaccgaagaccagctaacgatttcctatcacgacctgttttatcgatatgaccgcatcgcaccgggatggggggctctgatagactatatctgcgaagactgtgatatggatatactgacggcttatgtgacaaagcatgcacttgttttggggcagtcatccccggagatttatgacggcgactgctatgacctgctgtatatgaaaattatctgcaacgatgacttggcagaacaggcttatcagagcctagtttcagcaattgagattaacattcgggaaattgatgatcagcttagcacgcgtaatttctgcatccttgtagacatgcagaagttgcctctcgatgctgtcgtatatgaaaaaattgcggctcaatatattattcaggatgaaaaagtaagtgatgccttcgtcaattggttgattcagtataaaagtgaatttttgtcagagcccgagttctatctaagaaaagaaaaagacacgcaattctttaatgtcatgctgtcaaaagtcatgaactgctcgctctttactgtgcaacagagagcggacttgatgttgctatttattgattatttcattgcgtatgataatgctgaactaaatttccctaatgatgtcctgatgcaggtttttaacagcaccagcaatgaagaattcaaggccctgttgtttaagcgatttattgttgtgggcctgagtaaacatcaactggctgggctttgccatcagttgggcgaagatgaattgagaaatgtatttatcaatagaacccaggcaaaaattgctgttgctaatagggaacgcatgatatcaattcttaatcatctgcaagcagcacgcatcatcaaaggtttccaagagcatgaaggagggaaaatctccgtatttatcgaacccgatctgaaggatgaagagtag

SEQ ID NO: 225470 - DNA, 1230 bp, Klebsiella pneumoniae
atggcaacaattagcgaccaactcgcggcggacattcacaacgctttcagcaaatactacacagacttagccaatcaggatcagatcttctttggcgttggtgatgtgcagatcaccaggcaggatggcagcacagctacaattcgctcctggaataaggttattgggtcggtggacactgctgcgcagcgcggtacgtcgaacacctttacagcccttcaaacgttcagtgccgggctcactgttagcacaggcaacatcaattgcagcgccgataacagcatgatcgtgctgggtaagaataccgatctggcactgctaaagaagcaggggcagggcggcactatagcggtaggatccggtacgccgttcaaaattcaacgagccaatactgcagccgttgcggtgagcagcacgatggaagatatattcgtcataggcgtggacaagcagacgacattgcccggcgcgctggctgctggtgggaacattgacaatacgtcgaaaggcaaggtactgacgcaggcaattgagctgtctatgtcgacaccttacattgacttccactacaacaacagcactgcggactataccgcgcgcctcatccacgacaggcagaaccgcctgaacgcgcaggtgcaaagcttttgggtaacggacggcaggataactgcatcatcgaccatgccagccaacccatccatcggaacacaactgacctccaacccggtacgttcgttgatggccgggcgtggggcatatggtgacgtagacggcgcttacgttcagatgtacatggaagagcaggtcggcactgagcatcgcctggtgttgtacgcggatggcttcggacgcactgacgcatggatttttcgggctggtggcaccatctccaccgggaaaggtgacgtcatgaccactggatcagacgtgcggctgaaagagggttttacggaagctcctcagaatgcgctgcagcgcgttgaaaggttaggggtgtgcgagtatcagatgaaaggagaaaaccggcgacgccggggatttatcgcgcagcaggctgatactgtggacacaacttacaccttcatgggatgtgagcaggaaatcgatggggaaaagtttcaggtaatgaacgtggactatgtagccatcattgcggatcttgtgtcgtcagttcaggagcttagaaaacaacttactgatttaattgaaatgaacaagctaaattaa

SEQ ID NO: 225471 - DNA, 273 bp, Klebsiella pneumoniae
atgcttgctggcatgacgtcctccgagctgggcgactggcatcacttttaccgggagcgtttttttcaggacgcgcagctcgatgcccacttctccgggctgctttacaccatttcaaccttcttataccgggatccggacatcacccctgcacacttcagcctgctgtctccctccgctgaggctgcagcggataatgtacaggacgatgaagccatgatgctggccgcggagggaattacaggaggcaccagatatggcccagcagattag

SEQ ID NO: 225472 - DNA, 327 bp, Klebsiella pneumoniae
atggctaaaaactttgtgcaggaaggaaagacgattcatctggttaatgccggacaggaaccgattctgagtggggcagctgttgttgtcggtgagctgattgctatcgcgatcactgatatccccggcggcgatactggcgatggtcttactgaaggggtattccagctgccgaagctgcccgctgatgaaattgaagcgggaaagaaggtgtatttcaaggcgggcaaggtacagctggaagcaacagacgcagtttttgctggggttgcctgggaagatgcgggcgcaaacagtaccgtcattgacgtcaagatcaatgcctaa

SEQ ID NO: 225473 - DNA, 606 bp, Klebsiella pneumoniae
atgtggcaaggtataccatttaagttaattaacactcaatgtttagattctttaaatataataattaaaaatgcgccaaatgtaattaacccggcatcaacagatttttatagtcctattttaacaggcctggcaactcttattggtggtgcattaccggcttttattgcattcaaagctattaaagcaaataaggagcaaatgctccaccaacaaattataataagtaagcaacagtttattgatagtcttagattgaaattgtcatctttttcagctcagatgggacggttggaggtatatatcagtcagcaagttctacataaagggttgactgtacgttcagcaccagaagaaatcagaggtaaaatcgcatgtttagcatatgaactagatcttgaatacaaccatatagagcttatggtgggtgacattccaagatttgcaaaactattaaatttaatgaaagaactaacagatcaatatgttggtaaatttgaagggaaatctacaatcgatgtttttgcgcaaatggaactactaactcaagaagcaattcgttgcatttctgatgagtggaaacaaaccatcgataactttcattaa

SEQ ID NO: 225474 - DNA, 300 bp, Klebsiella pneumoniae
atggctaagacagcaaatcaactaattaaagaggcatacgaaattgccagagatatgccaccagctcagggaacgatcgtcaaagaactggcggctatcctcgatgtttcgaacgtagctcttcgccaggttcgtatcgaacgagacgctcttctcatcgaagtcaaatcatgggcgaaggagtgtgatcgtattactgagcgacataccaagaaacgcacaaatctgcatgtcctcgaagcaatgcgcgatttgaaagcaatttgccccaccagcttccgtaacgtggaggctctctga

SEQ ID NO: 225475 - DNA, 192 bp, Klebsiella pneumoniae
atgacaatcataaaaacccataccggtaccgtgatcaccaaagacggtccgaaggttaaaaaactgcatcagacagagcggatgtgggtcgttggcaaaaacgagttttaccacaaagcgaccggatgccgtcattttgcagaaaatacgcgccgccggctgctgctcgacaccatcaagcctatcgagtga

SEQ ID NO: 225476 - DNA, 1035 bp, Klebsiella pneumoniae
atgccacgtccgagaaaaaataaagacgatgcctggatgccaccgagggtttacctcgggaggtcagcatatgaatatcatcccaaaggaggcggcaatatccgcctctgtgacaaaaccagtacaaaggctcaggtatggagtgcatgggaagcgctaatgaacgatcgcccggactactccatgctggaagggcttattgaacgcttctttgtatctggtgaatttttcgaactggctctggaaacccagaaagactatagaaagtattcaaaaaaaattattgatgtatttgggaaaatgccgccggacgctatcaaacctgaacatattcggcgttatatggacaagcggggaataaaaagcaagacacaagctaatagagaaaaagcttttatgtcacgcgtgtatcgctgggcttatgaacgcggattcgttaaagggaacccaacaaagggtgttcgccaatataaagaggttagccgagatcgctatattacaaatgaggaataccaagcgctgtactctgtagctccagacattgtgaaaatcgccatggaactcgcttacctctgctgtgccagacagaacgatgtactggagatgaaaaaaagccaatttatggaagaaggtatcctgataaagcaaagtaaaacgtctgttgctcagataaaagcatggagccctcgcttgaacgctgcacttgagttggcaaaaaaattgcctcttaactctggcatgagcagtctgtatgtcatccatcaaccagcaggtggaaaatacacacgggacggctttaacagtcgctggagaaaggcaaaaattgaggcgcaggagctgtaccctcacctttcttttgacttcacgttccacgatttaaaagcaaaagggatatctgatctcaagggcaatctgtacgagaaacaggcaatatcagggcacaagaacgttgagcaaactgcccggtatgacagaaagatcgcggtagttccggttgtagatggacaggtggaaaggaaaaatattatgaagtga

SEQ ID NO: 225477 - DNA, 144 bp, Klebsiella pneumoniae
atgggggaaattattggcttgccgatggctattacgtattatccgaagcataaaaacattcacagctcagatgagagaacagaaattaagcacacctttttttcagtcgcttgtggtatactgcgcggccttcacattgagtag

SEQ ID NO: 225478 - DNA, 468 bp, Klebsiella pneumoniae
gtgaagcaacaattctgccttatcaacgacaatgttaagcgtaacgtcgtcaacttcatccagtctctgcccgtcgaccaccgatcgccgctgattatcgaggcgcgcgaagaaagccgcaccgacaaacagaatcgtctcatgtggccacttttgaaagacctgagcgatcaggtgatctggtacggtgaaaagctggagccagcggagtggaaagacctcatcaccgtattggtcagccagatgcaaaacccggagcgtgagcagaaatccgccccgggcatcaatggcggccgcgtctacttcggcgttcgcacctcccaatccagcaagcgctacatggtcgaggtaatcgaggcgatctactggttcggcaccgagcacaatgtgaagtttagcgagaagtccagcagtcggattgcatgggcccaggaatggagggcttcgcatgcacagtctgctcgctaa

SEQ ID NO: 225479 - DNA, 171 bp, Klebsiella pneumoniae
atgcacagtctgctcgctaaggtcatggatcgcggcatcttccgcgtgccggcgcgccgcaagcgcaaggtagaagtaaagccttccgatatccccacctttcactatacggctcaccttgcagatgtccgctggctgcgccgcgctgcccggaggaaaaaccatggctga

SEQ ID NO: 225480 - DNA, 486 bp, Klebsiella pneumoniae
atgcagatcatctatgacacaattcgggaaagaaagtctcagcttgacgaacaaaaacaaaaacggaaagtaaggttgcagggtgacgctattgccctgatgagtgagtttaagcaatctcttttgcttccggatggcatcccttcaggatcatcaggaattaagctgagttatgtcagaacatttgttaagtctagtgatgggatgaaaacggaaaggccattacagggtgttcaactcaacggtgcgcatcagttggttttcaccattgacttattggtaagcgagcatcatcccaacggcgaatgggtctcggtggatgtcgagatgtggtatgaacaaagcacgctaacggtggcggtgcttggtcggaagcgcagacacatcacggttacgggtcctgatgtctctgggcgcttttacgaagcggcagcattaattaaagaaacaatgatggatttgctgacagacgatcggcttaattaa

SEQ ID NO: 225481 - DNA, 339 bp, Klebsiella pneumoniae
atgaagatgaataacgatcctcattcctggccggacattattgaattgctccacggctggtggcgcggagacacaccgctgggcgccgtactgttttctgtggttatggccggactgcgtattgcctatggcgggggcggttggaaaaagatggtgctggaggggttactctgcggcgcgctgacgttaaccgttgcgtctggactggaatacctttcgatccccaaaagcctgtcagtaagcattggcggcggtatagggtttattggcgttgagcagttcagaaaactggtcatcagtatcatcaatacccgcttcggcggaagtccaaaggcataa

SEQ ID NO: 225482 - DNA, 630 bp, Klebsiella pneumoniae
atgaacctgcaacaatttcagaaggcggctggccttggcgccgggttagcctcgcgctggtttccgcatatcgacgcagcgctgaaggaatttggcatcacttcatccgtcgacgtggcgatgtacattgcgcaggtagggcatgagtcaggcagcttttctacgctgattgagagcctgaattatgcagccgaaagactggtgccgctgtttggccctcggcgcattacggagcagcaggctgcagcgctggggcgcacgaaaacgcagccagctaaccagcaggctattgccaatctgatttacggcggtgactggggtaaacggaatctcggcaatcaggctccgggtgatggctggaagtaccgaggccgcggcctgaaacagattaccgggttagccaactatcgcgactgtggaatcgccttaaaggtcgaccttattactcaccctgagctgctggagcaggactcgtacgcagctcgttcagcagcgtggttctttgccgctaaagggtgcctgaaatggtctggtgaccttgttcgagtcactcagattatcaacggcggacagaacggcattgatgaccgcaaagcccgctatctcctggcaaaaagtattctggtttga

SEQ ID NO: 225483 - DNA, 177 bp, Klebsiella pneumoniae
atgaactatctcattaatcggctgaaagagccttccacctggcgcggcatcatcctggtcattgctggcgtatttggctaccagatgcctccgggcattcaggaaaccgtcatcgcaggcggcgtagcgctggctggcgttgttggtgcagtgatgccggacagcgttaaaaagtag

SEQ ID NO: 225484 - DNA, 429 bp, Klebsiella pneumoniae
atgaaaaactttttgatcgacacactgagtaaaattctctgttacgcgctgcttgcggcactggcctttggatcggttacagggcaaagcaacattctgaacgtggccgctactgcgttttgggtagtggtattccttggtgtatttgggggtcttcttacaacattcctcgcccatgtcgctgagcatgcaactgatgagaaaacacgtcagtcggtgcttgagtcgctgagaaagattgtccggcgtaagaacgtcgttgctcgttggtggggatggtgtcgcatggtggcaaccatcgctctgcttgcctacggcggctgggtattcaccgcagtgtgttatgcgctttcatccctgtttgtgcggttctgcatttctctggccagagacaaagtagaaaaacagacggtcggagttttagcttga

SEQ ID NO: 225485 - DNA, 534 bp, Klebsiella pneumoniae
atgtttgcccaggtagagcgtgaagagtggaatcagtggcgctctgtttcggaagaaatttcctctggcctgcgtgacgtgattaataacactcccgtcggcatggtggcgcaagacatcgtctaccgtcagattcgctacatgaagtctctgccattagaggcggctgggcgtgtcagggaaattcaggagcgtgcgatacaggctgtcattcatggtgagcgccccgatcagctttacgagatgatcatgcaatccggtgacgtggcggccagcagggcacggatgatagcccgcactgagatagggcgtgcaaccggcgcattaacccaggctcgggcgttatccgttggctctgagggttactggtggcgtattgagggtgctggtacccggccctcacaccgcaaaatgaaagataaatttgtcaggtgggataacccgccaacgctggacggtatgaccggccatgccggatgcctcccgaactgcaaatgctgggcggaagtgcatatcccggaaccacagaaataa

SEQ ID NO: 225486 - DNA, 498 bp, Klebsiella pneumoniae
atgaaaagcgggctcacgattcgggaagacaattacagcagcgttctggatgcgctgaagcagttgtcaggcactgatgtgctagttggtatcccggcaggccctccgcgcgaggacactccgctgagcaacgcagaaattggttacctgcaatcaactggtgccacggtggaaatcgacgcagaagttgtgacgcttccaccaaggcctttcctcgatatggggattgaagattcacgggataaaacgaccgagcggctaaagcttgcagctcaggctgcgcttgaaggtaatacaggtgtggcagagcagcatcttgaagccgctggacagattgccagttcagcttctaaggcggtaatcggtgctggcgatcgtctgactccattgtccgagaaaacgaaggccaagcgccgaaaaaacgggcaggacttcaaaccactgtatgacacacacagtctgatggactcaatcacatacgtcgtgaggaaaaaataa

SEQ ID NO: 225487 - DNA, 552 bp, Klebsiella pneumoniae
ttgagtaacgacagcacagagcctgggtatctaacccccgtcggggaagctcctgagtacgataaggagctggaaaagcaactgagtcgctgggtaagaggcgtgacagggattgcggttaacctggtattgccccggtttaccgatccccagtccaaaataccgccgaacggtgagacgtggtgcgggtttaacttctccacgctcttacgtccaggcactcctgcaaatgtccaggtaagcgaagagcaaagcgagcaatggtcatgggagagcatccaggtgcttttctgtttctatggccccggcggttccgggatggccacgcggtttcgtgacggaatgtttgtagatcaaaacgcagatacgttgcgacgaatctcaggtttgtcgctggtgagcgctgatgatatacgaaacctccccgaattgatcaacaaccagtgggtgcgccggtatgaccttgccgtgaccctttcccgcaaaaacacccgtacctacaacgttaaatctgtcgttgaccctaacgtcacgatagttaccggagactaa

SEQ ID NO: 225488 - DNA, 1152 bp, Klebsiella pneumoniae
atggaaaaagggcttccccttaaccgtatcgctaacgtgacggtgacgctttctgctcgggccgcgcaggggcgcaattttggctcaatgctcatcctgggcacctcaactgttattccgatttctgagcgtctgcgcctttactccagcgctaatgatatcggcgatgactttggtgtagacagccaggaatatgcagcggctgttatctggttctcgcagcaaccgcagccgactctggtgtatgtcggtcgttgggcgaaaacgctggccactggcgaaacaggcagcgcagaaagcctcctgcaggcggttaacgctttgctggactggaattcatggtatggccttcatcttgccgtgccggtagctgattatccttccgacaccgacattatcagtgtggcggcggctatcgaagccgcgagtgtatcccgcatctttggcgttacctcggctgattcaacgattcttgacgcggctaccacgacggatctggcttccaagctgaaagcagcgaaatacagccgtacctttatccagtactcgaccagcagccgctatgctgcgctgtcctcgtttgcacgtgcgtttactgttgacttcactggaagcaacacgacgatcaccctcaagtttaaacaactgccgggtgtcacctacgaaaccctgggtacctcgcaggcgaacaacctggaagcgaagaactgcaacgtttacgtgtactacgaaaacgatacggcgattcttgagcaaggcgttatggcaaacggcgatttcttcgacgagcgccatggcctcgactggctgcagaacgccgtgcagaccgctgactacaacacgctctataccagcacaaccaaaattccccagaccgacgccggtaccacaacccgtatcgccaacattgagctggtgctcgataaggctgtgcaaaacggtctctttgcgccgggtaaatggactggtggaccgattggccagctcaataccggtgacatgctgacgaagggctactacacctgggcggaaaacgttgatgaccagcttcaggtcgatcgcgaagcgcggaaaggtgtgccaattcaggttgccgggaaactggccggagccgttcattacggcaccgtcgcaatcacggtcgtgcgctaa

SEQ ID NO: 225489 - DNA, 450 bp, Klebsiella pneumoniae
atggaatttgaaatcaaaggcgttaattaccgcaccgccaagctcgatgttttccagcagttgaaggtaagccgcaaattgcttccggtgctggctggtctggtttcagactttggcacgctgaaatccatgatggtcagagacggcgagggcaagcttgttttcggtgagaaaagggcgttcgacgctctggatatcgttttgccgaagattgccgatacgctggcggccctgccggaagaggacgttaacgcggtgattcatccgtgcctgggcgttgttatgcgccagcatgaaaaagggtgggcgaagattttcgatcagggcgcgctgatgttcgacgatatcgacctgctcacgatgctgcaactggtggcgcgggtggtcgccgacagcctgggaaattttttgaaagaaatccccggcagcgggacgcctacccagccatag

SEQ ID NO: 225490 - DNA, 507 bp, Klebsiella pneumoniae
atggcggtaggtacagggaagaagattgttttggctgttattgttgtcgttggatatttaatcggcaaccactctaacgatagtaaaaagtatgaagaactaaaaaataaggacccatcatccctaagtcaggacgataagtcatttattaaaacgattgaggatggacgggcgaaagcagaagccgatcgacgtgactaccagaaagaacaggtagcagagaaggaaaagacaaaaccaaaacctttatcggaaaaagttttgcttcaaaatgatgtgatatttacatgcaaagatattgcaagaaattctctcaactatcctgattcttttgaagttgaaaatactaatagcggtgtagataaccaaaatggaaagcaagtctattacttcactcttgattattctggggtgaatgctttcaatgtccgaggatcacacactattgagtgctatgggaccataggcgacccatcgcacagtgtaacttatagaacattcaactaa

SEQ ID NO: 225491 - DNA, 1335 bp, Klebsiella pneumoniae
atgagttctgccaagaagatcgggctatttgcctgtaccggtgtcgtcgccggtaatatgatggggagcgggattgcattattacctgcgaacctggccagcatcggtggtattgccatttggggctgggtgatttcaattattggtgcgatgtctctggcttatgtttatgcccgactggccactaaaaacccgcagcagggcggtcctattgcctacgctggcgaaatatctccggcattcggtttccagaccggtgtcctttattatcatgcaaactggattggtaacctggccatcgggattaccgcagtttcttatctctctacgttcttcccaattttaaataacccggtgccagcaggtattgcctgtattgccatcgtgtggatctttactttcgttaatatgctcggcgggacctgggtcagccgtctgaccaccattggtctggtactggtgcttattccggtagtcatgaccgcggtcgtcggctggcactggtttgatgtcgctacctatcaggcgaactggaatacctccagcaccaccgatagccacgcggttattaaaagtatcctgctctgcctgtgggccttcgttggcgtagaatccgccgccgtgagtaccgggatggtgaaaaacccgaaacgtaccgtgccgctggctaccatgctgggcaccgcgatggccggtatcgtctacatcgccgcgactcaggttatcgccggtatgtatcctgcttctcagatggccgcgtccggtgcgccgttcgcaattagcgcctctaccatcctcggcggctgggctgcaccgatggtatccgctttcaccgcctttgcctgcctgacttctctgggctcgtggatgatgctggttggccaggccggtgtacgtgccgccaacgacggtaacttcccgaaagtgtatggcgaagttgataacaacggtattccgaaaaaaggcctgctgctggccgcagtgaaaatgaccgcgctgatggtgctgattaccctgatgaactccgccggtggtaaagcctctgacctgttcggcgaactgaccggtatcgcggtactgctgaccatgctgccttacttctactcctgtgttgacctgattcgtttcgaaggcatcaacatccgtaacttcgttagcctgatttgttcggtactgggttgcgtgttctgcttcatcgcgcttatgggcgcaagctccttcgaactggccggcactttcatcgttagcctgattatcctgatgttctacggtcgcaaaatgcaccagcgccagaacaacgcatcggataacaacaccaccgctaacgcgcactaa

SEQ ID NO: 225492 - DNA, 426 bp, Klebsiella pneumoniae
atgaataagacctggcttttcaccaccctcaccctggcgctggtcgccgccgcgccggcccacgccattagcgcgaaataccgggaacagcttgaacgttccggctgcacgcagatgaccgacgggatcacctgcgatattcataaaaccaaagccgagaatgccgccgccgcgcagcaggccgacagcggcttcggcccctgggtgggcacctggtatgtttatacggattatggcgataaaattgatgagattaccgtcaccgctaaaacggtgaaaacccgcggccatctggttgaggaggcgaaagccagccagggtaaactgaccttccgggtgaaaagctcagcctttacgctgaacgacgcctttaacggcgtatgggcaaacggcagccagcgcggcacgttgcaaaaagtcctgtaa

SEQ ID NO: 225493 - DNA, 768 bp, Klebsiella pneumoniae
atgccttgcccggcctacataacacaggcattaatatgctttaatatcaaacccttgcataaatatctcaggcccgcgcaagcgcagcgccgccgggcaaggacagcgggcgcagagccgcttttatgccgggcggcggcgatgccttgcccggcctacataacacaggcattaatatgctttaatatcaaacccttgcataaatatctcaggcccgcgcaagcgcagcgccgccgggcaaggacagcgggcgcagagccgcttttatgccgggcggcggcgatgccttgcccggcctacataacacaggcattaatatgctttaatatcaaacccttgcataaatatctcaggcccgcgcaagcgcagcgccgccgggcaaggacagcgggcgcagagccgcttttatgccgggcggcggcgatgccttgcccggcctacataacacaggcattaatatgctttaatatcaaacccttgcataaatatctcaggcccgcgcaagcgcagcgccgccgggcaaggacagcgggcgcagagccgcttttatgccgggcggcggcgatgccttgcccggcctacataacacaggcattaatatgctttaatatcaaacccttgcataaatatctcaggcccgcgcaagcgcagcgccgccgggcaaggacagcgggcgcggagccgcttttatgccgggcggcggcaacgccttgcccggcctacataacacaggcattaatacactgtaatatcaaacggttgcattga

SEQ ID NO: 225494 - DNA, 1035 bp, Klebsiella pneumoniae
atgaagagaggggcgatgaaaaacatttcactggcgatgctggccagacagattggcgtcggcgtggccaccgttgaccgggtgctgaacgagcgcggcggcgtatcgccgcagaccacgcgcaaagtgctgcaggcggcgcgcgaggcggggctgaagcggatcctgccggaggagcaccgctttccctggcagattgaggtctttctcagcagcaatgactcgttcttctttccgcagctggcgcaggattttgccgccgtggcggatagcctcggctatcgccgtctgaccttgcaccgcacctttgtcccggagtcgcagccgacgacgctggcccggcgcattgcgcgcagttgccagcagcgtcaggggatcatcgtcttcggcaatgaccatcccgcggtgcacgacgcgctgcgccgctgccgggaggctggcgtcccggcgatcaccctggcgacggacctgcccggcgccgaccgactctgccacgtggggatcaatcagctgcaggctggccgcacggcggggttaatgctggggagaatgacgccgcggcccggcgaggtgctgatggtcagcggccggcaagattacagcgcgcatcgcctgcgcattcaggggttccgcgaggtgctgagccagcgctttccccacctgcagctcagcgacgtgctggcgggcgaggagcggcgggagcagatcacccgcctggtggagcaagccctgtgccgcagccgaaatattgttgggatctataacaccgggcttggcaatacccagattgccgaggcgctggcccgccaccgccgcgaaggcgacgcctgctggatcacccatgagcgttacaataccacccggcagcagctggcgaagggcagcctggcgttaacgctcgatcagaacacccgccagcacgcccagctggcgatcgacctgatgctgcgccatctggagtccggctaccagccgcaaacctatgccgacggtaaagtcgactttatcctctacagcgccgagaacgtggactaa

SEQ ID NO: 225495 - DNA, 369 bp, Klebsiella pneumoniae
atgcagctggcgctcagcgacgggctgcctctctccatggtcgctgtcctgttagtattgaagatggtggtgattctggcggtgctgcgcggcggcgcggagggtggattgttaaccccagggctggcggtgggcggattggtcagcctgctgctctgcgcgctctggcagctcggcttccctggcggtgataaaagcagcttcgctgtggtgggggcggccgcgtttctcgccgcctccatgcagatgccgttgaccgcagtggcgctggtgatggagtttacccacatggatcacagctatctggctccggcgctgctgtgcgcggcaggggcgtttttaacctgccgggtgctggataaaaaatag

SEQ ID NO: 225496 - DNA, 570 bp, Klebsiella pneumoniae
atgacaactgatatcaccgaactggcgcagagcctgaaagcggcagcagagaaagcgactcctggcccgtgggcattagcccgcgacaggaaaacagtagtctccaatcagtcgcatccaatcgctaacttatcagatgctatgcatcgtatgttggctgatggcactaccggacaagacgcagaattcatctccctggctaacccagccaacgtcctcgcgctggtagaggcgctggagaaggcgcagaccatcaactcagcagccgagaaactggtcagctgcaaaggccgctatcacagcgagcagaactatcgcgcattggcggcgctgtttggcgtgaaaaccccagacctgccgccgctggagcatgaaaacgtccattatgccgatgctgcagagatggagattgcagaactccgccagcgcatcgccgggctggagtcccgcatcgtgaagctgccagagtcattcaagttggctaaatcatcgagcggattaacgtactactacgccgacgaggtcgatgctgcgcttactgccgctggcatcaatgtggaggctgagtga

SEQ ID NO: 225497 - DNA, 225 bp, Klebsiella pneumoniae
atgatttttctcaaattaacccaaaaatcaacggtagagcgccagggcaaatatggctgggttcctgaaacagttgatgagcccgtgtttgttgctgcagaccacatcgccagcatgtatttcgctggtctgacaatcctgaaaatgacctccggagagcgcattgacgtgaaagagaccccggaagaaatcttcgccatgatcgccgcaggagcttccaaatga

SEQ ID NO: 225498 - DNA, 306 bp, Klebsiella pneumoniae; identical to SEQ ID NO: 179421

SEQ ID NO: 225499 - DNA, 222 bp, Klebsiella pneumoniae
atggagagttcaacgacacgcaacaaagtggaggctcgcaggattgaaagctggttacacagccagatagctgaactgggaaccacgaatatcgccaaagtggccggagtgaataagtcgacggtgagtcgctggcgggaaagtctgctgccgaacatgtcgctgctcctggctatcctgatttctaacaggccgggagagaaaggtgactttgaagcatga

SEQ ID NO: 225500 - DNA, 246 bp, Klebsiella pneumoniae; identical to SEQ ID NO: 96491

SEQ ID NO: 225501 - DNA, 654 bp, Klebsiella pneumoniae; identical to SEQ ID NO: 96490

SEQ ID NO: 225502 - DNA, 888 bp, Klebsiella pneumoniae
atgtctgaattagatgtgccatctttacctgaatccccatttgcaaagcataaaggagatttgcaacttgggggtgactctgggcttgagtgctacgttctagacgatggtaagcgagtaattagtcttagaacagtagttaaggcaatagcctccaccgagagtggtaacctgggcagttacataggagctacgggactaaaaccttttctaaacagtgatttaatcctgggcgaaactattgatttcgcattacctggaacgcaatttcgatccaggggtattacagcagaagcatttctagatatttgcaacgcttacgtatctgccttgagagctggcacgcttgaaacccaaaggcagagagagatagccattcaggcaagcattctgttaagtgcctgtgctaaggtcggcttgatagcgcttattgatgaagcaacaggttatcaatctgagcgagaaggtgacgcgcttcaattgaagttaagggctttcattgccgacgaattacgcggatgggaaaaaactttccctgatgaattatgggaagagtttggcaggctaaccaactggagtggaagctttaactcccgacctaaatggtggggaaagttggtcctagagttaatctatgatgcgcttgaccctgatatagctcaacacctgaagaaaaatatgcccccgccgaagacagggcaaaattaccatcaatggctaactcaggatgtggggctaaaagctcttgtaagccatattcatcaggttattggtattgccaagacatgccaaaccatgcgcgaactcagagataaaatagctgcttactacggcaagcagccggaacaattgaccatgttcaatgacattccagactctgttaaataa

SEQ ID NO: 225503 - DNA, 519 bp, Klebsiella pneumoniae
atgcttcattacgacaagtcgactggagttttcacctggctggtaaagcctaaccgcagaattaaagttggcagtgtagcaggctcaatcacacgattcggttacgtaaaaataaaaattaacggcattgattacaaggctcatcgcttggcttggctctatgtaaacggacaatggcctgaaaaagggattgaccacaaggacacaattaaaacccataactggatcgagaaccttcgcgaagctgatcagccacagaacatggctaattgcggcgcccacaaaaataactccagcggatacaaaggtgtctgcctgcataagccatcaggtaaatggtacgcacggatacggtatgagggtaaacgagtaagtcttggattatatgacacacctgaagaagcatttgatgcctattgcgctgaatcgcgtgacaagcatggagaattttccaacaccgcttccgttgagctgatccccggctgcgccattgaagttgtgaagacggaggcagcatga

SEQ ID NO: 225504 - DNA, 252 bp, Klebsiella pneumoniae
atgactgacaatgccatcctgttaggcgaaggcttcaccctgatgtgtctcggcatgggctttgtactggtgttcctgctgctgctcattttcgccatccggggaatgtccctcgccgtcaaccgcctgtttcccgagccgcccgccgcccccgcagcggcgccggccgccgtcgcgcccgccgacgatttcgcccgcctgaagccggcgattgtcgccgccattcaccaccatcgccgtcttcacccttaa

SEQ ID NO: 225505 - DNA, 357 bp, Klebsiella pneumoniae
gtggtggtcgacgaccactttcaggggatcaccgagattgtccgcggcgcagacctgattgagccgacggtgcggcagatttcgctgtatcagcattttggctggcaggcgccggattacctccatctgccgctggctctcaatggcgacggcaataaactctctaaacaaaaccacgcgccggcgctgccggaaggcgatccgcgccccgaaatcgtccgggcgctccgctttctgaatcaggcgatccccgaggagtggcaggccctgagcatcgatgatttactcgcccaggccgtcgccaactggcagccggcgaaaatcgagcattctcaaatggctcccgctgagctatga

SEQ ID NO: 225506 - DNA, 2430 bp, Klebsiella pneumoniae
gtgtcctcattgccggttgccgctgtccttccagaactgttatccgccctgcagcatgcgccgcaggttttgctcaacgcgccgaccggcgccgggaagtcgacctggctgccgctgcagatcctcgccgagggcaacatcgcgggacgcattatcctgctcgagccgaggcgcctggcggcgcgtaatgtcgcgcagcggctggctgaactgcttggcgaaaagccgggggagaccgtgggtttccgcatgcgcgccgaaacctgcgtcggaccgcagacccgcctggaggtggttacggaggggatcctgacgcgcatgatccagcgcgatccggagctgacgggcgtggggctggtgatcctcgatgagtttcacgagcgcagcctgcaggcggatctggccctggccctgctgctggacgtccagcaggggttacgtgacgatctcaagctgctgatcatgtcggcgaccctcgataacgatcgcctgcagcgtctgctgccggaggcgccggtggtggtctcggaggggcgcgcttatccggtggagcgtcgcttcagcccgctctccgcgcagcagcgttttgatgaggcggtggcggtagcggcggcggagctcctgcggcatgaacagggatcgatgctgctgtttctgcccggcgtcggcgagatccagcgcgttctggaacagctgacggagcgcgtggcggaggatgtcattctctgcccgctgtatggcgcgttgcccttaagcgaacagcgcaaagcgatcctcccggcgccggccgggaagcgcaaagtggtgctggccaccaatattgccgagaccagtttgaccatcgaggggatccgcctggtggtcgacagcgcccaggagcgggtcgcccgctttgacccgcgcaccggcctgacccggctggtgacgcagcgcatcagccaggcatcgatgacgcagcgtgccggacgcgccggtcgtctctccccggggatctgcctgcatttgctcggcaaagaacaggcggaacgggcggcggcgcagagcgagccggagatcctgcacagcgatctgtcggcgctgttgctggagctgctgcagtggggctgccacgatccggccgcgctggcctggctggatcagccgcccgcggtcaatctggccgccgcgcgtcgcctgctggaggcgctgtcggcgctggacggcgagcggctgtcggcgtttggccgcaaaatggcagcgcttggcaacgagccgcggctggcggcgatgctggccgccgcgcagaccgatgacgaggcggcgacagcggcaaagctggcggcggtcctcgaggagccgccgcgcggcggactggtggatttgggggccgtcttttcccgtcagcaggccaactggcagcagcgagcgcagcagctgatgaaacgcctggcccgccgcggcggccagcccgatgccgggctaatggcggggctgctggcgtcggccttcgccgatcgcatcgcccgccgccgcggtcaggaggggcgctaccagctggcgaacggcatgggcgcgatgctggacgccgacgacgcgctgggccgtcatgaatggcttatcgctccgctgctgctgcagggtagcgcttcgccggatgcccgcatgctgttggctctgccagtggaaatcggcgagctgatcgccgcccgccctgaactggcgaaaagttccgacacggtggagtgggatgaagcgcaggggacgctaaaagcctggcggcggacggtgatcggccagttggtgatcaagacccagccgctggcgaagccctctgaggcagagctgcatcaggcgatgctcaacggtattcgtgagaaaggcctcggggtgctcaactggacgccagaggctgagcagctgcgcctgcggctgcactgtgcggcgcagtggctgccggaagaggcatggcccgcagtagatgacgcttcgctgctggcctcgctggagacatggctgctgccgcagatgaacggcgttcattccctgcgggcgctgaaggcgctggatctgcgtcaggcgctacaggactggctgccatggccgctgcgccagaagctggatcgcgagctgccgacgcactataccgtgccgaccggcagccgcctggcgatccgataccatgcggagaacccgccagcgctggcggtgcgtatgcaggagatgttcggcgaggccacgacgccggtgatcgccgagggacgggtgccgctggtgctggagctgctgtcgcctgcccagcgtccgctgcagatcacccgcgatctgagcgccttctggcaagggagctaccgcgaggtgcagaaagagatgaagggacgctatccgaaacacgtctggccggacgatccggccaacgccgccccgacccgccgcagcaaaaaatactcgtag

SEQ ID NO: 225507 - DNA, 699 bp, Klebsiella pneumoniae
gtgaagaaaatcgtattctccgtgatagcggcctgttcgctgttcgcgctgtttggttgtaaccatcgcgccgagactgacacggtccagccagcggcgatggaagagctcaagccgatgcagcaaagctggcgaggcgtgctgccttgcgcggattgcgaaggtatcgacacctcgctgttcctggaaaaagacgggacctgggtgatgaatgagcactaccagggcgcccgtcgtgagccgtcatcctttgcctcgtacggcacctgggcacgtaccgcggataagctggtgctgaccaacagcaagggcgagaaatcttactttcgcgcgaaaggcgacaagctggagatgctcgaccgcaacggaagccccattcagtctcctctcaactataccctggagccagtgaaggccagcctgccgacgacgccgatggcgatgcgcggcatgtatttctatatggccgatgcggcaacctttaccgattgtgcgaccggtaaacgcgtcgcggtggcgaacaatgcccagcttgagcgggattatgccgccgcgcgcgggaccgatactcgcccggtactgctggtggtagaagggcactttactctcgaagcgaacccggataccggcgagatgatgaaaacgctgatgacggatcaagccggcaaatttattcccggtaaagactgcagccattga

SEQ ID NO: 225508 - DNA, 240 bp, Klebsiella pneumoniae
atgcccgacatactggagctgcgtttcgggtttaaacgtggcgacgtctccttcccgcatgtgcagcagatcggaaggactgatccacgccgcctgcgcgagcgtcagcggatgtccggctcggacaaaggcctcgctgacaaactccgagcaaaactacgctttcttgtcgccgcttgccgcatcgcccagctgcgctttggccaggccgctgacgcactgctggcgaaagtctcgtga

SEQ ID NO: 225509 - DNA, 615 bp, Klebsiella pneumoniae
atgactgcacatctcctccgcagcggactgcttacttttgccctgctcctgcttaccgcctgtaccctggacgtcggccgcagctcgccttccacatctgctgccgatgaccattcatcatcctgggctgttaccctccagcgtcaaagctcgattgccggcagcggactgcgcgaaatcgccgaaagcgacctgcgctccggcgacctgctgttctcctccagcctgggcgtcacatcgcttgggatccgcgccttcagcgcctcttccgtaagccacgtcgcgctgtatgttggcgaaggtcaggttgcggaagccaccggcgccggcgtacaagtgattacccttcagcaggcgctggcgcacagcgataaactctttgctctcagggtgcctgagctgacgccggaccaggcgacggcgatgaaaagttttgcctggcaggtcaaagacagcgggtataactatcgcggcattattcagtttatcccttatatggtcaccaaaccgctctgctcgctcaaccccttctcacgagactttcgccagcagtgcgtcagcggcctggccaaagcgcagctgggcgatgcggcaagcggcgacaagaaagcgtag

SEQ ID NO: 225510 - DNA, 1011 bp, Klebsiella pneumoniae
atggtaaaggtcggtattaacggttttggccggatcggacgcaatgtactgcgcgcagcactgaaaaatccggatattcaaattgtggcaatcaacgatttgacggacagcaaaacgctggcgcatctgctgaaatacgactcgcttctcggtaagctggatgcagaggtcaccgcgggtgaaggggggcttgttgttgatggtaaacccattaccgtattcagtgaacgcaacccggccagtattccgtggcgtcagtgtgaagtcgacatcgttattgaggctacaggattattcacggaccgtgaaaaggctgctgtacatatccacagcggtggcgccaagcgcgtgattatctctgccccgggtaaaaacgatgatttaaccattgtgataggcgttaatgagagtctttactccccggataaacactacgtgatcagcaacggaagctgcaccaccaatggtcttgcacctgctgcacaggtcctgcaccagcatttcggtattaagcatggtctgatgaacaccacccatgcctacaccaacagccaggcgctgcacgatcagccggaaaaagatctgcgcggggctcgcgccgccgcattgtcgattgtgccttactccagcggcgcagcgaaggctctgggtaaagttattcctgagctggatgggcgtttaacgggatactcgctacgcgtccctgtgccagtggtgtccattgttgacctcaccgtcacgcttgagcgagatgtgacggtcgaagaggtgaacaatgcttttcgcgaagccgccgcagcgggacctctgaaagggatcctgggttatagcgatgaaccgctcgtctccagcgattaccagggagacccacgctcgtcgattatcgacggtctatcaacgctggtgattggcggtaatatggtcaaaattctggcgtggtacgacaatgaatggggattctctaatcgtctcgttgatctggcattgatgatggcaaagcgtgaaagctaa

SEQ ID NO: 225511 - DNA, 1335 bp, Klebsiella pneumoniae
gtgtctaatgctataaatccaaatcaaatgaatatttataatgacatacgtaaagcaaaagagaaccatgttaacaacagtttaaaaacattaacaaaacatgtcttttgtcctaagtgcaacattcaagtcagggctgctaatcttaaaaaacatctagctaaacatgaagtaaatccattaatgatgcccaaaatcccccatcctccccaaccggtcaggtcgcccagaaagatgaagcctccggtcatcgagattaaaaaaaatgcagtcaaatcttctgctgttttaagagataatgcagagaagagtgttagcggttgggcagataaaattaatcgtacaggtgctgaactaagagcgctctatgagggcaaacaattaccaaagcataaagcagaaattagaaaagctaaatttaaagcgacccaggacatttcctgcctgatctgtaaaacacccttaaaatcttctaatctgaataaacattataagaaagttcatggtattgacatccaaatacaagagcttgaaatttcaggcgtgggtgaattgaaccaagaaggatttatttctcattggtccctgcccgggaccgggaagcaggcacttgagtcatcttgtgaacgtatacgaggtggtaaatttgaagagattgaggaacacttctttgaacactggttgcgcctgtttagcgaaaaaggttacaccgtggcaatggtacaagcttttaggcgtacttcggaaagtaaacacatcagtaagtcagagataaaaagttttctcgaagttgttaaaccaatcaaaaagaaaccacaaatacaggaaacaactgtttgtggtaaagaactttccgaatctgttgaactaattaaggagctacatttatcgagtgtgaaaggggtgaaaaaagctatccacaccgttggccgagatagtcaggagcaagctgcttttcgtaaagctgtcagcatgaactataatcatcgctgtgcaataactggggacgaagtagctgttgaagcttgtcatattcaaacacatgcaaattacttcgataactcactggataatggtgtcctgttatccgtaggcttacaccgcttgtttgatgcagggataatgattatttgccctgaaacaatgactatcagttttacacgtaattgcttctataaaaaatatttggatggggcattagtgaaacaagggcggatcccgattagcaagaaaaaactttccgagaagaactcaggaattaaaatttgccatgagattacgccaggcctgcgagacgttatcgcggagcaggatggtgattacactggccgctga

SEQ ID NO: 225512 - DNA, 1371 bp, Klebsiella pneumoniae
atgctgtcgcgacgccgcggagtaaacacgactatgacaacaatcaatcacacacctgccggcgaacaacgtggcaaaaagcggctgatacatcgcttctcctgggtttcgctactggtttgctggctaatatgggtgcttaacgcctacgatcgcgagatgatcctgcgccttggcccggtcatctctaaggagttctcgctctcgccggaacagtggggcaatatcgtcgccctgatcatggtagcccttgcggtgctggatattcccggctccatctggagcgatcgctacgggtctggctggaaacgagcgcgctttcaggtaccgctggtgctgggctataccgcgctgtcttttatttccgggataaaagcgatcagccacgggctgacggcctttgtgctgctgcgcgtgggcgtcaaccttggggccggctggggcgaacccgtcggcgtcagcaacaccgcggagtggtggccgaaagagaagcgcggttttgcgctgggggtgcatcataccggctatccgattggcgcgctgctgagcggcgtggtggcaagcctggtgcttgccacgtttggcgaaggcagctggcgctactgcttcctgctggcgctgctcgtcgccatcccgctaatgatcttctgggcaaaatattctaccgccgaccgcatcaacacgctttatcagcatatcgacagccaggggttgacgcgcccggcgacgcaggaaagcagccatgtcgccaaaggcgaagggatgaagacctttttacgcaccctgcgcaaccgcaatatttcgctgacggcgggcaataccctgctgacgcaaatcgtctatatgggcattaacgttgtactgcccccgtatctttatcacgtctccggcctgtcgctggcggcgtccgccgggctgagtattatcttcacgcttaccggtaccctgggtcaggtaatctggccctggctgtcggatagctttggccgtaaacgaaccctgatcgtctgcggtctgtggatgagtatcggcattgcgctgttctatttcgccaccaatatgccgcgccttatcgccattcagctattttttggcctggtggccaacgccgtgtggcctatctactacgccatggcgtcggactccgccgaagaacgcgccacctctaccgctaacggaattatcaccacggcgatgtttatcggcggcggcatttcgccattgcttatgggctggctcattcagtttggcggcggctgggaaaatccagcgggttatatctacgccttctttaccatggcgggatgtgcgctgctggggatgttattacagctcatgaccaccgataaaacgccgcgcaaagcgcattaa

SEQ ID NO: 225513 - DNA, 768 bp, Klebsiella pneumoniae
atgacttacacagaaaaggatccaaacggtaaaaaaggtactatggatcctttattggataatcaaaaaggaaccactttcgcggaaagattgcgtatagcgataggcgataagagcattcgacagtttgcgatagattgcggcatcagttacggagctatgcataagtacttcacagggacgactcagcctacacttgataatttggttattttgtccaagaccgcaggcgtaggcattgaatggcttgctaccgggcaaaacagccctgttctaacagaaacgaaactacaaacggttccagcagctagcggagtcttggatgttcatggaaatgatgttgacttaggcgagtttgtgtttgtcccgcgctacaacgtagctgcagctgctggatatggtgcttggaatgatgatgaaacgccgatgttcacagtgtcttttcgaagatattggatcgtaaatcatttaaaagcagacccaacgaaactatctgtaatcagcgttgtaggtgattcgatggaaggagtacttaatgacaaggatattatacttgtaaatcatggtgataaggagccgagagaaggcatttatgtgctgcgccttgatggtcagcttatagtaaaaagagtccagcgcttaccaggctctgagcttttcgtgactagcactaatcctgcatacaagccattcacgataaatttaaataacatcccttcagattttgacgttgtgggaaaagttgtttggtacgggcgagttgtttaa

SEQ ID NO: 225514 - DNA, 2046 bp, Klebsiella pneumoniae
atgtggtcaacggtcgctgagctcacaggttgcaatgggatgcctgctacagaacggggttgccgtaaataccttgataacctcgctgcaaaagttcctgatgtccgccggaaacgcgtaggtacaaaggcgtttgaatatcacatcgattttttgcctgctagcactcaggaggaaattaaaaatcgttattacaactctctgctttcagaaaagacagtatctacaaaagtagtcagtacgcgaccgcgttcagatacagcgacaaagaaaaatatttcgcttatacgtcaatgccctgcgttgcttgatcgtgaagtgaactcgctgacagctaagcaaaagcagatcgcagatgctcgggcggtgttggccatggaagtcgaaaagctcagagatgcgggtttgtcacgcacagcagcggttaatttcgtctccatgggctcacgcaaaggaacgctcccggaacatctgatgaaagcctctgagctggccaatgcccgcaaaggcagcagtcgtgcaggcgtaggtacccgcagcctgcaggaatgggtgagcgtctttgagtcaacaaaacccggtatcgaacgtatggccatgctggcacccggtcatcttaaagcgaagaaacctgagcagattaaatggttacctgattttcttgctcactggcgtaaccgtaaagggccgagtcttaccgaggcatatcgtgatttcaaagctgaatggactgctctctatgctggccagccagcaatgattgaggcgtgcccttcctatgatgcagttcgccgggctatggaaaaactgccccgccgtgagaaagcacggggccgtgtcagtggttctgctgcgctggtttatgagtgcttccagaaacgtgactggtctccgatgccggttaatggctgctggattgcggatggtaagtcactggaaatgaaagtcgcacatccagatcatggtcgcccgttcacacctgaactgacgctgattattgatggccggacacgctttgtcgttggctggagcctggctttatctgaaagcgttatcgctgtggccgatgcctaccggtacgccatgcgccacttcggtaagccgctgtttgtttattccgataacggtggtggtgaaaccaacaaaacccttgatgctgatgtgacgggtattttcagtcgcctgggtattgagcacccgaccagcattcccggacgtcctcagtctcgcgggatcatcgagcgactgaacaagggtataccgcgccgtgtggccatgcagtttgacacctttagcggtgacagcgctgaccaggagcatgtgcgtattacagcgcgagccattcagtcagccgttaaggcgcaggaaaacggccgtgaactgacaccggtacagcgtactgctttgggaaaacttccctcctggcagcagctgctggacgccatcgcagaggaagtggacatctacaacaacacacatgagcaccgggaactgcctaagcgtaatggtaagcatatgacgccggcagcgtatcgccgcgccgttcttgaggcggaaggtgatgagacggaatatctgaccgacgttgagttgcgtgaagcgttcatgcctgaaatggtccgtaccgcgcagcgtggctggttacgtctgttcaataacgattatttctcagaagaattgatccaggtcgacagcgaagaagtgcgcgtggcctttgatatccatgacccgcaatccgtcattgtgcgccggatggatggctcttatgtctgtaccgccatctggaatggcaataaacgtgcagcgattccggtcagtgcaatggatgtagccgttgagaaacgccgtcagcgccgtatgaaacgcgttgaagagaaagtcctggagattgaagccgaaggccgctccgttctgccggggcagcgatttgatgacctggggagctttatccctgctgaatataccgttgagaaagaagaagagccgtatttcttccttgaaactgaccgcgacgaatatatgaaaaaaatcggcaatagccggtaa

SEQ ID NO: 225515 - DNA, 894 bp, Klebsiella pneumoniae
atgagcatacatgttgaactgaatgacctgatgacccgcaaaggctacagccagacacaggtagccagggccattggcaaaagcacagcggttattaatcagtacctgcagggtaaatatgccggtgatgttcctgcaattgatgcactggcacgtagctttattaaccgcgaagtggaaaaagaaaaatcgcagaaaattgctgctcgttttgtccctacggtcacctctcgcaagggaatggaggtcatcagatatgcgcatcttgatggcgatctcaatgttatttatggcgctgcgggtcttggtaaaacgatgattttgcgtgaatacgccgcccagcatcgtgatgccttactcattgaggctgacccggggtatacggcgcgtgtggttctggaagagctctgcggcctgctcgggattagtaagcgcgggaatatgcatgaactcagcgaagcctgtatcgcggctctgcgtgattcaggtcgtcttctgatggtggatgaggctgaaaacctgccataccgtgcgctggaaaccttgcgtcggatccatgacaagtcgggtattggcctggtactggctggaatgcctcggctcatcatcaacctcaaaggtaagcgtggtgagtatcaacaattgtatagccgcgtaggcttcgctctctgtatcggtgattccctgccgcagagcgatatcactgatattgcggtcagcatgctgcctggtgcaggtagccaggaagtcagcgaggcactgtttaaagccagccatggcaatgcccgccggttgttcaagctggtccgcggtgtcagtcgtcatagtgaaatcagtggtaatgctgtcagtgctggtgcggtgcgtaagtttgctgaaatgctcattaactag

SEQ ID NO: 225516 - DNA, 216 bp, Klebsiella pneumoniae
atggccattattgaaatttcggtctcacgcagaggtaaaggggttcaggttcggacccgaatggtcaggaatgatgatgattctgaactggtaaggaataccgctaaaagaattcatatgtcgctggggggatttattcacggtctggtcgccaggatattcgcaaaggttgaaaatatatcgccatccccggcagataaaaacaatattcactaa

SEQ ID NO: 225517 - DNA, 234 bp, Klebsiella pneumoniae
atgtgccgtttaccaattaacgatccaaaaatgatggccccgattaaccgcctcatgcgtggcggcctgcaggtactggacattaacacccggttccgtcgccctatcgtcgaagttgaccgcccgtttgagtcgtggcgcggcaaggaagtcgagattaccgagcgcaaggacggtaaaagctcacaggtcaaaatgcttatctggcgcgggatgcatgttatctggaggtag

SEQ ID NO: 225518 - DNA, 639 bp, Klebsiella pneumoniae
atggataagaaagaaacacaatttactgcagcgactgttccggctgattactggatggatgccaaaggtgcgttaatcccggtaaaactgctgaaacccatcgaccttgctcgtgatgctctggtcggcgagatcgtgactaaggcgattgagctcaataaactgatgaaggagtttaaaaataactcctttgcggatatagcggcattcgttgacctgtcagcgaatgaatacgatgtgaaactgggggggaagaaaggtaacgtcacactattcacgtttgatggtcgctataaaattcagcgagctatggcagaccgtcttgcctttgatgagcgcctgcaggcggccaaagaacttatcgatcagtgcctgtccgactggaccgaaggtgcgaagccagagttgaaagtcctgattaaccgggctttctcaactgacaaatcaggtgaggtctctacgggggcggttctggcccttcggcgttatgagattgatgacccgcgctggcacagtgccatgactgcaatcggggaatcagtccagattgtggcaacaagtgcctatatccgtatttatgagcgtattggtgacactgaccagtaccgtcctgttgctctggatatggcggcggtgtga

SEQ ID NO: 225519 - DNA, 168 bp, Klebsiella pneumoniae
atgaaagtatctttagaaagtatttttgaacgtattatcgagtgtacttacctgcgtgcaataacctggttaataagcgttagtttttgcattgtcttctggggttattgcattttttacgggttaaaagcctgggggttgttattgacgatgtttaaggtggcttaa

SEQ ID NO: 225520 - DNA, 537 bp, Klebsiella pneumoniae
atgggattttataaaacgactcaaaaagcagctcttgatgcgtgggacaatgaaattcatcaacgcgcagagctgaaagagaaggcactcgagtttgctaaaaaattcggcggcaaaccggtattttgcggtgatgctacacacttccgctttcacggtctgtcattcgatgctgcgccactgattggccatagcagtttatggacgctctcccgttcgcagaatggttacacccgagaaccaagaggtaagagccgcattccccgtgagcgccgcgcggaacatctgcagctgttggccgcatgggacgaggggcgtcccacagataggatttcaagggagccttactggaaagcgctgggccttgaatgggggatgttgatcctgtgtggtatcacccattttcgggtcggggatgtcatttatttcaaaacctccaccactccctctaaaggctccggcgtaatagaaattgttgaatctgaatattacgacgctgaaatagcgctgaatatgacaggagaaagccatggctga

SEQ ID NO: 225521 - DNA, 225 bp, Klebsiella pneumoniae
atggctgattatctttgcgtctccggttgtgagatccaggagatgggcgacagacgcgtttatcacctgaataataactccgttgttatcgagcatccgaaatacccaggtaagacccgatttcagttttatacccatagcgggcagtcaatccgtaaaccggccgataaaaccgcaatgaaacaggccgtagaacgtcacaaaaaacgctggagattagcatga

SEQ ID NO: 225522 - DNA, 540 bp, Klebsiella pneumoniae
atgaatactgcaaaccattttattaccaccgggtcaggtcagcacttttatttttgtaattctggtcctgatattgtgtatatcgaagatatcgccctggcgctttctaacttgtgtcgttttactggccatctcgacgagttctacagcgtcgcgcagcattctgtactggccagttacctggtgccgtctgagttcgcgcttgaagcactcctgcatgatgccagtgaggcttactgcaatgatatttctgcgccgctaaaagccctgctaccggattatcgtggcattgaaaaatgggttgaaggtttaatcagccagaagtttggcacgcctgaaactatcagcccggaggtcaaacaggccgatctcattatgctggctacggagcggcgggatttatttattgatgatgacactgaatgggccattcttcgggggattcagccgacgaatgaatttacgattaatcctcttctgccccgccaggcaagaaagctgtttatggagcgctggcatgagctcagttcgaaagtctga

SEQ ID NO: 225523 - DNA, 165 bp, Klebsiella pneumoniae
atgagctcagttcgaaagtctgataaatcagaaaagctgaaactgatggaggaagcatcacggttcagaaatgcgaaggaacgtcgtctcttctggactgacattgtgaccatccttctttcatttttgcttctgtttatatttaacatcgttttacagaaatga

SEQ ID NO: 225524 - DNA, 330 bp, Klebsiella pneumoniae
atggggaatataacccgggaaaaacgcgatagctttataaagcaaatcattgatgaaaccagactaagaggacgccttacggttcgtgatgcctgccagatgttagggatgaacagggatgcagttcagcgttacttcaaaattgcagaaaatagcggagaagtttaccgtcatgggaatcttgggttgtttcctgattacagggcgacaattaaatttgacctgcagcggtatacctgcaagaaggcagcaaaagataattcgcagggtcaaaaacttaacagtacttatgattgtcttcggaggactcatgaagtacctgctgcgtaa

SEQ ID NO: 225525 - DNA, 216 bp, Klebsiella pneumoniae
atgaagtacctgctgcgtaatatatccgccgatatttttaaccggcgttatccggtggggtcccggtttcggtactacatcgttcccgggatgccagaggttgaagtagtcaccaccacatccgaggcctggcatgtacgtaacggccgactggtcgtccgggtggaagggaaaatagggggcgtgtcggtcaacaaactcgaacccattcagtga

SEQ ID NO: 225526 - DNA, 477 bp, Klebsiella pneumoniae
atgtccactccagcaaaacgcggccttatcggggccatcaaagccggtcaggctcatctgggctgggacgacgcgacatatcgcgccgttctggtccgtttgtgcaacggcaaaacatcatccactaaatgttcccttgaggagctgcaggccgtgcgtgaatacatgcacgaccagggttttccgcgccagtcagcacgtcatggaaaacgtcctaaggtagcccgttcacgtaaaaacatgctcagcaaagttgaagctttgcttgcagatgcgaaacggccgtggaattatgccgagaaaatgtgcgatcatatgtttcaggttaagcgcgtcgaatggttaacaaccgaacagttgaccaaactgatgcaggcgctggccattgacgcaaaacggcgtaaaaaacgggagacaactgatgaatctgcaacaggtaacagagctactgcccccggtagtcattcagatagctga

SEQ ID NO: 225527 - DNA, 435 bp, Klebsiella pneumoniae
atgaatctgcaacaggtaacagagctactgcccccggtagtcattcagatagctgaccttatcggcttcccggccactgaacgcctgctttcagcgttcggtggtaccacctttccgatcggaaaaggtctccgcgctcttggtgctcaacgtgcagctctcctccgcgatactatcggcgaccataatgctcaactgctcttcaaaaactttggtggttttccgctttatctgcctcgttgcgagcaggcattacgtgaactgcgtaatcagcgtttcctggcagagttccacgcaattcggcaagacggtatttcttcgctcatggcgatgacaatcctttgccctaaatatggctttagtgatcgtaccggatggagtttactgtcgttacaaaaaaacagcgctagctcagtgcaggattctcttttttaa

SEQ ID NO: 225528 - DNA, 654 bp, Klebsiella pneumoniae
atgaatctcaacgacttccagcgagccgccggcattacgcaacagcgggcgcagcaatggcttgagccgctgaatgcggcaatggctgaattctttatcaataccccgctgcgccaggctggctttatcgcacagctggggcatgagagccttcggtttacccgggtcgtcgaaagcctgtactaccgtgatgctgcgcgtctggcgatgattttccgttctgacttcgatctcaacaaaaatcgtaagattgagccgtcagaactggcactggcccagcagttcgtcggcaggccggaagcgaccgctaattttgtctatgccaaccagggcgggaacggcccggagtcctccggtgacggctggcgctatcgcggccgcgggttaattcagatcaccctcaagaacaactatcgagcctgcgggcaggcgcttgggctggacctgctgaaaaatcccgacctgttgctggacccggtgaacgcggcccgttctgccgcctggtactggtaccagcatggctgtaatgcgcctgcggatgcggccaacgtggtagaagtcacccgcaaaattaaccccgcgctcgttggtctcgatgaccgtgccatgcttttcgagaaagcccggagggtgttatgtccctcaaagaactga

SEQ ID NO: 225529 - DNA, 249 bp, Klebsiella pneumoniae
atgtccctcaaagaactgatttctaacccgtcgggccggctcagcacctccgacactattactttttttaccttcctggtcacgtccgcgatcgtcatctggtacggctacagcctgcagctgcaggagtggatgtttaccgcctacatcgtcgcctgggcgggtcataacatcggttcaaaactggtggccatgaagcgtgaccagcctgcatccacacctaacggaggcacccccgatggccagtaa

SEQ ID NO: 225530 - DNA, 597 bp, Klebsiella pneumoniae
atggccagtaaactctgggcgctggttaaaccgctgctcccctggctggttgctgtcgcactgattcttttcgtcggtatctggatcgggattcaggtgacagccatccagatgcgtgacgacgttcagacagcgaacaacgctacagcgaccgttcagaaagccttcgacaattacaaaattgagcgtgaaaaaacagatgccgataaggccagacaaaaccagtcgcaactgcaggctcaggtgaatctcgccgagcactaccgccagcaggcggacaaattgtccggggagctgctggccaaaggaaaggcattgacgattgcacagcaaaaactgagggaaaaaactgatgaacttgcacgtaaagatggtcctggctggactggtattggtcccggggctttgtgcctgtacgggcaaaacctcggctatcccgtcggaccggttgcagtgaatatctgtcagcagccaacggcggaaatgctggaaattccggcgatgccggccgcgccggaggcggactctccccccggggcatcctcgggcacagtaacgcctacggcgaatggtgccagctcatccgcaacaaactaa

SEQ ID NO: 225531 - DNA, 246 bp, Klebsiella pneumoniae
atgacccctgaccagatttatcagatattgctgggcggtcttgggctcttcggcggtatctggatacgccgactgcagtcggatattcgggacctcgaaaaagccgttgagcgtatcaaggatgaatatcagcgccgggaggattctcgccgcgaccatgaccagctgatagaccgcatccgcgatatcaaggaatcggttgatcgcgtactcgaaaaactggacaagaaggcagaccggacatga

SEQ ID NO: 225532 - DNA, 315 bp, Klebsiella pneumoniae
atgaaggccagacaaaagcggcgtcagcgtcgtatcaccacagcaaacgtcacagcgtcaccccggctcaccagcgatgacccgttactgcttctgcagaaattactgaccgagcaacgtcagccgctgtcatccgacatcatgcctgagctggagaaaatctccggggcggtgatgcgtatcgatcggcgtattgatgcgatggaaagccgggttatccgtcagggtgctatctccggtggactgaccggggcgctgtcaggcgggctggtcgtgacgaccatttccttaatcaaggccaagatggggttctga

SEQ ID NO: 225533 - DNA, 501 bp, Klebsiella pneumoniae
atggcgcatccgcccgagacaagggaaaaagttcggcggctttatattcagagccagctgtcgctgcagatcgtttcttcacaatgcggcgtcagttttgcgacggccgcccgctggaagaaagaagcgcaggacagcggcgacgactgggacaagctacgtgccgccaacgtgctggcgggtaatggtatggaggacgtcggccgggcgatcctgatgggattgctcgttcagtatcagaccactatcgagcagctcaacgttgattcgcagcttccgcctcaggcccgcgtcgaactgctggccagcctcagcgatgctttcaacaaggcgacggtggcgagcaagcgcgttctgccggaaacctcgcagctggccacagcgatggaggtcatcacaatgctgtccaccttcatcagtgaacactatccgaagcatatggaagcctttgtccaggtgctggaaccctttggtaatgaggtgcaaaaacactatggctga

SEQ ID NO: 225534 - DNA, 210 bp, Klebsiella pneumoniae
atggctgacaaattaatcccggtgaattcccgcgtcagcgtaatggcgagccaggtggcttgcgtcattgcgcctgattataaggagtacgtcgaagtccatttgcttgatggccgtgttgaatatctggagtacgccatgcgacaagaccgctggagcgccaagtcccgttttgagcaggctgttaacgacgctttaaagggggagtaa

SEQ ID NO: 225535 - DNA, 330 bp, Klebsiella pneumoniae
atgttcatttccgccgttgtgaaaaatgtgtctcacgatcgcctgtcattcatctgtccgggatgcggtttttcccatcaggtgaccattggtcagggtgcggggccgcgctgggactggaaccatgattatgttcgtccgacctttaaccccagcattctggtgacctgggaagagccgagcgataacccggcatattttgatgacccgacgaaggaccagcaccgtgtctgtcacagctttgttcgcgacggccagattcagtatctggcggactgcacacatgaactggccgggcagacacgttctctcccggttgttgatatttag

SEQ ID NO: 225536 - DNA, 444 bp, Klebsiella pneumoniae
atggacgatgttgggacagacctcaggaagttttttaagctggatgcgatttatccggagggtacggattctgttccagaacatctgccacaggagattcattccatgtacgttgatgaccttctgcaggcaaccagttcgcccagactcaccctggtaagctgccggatgattcttgagtcggcatgccgcgacaaactggggaccgataaaggcaggcttgtcgatctcattcaaaagcttggcgaagcggaagcattgccacgcgttatgcttgactgggccaacacaattcgccagttcggaaatgaagccgtacatgtttccggttctcccacagtggatgaagcaactgaaatccgttcgtttacggtaacgttgctggaatttctctatagccatccggcaagaattgattcattgcgcaaaggcaacccgggctaa

SEQ ID NO: 225537 - DNA, 201 bp, Klebsiella pneumoniae
atgagcactcccgataaaaatatcctcattgaactggataatgtatcacgccagcaatgtgaactgccccaacggcagaaagaactttactgcattttaaaggcttacggagatgatgctttttgctacgcgctcgcctgcctgatgcaggcggatataagatttaaaaacgcagctaaaaagccttttaaaggtcaataa

SEQ ID NO: 225538 - DNA, 1704 bp, Klebsiella pneumoniae
atggtgcgtaagaagaatgtcagcctgaaaaaaaaggagtttgaggcccagctcaacgagctggccgcatcgctgcgtcggtccatcgaggcggaacaggtcggctttgacccgtctcaggaggcggtaaaccagcgtcgtgatgcagcacgggatccggttaccggctttcgttacttcgtgcagaactacttcccgcactacatccgccataaggatgagtcggagctgcataagttcctgtttcagcgtctgcctgaaatcgttgcggcgaccgtcagtcagcaggatgccatagcggccccccgtggtgaggccaaatcgaccatcgtcagccaactctttgtgctgtggaacatcatcctggaactgaaaaaatacccggtcatcatcatggacagtatcgaccaggcgtatccgatgctggaagccatcaaggcggagctctgctggaacccgcgtctgaagatggattttcctgaagcctgtggtcctggccgcgtctggcagatgggtaccatcctgacagccactgatatcaaggtgcaggttgccggcagcggtaaaaaactgcgtggcctgcgccatggcccgtatcgtcctgacctggccatactggatgatattgaaaatgatgagctggtccgcaacccggatcagcgcgacaagctggataactggctgaaaaagaccgtcctgccgctgggtggcgcgggggccaaatttgatgttatctacatcgggaccattctgcattacgactcagtgctgtcacgtaccctgaaaaacccgctttggaaacgcaaacgctttaaggcgctcattacctggccgtcagacatgacgctctgggataagtgggaagaaattctgcgtaacaacgacgaggatggcgagctgctggcccggacgttctacgacgaacaccgggaggcgatggaagccggcgcggtagtttcctggtccgcgcggccactctataccctgatgttgatccgcgcccgtgacggtcacagcaccttcgacagtgaataccagaatgacccggtcagcggcgatgatgcaccgttcgccacctgtatcaccttctgggtgaaccggctgaaggaatggtcattctttggcagcattgaccccagtctgggtctaaaaggtaattcccgcgatccgtcggcgattcttgtcggcggctttaaccggatgaccggcgttctggacgtcgtcgaagcccgcattaaaaagcgtctgccgagcgtcattatcagcgacaccatcgcgctgcagcgggaatacggctgtctgtgctggtcggttgaggcggtccagtttcaggagttcctgcgtactgagctggttcgtcagtcagcagagctgggggtcccggtcccggcgatgccggttactccgcactcagacaaaatcctgcgtatcgagtccctgcagccttacgtgttcaacaaactgattcggctcagcccgacccaggtcaccctgatagagcagctccgccatttccccatggcagaccatgatgatggcccggatgcgctgcatatgctctgggcgctgtgcaactcctttgggacgcgagacgggttccgccacgttccgcgccggcaggacgatgacagagataatgacaacagacattcaggccagtcgcgccagcgttcccgctcgcgctttggcaacggaggatggtaa

SEQ ID NO: 225539 - DNA, 1569 bp, Klebsiella pneumoniae
atgggcaagatagttgatcagtggggtcgccctttcgataagtcggtaaccaaagaaccgcagaccgcacggatgattcagcttaacagcacgtatccggctcacccctcacgggggctgacgattcgacgtctgccgcgaatactgcaggaagccgaacagggttatctttccgctcaggctgacctttttgacgatatggtcgaaaaggatggccatatcttttcggagatggccaagcgtaagaatgcgttactgggtctcgactggagcattgaaccccggcgcaatgcgacggcggaagagaagaaccttgcggccatggttcaggagtggttcgactctctcgataatctcgaagatatcattctgcaggcagcggatgcgatcgggcatggtttcagctgtcaggagctggaatgggaactggaagagaatgtctggctacccagcgccgcccacctcaggccgcatcgctggttccaggcacgccctgaccgtggcgataatatccgcctgaatgatggcagcattgacggtgcagagctgatgccgttcggctggatggtccataagcataacgcgaaaaccggctttaccggtcagtcgggtctgtatcgcgtgctggtctggccgtacctgttcaagaactttgcggttcgcgatctggcggagttcctggagatttatggtctgccggcgcgcgtcggtaagtacatggctggcgcaacggaccaggacaaagacgcgcttttcgaagcgctggttaccctgggccacaatgcggcgggtattattccacagggtaccgacattgacttccaatcggcagcatccggccaggctgacccgtttgttgcgatgatggactggtgtgagcgcacacaatcaaaagtgatcctcggggcaaccctgaccagccaggcagatggcaagacctcaaccaatgcgctcggcaatgtccacaacgatgttcgccacgacatcttggtttcagacgccaagcagctgcatggcttcttcagtagcatgattgatatgctgctgcggattaacgggtatgaagtctcgcgccgtcgcctgcctaaatttttatttgatacccgggatatcgaagagattgcgtccttttctactggcgttaaaaacctggttgaatccggtgttaaaagcataccggcgtcctgggtacataagaaactgggtattcctgtcccccagaaagatgaaacggtactggaggctcccgctcaggccagctcaccgtccccggttgctctgagtcagcgattccggcgcattgctgccctgaccaccgccgcagagctgtcagacccggcacaggaagcgctggataatgggcgcccggtaccggagaaaatcgcggccgcaatggaaaagctgattgcgccgctggttgcggcgttgcaggacggcaaactgccggatgaagcaatggatatcatcgccggcagttaccctgacctggacgacagcgagctggtaaccctgctggagcaggcgctgtttgtctcggacgtatgggggcggctgaattccgatgcctga

SEQ ID NO: 225540 - DNA, 1272 bp, Klebsiella pneumoniae
atgcctgacagcgttgaccttagctatgcgatcggcctgaaacccgctcaggccatcgagtatttccagtccaagggctacaccataggctttaactggcatgaggtggaggcgcgggcgcacgcgacggcgttcaccgtcgccggcatccttcgccaggatattttgcaggacgtgcgtgccggcctgcaggattcactggataacgggctgacgctggaacagttccgccggcagatgacgcagaaactcacgcagaaaggctggctggccgataaggcgaagctggtcgccgatgaggatggcgtactggagggcaagcagttaaccccgcgccggctacgcaccatctttgaaaccaatatgcagtcgtcttacggtgccggccgctacgcccagcagatggagaatgccgccgaccgcccgtactggacgcgcgtggcggtcatggacctgcgcacacggcccgcacacgcggcgctgaacggactgacggcccgctatgacgatcccatctggcagtttgcctatccgcccgacggctggggatgccgctgccgcgtccgggcacgttcgcaaagcgatatcgacaacaagagtatcaccgtctggtcgagcgaggggcatctggaaaccgtgcagcaggcctgggggccgcaggatacccgcgaggtgcaggcattccgctacaacggccagctctataccccggatgccgggtttggccacaatccgggtcagggctggctggcgggtctcggtcagcgcctgatggaccgttccgccaccgcgccgccgaaaatggccgcgctggccgtggagcacacccttgcggagccgcagctgcgtgacgcgatcacctctgatatgcgccgcttcgtgaaccagtcgctgctgcgcgagccggccggaaccttccgtcatgccggcgcactcagtacccgcacgctcgatgcgctgggtcgtagcgggacgctgcctgactcagcagtactgactgtcactgatagcgcggtggtacagtctcccgggccgctctgggagctgctgccggaacagctgcgccagcctgcagcggttctggctgatggtgacgatctgctttatgtcatccgcaatggcgagtcactccaccaggtgcgggccgttcccgggcagaacgctgccggttacgagctgcagttaccgggcggcggcgaggccctgacgccggcctccctgcagtcgctggcggagttaccgttactggagggcgcgttaaatggcttataa

SEQ ID NO: 225541 - DNA, 546 bp, Klebsiella pneumoniae
atggcttataacatcgtttttgacgtcaccgactttgagcgctcgctgggcgagctgatcaacaaattcgagaaacgtgcgccgctgatgaaaatgctggccggtctgatggaagactcggtccaggagaacttcgaagtggagggccgtcccaaatggcagcactggaaaagtaatgcctattgggcccagcgtcggggcggtaaaatactccagcgctccgggcgactggcggcgagcatcacggcttacagcgataatgatatggcgacggtcgggaccaatgtcgtctacgccggcattcaccagtccggggggaagattaacatccccgcccgcagccagcaggcatactatcgccagaataaggatggcactctgaataacaagttcgcccgcaagagcaaagccaactacagcgagtggcataccatccccgcgtatgagatcaacatgcccgcacgtccgttcctgcgcctgaccgaatccgacatcagcgatatggaagaaaaagcgacggattatttcagccagatctaccgataa

SEQ ID NO: 225542 - DNA, 1086 bp, Klebsiella pneumoniae
atgaaaactcgtatcgcgtcactctcacaggttatcaacgccgccactcgcggcgtgatccagctgttaccggccggcaccttccgtgccggcgacggtcgtccggccgaatgccctgacggctggtttattgacggcactatcgcggccgctctcatcgcagcggctgacacccgccagaccccttatgtcatcgactacgaacatcagaccctgcgttcggcaaagaacggcctgccagctccggcttccggctggttcaaaaagctggaatggcgcgaaggggttggcctgtttgcggtggatgttgaatggactgacgccgccgctgccgctatcgatgccggcgaataccggtttatctcccccgtatttttgtacgacaccagtggtctggtcaccacgttaatcaacgcggccctgaccaatacgcccgccctggacggtatggatgaggcaatgcttgctgctgcctcactcctggccgccgcttctactgaggacacaacgatggatgaattactggaacagctccgctggttcctgggtctgcccctttcggccacgaaagaggatgtgctcgccgatctgcagaaactcatcaacaaaatcaaggcagctgacagcgaagccgctgcgggtcttgcctggattaacgggctggaagccagcgtcgccgcgctgacgtctcaggttgaaaccccggacccggctctttgggtctccgttgacatcatgaatcaggcgattgaacaggcccgggcctcaggtgaggagcagattgcccagctgacgctgcagcagtcctcagagctgattcaggcggccttgtctgatggccgtttgttgccggcgcaaaaaggctgggcggaggcgctggccaaatccagccccgacaaactccgcgatcatctgagcaagcaaccgcgtatcgccgcgctcaccaccacgcagaccgggggccgtccgccagctggcctgccatcccgtgcagtagatgccccggatgatgaactgaatccggccgtactgagcgtgatgggccttaatccgaacgattttatcgagggaaacagcaatgtctga

SEQ ID NO: 225543 - DNA, 396 bp, Klebsiella pneumoniae
atgtctgatcgtaacaccccctggcgcaatggtgagcttgtcgccgcgcctgtggctgcggccacaatgatttatggcgggcacatggttggcctgaatgccagtggcatggccgttcctgccgcagccaccgcctccctgaccattttcggcgtttccgatgagtacgcggataacactgccggtgcggccggggcgacgtcggtcatggttcgtcgcggtaaagcctggaaactggccaacttctccggggacgctgtaacccaggcggaagtcggtaagacctgctatgtcgcggacagtatcaccgtcgccaaaaccagcaacaccaatgcgcgaccggtggccggtaccgttattgccgtcgagtctgatggcgtctgggttgaaatttaa

SEQ ID NO: 225544 - DNA, 909 bp, Klebsiella pneumoniae
gtgattgttaacaagcagaacctgaaaaccatttttatcggtcttaagaagacctttcagaatgcgtttgatcaaacccctaacgactggcagcagattgccatggtcgtgccgtccagcaccaaggaagagaactacgcctggttgtcgcgtttcccgaaaatgcgtgaatgggttggcgaaaaagtggtgaaagccctggaaggcttcagctacaccatccgtaacaaagactgggaagcgaccattgaggtcgatcgtaacgatatcgaagacgacaccatgctgggttatgcacagcaggctcagggggctggccagtctgccgcagaactgccagccgatattatcggccggttgctgagcggtggtttcaccaacttctgttatgacggccagtacttcttcgatacggatcacccggtcggtagtggcgtggcatccaacaaaggcactaaagcgctgtctgcagcatcgttcgccgcagcccaggcatcttacggtgcggcccgttcagcgatgcgtgacttcaaggatgacgaaggtgaaaacctgcgtatccgcccgggtctgctggttgtcccgccggcgctggaagataccgccaactatctgatgaccgccgatcgtttcccggataacacaccaaacatctacaaagggacagcgaaagtcctggtgtggccggggctggcaaccgataccgagtggtatctgtttgacaacacccagccggtgaaaccgctggtctatcaggagcgtaaaaagccggtattcgtcgagcagaccaatatggacagcgacgacgtcttcctgatgaagaagtacaaatttggtgccgaggcccgctccaacggcggttatggcttctggcagatggcttttggttcaaccggggtggatgcataa

SEQ ID NO: 225545 - DNA, 423 bp, Klebsiella pneumoniae
atgcctgaaattacgattacctccaagcgcgacggtttccgtcgctgcggtgtggcacaccgtgacgtgccggtaacctggcctgatggcagttttactgacgagcagatcgccatcctgcgtgccgagccggcgctggttgtccatctcggcgctgtcagcggcgatgacgacaagctgaaaaccgcactggctcgtattcaggagcttgaggtccagcttaaggatgtgacctcagatcgcgatcttctgctggttacgctggagctacagaaagcgagtcagtcgccggcggcaagtgataacgctgctgatgacacgactgcgctgacacttcagacagcaggccagtcaccagaggtgaaggataacgccgctgacgatactgcctcggctgatactacggctaaagcgaaaaagtaa

SEQ ID NO: 225546 - DNA, 429 bp, Klebsiella pneumoniae
atgtacgcaacccgggacgatatggtcaggcagtttggtgaaacggaatgtatcgcgctttccgatcgtgattttaccggtgagattaatgacgacgtgctgaacggtggccttgagcgggccaccgccaccatcgacagttatctcgctggccgttatccggtgccatggactgatacgcccgggatcctgacgggtaagtgttgcgatatcgcccggtacgaactcaccggcgcagagacgcagaacacagaggagatacgtcaacgttatgaagacgcaatcaggtatctggagcgtgtggctgatggccgcatcacgctgggccgtctcccagatggttcagtcgctcagggcgggagcgtttcccgcttttcctcgaatggccgggttttcgggcgcagtgaaacggatgggggtgcattttga

SEQ ID NO: 225547 - DNA, 660 bp, Klebsiella pneumoniae
ttgattatcacgcaaatcgaatccgccattatcgacaggctcacccgggggctcggcaaactggtccgcgaggtgcgttcctacagtggcgaactcgatggcgatcctgctgatgtcattcgccagcttccgggcgtctgggtcacttttggcggtgtacagagttcagaactgctgagcaccgcccgtaataagtggcgggataccgggcgttttgtggtcctctcgggagcacgaagcgtgcgcagtgatcaggctacccgccacggtggaccgtcattcaacgaggtcggctcctaccagctggtttacgccatccgccggctgttggcacggcaggacctgggattaccgattgagcatctgatgcctggcaaggtgcgaaccctgtttaacacgcaggtaaaagcggcggcaatgtctgtttttgcctgcgaatttgatacccgctttgattcggaatcactggagaacggtcgcttcccgctggctccagccgacctgccatctggtcatcctgacctgatttttggcgaatatggcggagagcacagcccggatgacccggcctggctgaccactgatttgcggtatttcctgaacggccaggagccgttcgctgctgaggatattattcatcatgaaagtgaaagcccgtga

SEQ ID NO: 225548 - DNA, 198 bp, Klebsiella pneumoniae
atgaaagtgaaagcccgtgaagggatccgggtaccgcgcgaggataacgcccgccggtacatcgagcaggaaccggttgaggttcctgaaagcacctactatctgcggcgtctgaatgagggcgacctggtgaaggtgacagatgcgaccgttgatgttacggccgctgcagcaacgaccggcaaaggaaccaaataa

SEQ ID NO: 225549 - DNA, 1419 bp, Klebsiella pneumoniae
atgtccagcccgaatatttctttcgacaacatcccgtcgagcatccgcaaaccggggcagtattttgagttcaatacgaaacttgctgtccgcacgttgccggcgaatgcgcaaaaagtgttgattgtcgccccgatgctcgccagcggcagccttgaaccgcttgtggccaccagtgtattcagcggcgatgaagccgcagtgtacttcggttacggctccattgcgcatctgatggtggtagctgccattaatacctattcctacctcgatctgaccgttatcggtgtcagtgatgccagcgccggggttgccgctgctggtacgctgaccatcaccgggcctgccagttcgcagggtgtggtcagtctgtggatcggcaaaacccgcgtggatgtggctgtcagtgcggcagataccgcaactgaaatcgctgcagcaatgaaaactgcgatcgataatcagccggagctgcccgttactgccgcagtgtctgctggtgtcctgaccctgaccgcgaagaacaaaggtgcggccggcaacgatatccgcctgcgtgcgcagactaccgcatccggtacgacgactgccatcgttgcaatggccagcggggccactgacccggatatcgcaccggcgctggcgaacgtcgtggctgcaggccacaacatcatcgtcagcccgttctgcacccagaccacgctgacagcactgcgtacccatctggattttgtttccggcccgatggagcaacgcggcgcggtgggcgtcgccggctggccgggtacgcttgctgccggtaccacgctggcatcacaaatcaacagcgggcgaattacggtgggctggcataacggttccgttatgctgccggcagaaattgcggcggcatatggcgcacgtattgccagtgaagaagacccggcccgaccgctgaacaccctgacactggcgctggatgtgacggacctcgccagccgcccgggacgaaccgagcaggaaaacgcgctacataacggcctgactccgtttgaagtgggtcccggcgagacggtgcagatcgtccgcgctatcacgacctatacccgcaatgccagcggcgtcgatgatgtgtccctgctggacctgacgaccatccgtaccctggattacgtgcgtaaagcctgccgcgagcgaattgcgctgcgcttcccgcgtgaaaagctctctacgcgtacgcctccactggtccgcagcgaactctatgacgtgctgctgaagctggaagagctggaaatcattgaggaagttgacgccaataaggacgcgctgatcgtcgagcgtgacagccaggatgttaaccgcctgaatgcccgtattccgtcggatgtggtgaacggtctccacgtcttcgccggtcgcatcgatttgcttctgtaa

SEQ ID NO: 225550 - DNA, 375 bp, Klebsiella pneumoniae
atggcacttgaagaatacgtcggctcaatcgttctgtacgtggacggccaggagattgaggttaccgatattcgtccccagacgaacaccggccgcaagctggtgaagaccatgaacagcaccggccgcgccaaagggtattcgaaaggtatcgctgaacattcattgcagatcaccgtcgtactcccgaaaaacgtcgcgcagcctgactgggatgaaatggtaggtgcgaagctgactctgatggatatggacggcaacccgctgtactcctatctggactgctttaccactcagaccggcgaacagtatggcgtggacaatgaagcccgccgcgatctcaccattcagtcactgcgtaaggtacaaggctaa

SEQ ID NO: 225551 - DNA, 402 bp, Klebsiella pneumoniae
atgaaagcatcaggagaattgttattcggcattccttcaaaggatggcagtgttatccattatgactacacagtgatactgccggtgattcgtcataccgtgaatgcactacaggcgacaatggaagcacttggcgagacgaccagtgcggcggcacatatgtactatcgcgttgctgtcctggcggaagtgattcagtccctcggaagcctcagtgccgatgaaatcactgctgaactgctgctggacggactgactgacgatgatatggatctgcttgatgcagagcttgccgggctcaaaaaaaagcggatgcgcacgctgccggacttagcggactccggcgagccatcctcgcccttggacagtacgggatcagcgaagacagcatcaggggaatga

SEQ ID NO: 225552 - DNA, 2226 bp, Klebsiella pneumoniae
atgcgtgacttaaagcttgccatgaccctgcttgcgcgggatcagggctcaaaagccttacggcaggtgctgacagatatccagcgtcagacgatcgccaataagaaagcagaagatgatgcctctcgtgcccgggagcaatcctcacgtgaggggattagagcatcacgcacccttcagcaggaatatcagcgggcggccagcgcccgttcaacgctggggatccgttctgaaaaagatattcagcgtgaaatcatgcagactcaggccgcttataaccgccttctgcgctccggcaccatgagtgctaatgaacagactcgcgcattcagggctatgaccagccaggttgcacagttacgcactgaactaaatggcgcgggtcagtcgatgtcgcgtatggagcgtctgcgtaactggggcggcaacgcaactgctattgcaggcggcgtgacggcagcggcagcagtgctgcgtgagcccgttcgtaaccaaatgagttatgaacagcgccttgccatgatggccaatacggcgtttgctgatgaaggcattgcaggtcgacgctcaggcatgcaatcaatggaccagctgattcgtcgggcggtatccgttggtggaggtaataaagatagtgcagccgggactctcgatgcacttctggcatcaggtacagtcgattttaaatcagcagaacaactgttacccatgcttcaaaaatactcgacagcgaccggcgctgattctcaggatctggcgatgattgccatacgcctgaagcaaacttttggtgtgaaagatgaagacataccaaaagcactgaatatggcaatcaaagcgggtcaggctggctcttttgagttggctgatatggctaaatatctacccgagcagttagctaatgccggcaatgcgggtatgaaaggccttgatgattttgcaacattgctcgggttaaaccaggcggctgcaatcactgcgggtagcagcagccaggccggaaataatgttacacagttccttgctaagataaccagcagggatgcggcgacagctgctgagcgtattaaatacaacggaaaagggattgaccttcccggttctcttgtaaatgcgcaaggtaaaggaatgaactccattgatgcttttagtgcaatcgtggataaaatcgttgcgagtaaccccgagtatagcaagctcgaaaaaaggctggctaattccaccgatagtgctgaccgacaaaggattatggcatcccaggcaaaaatccttgagggttcatctgtaggacaaatcattgcagatcagcaagcattgatggcattggttgcataccgttcaaatcgaaaatatgcctatgaggtccgggatagtgccaatgtgcagagaaccctcgcagatggagcgacggcgggtgacctgaactacgaattaatgtctggcacagccggttttaaaactaatcagttaggtaaccaatccgactttgcacagatggatgccatcaagcctctgtctgaagtacttggtacactttcgaaaaaccttaccgactatgcagctgaatacccagggttgaccactgccgttgcgggggcaacaacaggcatcaaagcactggccgcagccgcagccgccatagcgggtatccgctttcttaccggtggcggtttccccggcataggtcgaaaaggtggtagtggcggtggctctttcagcccggcagatctccttactggcggcggagcgtcgggggcgggagtggtcccggtctacgtaacgaactggaaagatattggcggcgatgacaagagtggcgtaatggattccctcaaggatattccaggagccgttggaaaatttgcagcctactttaccgctgcaactgctattaaagaaactcttgacgaaaaaatggatgacatcaataaagaatcacaagaaaaaggaatttctcctggagaattgcttcagcaaaagctcgatgagaaaaaggtacctctttttgactgggattttagttcctggtggtcatcccctcagaatattcgcgtgcctgaatcggccaatggttatcccgtccctggttttgctcaggcgcctgctcaacatttacccattaacatcaccacgcaactgcaggtagatggccgtgtactggctgaggtggttaacgaggctaacagccagtccgccacccgtggcccgcagggaggtccgcactga

SEQ ID NO: 225553 - DNA, 1314 bp, Klebsiella pneumoniae
atggcatgggaaacggatctgcaggatgcttccttccggggcgtcgccttcgatatcatcaccacgcgtgacagcgtgcagcgtgatatcgcccagcatgaatacccgtatcgcaacggggccaatattgacgacctcggcggtaaaccacgcagcctgcagtgtcaggcggtcttctttggcgacgactatgaaagccggctgcaggcgttcattgccgcactggacgtgcgcggctcgggcgagcttattcatcctgtgtttggctccatgccggatatgctgtgctatgtctatcaggtaaaccacgacgcggagacgcctgactactgtactgttgatctgcagttcctgcagtcaggtctggatgtgaagttcttcgtacgcgaatggccactcagtcaggcagatgccattttcaaccaggcccaggaaatcctcgacagtaccgccacgttactggataacgccatgaagccgctacgaacggcgcggcagtatctggcccggtccaaagcgctgggcgtgacggcgctgaatatgattgctgttctgcgcggcgatatcaccgggtttatcagcagcaccaccgattttgttaacttcccgtcggcctttatgaacgatattcagtcggctcttagcctgcagagctcagcggcgatgagctctatcagcagcgactctgccgtctatgcgtcagcgccggccgtggtcatcgcggactgggcggcggtaaaaacacaggccgatgaagtggccgcactgccagcgggtctggtcactggcgatgtaaccgtatcagtcgaaatgccggcaaacgtaaccgccaccgatatccgtgagctgattgccatgacacagctggcggtcgcccttgagttgtcgcagcaggcggctgaccttctgagcgatgagaccgtcaccgctgcgttaagccccgatgatatcagtctgatcaccggtgatgcccgccaggcggtacagaacgccatcgacagcgtgcgcaatacctgggcggcggagatggagaccgtcagcagttcagagacgtcgatcgccctgcagtatcagccggtgattgatggcctgcgcgatactgcgctgtccctgcagtcgatggctgtggccctgattaatgcccggccgccgatgattcagcgcaccgtggccagcgccacgaacctgcacctgctggcgcacctgtggtacggcgactacacccgcgccggcgagctgaagctcctgaatccgtccctccgggaccctaacaacatcatcccgggagacgtgctgaatggctactcagaataa

SEQ ID NO: 225554 - DNA, 1239 bp, Klebsiella pneumoniae
atggctactcagaataaactggcagcgcaggatatcgacctcgacaaggtctctgtgatcgtcggtggtaaggtgcattccgactggtccggctacggtatcgacagcgactttcttatccccgccgatgcctggtcgatgcgtctcggtctgcccgatggaatctttccagaaggtgtggcgcggggcgtcccggttcaggtccgcatcgggccggatgtggtgatgaccgggcgtattgaccgggtttcccgtaccgtcagccgggatcaggtttcgctttctgtcacgggccgtgatggtgcggccattctggtggattgcgcatcacctttgctgaccagccgtcaggccagcctcgaggaagtcattgcccaggtcgttaggccgctgggtatcaaaaatatcgagctgcacgccgagagctcgatccgcaatgacaaaatcaccaccgaaccgggtgagcgggcatgggatatcctgctgagggcctgtgcgggccgtggtctctggccatggttccggcctgacggtacgctggttatcggtgggccagactacaccactgcgccggtggccacgctgataatgcgccgctccggcgagggcaataatatcctcagccttaccgatgaaagcagcatggagcgcagcttttcccgtctgacagtactggcgcagggccatgcacattcgacaaataaaaagaaagagctgggaattattgatgtcaccagcccgaccactttttctgtgaccgaagatgcggatacgtctgaaaccgagctggataccgggctagccgagaccggccagcatggtctgcagtttaccgttgaggatccgaccgtcacctattaccggccgcaggtcattgtcatgcatgatgcagatgaccttgagcaggtgcgttaccgtgcccgcaagatgatggctgatgcccggctggaggggtacagcctgattgccagggttcagggacaccgaaccagtgacggtgtgctgtgggagcccgggcagcgcatccacgtcatcagcgaaccacacggtatcgatgccatctattttcttataggccgggagtttaccggtgggcgcccgggcggcgcggtgactacgctgcggatgaaagaagatggtgtctggatacccgatgcgtggccgaagaagaaaaaggcccgcaaggggcgtaaaaagaaaaaacaggagacagcgataatcgatgtggaaccaggttga

SEQ ID NO: 225555 - DNA, 582 bp, Klebsiella pneumoniae
atgtggaaccaggttgatttacgtatccgctctgcgctgcgcggtattcgccttgctttccggggacgtttaacccgcgttaaaagcgatttaaccatccagcaggtgcagcttaaagggctggccggcgagcagctgcaggacgccgaactgttccagcacttcgggtttaccagttgtccgcctgccggcactcagtgtattgtgctccccatcggtggccagacctcgcatgccatcatcatcgccaccgagaacggtgcataccgtttgcaggtggccagcggtgaagtggccatctactctgatgaaggtgcttttgtgcatatcaaaaagggccgaatcgtcgaagtggattgtgatgagtaccttgttaaaaccaaaaaatacaccgttgaaactgaggattatggcgttacggcgtcagccggtgcgacctttgagacgccattactgaaagccagcgagcagctatccgatggtaaatcgacgctcgatgagatgcgcgagacctatgatgaccatgaccatgatcatggcggtgatgccggcaccacggataaaccgaaccagcagatgtaa

SEQ ID NO: 225556 - DNA, 357 bp, Klebsiella pneumoniae
gtggacagactattagacccgacaaccggcgactacgccggcacgagcacgagcaccctggctaacgcagtgtatctgcgtctgaccatcccgctcggctcgtggtgggcgcagccggatgtcggttcaaagctttatctgctgaggagagagaaagatgtaacccgcgtaaaaaagcttgctcgccagtatgccgaagaggcgctggcaccactgacggccgacacggatggccgggcaaaaagtatcacagtagaaacttttcagggggagccgggctggctcctcttattgatcaccgttattcaggccgatggtattaccgtcacctttaagcattttgtgagggttatttaa

SEQ ID NO: 225557 - DNA, 1062 bp, Klebsiella pneumoniae
atgccgtttatcacgccaacgtttgaagatatccgcagcgatattctgcgcgatattaaaaacctgaatcccgacgcggatactggcgttgatagtgacctgtatatccgggccagcgcatcggccagcgtggccaccggtatttatcaatatcagggctggatagttcgccagatatttcctgacacggccgataccgaatttctggaatggcacgcccgtacgcgcggcttgtatcgcaagtcggccaccacggccaccggccccctgacggtcaccggcgaacccggcgcgacggcagcggccggctacagtgtgacgcgcggcagcctgatgtataccaccacagcagcgatcacgctcgatgccgagggtaacggtacagtagcggcgagctattccactgccggcgctgcagggaataccaccgcgatcactacaggcacgttcaccagcacgccgacagggttcgacagcaccgttattatcggggttatgtccgggggaactgaccaggaatccgatactgagctactggcgcgtttgctggacattattcgccgcgctccagccggcgggaataagtacgattaccgccgctgggcgatgtccgtggatggcgtcacggccgcgtatgtttatcccctgcggcgcggtctgggtaccgttgacgtggttattacctcggccgacggtttaccctccgccgaaattattgccgctacgcaggcgtatattgacgatgtgcgcccggtaaccgctaaaaactgtctggtactggggccgacgattaaaacaatagaccttgttattcaggtttcgcttgatggtgtgacaattgatgtggcgcgtgaaaatattatttccacgctgaccgactatatcaataaattaccgccgggtgagccctttattcgctcacaggccgagatgctgatttctatcgtgaccggcgtcgtggaccgcgtcatagtttccccgacgtcgaacgtatttcctgacgtcagtgaaaccgttgtggaatggatccgagtcggcagcatcgaggtatcgcagctatga

SEQ ID NO: 225558 - DNA, 657 bp, Klebsiella pneumoniae
atgagtaatgcgaagaacctcttatcccttttactaccaccggttgcctacgatacgcagcaaccagcgctatctgctgaactatcggcagagggtaatgcattcgatgccacggatgaatcagcaaataatgcactgaacgctgttgcaccactttttgctgataacctgctcacagactgggagcgtgttttagacgtcacgcctaatgaggatgacgggtatcagcagcgactcgatcgcgtcttgattaagctgtcagaaattggtggtttaagtattccgtattttatcactatggccagcaggattggctacaccatcaccattgatgaattacaacccttcagggtcggttccagtcgttgcggtgatacgctctatatcgacgatattatttttacgtggcgggtaaacgtctatgggttagaagttcctctttattatttccgctcggggacttcccgcgttggcgaacggctcatgacactgggcgataaagttcttgaaacgacattcaatgaattaaaacccgcacataccctttgttatttcctctacgaatctgaaatgacctggccgctttatctggacggttcatttgcgctggatggcgaacagccaatgaccggctacgtagaaaaaaccaccgattaa

SEQ ID NO: 225559 - DNA, 744 bp, Klebsiella pneumoniae
atgcaaagcctgatgcctccggttgatgcaccaaataatgagttcagcgacggtaacccctcgctggggacattaggaaccattgtcagggcgcttttcctgaataatgtgcaggatgccatccggtctgtacaacgtgaattattgtcaattctggccgctgcaaatatcaatcctgatggcgacagtaataatcaggtgttgcaggccatcaataaaatcatggtggattcaaatatgtcggtaccttacggcataccgctgccatggccaaccagtacgccaccgacaggttatttaatctgcaacggagcgtcatttagcgcggcgacctatccgaatctggctgcggtttatactggcggctcattacctgatttacgtggccagacgatcaaagggttaccggcctctggccgtgcactgctcagtcttgaagctgacggaaataaaacgcatacccatggtgcatcagcatcccagactgacctgggcacaaaaacaaccagcgaagacaacgaacacgatcacggctggggggccgggatgcagaaacaaggtggcagcgaccaggaggtcggtggcaatggcggtactggattcggacggacatctgtgcaaccaccgcattcacatacagtttatatcggcccgcatggtcatacgataaccatcgatgcttccggtaatgctgaaaccaccgttaaaaacatggcatttcattatattgtgagggcggcgtaa

SEQ ID NO: 225560 - DNA, 633 bp, Klebsiella pneumoniae
atgtctggcgatattaaaacgatatttgatggcaatttaattgcaactcaggctggtaccgttcaggtatttcattttgatatgactacccgtgagtttatcggtactgaggaagtttatattcatgtcggtgtcggccttcctgcattttcatgcatggaagaaccaccggtacaaagtgaatatcaggttgctgttcgttccgaagataatttgtcctggtctgttacagatgattatcgcggtatcactgtttatgacattaagacacaggacagccacgttattacagagcctggccctatccccgatactgtaacgagctcagcaccatcaaccccatacgacaaatgggacggttctggctgggtaacagacgcagatgcgcagcatgcggctgatgtttctgctgctgatatgcagaaaaaagagcttttagctcgggcgtcggatgatatttccattcttcatgatgcggtcactcttaatatggccactgatgaagaaaaatcccggctgactgctttgcagacgtatcgcgttctgcttaaccgtgttgatacagctgctgcgcctgatattcagtggcctgttttaacggcgaccaatgccccggaggctgataatggctaa

SEQ ID NO: 225561 - DNA, 3030 bp, Klebsiella pneumoniae
atggctaaattacccgagacgccggcgtgggagtccgaaattcatcaactggaagagtcggaacgggcaaaggctggcccgggcggcgtattaaatgtcccggcaacacaactggcaaacagaacccgctggctcaaagaccagatagaatcagccagtgattaccgtgagtatacattttacaaaacagaatcggatcctgatgggacgatcgcaggactggctaatactcctgatgaaaaaatgtttcgtgttgctcagggagttggagatatttttgcgtttcgttattttctgaagcaaagtggttctgctattgaaatcacaaatttacttggtgtcgccgcaataacaacaacggttcgtgaatttccttcattacctattgcgcaaaatcatgttttggcaggaatgatacttcctgacactaaatttttggtgacaaactctaccgatacctcgctagcagatgaatatattaataatgccggaatcgtggtaccgacagggagaaaaatacccagtaaatcatcagttttaatcggttctgttgattcctggataaacagcaccctctatccgttcggcaccgtgtcctcaatgaatgagaacttgctgacattacaggtggctgcagtatcgacaattacctatcgtgaggcgtatgcgccgctcacagcgccggtagcgtcaggcgatattataaccgtccgctataaatgcaacggagccggaggcattcctaccattgggctgaaaacatcacttaacggattgtttgtcagcaaccaggtaacgctgacagccagcagtgactggcaggaaatccagctgacggcgactgcggcgacggctacgctgctggcagtatgggttaatactcgcctggctaccgatatccagttatctattattgcgtacagcaataataaaaatgcggtgaccgctgctattttaaatgcaatggataatatctcgtctttgtccgggaaaacaaaaatcggggcggttaatgcatgggtaaacaatagcggatatccgttcagcacgttccggcaggctaatgacaaccgggttaattacggtaacgccgctggtgtatattcagaaatgtacgccaatattaccgttgcggcaggcgcctcggtcacgctcagctattccctgggtgtcacatccggacgcctgtttgcccggttagcgaatggcagcgcgtggacgggtgacgaagtgcagctcgccggtggcggtgccagacagaccattacactcgtagccgcggaagacacaaaacaattaaaaatttacaccagagcggaaatatccgcagggtctttttttgcggaggtcaactacgggcaaaaaaatgcgctgacagagcagattaattcgctgtattcggcagtggcatcagctaacgctgttatggccatactgtcccaaagctcaacgtttgattcatttgtaaaaagctccccttacacctacacgttaagtgatgccggtgtggcgtataagcagctactgaacacggtcaacgccgtcactggcgtatcaaccgtcaagatgatgtataaaatatcttctaccagtgccgcgttaaaaatccagagtcgaaatggcagcgcctgggggggcaatgagaagccactgatagctgatggggattatcacgagattgacttaccgatagcctccggccaggtcttttcaggatggggggtttattcagcagcaaaatccggcggctactctgctgatgtcacaatgattccgatttctgccgatggggtgtttttcaccccagctacagctattttgtacgggctaatggtttcatctgcatcgctggactcccgcgttacggccctcgaaaacggccaggctaccggtcaaaatacagatgttatttttccgtcgtatttttatgctgtggatgggcgtccgctgcgcttctacggggccaatatgataagtggttcccgtccatggcgaaacaacacggatattgttatttccagtcacggctatgacggaaagcccgtgctgttaaaagatgcaattcctgacgcaatgatcctgccgtctgaaatcaacgggtcaacgctgaacatcaacgcacgggcagatggttccggcagcgtgtaccgcaaaaaatcggcattcacgaagctggccgcaacgcaggctggtaacgtgaaggtagcgaccatcctggattctctaggtgagcggtgcgttccgtggctttattttgctctcaatacaactggcgcgacttatgttggtgctggctcaaggacaactcgcggcatgacagacgatggggggtatacacttccaaatacaccggcggacggcatcccgtttgatggtcgtggtggctggacgacgttcgactatatcgggaagacgcaaaaaaccaacttttcacagccgttcctgcgtgatgctgtggccgccgatttcgctgcatatccgcagtattgttatgacagggcatacagcgggcagagctacgcagataatccgaatcttgcggggtatcatattttcgatgtgactgcatggatggctgcggctggggtgagcgcatcagacaaactggttgtcatcattcagctcgggtacaacgacctctactacagctatacgcctcagcagaccgttgatgcacaggaattcatgatcgccaaattcagggagaaaatagcgaattcccgcttcgttatttctcatcaggcatttggctggtcaggagtcagcgcaccgcagaactggcctgactttgccaaatggataacgcagaaactgcgaaagtttgataaccgtatcagcgagaaaattctcgtcgcccctgcatgggcacagctgagctacaaatacggaatgaacgaaactatcacagcaaccagtgatacgggcgtgcagactgtatcgttacctgacgatgtccaccccggtgagctggggggagcgcagtggggggatgctctggttgctcctgttctggcagcctggaatctgtaa

SEQ ID NO: 225562 - DNA, 231 bp, Klebsiella pneumoniae
atgcaagatgagtatggcctgaccctaaaggagggcgaggctgatatgtacaaacattcaaccaaccgtgatgtccgctacgcggaacgcgagcttcactttgtgattcccttcactgtacagggaattacacatttggctatctttttctcatcctcaatgcaaaaagacgctaacaggcctctcattccctcctcagacactggcgctgcgtcttattttacctgttaa

SEQ ID NO: 225563 - DNA, 1218 bp, Klebsiella pneumoniae
atgctaaccaccctgatttaccgcagccaggttcatcctgaccgcccgcccgtcgatctcgacgctttagtccatcgcgccagcagtaaaaatttgccccttggcatcaccggcattctgctgtttaacggcctgcagtttttccaggtcctggaagggactgaggaggcacttgagtcgctgttcagcgaaatccaaagcgacccgcgtcatcgcgacgtagtggagctgatgcgcgattactcagcctaccgacgttttcacggcaccggaatgcgcatactggatctccggctgtttgaaaccgatggcgcgctggaggaaattctgcgctttagcacgtttggggtcaccgaaccggtcaacgaccggatgttccggctgcttagcgccttcattgccgacggcggccgctattgcctgcccgagccgctgcagccctctcgctggatgatgatgcccgcgtcaggtacggccgcgccgcagcacctgcccggtcaaccttgccagtttgctctgcaggctattgtcgagccggctaaaaagcgagtttcttcctttgaggctctgatccgcagcccaaccggcggctctcccgtggaaatgtttgccgccattgcggcggaggatcgctaccgttttgatcttgaaagcaaagcgtatgcattcgctctcgccggccagctgccgctcgggaaacatcagctggcgattaacctgttgcccggatcgctgtatcaccaccctgacgccgtaggctggctgatggacagcctgctggcggccggcctcagaccggatcaggtactgatcgaggtgaccgaaacagaggtgatcacctgctttgaccagttccgcaaggtgctcaaagccctgcgcgtcgcgggcatgaagctggccatcgacgactttggcgcaggttattccggcctgtcgttactgacccgttttcagcctgataaaatcaaagtggatgcggaactggtacgcgatatccatattagcggcaccaaacaggcgattgtcgcctcggtcgtccgctgctgcgaggatcttggcattacggtggtggctgaaggtgtcgaaaccctggaggagtggtgctggctgcagtcggtgggcattcgcctgtttcagggctttctcttttcccgaccctgccttaacggcatcggggagatctgctggccggtagcgcgccaggcaatggacctgtaa

SEQ ID NO: 225564 - DNA, 1422 bp, Klebsiella pneumoniae
atgacttcaatcagtaacgactctacattatcgccgcggacgcaacgtgatacccggcggatgaactggtttgtttccatcgccgcggcggtggcgggcttgctctttggcctggatatcggcgtgatatccggagcgttgccctttataaccgaccatttcaccttatccagccagcttcaggagtgggtggttagcagcatgatgttgggggcggcgataggcgcgctgtttaatggctggctgtcgttccgccttggtcgtaaatacagcctgatggcgggggccgtactctttgtggccggctctatcggatccgcttttgccgccagcgtggaggtgctgctggtggcccgcgtggtgttgggcgtggcagtcgggattgcctcttataccgcgccgctgtacctctccgagatggccagcgagaacgtgcgcgggaaaatgatcagtatgtatcagctgatggtcacccttggcattgtgctggcgtttctttccgataccgcctttagctacagcggtaactggcgcgccatgctgggcgtgctggcgctgccggcggtgatcctgatcattctggtcgtctttttgccgaacagcccgcgctggctggcggagaagggacgccatatcgaagcggaagaagtgctgcggatgctgcgcgatacctcggaaaaggcgcgcgacgagcttaacgagatccgtgagagcctcaagctgaagcagggcggttgggcgttgtttaaggtcaatcgtaacgtgcgccgggcggtgttcctgggcatgctgctgcaggcgatgcagcaattcaccggcatgaacatcatcatgtactatgcgccgcgtatctttaaaatggcgggctttaccactactgaacagcagatgatcgccaccctggtggtgggcctgacctttatgtttgccacctttattgcggtgttcacagtggataaagcgggccgcaagccagcgctgaaaatcggctttagcgtgatggcgctgggcactctggtgctgggctactgcctgatgcagttcgacaatggcaccgcatccagcggcctctcctggctctccgtcggcatgaccatgatgtgtattgccgggtatgcgatgagcgcggcgccggtggtgtggatcctctgctccgagatccagccgctaaaatgccgcgacttcggcatcacctgctcgaccaccaccaactgggtgtcgaacatgatcatcggcgccactttcctgacgctgcttgacgcaattggcgccgccggcaccttctggctctacacggcgctcaacgtggcctttatcggcatcaccttctggctgatcccggaaaccaagaatgtcaccctcgagcacattgagcgcaacctgatggcgggcgagaagctgcgcaacatcggtaatcgttaa

SEQ ID NO: 225565 - DNA, 174 bp, Klebsiella pneumoniae; identical to SEQ ID NO: 134724

SEQ ID NO: 225566 - DNA, 1344 bp, Klebsiella pneumoniae
atgaataaaatctgggtcgggtgttttctgacgtctctgtatctgccatccgttatggcgcaggcgccgttatcgctggaggagcgactggcgcaaatggagcagcggctaaaggcgacggaggcgcgcgccgccagcgcagaggcggaaattaagacgctgaaaggccagcagcaggccgcgacggtcgcccgcgcggcgcctgcttcgccgcgtttgcagctaaatgacaatggcgaattaaaattttatggcgacgtcgaatttaacctcgatggcgccagtcgcaccggcagtctgacgtcggtcaaaaccagcgcgaataaaagctgggcgcccggcgataaagagcgctgggatattaacggtcgtattctgttgggtttcgatggcagacggaatggcgccgacgggcaatatgccggattcagcgtgcagcctctggcggatatggatggcaaaatgaatcttgatgatgcggcatttttcttcggccagcaggatgactggaaaataaaaataggccgctttgaagcctgggatatgttcccgctgaatcaggatacctttattgaatattcaggtaataccgccaacgatctctattccgatggctatggctatatttacatgatgaaagaggggcgcgggcgcagcagcagcggcggtaaccttctgtttagcaaaacggtggataactggtatttcgaagttaacaccctggtggaggacggcagttcgctgtttgtcgatcagaactatcatggtaacgcactggaaaaccgcaaaaatgtggtgtacgtgcggccggtggcggcgtggcagtccggcgcctggtcggcggccgcggcgatagagagcaatctcgtcaacaatgcttacggctatcagagccagagcggacgctgggtcgaccagtcaaaccgcaccggctacgggctgaccatgagctggaacaccctgaaaagcgatccgcaggatggggcggtggtcaatctgagtaccgccctgctggacgcggcggacgaaaccgacttcagcgccgggatcaacgccctttggcatcgcgtggagctgggctatatctacgcgcataacaaaatcgaccagttcaacatggccggggtgagcggcgagtgcgatgacgactgcgcaatcctcgcgccggggcgctatgacatccataccctgcacacctcctggcagttgccgaatattatggcgatgccgaacttcaatatttaccttggcgcctacgcctcgtggctcgattccacggcggcgaagagcgggaattccgatgaacgctatggcgcccgggtgcgcttcaaatatttcttctga

SEQ ID NO: 225567 - DNA, 207 bp, Klebsiella pneumoniae
atgttatccacagaaaagtgggataactggggaaaagactcactactggttcgatttacagccttgacgtgcgacgaaaatcgaatttttagagaaaatgtgccggtggcctgcgcggaatctgtggataaaatcgacattgctcgatctttcatcagtcggcggatcgcatgtgtgatgatcgtcacgttatgctgtaatgtgtga

SEQ ID NO: 225568 - DNA, 1098 bp, Klebsiella pneumoniae
atgaaagttaaagtactgtccctcctggtaccggctctgctggtagcaggcgcagcaaatgcggctgaaatttataacaaagacggcaacaaattagacctgtacggtaaaattgacggtctgcactacttctctgacgacaagagcgtcgacggcgaccagacctacatgcgtgtaggcgtgaaaggcgaaacccagatcaacgaccagctgaccggttacggccagtgggaatacaacgttcaggcgaacaacactgaaagctccagcgatcaggcatggactcgtctggcattcgcaggcctgaaatttggcgacgcgggctctttcgactacggtcgtaactacggcgtagtatacgacgtaacgtcctggaccgacgttctgccggaattcggcggcgacacctacggttctgacaacttcctgcagtcccgtgctaacggcgttgcaacctaccgtaactctgatttcttcggtctggttgacggcctgaactttgctctgcagtatcagggtaaaaacggcagcgtcagcggcgaaggcgcgaccaacaacggtcgtggttggagcaaacagaacggcgacggcttcggcacctctctgacctacgatatttgggatggcatcagcgctggtttcgcgtactctcactccaaacgtaccgacgagcagaatagtgttccggcactgggtcgtggcgacaacgctgaaacctacaccggcggtctgaaatacgacgccaacaacatctacctggcctctcagtacacccagacctacaacgcaactcgcgccggttccctgggctttgcaaacaaagcgcagaacttcgaagtggttgctcagtaccagttcgacttcggtctgcgtccgtctgtggcttacctgcagtctaaaggtaaggatctggagcgcggctacggcgaccaggacatcctggaatatgttgacgttggcgcgacctactacttcaacaaaaacatgtccacctatgttgactacaaaatcaacctgctggacgacaacagcttcacccgcaacgccggtatctctaccgacgacgtggttgcactgggcctggtttaccagttctaa

SEQ ID NO: 225569 - DNA, 1335 bp, Klebsiella pneumoniae
atggccataaatattgcggaaaaagatttacaagactggttcgtagacaaggcccggaaacaaactatagctgacttcatcataaattcagacgtgctagataccatacaaaattttcagcaaaaacctaccaaagagagtgaacgaatgaggttgctgggattaaacaatgcaagaaaggtttatgatcgattaagtaatgcaaaatacttgtcaggaaatctaagcgtctccgataaaggtcacaaacaattgaggcctgatctcgttttaatctccgaggatgcaaactacctattagtcgaattaaaaacccgtaaaggaacagaacggcaggcagtacaggaacttttagcgtatagtgcagctatgaaaatgcagttaccatttatcaatgagttcatttttatcattgtcgcactacattgggatacgttgctaacattttcagtacaatcacttatcatggatggaaagcttgtattaccactaatattggagctagatcagaatgatgactaccagctacgtattcatcattccatttttaatatcaagcctgagtcaccatatgaccctttccttgccatggtgccacatacaatagcaaccaccatttatggtaatgtgaatgaacctcgttcatttagagcaagaaattacactttaaattactttagatacttatcaaatttaatttcatcagattgccgcaagaccaaacaaagcgggtttacattattagcaaggagtcaatttaatagacaatctatttgtcttggactgactgtagtcacagttaaccaattttgggaatacagcgaacaccattccagtggtatttatccaaacagggatatttccaaaagaggtatgagacgagttcatcagaatgcagcaaaacaaatacatgatgagttttactgtaaaccgattgaaaaagatgacatgtacagagagttggaggatgtatttcttagtgcagaagcttcgcaggcagaagcaagcctgtatgcacaaagctcactttcctttgatcttctccaacggtacacctcacttgagagagagaagttcattcagcagactggcttcatccaatcttttgaacttggcgggcttaataatctgaaagaattgctgtcagatatgcagttgcatcgaccaacacacattgatattttgtcaacttttggtgatgtaaccgattttttacttgagaaaagtttaggaatatcacttctcgatattgaattctgttattttcaaaaactaatggaagattttcagagcagtatgctcaatagtcagcaatacgtagaccagtacagatga

SEQ ID NO: 225570 - DNA, 741 bp, Klebsiella pneumoniae
atgaccagcaaattaaccagagagcagcttcacgaacgcgctcgtgaaaacgtcaaagcgctgaaaatggcatcacgacagacagcattcgaaagcgcgcgcgaagaaatattggctgacctgcagcttgctgaactggcgctggccgcaatggccggcgagccggtggcggtctgcatcgtagaggacggtcaaatgtgtcccgatggctttggtgagtgcgatcatagtctgcccgatggcacacatgaactgtacgccaccccgcagccagcgccggaacatcccgaagtgctgccctgttcggtattgcttgagctagggttgctctttggcaaaggcattaaaaccagcaccatgcttgccgcactggcgcgcagggccgtatacgaatcagatatggctgcgctatcaccggaagagagagcggattttcagacgcgaattgaggagttcaaagcgctgattgcgcagccagcgccggtagtgcctgatggttacgtgatggtgcctatgaggttaaccgctgagaacggcacaaagggggcgctatcaggtgagttttcagaaaccaagttcgtaaactgcccggaatgctttggtgatgatgaatgtgaaacctgtgacggcagcgggagaattgaaatcacggtacctgtcacctggacgactatcaaagaaatctgggctaaaggcgttgagcatttctcagccacagcaagggaggtgaaaggtgaataa

SEQ ID NO: 225571 - DNA, 216 bp, Klebsiella pneumoniae
atggctatagaaaacccgagttcatgcccgcactgcggcggtgagaatggattccacacgaaagaggttgtggatttcaaacagttttatgcttgggatggctcattccttgaagggcagcacaccagcggcattcgcggtgggaaagcattctactgctgcgactgcggtcggaatataacatcgcgcatcaataagcctggagccaaccaatga

SEQ ID NO: 225572 - DNA, 135 bp, Klebsiella pneumoniae
atgaatattgatcctgagaattacagcaaatacaccctgcgtcggttcgccgccctgttcgatgtgaactgctgggtgctgattgccggagtaaccgttggtatctgcatgtttattgaatgggtgacagcatga

SEQ ID NO: 225573 - DNA, 801 bp, Klebsiella pneumoniae
atggggttaaaaaccatggctaaaaactcgatcgacgtgtacggcgccagcggcaaaaccaacgccctttcgtttgaaccggaaaagcttcatctggtcaccgataagacccaccctctctacgatgagcgggtccaccttcctatcgacgaagggatggttctgaacatcaaggagctgggtgtactggagccgattatcgtctggaaagactctgaaactgggctcacctgtgtagttgtaggccgtcagcgtgttaagcataccctggaggcaaataagcttcttttgaaagagggcaaagccccactgcttgttcctggggttgttaagcgcggatcagcaaatcagatggctaaatacatggtcagcgaaaacgaaattcgccgacctgatacaccgcttggccgggctaaaaaaatgtcagatgcactcgaccgcgggctcgatgaggacgacattgcagtattgtttggctgcagcgttcagaccgttcgtgcaacgctctccctcctcgaggctacccaggccgtccgggaagcggtagaggctggcacaattaccgtcacccaggcgcgtcagttggcatcgcttaaacccgaagagcaacgggaaaaggtcaagctgatcgagacagcgaccgccggcactacgggccatgaaaaagcccggcgacagcgcctggttcttggtgaagcaaagccgcgtatcaaatcacgcaaggaaattgcaaaagccctcgaagatgccagcggcgagtatgccgaggctctgcgctgggtgcttggggaggcggtatga

SEQ ID NO: 225574 - DNA, 372 bp, Klebsiella pneumoniae
atgagcaatgatcgcatgaccaatgttccagatttcctaggtgaacttgacgccggcgtattcatgaacaagattgcggcggcgctcaataccaccgcgctcggtgttcttaacaacggcaacaaaggcaaggtagtcctcacctttgattttgagcgtatgggcaactctgttgaagagaagcgcgtcaagatcaagcatcgcctgaattacagcacccctaccccacgcggcaaagcgtccgaagaggacaccaccgaaacaccaatgtgggttaacaagggcggcaaactcaccatcctgcaggaagaccagggccaactcttcggtatcaccggcacggtggacggaaagcttaaagcggctcagtga

SEQ ID NO: 225575 - DNA, 912 bp, Klebsiella pneumoniae
atgagcagtaaattacacggtctggtatgggaagcctgtgctttcaaaggcctgatcatatctgaaatagcggtcatggcccgcctggctgacttcagcaacgacgaaggaatatcgtggcctgctgtgacaactattcagcgacagatcggggcaaagagcgagaacactgttcgaagcgccattaaaaaacttcaggcgaaagggtggctgaagaagcaggagcgtcgcgtaggcggcaagaataattcgaacgtctacaaactcaacgtcgatatgctggaacgtgcagcagctgaagcaaaactcttctacgcaaccccgcgtgagcaatcaaaatttgatgcctcagaaattgagggttcaaaatttgaggggtcaatttctgacgcctcaaataatgggtctgcatcccctcaaatattgcggggggacccctcaatggttgaaggcgatccgtcattagatccgtcattagatccgtcatctaaaaaaccttcttgtcgggctcctgcggaacccgacgataagccggatcctgaagtggtaatcactgaccatgcgatcgaagttctaatgcatctgaatcaggtcagtggctcccggtttcagaagtcaaaaaattccctcgaaaacattcgggcacgtctacgtgaggggcataccgttccagatctgaaactcgttatcgacgttaagcatgagcactggcatggcaacgacgagcaataccagtacatgcgccccgagacactttttgggcctaaaaaattcgagggctatctgcagagcgctatccgctgggatgccaaagggcgaccgccacgggaatgctgggacagaagtaagccgcgggatatcaaccaaattggtgcagtgcaaacaaccataccgaaggggtttcgtggatga

SEQ ID NO: 225576 - DNA, 1851 bp, Klebsiella pneumoniae
atgcgtgaaattatcgttgataactttgccggaggcggcggcgcttctaccgggattgagatggctattgggcgtagtgtcgatattgccattaaccatgatgaaaacgctgtggccatgcaccgtaccaatcatccggataccttgcactactgcgaaagcgtgttcgatgtttctcctggcgcagcaaccagcggcaaacctgttggcctgacctggttctccccagactgtcgccacttttccaaagcgaaaggagctaaaccagttgaaaaagcgattcgtgggcttgcgtggatcgttcttcgctgggcgctggatgttggtccgcgggtaatgatgctggagaacgtcgaagagtttaaaacgtggggtccactactggcggcggaaatgcgtccggatccggaccgcgttggtgaaacgttcgaggcgttcgtaggcatgctgacatccggagttcctgcagatcaccctgcgttgttggaatgctgcgaatttttggagttatcgccggatagcgaacaggcgatgcgtttgattaccgggctgggctatgacgtcgattatcgcgaattgcgcgcctgcgactacggcgcgccaactatccgaaaacgtttcttcatggttatgcgacgggacgggcagccgatagtctggccggcagctactcacggggatccgaaatcgccggcggtgatttctggcaaactggcaccatggcgcacagctgcagaatgcatcgactggtcaattcctacaccatcgatatttgaccgcaaaaagcctcttgcagttaacacgttgaagcgtatagctcggggtatccagagatttgtggtcgatagcgataacccattcatcgtgaaatgcaaccacaccacgacgcgcggtaaatatgattgtttccgtggacaggcgttgtattcgccgatacagacaattaccaaaacccacggctacgcgctggctgtacctactctggcaccgtttatggctggaaatggtggtagccagtaccaggcgaaaccacgtccactcaacaaaccagcgcataccatccttaagcaatctcgagcatgcatagttgcgccggtgatcgcgcgccagttcggctgcagtatcggccaccgggcagatgagcccagcgctacgattaccgctggtgatgggggtaagtctcagttagccatggccacgcttattcagatggggtatggcgaacgggtggggcaatcgccacgggttctcaatcttggtaaaccgttgggtactgttacagctgggggcaataagtttgccgtaacaactgcgttcctggcgaaacactatggcgggaactacaccggtccgggcgttgcgcttgatgagccagctcactcagttactaccgttgatcatcacgctcttgtgacatcgcacctggtaaaactgcgtggtacctgccgtgatggtcagcgtaccgatgaaccgatgccgacaatcaccgctggaggtcagcatgtgggagaggttagcgcgctgttggcggctaatgattacgacgagcggcgtgcggatcaagttaaagagttcctcaattcttttggcgtcagcgaactggtgacgattaaaggcatcgtttaccgcattgttgacatcggaatgcgcatgctgcagccacatgaactttaccgcgctcaaggattcccggactggtacatcatcgaccgggactaccgcggagtgaagtattcgaaggaaaaacaagttgcgcgctgcggaaatgccgttccgcccccgttcgctgaggcgctggttagggccaatctgccggaaatgtgcattaacaaacaggagcgagccgcgtga

SEQ ID NO: 225577 - DNA, 477 bp, Klebsiella pneumoniae
gtgatgaagttaactctcaggcagcaggaggttctgaacctcctgatcgactaccagcgtaagcatggtttcccgcctactacctacgagctgaccggcatgctggggtgccggtcccccaatgcggcggcaagccacctgaaggcactggagagaaaaggggccatcacaatcacccgcggggtatcccgcggtatcagcatcactccttcgttttcccgaaaggagctggtcgttaacctcaacagcatcgtgaaagtgaaacttaatgaagtttccctcactcatttggaaaaacaacacgaagagaaccgtatacgttatccggggatattcggagagtttgtaccgttggcgacagacgaaaatggctactcgtcaatgaccctatggcgccttatgtctgacctgggacaactttgctattgcggaggggaggttccctttgagctcaagttgattttggaggatgaatga

SEQ ID NO: 225578 - DNA, 831 bp, Klebsiella pneumoniae
atgaatatcgaatcaattccaaaattctttgccccgaaaggaatgcatatatcagatagcgggagagcaactgccagcgaacaactcaccgtaactgacgttatggctgcgctggggatgacgcaggccgaagcggggatcggattatccatgttcctgggtaaggctggcatcagcgagaatgaccgcatggcctcaattcactggttggccgaatatgcaaagaagaatgctccccgctcagtcaggaaagccgccggcaagaaatttcctctttgcatgctgatcatcgccaggttcgcatatcacgactacgcctcatcagctgctgatactacggactgtacgaaatgcgcaggtaatgggttcgtgaagaaagttaaaatggtcgagaaaagccactacacaatgagattaccgcaatgggcaaaagacctgaggcagtcaccttcggattttgaggttaagcggcaggtgcaggatgtcgatcacgtgctttgtgtgaaatgccatggcaccgggaaaatcagtaagcgctgccagtgcagcgggacggggaagacacttgaccgcaaagaatccgaacttcagggagtgcctgtctacaagacatgtaagcgttgtgaaggccgcgggtttagcaggccaaaatcctccaatgcataccgcggcatcctttcagagttacctggcttgccggagcgtacctggcgttatagctggaaacctttctatgaaagcctggtgaccaaatgttttgtggaggagagttttactgatgctcaactccggagagttacaaaaacgactaatttgataaatttcgcatga

SEQ ID NO: 225579 - DNA, 171 bp, Klebsiella pneumoniae
atgcaacaacgcaaaaactcaaaaaacaatcgcaactacctcatcaaatgtacctgccctaactgcatcaaccaatcagaacatagttacacccgagtccaaaaaggttctgcgctgatgtgcccccactgcagtaagattttcactcaagacaaactccctctagcttag

SEQ ID NO: 225580 - DNA, 312 bp, Klebsiella pneumoniae
atggcaaagcatatgcaagacaaagagagcatggccggaatcacctggctggctctgctgatcattgctggttggggcggccttgtccgattcctgatggatgtaaagcagggcaaagcaaaatggagctggataaatgcttttgcgcagattgtggtttcggcttttaccggggttattggtgggctcatcagcattgaaggtggcctgagtatttacatgatattggccactgctggtatcagtggtgctatgggttccgtagcgctcacgtatttctgggaacgaatcaccggagtgaaagcacaatga

SEQ ID NO: 225581 - DNA, 1866 bp, Klebsiella pneumoniae
atgacccgcgtaagcagagacgactgggtacctcagggtgtcggtggtctggaagggagagcgtgggaggctttacgtgaaaccgatagcagcatccttgtgacagctggtgccggtgccggaaaaactgagtttctggcacagaaggcgtcctatcttctgcagacaggtatttgtccggcacccaaacgtattctggccatcagctttaaaaaagatgccgcccaaaacctcgccgaaagggttgcaaagcgttgcccgagagatcaggcgcggcgctttgattcgatgacttttgatgcctttaccaaggggcttctggaccggtttcgtccggctttacctgagccgttcaatgcgcccggtacgtatcagattgttaatccgtttcgtagggattatgacgattttattgagcgacatggctatcacggagtgagtgctcaacagcttgagagaagactgcttctgacagacctgccaattgacttgtcaaatggatctgaagtacatcgtgcgttagcagattactggcatgaacaattcttcgggggcgacgagatatctctatccttcccgatgataaacaggcttgtaaaactgctgcttcaggaaaattcatatattcgcagggctttacaggcaacatatcccatcgtctttcttgatgaataccaggataccacctatgcccagtatgacatgctactaacggcattcgatggtagcgatgctgtctttacggcagtcggcgatgataagcagcgtatcatgggatgggcgggagccatgaacgacgcctttgaccagtttgaaaacgactttgctgccagacgcataacactgctttctaactggcggtcacatgtggatctggttcgtattcagcacgagattgcccgccggatagacgatagtgtggaagaagtgcaggcacaagggacccgtgaaatcgaaggtgaggtttctgctatctggcaattccggagcgcagatgacgagaacaattatctggctgaatgggtgagcggtgaggttcagtcagagcgtgttgcaccacatgatgtagcgattctgatcagaatgcgggcagatcaggttgagggtgaaatagccccttcttttgcggcacgaggtctcaggatcagaaatgcggcccggtcagtcggtgaaattcagatacaggatctgcttggtgaagagctgacctgtatatttgttcctttactccgcctgggagcgacggagcgaagcccggaaaactgggagcagacccagcagaactatctgtttttggaggctgccgatccggataacgatctcacgcaggaacgattgctggttaaacttgaagcattcgtccgtaaattaaggacagagctagcacagcgccagcctagtccggattcggcggaagagattgcagacatgcttcttgaatttgtcgggacccctaggcttcggcaatcctttcccgcttaccagcgtgcaagagattttgagagggtgtggagtggatttgtcacactcctgaaagagtgtgcagaacacagcagcagctggacggaggcgctggatgagttcgaaggtattggccaggtagctttgatgaccgtccataaaagcaaaggtcttgagttccatacgatgatattttatgggctcgacaatcagacttggtggagccttacgccgcaacggggtgaagagctaaacactttttttgttgcctttaccagagcaaagcagcgtgcgtttttctcccagtgcgttgagcgagggcatgctattggctggatacagcaattattggccccggcgggagtcgaaaccatagatggtacgactatattgggtactacgtga

SEQ ID NO: 225582 - DNA, 1962 bp, Klebsiella pneumoniae
atgaaaatagagaagataaagctacagaattttcgttgtttcgggcatgaggtggtcgagctaaattttgaggaagaactgacaatacttgtcggcggaaacggctccggaaagacggcagtgctgcaagctgtgtcccggttgtttggtacatcatcagcgcagcggtcggtacagcgtcgagattttcacatacctcttggccggcaggagctgcagtctggcgacagtctgtttgtcgaagcggtacttgccttccctgaactggaagagcaagacgctactcctcttgatgccgttccggagttctttaatcagatggcggcttccggtgagggagagccccttaaggcccggatacgactacaagcaacatggacggatgacggtacgccggaaggagcaattgaggaggatatacgctggataagagccctggatgataattttgaatgggatgactgttccaggattcaggctgtagagcgctcttcaatccagtttatttacttaccggcaaatcgtgatgcgacgactcaagtgaccgcccttctaaaagggcggttatggcaggctgccaaatggtcgacggcatttagggatgcaagctatgttaatgccggtcagatccagagcagtttcgaagaagaggagccgtcgaagtttctgctggagcgtctttcgaagcgttggcaacaggtgcatgaagccgatacagacagtaaaccgcgtttaaggctcatcgagaaccgttttgaggagcttgttcgtaaagccgaatttacttttacgcctgatgaagaaggtcaggagcgtcatttgtccgagctgagtgacggtcagcgctctctgttccatatcgctcttacagcggcaacgctcgaaaccgagcgggaagctttttctttgcctgctgatgacagctcatttgaacaggataagttacgccgtattcacctgacgattcttgccatcgaagaaccagaaaacagcctgtcaacgttctttttatctcgcatcatcaagcaggcgagagagattggcgcactgccttccgctcaggttctgctatctagccattccccagctatcctgagccggatagagccggaggaagtgagatattttcgtatggaccggagcgctcggcgctcatcgatccgagaactgactctgcctgaagatgatgttgaggcaagcgtttatgtcaggctggctgtaaaggcataccccgaactttattttgcgcgatttgtaatcctaggtgagggagactcagagcgagtcgttattccgaaaattgcggaagagatgggggtttcccttgatccatcattcgttcccgtcgttccgctcggtggacggttcgtagcgcatttctggcggctgctgaatgatcttgagattccacatgccacattgctcgatcttgatctggggcgccgacatggtggggtgaataccatgagaagctgccttcagaatttggccgatatcgggagtaattttgggagcgccaatggagctaatgttgctcagcttaccgaccaacagctttataatgaaggcctgcaaggtcaatggcttcaagcattcaggagggaaggtgttttcttttcctatcccattgatctcgattttgccatgttgcacgcctttccaaccgcttatcaggttgccaatcctggtggcaatggtcctcagagtagtgctgttgctattcaagccaaaaaggtcagtacgctgaaaacaggtggtaatcctgccttgtataccgcgcattatgatgacgctttcaaatggtatccgtatttgttcctgagccgcagtaagcctgaaactcaccttgcggctttttcccgtatcgcggaaggtggtgttgctgcgtccgctcctgtagagctcagggcgctcattgagtacgttacggataagcttaatctgtcaggagagagtgaatga

SEQ ID NO: 225583 - DNA, 330 bp, Klebsiella pneumoniae
gtggtacgtggctaccagatggccgactctacccgtgatatgcgccgctcggtttatacgagagagctgaaaacgaaatttggcaatcagaagctgaccgaaaacacccacgaggacttgcgagccctgaccgacgccatcgtagagcgcggtgcgcctgctacggcggttcatgcgcgtgagattgtacaccaggtataccgctgggcgactgagcgaggccagaaggttgagaacccggcagacctggtgaggctcgcaagcattgccaggttggggccgacagatcgaacccttacgcccgaagaaatcaggatcatgtaccagtaa

SEQ ID NO: 225584 - DNA, 2154 bp, Klebsiella pneumoniae
atggccgaacttaacccgcctttgggaacgacgacgcctgaaattttcctggataacgtcaagcgcgctgacgaactggtgaacggtccggccggaacggttaacgaccgcggcggtgaaccgctcgatacctggcgccagatgatggcgaaaaacgatgaggtcaggcagaacctgatcccgctcagtaagcaataccagacgctggcagaggcacaggctgatatcgcgaatatccctgctggctcgacaacgtatgttcgcagccatgacgacagcgcgctcgctgatgagtacatgaataacggcgggacgctgcaacctaccgggcggaaaatgccatctcagggagccatcacagcagtgatggcttacatctcatcgctcatatctactgatgattctggtgaccccctactgacgctgaatgatgaagcgggatttcgccttgcggcattcggccttaacgcgatacagagcaatgcaatgaatgcagaatatgacccggatgtatctggctttgtgttccgggacagcgtcggattcgttattcagcagattggaacgccgttgctcagtgctgtagacagcatacagcctgtacttgaacagcagcgattggtgactgaggcattcagcgcagaatatgatcctgatgtttctggatttgtatttcgcgacagtgtcggattcgtgctcatgaatcttaatggcgagcagggtaatcaggataacggtggggtagatgatatttcgcgcagaaatgctgcaaatcttgctcttgcggcggcaattcgggacgagattaatacccgcattgctcgtcctgtatacgattacaacattctcattacggatggccagtcgctgagtaacggagtggaggggtgggccgcaatgagcaaagacattcgtcctgcgctgaacattaatatgctcggtgactccgtccggcccaaaaatgagaatggttcaacgtttacgccgctgaacggggctgaaatcaggccggcccgtgcggttgttcaggatttgattacccctcctgacggcggaaacctcatgactgatgaggccgtggctgcgctgcctcgtggtgccaacaatttcggtgaaaccgtcgatatcggcgcgatgtggatgtggcgcgaaatgcagttgcagttccggggactggcaacggatgagcgcaagattgtggccgtcaactgcggtgttggcgggcagattattgaacgtctgtctaaagggcattcctggggattctacaaccgaatcatttcagccgttacccagattaaagctattgctgacgccgaagggaaaacctgcggcgtggtgggttttttatatcttggcaatgaatataactatgacagcacaaaagggggaacgacagaccgcgcagaatacagagcgctcctgagaaagctgattgatgacgtcattgcggataccgcagccattacaggccagactgagccacctctgactgtgctgtatcagaccagcggcagctggacgcgggacagcgcgaacatgagcattggagaggctcagctcgatatctgtgcggaagatgcaaacgtcatgatggcatcgccggcgtatgccgtaactgacaaaggtggtcatcttgacgcgaatggctatcgctggctgggaatgcagttcggaaaagtgctccatcgtgcaattgaccggcgccagaactggcggccgctgcaacctctgtctgtcacgctgatcaaaaatattctgcgcgcggattttctggtgtggagtccgccgcttcagttcaggtcatgctatgtaggttcatctccgacgatgtatgccgcaaaaggattccgggtcactgacgacgccggggatgttccggtgacgcgggtcgacattgtagccgataccgtagtcgatattacgctggggcgtgaaacgagcggcgatgtttatctctggtacgccagccagaccggcagtaacggtaacggaaacctgtttgacagcgacgcaacggtcgctgttgcgaattacgaatatcacgacggtacggggcaatatccggaatcaaatattcctgaactggtaaaccgtccgtacccactgaataacccctgcgtggcattccgccgccaggcaaccattatctga

SEQ ID NO: 225585 - DNA, 735 bp, Klebsiella pneumoniae
atgggttcacgcattactgttccgggtttttttggtgacaaaggtctcggtttcgatccgcttattcgccggggaatgaaatttcttaattttttcggagagacagataaaaccggtcggaacctggcgccgggtggtgcggctgcgactgtgctgggaacgcccatcgtgaaggaaaatggcgtccagtttactcctgcaggcacattgcttgatacgggtattcttcagtctcttgattttacttttttcaccatcttcaactgcccgacgctgtcccagattttactcctgagtaacttccagggcccccggcaatcggggtctggtactacatcaggtgtggttatcaggacgcagcccggggcaacgagcatgactctgaacttttcggtaaacactatcaacgggagtacatcgacgcagcgcacagttgcactcggcgggttgcaggcaaacacaaactatttgttggctgcacgctttaaatcaggccagaaaatggatttcaaaatcctgaacaaggtgctgtcggcagagaaaacgacagacatgggcgatccggcagacctgggggcaaaattgcggatcggcggcagttaccagcctgacctgacaaacgccgggattcacagaatgtctgcgttacataatgtcgcgttgaccgatgatgagattacaaaagcaggagtacagtggactgcttgggcgaacgccgtgggcgttgtgctgtag

SEQ ID NO: 225586 - DNA, 3354 bp, Klebsiella pneumoniae
atggcctttgatccgcctcttgggagcagttcgcctgcggtgctgctcgataacgccactcgactggataacctgctgaatagcctggcgctggtcttccctgaccgcgcaggcgaattgctttacacctggcgtggcatccatcaaaatctgatcccgctcagcaagcaatatatgacgttagcagctgcgcaggcagatatcgtgaatatccctgttggctcgacaacgtattaccgtagcccggatgatagtgctcttgccgtcgaagtgatcaataacggcggtacacttgaggaaactggaaggaaaatgccttcaggtgcgggggttgatgcaaaagtaagtgctttatatgaatacataaatgataaaattggcaccattaatgttttgcttagcgaaatctcctcacttccgctaactaagtttaccagtatctcaatgcctggtgacactgtagtcaatgtcgggaaagaatctgttttacgcattaactccctgtcagctgctgaaacttctgacgcccgaaaccagaaaaacacactaaaagtaaccaatctgcaaagcggtgtcacaacagtaattgcagaactacttccggctgaatactttgctgataatgtacttaactctccatatcactctgtccagctggcaaaattaaaaccgtcaacagtcttgtatgatgccactaactcagtagcaagagcgatatttaacaacattccacttgtcaatacttttatgtcaattactgcttacgctgtaattgacaagtcaggtgattttatttccggtaacaccggtgcgtatggctcagatggtaaatattgcacgctttactctaaccctgacggctcaacctcaatccagctaacattcccctattctgatattacgggggcagggtttagcattactgatgatggcgttaaaaactatttctatgcctcattttatgatgtgcatctttattacagaagtaccgatgtatcagtatataaaacggcttaccttgccaaattaagcgcagaacctgcgacaatttctgtaaacgattatctgaccattgacgcagatattctttattacaacggaatttccaggcagaacactgacaataacccttttacccgttttgttgctgatgtagtaaatgacatggctaccaactacagtggtcctgtcgagttaaaagtgagtttccctgcaggaatggtgtttggtcacaactgcattaaggtatctgacgctgaaggaaacgtgtttgatgcgcaattttctgcagatgatttcgttaaccttcgctttcagtcaactgaaggttatcaccctgatggctcattcaaaacgggggccgtgtggatcgtcgattccgtatcggcgggacaaaagaaatattataacgtggatgtttttggttatcgctatgatgatacgatctattccgaaggcctggagtactacgcgccttctgatgccctgaagcgttataacattaaagtgggtgacttgtattaccgctttggttttgccggtggatcctatggcctcacatccattgatgctgctaaaaatgatgatatcaaccgtatcagatgcacgctgagcccgcagcatcgctacgtgactgcaggtgctcaggttatcgagtatttcacctacaacgttacgctgaaggtcatcaataccggcccgctttttaccgagattgagcgtacaggctacaatgccgccagtgccgtttattcggcaggcattattaaggccaccactcgcttccgcatttttaaaaacggaattgtcgttgtgaaaaatatggtgactgccctggaggagattcctgttggtaagatgtgtggggcaactattagctctaatgttatttataaaaacgggacgactccagcctattccggtaccgctgctgcagcaatcacaactgggaatacagccggtaacggcaggttttcctgggtgccgaccattgtaaacggggatattcacagggatggaacctctgcgggcccaaccagaccgacaggcatcacgatgacgaatgccgcgtcagagtttacgctgggcgtaaccacaggctggcaatattcatccctgtcggattattcatttcttaactggccggttgagaaaaactggacatggaccattgaagcctggctgaatgccggtgaaactgaaacagacccgttaacgcttgcgaagaaagtctacaatcggcctgtgggttttgcgcgtggcgggaggcttcctaactttgcagtaaaagaagctgagaataagctgagagtattgcttgatggggttgctgacttctggatgaatggagactcagctggaataggcggtatggattcgaatgccgggccatatgatattaataccccgtggggatatcttgcgtatcgtgaactgcaaaagccctctcctaatattgcggcagtatgggccaggtttaaacggtgctgggatgataactggcgaagcacaaatatcggaacccgctatcttgagggagttattaatgttgctgatttggtcactccggtactcaaaccatgtgtttctgtatatcgtgcagctgagtttttgggtgacactgcaacaatggcggcaatgcagccttatattaagtcctgggctgacgcgatggtaacagcagtcgcagcaaaaggaggtgtgccgaacacctatacgtcatcttcagtcagtgccgccgtgaatattaatatctacggcatgctgcttgtcgcgctggcaatccacgccgggatggatactggcggagcttaccagtcatgctataacacggtgatggcgaatctgaccaatagcagcactgttggtcgctatctgccaagcatgctggattcgatgccagtcagcacctccctggcaagaagccggtggtacaactacgacatggacctggcacctgaatacctcatgatgacggagttactcggcggaacggctctgtttaacaacgtcaattacgggcttcagggtttgtgtggcgatggccggctgcgggggattgatttcattatttccgaaagcaggaggggtatcatttcaacgccagttagtgtggcattgacgatgatgctggttcggcgggtatcgactgggaacgctctgttggcctgcattcaggcatatgaaaaggattacctaactgatccgtattcatcaggacgtttctatgatcactctccgcgtcttgcgtctggcataccaacaactatctcaagtcataacaaggtaatgattgagatgttgtcatcttattttgtacaccagattgcaaaaggtaaggcgtcaggaacgtaa

SEQ ID NO: 225587 - DNA, 1401 bp, Klebsiella pneumoniae
atggctactctggtaaaaagcagcagtaaatttatgggtcgtaaggccgtcgctactgatgccccgctgcctgacaatgcgttaatgtatctggactttgaaaacggccagtttatccgcagaaccgcaaccggggcggtaattcgcagcaacagcataactgacgtgatgtcatttacccgcgccaccgtggcaacgtatttcggtgatgacggcctgctgaaatatgcagcagctggtgaacctgttattgaatatgaccagaatacgctcgcctgtctggggttccgtcccgaagtgcaggccactaaccgggttatcaacagccagaactttttagcagcgaactggagcaaaacggggatcgaggttaccgataatgatgccgtgtctcctgacgggaacaagacggccagcaaaatcatagaggccgcaggagcggctaataccgttcactctcttgccacgacggtcacctatgctgcggttgtcggccagccctacacattcagcatttttgcaaaggcaaacagcggatctgttatgcagattgcattgcctgcgggcgtcgtcgccagcgcgcagttcgctaattttgacctggtgaacgggaagatcacgcgctcctctccgctggtcatgcaggcgaatatgaaaaagtgcccgaatggctggtaccgctgctcgctgacgatcaaccctgttgccgcgggcgaaccgggatttactgtctgccttaccggcggaaatacggcagctgaagcactcccggcctacagcgcaacaaccgtcgcatcgatttacatctggggcgcccaggcggaacgcgccgcaggctatacctcatacattccgacggcgggggccgaagcgagccgcgatgcggatatattaacgaccccgtccggttatacactgattgattctgcaaaaggcgcgttctttgtctcggtggtgcatcctcacagcctgaaattattatcgacggcgtatgcttcgctggcctgcgtcgtcgttctggataatgcggtggaaggtgcccattaccgccttgcctggcgaggcagggacaacatgaacggacaggcggcatttgccgaactgaatgctgccggcgggacgacggtatccatcaacctgccgccgttaatggcggtctcggattccgaacaggcagccttctgcatgttcagtaccgtcgatttatccatgaaagcatttgatggtcaggtatggaattcggcatcgcccacgatcatgcctgctacgctgtcgcgcatctgcctggggcgctcatatatcggcgcatcaaactggtttaacgggcatatcaaaaagttcgtttactgggctgataacatttctcagtctgaagccgaggaatatttttcagttctgtaa

SEQ ID NO: 225588 - DNA, 1989 bp, Klebsiella pneumoniae
atggcctttaacccggagctggggagcacgtctcccgctgtgttgctcgataacgccgagcgcctggataagctggtcaatgggcccgccgaagatgttcccgaccgtggcggtgatcctctttattcatggcgccagattatggcggtgaatcaggcaaaacaggatcagctcgacgacatcattacttcccttgataccgccagttttacgttttcagacactactgccggactgacgggaaccaccgacgggcaatatttcagagtccctcagggtgaaggcgatgctgttggatttatttattataaaaacagtgccggagctgcagttgtggtggcctcacttgcttcagccgagatcacaaagttgctcgggaaagacgacagccagaaactggttgcctttactgatgatgacggcgccagcgcgttggcactggatgagaggggcgggatatttactgctgactcgccagaagacatccgcaaaacgattgggaaaaccggttatgaccgggctcctgccattctgaaaattacgtccgcagacaaggccgtacatggttttatggatgaattcggcggcgttcagttacccggcctgcaggggagcgttcaggagaatatcaaaaggctgaataagcgactttctgagcatctggaacggcgacgtgttcttgatgccagagagtgtgggcttgacccgttttcttccgaggacatgtggtatcccctgcagcgggcgacaaactggctgggggctaatggcggcggcacaatctatatccctgaaggggcttatcgaatttcccgccctgtcactccggtggctggagtgggttatatcggcgccgggaaaaagaaagctcgcctgctgccattcaaagcgaccgcaccgtttctgtatcggggtaatgaaacctatatcgataatctgctttttaccggctttaccattgacggggaaaatcagacgctcaatcctgcatccggctatcttccggaaattaaggcgatatttatccagtactggtccaacagcatcattgacgacatggaaatcgttaatatcggggccacaggactcggtgttgatatgcattacaactgcttaatcacacgttgcattgtggaaaactgcggtcggctggccgaacaaggtgcactgggggcctctggtatcgggatcggaaccggattcctgaacagtgaaccgctctatgtgtcgcaaaacctgtgcaggaacaataaaaactacgggattttttacgagccacaaagaggggtgggaaccgcacaggacatcatcactacggataatgtctgccttgggaattacgcggggattgctgactgtggtgttgaggggctgattgtctcgaataaccagatgcgcgggaatacgcatggtttcctgatgtaccctggcacaaacaacgggggtaagcctggccgccgtggccgtctgcagggcaatattatcagagggaataccgagaacggcgtgacatctgtttgctcaaaaaccgacccgctgttaggcgaatacgccttatccggcaatcatatttatgaaaacggaaaagacggtatcaacatgaattacagctatccgacggttaaaaacctgaataacgtcatcagtaataatgaaatataccgtaatggccgtcatggggtttcgcttgaaggtggcgatgtcgtgaatcttgatatcgtttataaccgtatttatgacaatggtcagacgacagccggtcacgctgttaatattcaggtccccatgtcccgctcttctgtatcgaataacaagcttcgtgatacccagtccacaccgacgcagcaatacccggtgtttgcgacaggggctttaactgacgtagacatttcctttaaccactgcgtcggcaacgcacagaacatgctgagtctgacgggtgttaaaacccgcgtcaccacattcattaatcccgggatagatttatga

SEQ ID NO: 225589 - DNA, 975 bp, Klebsiella pneumoniae
atgtaccgatatattaaaaaacgtgtttacgcattactgggaagtttactggggattttgcttactttggtcgtgaccagaattctactcgtcagcaatgacataactgcaaaagcttggttcatggcaacatttgatgccagcatgatggtcgtgctcgccactcttttgtcgctttactgcattaataaagttagcaacaaatttcctgataccaatactctactcccattttttggagtaatcgtatggtcgttgctgctgttaagctattatgttctaagatataaaatcgagtatcaatcggccctatcaatcatagtcgctggatcgatagctgggatgggatggtggattcagtttattacttcagcagcaagtgaccgacgtaagcatacactcaatatagtgttaagcacgcgaacctgttctgaataccagacccatctgagaaattttacacgcttgtggagaggcaaccgtcacgttcctaaagaactgtgtgagtggcgtgatgacccagataatccaaaattcaaagatgctaatgtccctgatgatgtagtaaaagccatcaatggtttagtctatattcttaatttttttgagtttcttgcccaaggtataaaagctaacgatctggatgacaagcttttgagagaatgtttctgtggttttctcgagggcctcgaaagacgagcttattacattttgtctgaagcccagaaaagagatgaacgctacttcgaaggtattatttatctttgcaaacgctggaatagtggtaagtctctgattgaaaaacacaaacactccacaccgcctatcgatataggcaactgcttccctgaaaaagactctgtaaaaaaaatgttgggaataagagaaccacacatcaacacgaagcgtcgtagacatcggcaacgaggaacaagaccagtgcaaacggaagccgctaactcaaatgtagcgtaa

SEQ ID NO: 225590 - DNA, 138 bp, Klebsiella pneumoniae
atgttagccttcaccgtaaccgatgtaaaaagttttcatgacatgtctctccttgttgtgctctgcgacgaagtaaaaatcagactgaacttacaaaacaaactaaccgtttctagttgggcaaatcttatcaagtaa

SEQ ID NO: 225591 - DNA, 525 bp, Klebsiella pneumoniae
atgtcagatctaaattccacccaaattgatggctttcataatgaaatgcaagatttaataactgtttatataccgactcataatcgatctgatttattaatgagagccattgagtctgtaaggaatcaaacatataaaaacattgaaattattatttgtgatgatggttcttcagatgatacgcagcatgttttattagatttggctagtaaagatggaagaattaaatatctaacgaatgaaaagcctaaaggcgcttgttattcgaggaataggtgtattgaaattgctcaaggagagtatataaccggtcttgatgatgatgacttattccttccagaaagattagaaaggtttattgaattgcataaaaaaactggagccaatttattgtgttccgatatgatattccggaatgaaattaatgataaaaaatggaatggaagaagcggaactattactctcaatatgatggggtataaaaactatgtcggtaaccaaatcctgtctcttatacacatctga

SEQ ID NO: 225592 - DNA, 708 bp, Klebsiella pneumoniae; identical to SEQ ID NO: 217763

SEQ ID NO: 225593 - DNA, 600 bp, Klebsiella pneumoniae
atggatcacacagcatttaacccggaaccaacgtctgccggcatccggttatctggaagcaggattattggttactccgccgctattcgtgaactggataacggtcactacgacaaacgccttgccgacggcatgaatattctggcctgcatcatggaggcggtagaaagcagctggctcacgctcactatcgagcagcaaatcatcgtctggcgctggttgctcgccgcggtattcattaccgaggagctggagaagaacgggactgtcgacgttccgaacgacgaaggcggcgttgatacagccgttatctattccggggagcacggtgcaatcagcgtctacccagggtcggaacgctttgcactcgccaaccatattgagctggggcaatcgagaaatatgggccagaggttggccagcagctggcgctgcggatgtatcaggacatggttattgctgacgaagaatttgggttcaggttatcagcacttggccgggaggggcttaacctcctccatgacagctttatcgaacacatccagatcgaaggtgtgcccgaagcaccgattatgcattgaggggaatgatgatgaataa

SEQ ID NO: 225594 - DNA, 264 bp, Klebsiella pneumoniae
atgaatattgcatcccgtaaaaaagacaaccttgaaataacaatgcgtactgatttccctgtactcattgaagcaaatggagcactcaggacagcacagcacgcagatgcgtacgccaatcaactcagggatgagttcaatacattgctctttgctgcgatagccagaacagataagcatgtcgcctgtcgctttaccagtctgctcaatgagctttgcgttatgactggttccacagtgaacaatattagaaaaggtcgctaa

SEQ ID NO: 225595 - DNA, 567 bp, Klebsiella pneumoniae; identical to SEQ ID NO: 214764

SEQ ID NO: 225596 - DNA, 543 bp, Klebsiella pneumoniae; identical to SEQ ID NO: 196939

SEQ ID NO: 225597 - DNA, 906 bp, Klebsiella pneumoniae
gtggatagcgcacgcgcccttattgcccggggatggggagtaagcttcgtcagctgttgtctccgggtgtcgcgtgcgcagttgcacgtcattctcagacgaaccgatgacaggaaggacggccgccgcagccgtcacacggatgatacggatgtgcttcgccgtatacaccatgttatcggagagctgcccacatatggttatcgtcgggtatgggcgctgcttcgcagacaaacagaacttgatggtatgcctgcgatcaatgccaaacgtgtttaccggatcatgcgccagaatgcgctgttgcttgagcgaaaacccgctgtaccgccatcgaaacgggcacataccggcagagtggctgtgaaagaaagtaatcagcgatggtgctctgacgggtttgagttccgctgtgataacggagaaaaactgcgggtcacgttcgcgctggactgctgtgaccgtgaggcacttcactgggcggtcacaacgggtagcttcgacagtgaaacagtacaggacgtcatgctgggagcagtggaacgccgctttggcagcgagcttccggcgtctccagtgaagtggctgacggataatggttcatgctaccgcgcgaatgaaacacgtcagttcgccaggatgttgggacttgaaccgaagaacacggcagtgcggagtccggagagtaacggaatagcagagagcttcgtgaaaacgataaagcgtgactacataagtatcatgcccaaaccagacgggttaacggcagcaaagaaccttgcagaggcgttcgagcattataacgaatggcatccgcatagtgcgctgggttatcgctcgccacgggaatatctgcggcagcgggccagtaatgggttaagtgataacaggtgtctggaaatatag

SEQ ID NO: 225598 - DNA, 366 bp, Klebsiella pneumoniae
atgattgatgtcttagggccggagaaacgcagacggcgtactacacaggaaaagatcgctattgttcagcagagctttaaaccgggaatggctgtctcccttgttgcccggcaacatggtgtggcagccagccagctatttctctggcgtaagcaataccaggagggaagtcttactgctgtggctgccggagaacaggtcgttcctgcctctgaacttgctgccgccatgaagcagattaaagaactccagcgcctgctcggcaaaaaaacgatggaaaatgaactccttaaagaagccgttgaatatgggcgagcaaaaaagtggatagcgcacgcgcccttattgcccggggatggggagtaa

SEQ ID NO: 225599 - DNA, 2793 bp, Klebsiella pneumoniae
atggttcagatcccagaaaaccctctcatcctcgttgacggctcctcctatctttatcgggcgtatcatgcgtttccgccgctgactaacagcgcaggggagcccaccggggctatgtacggcgtactgaatatgctgcgcagtttgatactgcagtatcaaccgactcatgccgtcgtggtctttgatgcgaaagggaaaaccttccgtgatgaattgttcgagcattacaaatctcaccgcccgccgatgccggacgatctgcgcgcgcagattgagccgttgcataagatggtgaaagcgatggggttgccgctgatggctgtcccgggcgtcgaagctgacgatgtgattggcaccctggcgcgggaagcggaaagggcaggtcgcccagtcctgatcagcaccggcgataaagacatggcccagctggtgacgccgggcatcaccctgatcaataccatgaccaacactatcctcgggccggatgaggtggttactaagtacggcgtcccgccggagctgattattgatttcctggcgctgatgggcgactcctcggataacattcccggcgtgccgggcgtgggcgaaaagaccgcccaggcgctgctgcaaggcctcggcggccttgatacgctgtatgcggaaccggagaagatcgctgaactgagcttccgcggcgcgaaaacgatggcggcgaagctcgagcagaacaaggacgtggcttatctctcttatcagctggcgaccatcaaaaccgacgtcgagctggagctcacctgcgaagagctggaggtgcagccgccggcggcagacgatctgctggcgctgttcagacagtatgaatttaagcgctggaccaccgacgttgaggccggaaaatggctgcaggctaaggggggcaaaccggctgcgaaacctgcagtgcctgcagcagcggcagaagcggaagaagaggttgaagccgctactgcactttcagcagagcattatgtcactatccttgatgaggctacgctgctcacctggatcgataagctgaagcaggcgccgctctttgcctttgatacggaaaccgacagcctggataacatctccgccaacatggttggtctttcattcgctgttgagccaggcgtggccgcctatgtcccggtagcgcatgattatcttgatgcgccggatcagatcccgcgcgagcgcgtgctggcgctgcttaaaccgctgctggaggatgagaaggtgctcaaggtcgggcaaaatctcaaatacgatcgcggcattttggctaattacgacattgagctgcgcgggattgcgttcgataccatgctcgagtcttacattctcgacagcgtggcgggccgccacgatatggacagtctttccgaccgctggctgaaacataaaaccattaccttcgaagagatcgctggcaagggtaagaatcagctcacctttaaccagattgcgctggaagaggctggtcgctacgcggcggaagatgccgacgttacgctccagctgcatctgaagatgtggccgaagctacagcagcatgaaggcccgctgaatatcttccagcacattgaaatgccgctggtgccggtgctgtctcgcgttgagcgcaacggcgttaaaatcgaccccgccgtgctgcatgcgcactcgcaggaaattgcccagcgcctggttgagctggagcagcgggcacatgagatcgccggggaagcgtttaatctctcctccaccaaacagctgcaaacgatcctgtttgaaaaacagggtatcaagccgctgaagaagacgccgggcggtgcgccgtccacctctgaagaggtgctggaagagctggcgctcgattatccgttgccgaaagtgattctggagtatcgtgggctggcgaagctgaagtctacctataccgataagctgccgctgatgattaaccccaaaacgggccgcgtgcatacctcctatcatcaggcggtcaccgccaccggccgtttgtcgtctaccgatccaaacctgcaaaacattccggtgcgtaacgaagaagggcgccgtattcgccaggcgtttatcgcgccggaagattacgtcattgtctcggcggactactcgcaaatcgagctgcgcattatggcgcacctgtcgcgggataaaggcctgctgaccgccttcgcggaagggaaggatattcaccgggcgacggcggctgaagtatttggcttaccgctggacagcgtcagcagcgaacagcggcgcagtgcgaaagccatcaacttcggtctgatctacggcatgagcgcctttggcctggcccgtcagctgaacatcccgcgtaaagaagcgcagaagtacatggatctttatttcgagcgttatccgggcgtcctggagtatatggagcgcacccgcgcacaggcgaaggagcaagggtatgttgaaacgctggatggccgtcgactctatttgccggatatcaagtccagcaatggcgctcgtcgtgccggcgcggagcgtgcggcgattaacgccccgatgcaggggacggctgcggatattatcaagcgggcgatgattgccgttgatgaatggctgcggagcgagaaacctcgcgtgcggatgatcatgcaggttcacgatgaactggtctttgaagtgcataaggatgagctcgatgccgtatcgaaaaagatccacgaactgatggagaacagcactacgctggcggtaccgttgctggtggaagtgggcagcggcgaaaactgggatcaagcgcactaa

SEQ ID NO: 225600 - DNA, 2538 bp, Klebsiella pneumoniae
atggacgatagtaaattacgctattttgccagcgcatggttaatctccatcacgttaccggcagacagcgcggaacgctataatgcccagtttgtgaacggcatcgacccgctggcttttaatcagtttgtcgccagcgatggcgacgtcatgccgggcacctatgacgttaatatttacattaacgatctgctggtggatagccgccccgttcgcttctcagaggatagcgcacatggcgggttggcgccctgcctgagcgcggcggaatatatccgctatggcgtcaagattgacgatgaccaccagccctgtttcgcgctgtcgcagacgatccgccaggcagcgcaacagctggatatcgctaatcatcagctgatcattcatatccctcagcaatatatcgagcactatccccgtgactatgtttcccccatgcgctttgatgaaggtattaacgctgctttcgtcaactacagctattctaccgatgccaataatggcgacgggggcagccgccagtatcaatatctttcgctaaacagcgggatcaatattgcatcgtggcgatttcgcaataatgcctactggaataagttcagcggccaggcggataagtggcaaagcatcgccagttgggcggaaacgaacatcattccctggcgcagccggcttgtcgtcggccagaccagtaccgacaacagcgtcttcgatagcgtccagtttcgcggcgtacagcttggcaccgatgtcgaaatgcgccccagcagccagaccggcttcgcgccggtcattcgcggtgtggccaacagcaacgcccgggtggaagttcggcagaacaactatctgatttacagcgagaacgtcccagccgggccctttgagctaaatgatatcagcgccgttaaccgcagcggtgatttctacgtgaccgtcattgaagccgacggtagccagacgacctttactgtcgcctacaccaccctgccacagctggtgcgggcaggccaatggaattatcagctgtcggcgggtaagtatcatgacggtgctgacggctatgcccccgctctgatgcaaagctcgctctcttatggcctgaataataccttcacactgtacggtggcgcccttgccgcggagaactatcgcgccggcgcctttggcgtcggtagcaatttgggggagattggcgccctctcagccgactatacgctggcgggaacgacgctggcgaatggccagcgcaagcagggagggagcgtgcgttttctgtatgctaaatcctttttatcaagcaagaccgactttcaaatcgcgggctaccgttactcaacggcaggttattatagcctcagcgatgcggttaacgagcgtcgacgctggcacaatggcctgtacgaaaatgattactggccctctgacgaagacgaaagctggcaggcaagcgctccccaacactattacacgtcctggttttataataaaaagcatcgctttgatatttctgcccggcaaactctcggtaagaacagcgctttcttccttaacttcagccagcaaaattactggaatagctcaggaagtgatatctctctgcaggcgggttttaacagcactatccataacgtgaactatggtctgtactatcagaatacgcgtagccacttcacgcatgacgacaatagcatcacactgcgcgtttccatcccttttactctgcaagaaaaccgccggatcaataccgcatttaccctcgcccacagtaaatcgtctggcacgtccgggcaggctggggtaaacggcactctgctcgatggtggtcgcctgagctgggccgtcaccagcgcctatgatgacaccagccatagcaccaacagcgccagcctgggttatcccggccagtacggtaacctgtataccggctacgcctacagcaaaagccatcgtcaggcgagtctgaatctgagcggcggcgtggtggcgcaccgcggcggcgttaccctctcgcaaccgctgggctcaacctttgcgctggtggaagccaaagacgctcagggggtagggatagagaatcagaccggcgtgcgcatcgatccattcggctacgcggtcgtaccacaaagcgttccctatcgggtcaattctgtcgcgctcaaccctcaggacttcgatacctttcttgatgtccctaacgcagtggcggataccgtgcctacccgcggggcaattacccgggtgcgctttgatacgttccggggatatagcgtgctgatccacaccaccctcgccgacggcagctatccaccattgggcgccgagctctatcgcgccagtgggatcagcaatggtctggtcggcccgggaggagatgtctatgtcagcggagtcgattcaggcgaaaaactgcagataaaatggggcgaaacgcaccagcaaagctgcgaaatcaccctgcccgaactgcgccaggagcctcagcaggcgacggcctggcgtgaattatccttaatctgcacagtaaccccctcgaggtaa

SEQ ID NO: 225601 - DNA, 993 bp, Klebsiella pneumoniae
atgtttgggcagaaaaaggactgggaaacacgagaaaacgcgtttgcggcctttagcatggggccgctgacggatttctggcgacagcgcgaagaagctgaatttaaaggcgtcgacgatgtaccggtacgctttgtccgcttttgcgcgcaacataacgatcgtctggtgttgatttgccccgggcgcattgaaagctacgtgaagtatgctgaagtggcctacgatctctttcactgcggctttgacgtgatgatcattgaccatcgcgggcagggacgctcgggccgcctgctctcagatacccaccgcggacacgtggttaacttcagcgactatgttgatgacctggccgcgctctggcagcagcaggtggttcctggacactggcgaaaacggtttatccttgctcattctatgggcggagcgattgccacgctttttctgcaacgttaccgggcgcattgcgatgcaatagcgctctgcgcgccgatgttcgggattatcattcggctgccggactggatggtgcgccatattctcgactgggctgagggccatcagcgcattcgcgaagagtatgccatcggcaccgggcgctggcgggcgctgccttttgccgttaacgtgctgacgcacagtcggcaacgctatcgtcgcaacctgcgcttctatgccgatgagccgcggctgcaggtcggcggtccgacctggcactgggtgcgtgagggcatgctggccggcgacgaagtgctggcgaatgtggaaaaagatacggccccgacgctgcttttacaggcggaagaggagcgggtggtcgataatctgatgcacgaccgctattgcgaattacgggccgctgccggccatccctgtgagggcggtaagccgctcgtcattgaaggggcatatcatgagatcctttttgaaaaggacgctatgcgctcagtcgcgctcaatgccatcgtcgagtttttcaatcgacatacttaa

SEQ ID NO: 225602 - DNA, 189 bp, Klebsiella pneumoniae; identical to SEQ ID NO: 107878

SEQ ID NO: 225603 - DNA, 1218 bp, Klebsiella pneumoniae
atgcagacaagcccggatacgttgctgcgcagagtagttcaggctccggagcagacagagaaccggccccggcatgtcggtatcgacgagtgggcatggcatcggggccacagatacggaacgcttattgttaacctcgatacgcatcgccctctggtactactgcccggtcgggagcagcgcactctggttgcatggtttaaaaaatacccggagatacaggttgtttcacgagatcgtggcggtatctatgctttagccgctcgcgatggtgcaccgcaggcaatacaggtggccgatcgctggcatctgttgaagaacatcggcgatgcgctggaacgcatgatatacaggcatatgccattgatacgacaggttactactgagatgtcacccaaaaaacaggacgcagaagtgtctctggcacctgtctcaacactacgtcgccctgagcgcattaaacggcagaggcgtgacaaacggtatcaacgctgggctgaggtcgactctcttcataaaaaagctcacgggatcagagaaatatcacgcatcaccgggctatcccgcgtgacagttcgtcggtggatgcagtcgaaggcgttccctgaaatatcaacaaaaccgccaaggcccggacttcttgacacgtggcatgaatggctggaaagacaacgtataaatggtaaccataatgcccggcaactatggcaggagatggttgacgctggttttgccgggagtgaaacgactgttagagatgctgtgtctaagtggcgtaagcagtctaatgctccgtctgtctccccgggtcgacttccctctgcatcccgggtcagtcgctggttaatgccctggcgaatgatcagaggtgaagaaaactatgcgtcccgctttatcgagtcaatgtgccagaaagaacctcaactgaaaatggcacaacagctgtccctcgacttctaccggatgctgaaaacgaaaaataaatcacagttaaatcaatggttctctgacgtcagtcagagtgggctcgttgatcttcagcgcgttgctgccgggatggaagccgatgcaacagcaatacacgaagccataatcagcagatggagcaacggtgttgtcgagggccatgtaaatcgcctgaagatgctgaaacggcaaatgtatggtcgggcagaattcgagttactgaggcgtcgggtgatgtgtcctctggcatga

SEQ ID NO: 225604 - DNA, 126 bp, Klebsiella pneumoniae; identical to SEQ ID NO: 188201

SEQ ID NO: 225605 - DNA, 558 bp, Klebsiella pneumoniae
atggcccgtaggtcgaaggactggcagggtcgtcggtgcaagcgcaagcctgatgatactgaagcgctggcccttatccataccgttatcggcgatctgcccacctatggttatcgtcgggtatgggcactgctgcgcagacaatcagaaactgacgacatggcggtgctgaatgccaaacgcgtatatcgcatcatgcgtcagaatgcgctgctgcttgagcgtaaaccggaaataccgccatcgaagcgggcgcatacagggaaagtggccgttggagaaagtaaccagcggtggtgctctgacggcttcgggttcagctgtgataacggtgaaaaactgcgggtcacgttcgcgcttgactgctgcgatcgcgaggcacttcactgggcggtcacaacgggtggcttcgacagtgaaaccgtacaggacgtcatgctgggagcagtggaacgccgcttcggcagcagcctgccgtcatcacccgttgagtggctgacggataacggttcagcctaccggactcatcagacgcataggttcgccagaatggtatga

SEQ ID NO: 225606 - DNA, 213 bp, Klebsiella pneumoniae
atggcagagagcttcgtcaaaacgatgaagcgcgattacatcagcatcatgccgaagcccgacgggttaacagcggtaaagaaccttgcggaggccttcgaacattataacgaatggcatccgcatagtgcactgggatatcgttcaccacgggaatatctgcggcggcggaccagtaatgggttaagtgataaaaagtgtatggaaatatag

SEQ ID NO: 225607 - DNA, 279 bp, Klebsiella pneumoniae
atggcttccatttacgtgggatcgccatcttgtgctgtgactgaaggcgtagaccgtaacggcaaaagtactgccggtcatcagcattatctctgcaggcagtgccgtaagccatggacactcactttcacctatacaacctcacagcgcagtacacaccagaggaaaatcatcgatatgactataaatggctctggatgccgtgccagtccacacattatcggcattggtctgaacaccattttccgtcgtttaaaaaactcagtccccagtcagtaa

SEQ ID NO: 225608 - DNA, 993 bp, Klebsiella pneumoniae
atgaaaatgagtgtgacaggctatccacatacatgcgtcttcacccctgggccacaccaaacagcagctgcaattggcaacacgggtgtgaaagtggtgtcgacaccagcgttgatcgctctattggaggagaccagtgccgatgctgtagcaaaagacttaccgtccggctgggtgagcgtgggaacccatgtcgacgtacatcatcataaacccgcttggccttatcaggaggttcgctgtacggcgacgttaattagcgcagacgagaaaaggttgcagtttttcgtacaggcgcatcaagcgggagcattgatcatgagcggtaagcatgaacgtgctctagcgccactcagccgttttgaacgtgctgatggtaaactgccagagggagctccgctggagtttttctttgattttcacagcccttggtgctacctcgccttcccccgtctaagagaaattgccgctgcgtacggaagaatgatagtactacgtcccttccatctggctaatttgattgaccgcataggtggacgtagaccgttggatgcctcgccagcgtttgtcaactggttcaaacaagatatgcaggactgggcgcgcattcgccggctgccactgagttatcatcctaagttcccgttgcggccttcacgtgcgctgcgagctaccctgtatgcagttgaagaggggctgggagaagcattcgccttcaaggtgatgcaggcgtattggtcacaaagtctggatattagcgatgttgccatcttaggcgacttagccacttcagtagggctggataaaaatgcgtgcatctcctccatcggcgatgaagcccggaagctagccatagtatcgaacacagatgaagctattgctcgcggggtatttggtgcaccagcagtgtttgccgatggcaaactgttctggggaaatgaccgccttgatatgatggacacttggctggcatctgcgggagagcgctgctga

SEQ ID NO: 225609 - DNA, 1590 bp, Klebsiella pneumoniae
atgaaatatattgttgacccattttccgaaaaaacgtcgcttaatacgccataccgtttactgcgtcattatgcagaaaaatggcctgataaagaagcgctggtattcgatgctggtaatcaacgaatgaccttcagaggttggcttgacagtgtcgacaagttggcgctagagctaagtcgtcgtggtgtaaaagcgggtgaccctgtggctctgttggcagaaaatcgtattgagtggccagttgcccagattgcaatttcggccttaggtgcgatactggtgcctgttaatacacatttccgtgataatgatttacgccacgttctcgatcacagccaagtggttgccatcttgctgtccgaacgttttcgctccagcgaatatttagccatggtacgagcgattcatcctcaactccctagcctaagagacattattaacttcgatgatatggaatatgaagcagtaatgcgccaacccgttttggctgaactgacggagtgggtatggtcccccagagagttggctagcatccaatatacttctggtactactggacggcctaaaggcgcagaactctgtatggaaggaataatgatgaatgcctggggcaccgtgcagcggctggaagtgacggcgatggatcgctggacatccattattccgctcttccactgtgcaggttgcatcatgaatattctggcatgcctgacagctggtgcgacatatttgggtatgcgtgctttcgacgccggacaaatgctttcgctgatagaacgggagcgctgtacagttctgacgggagtccccacgtcctacttagcgatgttagagcatccggacagaccatatttcgatctctcgtctttgcgtaccggtacctgcgggggtgcagactgcgatccgagacttctggaacagtgcgcgcgggcgtttcctattaatgggttggttcaggtttacgggcagacggaagccagcacactgatagcgttagattactggcaaagtccccagcgctttgccaccgctggcttgcccttacctggagttgaagtgcaggtctgcgatccgaataccggagtggtactcccccacggggaaatcggccagctacaggttcgtgggccaatggtcatgttgggatatcatcgagatgcggaggaaaccgctcgctgcatcgatcctcaaggctggatgaatacgggcgatctcggtcggctaaacatcgatggtagggtcgaactggtaggaggacgcctgcgcgatatgatcattcgcggtggtgaaaatatctatcctgtagagatagaaaatctgctgcgtgagcatccgtcgatcactgaagttgcagtcttcgctctacccgataaattttacggcgaagtggtagccgccgctattgagtccaccaagccgttatccaaagatgaaataagaaaagcctgtgttggaaaaatagctggttttaaacatcctgctcgggtctttaccatcgtagaatggccgatgacgtcaagcgggaagatcctaaagcgcatgttgaaaagcgcagcccttgatgggcaactgaaggagcttttatga

SEQ ID NO: 225610 - DNA, 1407 bp, Klebsiella pneumoniae
atgaaacattccactagcactgtaaagcacacggttatagaaagacggtcaatcgattatgtacctgataatgagcgcttcggcagcgctatgggacagtttacattatggctaggggttaaccttaatattaccgctattgtgaccggcgcgttggccgttgtattaggcggcgatgttttctggtcattaatcggtttatttataggtcagatattaggcagtatcataatggggctacaggccatacaagggccagctacaggactgccacaaatgattcgaagccgtatgcaatttggtgtttatggcgcggtcatccctcttttactggtaagttttttatatatagggttctctgctggaggcaccttgctggcaggacaggccgtggcaaaaattttgaatgccgcagaatggcagggtatcgttttattcggtgtcatcacgatcttggttgccaccttaggctaccgcgccatacattctttagcacggatcgcgagtgtggtcggcatcattgcatttatttacatgttcgttgcattattagctggccataatattagcagtcttctagaacagagaaagtttattctcaaccagtttatcctttccatttcactggcggcggcctggcaaattgcttatggcccctatgtcggagattattcacgttacctccctacggatacatcaaaactgaaagtgttctttgccgccgcctctggaacaacgctgggctctcaggcagccatgacatttggtgttttttccgccgctattgccggagtggcatttaccggacatgaagtagaattcgttgtaaatctgggggcatccggtctcgtcgcatctttgctttactttgtcgtaggcttcggcaaaataaccatgatgacattgaatgcgtatagcagttatatgtcgagtgcgacgctggtgaatggtttcagaggaaaagcaaccgtctctgtcggtcatcgatttatttatgtatcagccatgattttgttagctgtttccattgcgttatggggctcgggaagcttcattcacgctttttcttcttttttattatttctactgacctttatttctccctggagtgcaatttgtctggctgactggcagtgggggcatcgttcaaaatgcgacctgcaggcattaaacgatccacaaggaatatatggccgctggaactggagtgtaatttccatttacttcattggcttattaatggaacttccttttgtttccagcagtatttacactggtccgattgcaagcttgttggatggcgcagatatctcttggttagttggcctgattggcaccggcatagtgtattacatttacagcagaatattgccccccgcttctatgaaaatacaggctgctgattaa

SEQ ID NO: 225611 - DNA, 141 bp, Klebsiella pneumoniae
atgctaaggcgggagggctggcgggataaacataagcgtatttaccgactctacagcgagcaggggctgtatccgaatcatgcctggggcatggacttttttctgatgccatatttgacgggcgtcggttacgccagctga

SEQ ID NO: 225612 - DNA, 228 bp, Klebsiella pneumoniae
atgtcagcatgtggaggttgccgccgcacgcatagcgcttcaggcggtagaaacgccgtggacatcgtcgccatcgaactgctgtgcgcctgtcaggcgctgaagttccatcgcccgctgcgtgccgccgtgggcagcgaggcgacgctggagagagtgcgtcaggcgtgccgtttcgggataaagatacgctgctctaccccgatatacatgcgctacgcgccctga

SEQ ID NO: 225613 - DNA, 687 bp, Klebsiella pneumoniae
gtgcaggtagtaataggggtaattctggcgccccctgtagcctggggcattcaccacctgccatcggtcgagtcggcgatcgttaacctgtttggcatactgtataccattcggtcactggcgctgtttgtgctgctgcccccgctgctccacacgcagattctggaccccattaatgttgttgtcgcacttgccatcggcagctttgcgctactggtttgcaccgtctgcgacgggctggactccgtatcggccgatacccgtcagtccgcggcagcgctcgggtataaacccgcccagcagtttttccagaacgacccgccgctggccgtgccggtgattcgttacggtctgtgcgttgccgtggtgtttaaggtcagaatcgtttccgtcgcggcattaattggcacaccacagctcggctcgctgtttaccctggggcttcctgctgcaatttctgactcccatcatcggtgggatcgcggacagcatcattctggcgctgctgctggatatgctggtggtttacgccactcgtcaactcagcaactggcaacctcagagaggataattatgcttcagaactcgcttagtatacgctgtatcccccagatccgcggtgcgccaacggcgcttgccgttgcgattgcccagttgagcaccgcttcccagccccgttgcgactaa

SEQ ID NO: 225614 - DNA, 297 bp, Klebsiella pneumoniae; identical to SEQ ID NO: 177824

SEQ ID NO: 225615 - DNA, 1557 bp, Klebsiella pneumoniae
atgagaattaaaaagcctcaccttcgtccgatagtcataaccttgtccgttggtggtatttttttgacttctatttttatgatagttgtcattatgttttatcaacacgaaaatatagaaaaagatttgcttgatgctaattcatcgtacgctatgaaaatgtcggatgtaatgagcagttatattgaaatggctcagggcgaactagcatatggcgctaagaaaattgaatcaacgactgatgttgaatatcttaaaaatgaggctgataggcaaagattgcagtccggcatgtttaattcagttattgttgttagtaatggcgctgttgttctggcaacttctccagaatcacttgatttagttggtgttcacttgaactcaagtgtcagtaaattggctattgagggcaaaaaggcatttatatcgcaaccttacaaatcagttgctgggaatttgattgttttgttgtcacatcctatttatgataagagtggtaattacatagggtatatcggcgggtctatatatctaaaaaaacagagtttatttagcgatgttttgagtaggcatttttttaatgacgacactgaaattaccatcgttagtgatgatggtaatgtgatctttaataaagataacagtgttgttggtcgaccgatggttatgcctgatgatttgaaatcaaagttagcttcgtctgaaagaggcgatggtacctttttttcttcggggcataagtatcttcttggttatgctcatatgaaaaatactgactggaatgtgtttgtttatagtcatgctgacaacgtgaccactattcttattaattatgctaaaaatgtgcttgtgctgctagttgtaataatagttgtgttttcaattgtttcatatttcattgcatcccaaatctcaattcctttagaaaatcttgctatatctaccaatgctaaagatatagagtcctcgctgacttatattaaaggtatcaatgcttggtatgccgaagctgaccgccttaaaaaggcacttttaacgaatgtaaaggtaatgatgaaaagggttaacactctaaatgaagtggcagtaaaagatcccctaaccggtgtaaataatagattggggttttcgaataaaacaaaggattacacgcaaggctcaggggcttcagttattgctattgatgttgacttttttaaaaaaataaatgatttcttcgggcatggggtcggagatgaggtgcttatttctttggctcatgctattaattcttgctgccgtagtgaagatattgtttgccggtttggtggtgaagaatttgttatttttctgccgaatacttcagtggtaacagcagagcgtattgcggagcgtatcagaagtgttattgaaagttctgtttttactaatgacttgcgtgtcaccatatctgctggtgtagcaacgcaaactgatccccttagtgggatcgactttttgctgaaaaatgctgatgatgctctttatcaagcaaagggagaggggcgtaataaagtgattgtatatagtgctatttga

SEQ ID NO: 225616 - DNA, 2847 bp, Klebsiella pneumoniae
atggcctttaacccggagctggggagcacgtctcccgctgtgctgctcgataacgctgagcgcctggataagctggtcaatgggccagccgctgatgttcccgaccgtggtggcgatccactctattcgtggcgccagatgatggcgaaaaacgatgaggtcaggcagaacctgatcccgctcagtaagcagtacgcgacgctggcggctgcgcaggcggatatcgcgaatattccgacaggaagcgccacgtattaccgcagccctgatgattccgcgcttgctattgaggtaattaatacagcaggaactttacaacctaccggccgtaaaatgccgtcacagtcatcaatggtcattggtattgttgattcgtgggttaataacaacctttatccctttgatacattgtcatcgccgaatgaaaacgcggtatctatgaatgtagctgctgtaagcactattgcgtaccgagaggcttactcagctttattatctcctgttgctgtaggagatattatcactgtccgttataaatacagcggaaccggcggcgccccaaccattggattaaaaacatcgctgaacggcacatttgtgagtaatcagccaacgttgacctcttcaaatgactggcaggaagtgcagcttaccgctactgcagctacagcaacgctcctggctatcggggtgaatacaaggcttgcaaccactgttcagttatcgattatcgcctacgcatcgaagaagaatgctattaccacagcaattcttaactcactggatagcatttccagtttaaatggaaaggcgcgtattggttctgtggatttgtgggttaataataccggatatccattctctgttttctcgcaggttaataacaaccgagtaaactacgtcaattcgacgggcgtctattcggagatgtatgcgaatattaacgtgccctctggcggctctttgatttttagctattctctggatgccacagccgggcgattattcgctagattagcaaacggcagcgcatggacgggtgacgaagtgcaactcgccggcggtggtgccaggcagaccattacactcgtggccgcggcagacacaaaacagttaaaactgtataccaaggcggaaatatccgcagggtcttttttcgcggaagtaaactacgggcaaaaaaatgcgctgacagagcagattgattcgctgtattcggcagtggcatcagctaacgcggttctggccatactgtcccaaagctcaacatttgattcatttgtaaaaagctcgccttacacttacacgttaagtgatgctggtgtggcttacaaacaggcaataagcacggtggacaatatcagcggattgaacaccgtaaagatgatgtacaaaatatcttcatcgaatgcagctttaaaaattcagagcaggaacggaagcaactggggggcaaatgagagaactctggtagctgatggggattatcatgaaattgacttgccgatagcctcggggcaggtattttccggttggggtgtatactcatcagccaaagctgggggatattctgctgacgtaacgatgatccctatctctgcaaacggggtgtttttcacgccagcaacggctatcctttatggcctgatggccgcttcggcttcccttgacagccgcgtaacagctctggagaacggccaggccaccgatcaaaatacagatgtgattttccctgcatacttctatgcagtggatggtcgcccgctgcgtttttacggtgccaatatggtcagtggtacccgaccatggcacaacaacacagacatcgttctttccagtcatgggtatgaaggtaaatcggtactgcttaaagatgtagttcctgacgcgatgataatgccatcggaaattaatgggccaacgctgaacatcaacgcgcgggcagacggttctggaaatgtattccggaagaaagctgcgttcactaaactggcggcgactcagaccggaaacgtaaaagtcgccacaataatggatagtcttggagaacggtgcgttccgtggctttattttgccctcaacgcgacaggggcgacatatgcgggcgcaggttcccgaaaaacacgcggcatgacagacgatggggggtatacacttccaaatacaccggcggatggcatcccatttgacggccgtgggggctggacgacgttcgactatatcggcaagactcagaaaacaaacttcagccaacccttcctgcgagatgcggtagctgccgattttgccgcttaccctcagtactgctatgacaaggcctactctggccagagctatgcagataacccaaatctggcggggtatcatattttcgacgttacagcatggatggctgcggctggagtgagcgcgggtgacaaactggtagtcgttattcagcttggatacaacgacctctactacggttacactccagcacagaccgttgccgctcaggaattcatgatcgccaaattcagggagaaaatagcggattcccgcttcgttatttctcaccaggctttcggctggtcaggagtcagtgcaccgcagagctggcagggcttcaccccttggattactcagaagctacgccagtttgacaatcgcctcagtgaaaaaatcattgtggcaccagcttgggcacaactgagctacaaatatggcatgaacgaaactatcacagcaaccagtgataccggtgttcagactgtatcgttacctgacgacgtccatcccggagagcttggtggagcacagtggggcgatgctctggtcgcacctgttcttgccgcatggaactggtag

SEQ ID NO: 225617 - DNA, 318 bp, Klebsiella pneumoniae
atgggctttccatcaccggcaacggactataccgaacagcggctgaccgttaactcgatctgcaatgtcgggcctaatacgttgctcttcgagcggtctggcggttacgttgtgctggatatctccctcaaaccaaggcagggaagtcagttgcttatccagcacggcggcgggacggagcttgccacgctgagaggaaagtcactgataaccgaagacggcgaagcgatcgagagtgaagccctggacgatgttactgtcatcggcgtcgtgacgtttactatctgcgatgtccgcggggacaacaccgttgtttag

SEQ ID NO: 225618 - DNA, 858 bp, Klebsiella pneumoniae
gtggcagtgcaggtgcagggtgacgtcgtagcgcttcttgatttcgctgaccagctcaaaggcggcatgcggcgtcagaatgccggacatgtccttgatggcgacggagtcaacgccggtctccagcagctgttcggtgaggtcgagccaggtctgcagggtgtgggccgggctggtggtgtacgaaagcgtaccctgggcgtgggcgccgtggcggcggaccgcctgcagggcggcctgcatgttgcgcgggtcgttcatggcatcgaagacgcggaagacgtccatgccgtttttgacggcgcgctccacgaagcgctccaccacgtcatcggcgtagtggcggtagccgagcaggttctggccgcggagcagcatctgcagcggggtcttgggcatcgcctttttcagctcgcgcaggcggacccacgggtcctcgccgagaaagcggatgcaggcatcaaaggtggcgccgccccagcactcaagggagcggtagccgacgtcgtccagctgagcggcaacgggcagcatatcgtcgagacgcagacgggtggcgaacagggactggtgggcgtcgcgcaggacgacatcggtaatggcaacggtcatgaattcctccgtgaattaagggtgaagacggcgatggtggtgaatggcggcgacaatcgccggcttcaggcgggcgaaatcgtcggcgggcgcgacggcggccggcgccgctgcgggggcggcggacggctcgggaaacaggcggttgacggcgagggacattccccggatggcaaagatgagcagcagcaggaacaccagcacaaagcccatgccgagaaacatcagggtgaagccttcgcctaa

SEQ ID NO: 225619 - DNA, 249 bp, Klebsiella pneumoniae; identical to SEQ ID NO: 185079

SEQ ID NO: 225620 - DNA, 285 bp, Klebsiella pneumoniae; identical to SEQ ID NO: 185080

SEQ ID NO: 225621 - DNA, 1224 bp, Klebsiella pneumoniae
atgctaatccagaaagcgtataaatacagactcaacccgacagatgcacaggcgcaacgactgcgtcagatgtgcggctgcgcccgttttgtctggaattacgccctggcagagacgcagcgtattcttgaggccggacaaaaactcccttccgcctttgagctgaataagatgctgacaggatggaagaaactccctgagctggcgtttttatcagatgcctacaccgacaaccttcagcagaaactgaaagacctgcacggggcatgggaacggtgctttgataaaaagctggcagcgaaagcgcccgtgttcaaacataaaagccacggcaatgactctgttcgtttcgtcaattttgacaaatactgccagcttcagcacagacgcgttaagttaccctcggggcggggctgggtgacattccggcagtcccgcgccgttgtgggtaaaatcaaaaacgcaacggtcagccagcacgctggcggctggtatatctcatttcaggtagaaatggtggtcgaacagcccgcgcacccgtcaacgtctgctgtcggcctggatgccggtatctgcaagctggtaacgctgtcagacggcacggtgtttgaacctgtcaacagttttaaacagaaccaaagcagactggcaaggttacagcgccagcttgcccgtaaagtgaaattcagcgcaaactggaagaagcagaaagcaaaaatttcccgcttacacgcgcatatcaccaatatccgccgcgattaccttcataaagtcacgacaacaatcagcaaaaaccacgcgatgatcgttattgaggacttgaaggtcagtaacatgtcgaaatcggcaaaaggtacggcagagcggcccggacgaaacgtcagagccaaatcaggcttaaactgttcgatactggaccagggctggtatgagatgcgccgccagcttgaatacaaacagctctggcgcggtggtcaggtactggcgatacctccggcatacacaagccagcgttgtgcgtgctgtggtcatacggcgaaagaaaaccgtcaaacgcaaagtaaattcgtgtgccaggtatgcggctataccgcgaacgccgatatcaacggagcacgtaacattttagcggcaggacatgccgtgctcgcctgtggagggatggtgcagtcaggccgcccgctgaagcaggaacccaccgaggcgagtcaggctccggtctga

SEQ ID NO: 225622 - DNA, 1239 bp, Klebsiella pneumoniae; identical to SEQ ID NO: 185082

SEQ ID NO: 225623 - DNA, 468 bp, Klebsiella pneumoniae; identical to SEQ ID NO: 185083

SEQ ID NO: 225624 - DNA, 3942 bp, Klebsiella pneumoniae
atgagcaattttacgatttataccattggtgatattgattttgtttacacggcctttaacgggatcgcactgattttttccagccatggttcaaatgaatggctccgattttctgcatatgcagcagcaattgggctcttctataaatcaatgaaatgggtccttgcccccacaaaaaacgatgtccctatattctcatggataatggggttgttgttctattccatcgcggtaattaaagctgatgtcactctggaatcggttaaaacgggggaggtcaggaacatagacgatgtaccgttatttatcgcgtcaaccggtgaactgacaaccggattactgcacgggctcattacggactggcgagcagcgtttgacccgcttacgccggtgggccaggtcactgacacgctcgatgacagcctgacgctgggcccaatgaccaaaatggtcaaatatatggagtggggtggggaatccagtggattctgtcaggctttcccgaatacgatgagcgggagcgaaaaacctgtcacctttgatgtatgcagaatcattcagtccattgcacgcgattgtattaaaacgacccaggactcagaggtcaatacgccactcagaggcgtggcgttgaatgaaatctatgccacagatcttgcgtcagtaatgaacgtgatggattcaatgacggcgaacagccttaagaccgcaagcgtccccatggtgacatccaccggactgcagtatgcatcctgtacggacgcttgggcggcagtgaaagcttcgttcgcctcgccacagggcgtatctatcatgaaacatatagggcagatgaatcagtttattgaaccggctaaagaagaaaccggacaaaaaagtgactttctgcaaggtgtggcctcttcgctttttggaagcgctggtcaggctcacgatatcaccacaggggcttttgtcctcaaccaaatagataaaggtgtgctgcagtatcgcaagtcgttgggtatcgccgcagattaccaactcttcgaagcgagcatgaaacggaccaatggcatggtcagtcaggggcaactctggctgaacatctcaggcgctgcaatcagttttctcgagatgttcagttatatggttgcgccatttgctctgattgcgatcctcttcctgggaggtgaaggcataacttcagctgcaaaataccttcaactgatagtcttcgttaacatgtggccgataacagcggtcatggtcaatgcatacgtaaaaatggtattaaatcagcagtttgacacatggtcatcgctgggtgtacagaccacgatgaactgggcaaacatgggtagtattcaggagacatacggcagttacctgtcagtagcttcagcgctttattgcatggtgccaatgctgacgctgttcctgttgaccaccagcattcatcctatgatgggagcgttgaaaaatgtcacgccggatgctcctgccaatactggtcatgtcacaccagaagtgtggtcggcgggtaatgcgggtaaacagtcctttggtgaccagacacacaccgcagccacttcaaccggtggcggaatgtcatctggcgggcttctgaatgcggccgttcgtagttctatgccctctctgtcacttggcaataacttgcaggatactgtttctgcagcaggcaggaatgatattggaactacaagaatgtctagcagaactgctacacaagcttttagtgaggcatggaactttgcgtttcaggggcagcattcacaaatagcttcgtccggtacccagggaatccaacaattaatccaaaatatagcgtcagaaatcagtaatggggtagggtcaaatgtaggtgtttctactgatgttgcaaaaagtagtgcaatcagtgctgtgctccaggctgcaggtagtataggtgcatcattggggcttggtggagctggaaaaggtatctcagggcaattgactgggttgataaacggtcaaataaatagcaactcttcactcactgatggcgctaaaaaggcaatgactgaaaacctttctaacttaattaaagatgggagcagcttttcaaataatatttcgaaattagcaacaaatcttactcaagatggttttagtagctctgacacatatcagaaagccgctcagaaaatggaccaatatagccagtcaatcagcaataccgaaacaaattcattcaacaaaactggtggtcaggcatcccagctggctatgagtaatagcctaaatattgatggaaatatgatatcagataccatgagaacaccggcaaccgaggattcagtaagagcctgggcgtcagcttcaggtctaaatgcagatgcgatagctggtcagtggaagtcaacccgcgatatgatgaacaggagtaacacgctcggttctgataaaaatggtaatgatgcctttgcaaaggtattacttgaccaggcgcaagctaaaactcaaatggaatccggggaaaccgtcgccaaaaatctggctgatattaaacagacatctgcgatgttcaaaaatgcagtcagcatgatgggagccaatgaacaaattcttgcaccagctgcagaaaaattagatcagtttgtggctttgggaagtggcggtcagtatgccaactaccaagaacaagctcaaatggcccccgatacttcagctgtgccaacagcaggagagattggtggaaatgttgccgggcagagagctcaagctactgcgaacctgagtcaacacagagatgcctccacagcacaaccaggtaatacaattggcggaattacggctcaaagccttaacgaggacaatggccgtttgcacgttgcaaatgaaggtggcgcaggtgaaggacgagtactttctcaggcagacagagatactcttaaccaggttaaaaataatcttccaatggggtcaacaaatgacacaatagagagaggaatacaggctggttctgtaggagacgcaaccacaggaagggtccaacctcttcttcttggtgacgcaccttctaacgatttcaacgcctcaactcagcaaacaatgaggaacctgcagtcaagtgaagcacctaaaagctttgatagctttaggagtaccggtgacaagacacaggatgctaaggcagcattaactcaggcaacattgcatagtgaaaacgcacgtaaccaaatcgggcaagagcgtgaggcaagcctggcagaaagcaaagcatacctcgataagtataatgaaatcaccggtgcaacaatgtccgaatcaggagttgaacggattggaagacaagcgtcggatgggaaaaataatggtttcaggggcgggctcaatgatgtcgtaaatgcagaagtcactggaagcggtacgacaggaaaagcagcaagaggtagtgcagatgcagcattaggccaagaactgagagaaaataatggagccagttcgcatccaatggataaggcttcagcagcgtggcaagctaccggggactcactgcccggccatgagatcgcgtcagatatcgtacaacgagttgctggtgctatccctggtggtcatgctatcgcaccaaaaataggctctcaggacaatgtgccggacgcaatgggtataagtagtggtagagcgccaggctctctcatcggaaacatcagcaataatatccagttagggcaagcattaaataatgcaggtaactattccggtatgaacgatgaaaaatttaccaggatggcggaccaaaacgagatgttaacccggcaggttcaacatgctctttcaaatgattctcgttatgggcctgatgtagctgccgagtatcccaaatttatagccaacctgccaaaggatattggagtaaacgagggaatagcgaagactaaagaattccttgataaacataggaaaagttaa

SEQ ID NO: 225625 - DNA, 258 bp, Klebsiella pneumoniae; identical to SEQ ID NO: 185123

SEQ ID NO: 225626 - DNA, 1278 bp, Klebsiella pneumoniae; identical to SEQ ID NO: 185127

SEQ ID NO: 225627 - DNA, 300 bp, Klebsiella pneumoniae
atgacaaaaccaacatcaaccaccaaaaagccacgcaagcagcacactcctgaatttcgtcaggaagccctgaaactggctgaacgcatcggggtggcagctgccgcccgcgaacttaacctgtatgaatcacagctctacaactggcgaagcaaacagcaaaatcagttctcttcttctgaacgcgagcaggacatgtccgctgagatcgcccgtctgaaacgtcaactggcagaacgggatgaggaactggccattctccaaaaggccgcgacatacttcgcgaagcgcctgaaatga

SEQ ID NO: 225628 - DNA, 168 bp, Klebsiella pneumoniae
atgtggatcctcattatctggatgttcggcgcttatggaaacccgaccatcaccacccaagagtttcaaacagaatccgcctgtcgagcagcgtttgccgaagcaaaaaaggtaaacaatgccgacgtttctctacgtggcgtatgcacgcccaagggtgaccaatga

SEQ ID NO: 225629 - DNA, 786 bp, Klebsiella pneumoniae
atggctaagaattcaatcgatgtatacggtgccagcggcaaaacaaacgtgctcagtttcgagcctgaaaacctgcacctggtcaccgataagacccacccactttacgatgagcgtgtacacctgcctatcaacgaggcaatggtgctgaacatcctggaccagggcgttcttgagccgattatcgtctggaaagacccggagacaggactgtcttgtgtagtcgatggtcgccagcgtgtgcgccatacactggaagccaacaagcgactgttgaaagagggtaaagaaccgttactggttccagcagtcgctaaacgtggctccgccgttcgcatggcgcaggcgatggtaagtgctaacgaaatccgccaggcagatacgccactgggccgagccaagaaaatggctgatgcgctggagcgcgggcacgacgaggacgatttagcgctgatgtttggcgtgagtgtccagaccgtacgcgcaacgctgtcactgctggatgccacccaggctgttcgcgatgcagtggagtccggaacggtcaccgttacccaggcgcgtcagctggcatcgcttaaaccagaagagcagcgggagaaggtctctgaaatcgaagcggcaactgctggcacaaccggccatgaaaaagcccggcgtcagcgtcagatcctcggtgatgcaaagcctcgcctgaaaacccgcaaagaaatcacaaaagccctggaatctgccgagggtgagtatgcaaacgcactgcgttgggtgcttggggaggcgcaatga

SEQ ID NO: 225630 - DNA, 1008 bp, Klebsiella pneumoniae
gtggcggctaaaatgtggatgatccgcggtgatggcggaaaattgtacgatgactttagggacaaacaggttgttgcaatcggctggtcgcagctcgctccctatgtgaaaccgggatgttcaagagagcagttgtttacccggtatcaggagcttgaaccacagactaagccaggcacagttcgttccggtgcttctcaggtttggcgctttgtgaatgagatgcagaaaggtgactgggctattacttattcaccttctaatcggacctatttaatagggaaaattgcctcagattttgagtttcatgccgaatggcttgaagatggcatgggcattgcgcgtaaagtgaagtggaatgcggaagagattaagcgcgatagtctgagtgatgcaaccagaaacacccttggctcaacgctgacggtttttcaggtgcctgattttgccgtgaatgaattagtgcagggcaaaaagcctgtctcagatgtcgtgccggaagtacctgtttcaggtgaggaggatgaggtcgtttctaatcctttgcgcgacatggaaatgatcgcttttgaaggcatcaaagatcgtatcaaccgtctcgactgggatgagatgcaaaatctggtcgctggcgtgttacgcagcatgggatataaaacccaggtatcgcctgcaggtgctgaccgtgggaaagatattattgcttcgcctgacggctttgggttcgaaaatccgcgcattattgtggaggtgaagcaccggcgggaacagatgagcagccagcaaatccgtagctttatcggtggccgccataaggacgatcgtggactgtatgtcagcaccggcggatttagcaaagatgcgcgctatgaagccgatcgttctacaattccgttgacgctatggactctggacgatttagtacgcgcgttagtggaaaactacgagctggtggatattgaaactaagctattggttccacttaagaaaacgtacttgcctgcatga

SEQ ID NO: 225631 - DNA, 1188 bp, Klebsiella pneumoniae
atgcgatacgatcatacagtccctgtatcaccttcacttctggaaaaactccttgcgaatactaataataatgtattttgtaagcttgttccggattgtctacacagtaaaatcatatggtggaaaggttatggtgcatatattggttcagccaatttaactgagagagcatggtacacgaatatagagtccggtattttcctcactgagagtgacttatacagttctaatctaattgaacagctagaggaattctttgataacttagcatcgcttgactcctgcgttgatcttagtaaagatattattgatgaacaaagacaattattaaaactaaaaatcgaagtagagaaaaaagaacgagatattatcaaaaagcgaaaaatacctgaatggggtggagtgagctttattgataataaaaaaactaaagataaaagaaaagagagtttccataaagaatgggaaagcacgttttcaatcattgagaacatctcaggacagattaatgattacagacctgtatggatatcagaagacactccaaaattttggcaaaccgatcagttcttacatgcctattattataatatagttcgtcagaaggataacacttatccttttgaagattatcatcgtacaaatagtaaaaatccacaggcagcgctgatgagtatgctctcctggtggaaagaccaatcagtacctccatctcatgaagataccaacttaggaatcaacgccccctatattcgtgaacatttgtctaatactcacattaattcattaaccaaagatagtcttcataaaatattcttttacacacatgcaacgatggatcatgtattaaaaatgagtgctgagacatttggtcatactgctaaaacatccttaaacaaggaagaacgtgctgttttattcacagaatggatcatgagcaaaactaatcaaaaaggcatgaccattgctgaattactcaattacgtcctctatggtggaaagccctcattgatgtgggaaagaatctaccaggctggaaaagatgatgaatacaaatttcagcactatggtattaactctatcgctgaagttgttggctgggccagacctgatgatacgcctcccagaaatggcagaactaataaagccttacgtgcattaggctatccagttcgagtgaatatttag

SEQ ID NO: 225632 - DNA, 159 bp, Klebsiella pneumoniae
atgagcccgagcattgatgcttaccatcgcctgagtagccagttcgaaaccgccgattggagatttaatactcattttactagtattattcttacggtcagcctcaacattctgagtcagatgagattcaagttccatagaaagacatgcttaagttaa

SEQ ID NO: 225633 - DNA, 996 bp, Klebsiella pneumoniae
atggttggtaaaagaaaatttgtatctgaattttcagtgagcattacttctaaaggatggctgatgttcactcctgatcagctgcatgctgatggtaagatgaatgatgagctccaagaagttgctgacaatagccatatatacctcatctgtaaaaagccaaaagcaacatgttgtaacgagcaacctataatccacaatggccttgtttctggtaaagtgtctagtcgggtcaaaggtaaagaaatagtttctgaatatacttttccatttgaatttgaagataatgaggttagtttgaatgtagcagattacccacataaaaaaattcagacgctcaagtctgatggcttatgggagagatattggccgagcgatgtattggctttatatactggaaatgatatttatcgtaacttcgaggttttatatgtaggtcaagcttttgctgaaggaaagagaactgcaattgaccggttaaaaagtcattctacactccagaaaattcttgctgaaactatgagtgactatccagatgaccaagtgtttatttttaatttggtatacgatgattatatacttttaacttctttcgatggacgagacaaaactagtattaccggtgaagaagacaatattcgtctcaaaagcataatagacaatcatttatcccaaaaagaagtaatttgcttagccgaggctgggttaattagatatttccaacctaaatataatgccatttataaagaaagttttcctgcttcagatcagaagatactttcaggttgttttgcgctcgacttttctggtttatcagtagaaatcgaattgagccaatcacctttcagattatattctgataaaattaaatccagttatcatcatattgctgcatttaatttatctgataaagaggagagacttggtttctttaccttaagtgatggcgttacagaaactaacatacttggtaatattattaaaatggaaaaataa

SEQ ID NO: 225634 - DNA, 252 bp, Klebsiella pneumoniae
atgggcacaccacgatttacacttgaatttaaagaagaagccgtccgtcagataatggaacgcggtgattctgttgccgaagtatctaatcgtcggggcgttcccgcacacagcctctacaagtggctacgggcgtggggtcagcccatatttagagccattagggtgaacgaaaagatgcataccgttgccatcggtcagcttatattgtttgtccgctggcatagctgttccgacttcgatatcttttaa

SEQ ID NO: 225635 - DNA, 1026 bp, Klebsiella pneumoniae
atgggacgtggcgattttggctttataaattccaacaaaatttattttgaatcggaaaagtcttggtgggtagaacttataaacactaattgcatttggtatgatatgcttataaacccacccgatcgtattgacaccaataaaatcataaagaattatcttggggcggttgaggcttatttgagtgagcattgtgaaaaaagatttatctattttttaggtgcaagaaaaaaagttagattttccactgagaaaaaaccaacttactcttattttacgaaggatttaaacctaactttattgattggacaggagtgtagaaagttaaaattaaaatattctttttttgatgttacgccaaatggcaagaggaaaataatgccaaaaataagagtaactgataaatatttatatgttgaacatgatagtaaacatgtgagtgtaatttctatccatgattttcttaaagataactatataaatttgggaataagtactgagatacattatgttggatatactcgtcacccacataaacgacctatagattttattcatcgtggtttatcaagaatgctttataatgtttcaaacgaggataatgatttttttgtttactttagcatatttaatcctgtagtaatatcccataatgatgattataatgttagttttggtattgctaattctcagatagatgaggttgaggtagataaagaggggaggatcattgaaaattgttttatacgatattttgatacggaactacaaaatgatgataaagaaagtaaacgcccggatttaaataaaatgttcacagagcttgttaaccacaagagaataaaaacaatcgctgtagattttcgatatgaaaataacaatgaatatttctctttttattctaacactgttcagccgaaaaatgaacatttttttgtaatcgattttgttgatgggaaaattaacatagataggaataaaaatatagccactcacatggaatgggttatgggtaaaaattcttaa

SEQ ID NO: 225636 - DNA, 510 bp, Klebsiella pneumoniae
atggctctacagggaaagttgatattaaatggtgctgattatgcacctttcaatttgtacggcgtcggtgtttttatggcgcattcagggcgaggtgtatatcgcaataaagctgcatgcagcacagtagtaaaagatggtccgctgcccttgggaaaatactggattgttgaccgcaatgaaggaaactggttttcccaaaagggacgagaaattaaggatacggccaataagattataggttatcgtgaatttggtaaaagcgattggtttgcattatggcgtgacgaccacggaatcgacgatgagacgtgggtcgaaggtaacttccgtttgcatccgggtacggtttccgagggttgtattactatcgcccataattctgattttgccatgatccggaatgcgcttatgaatacatcacttgttcaggttccctgcatgcgttcccttatggcccgtggttgggtggaggttgttgccagtggctctaacaacgtttgcccgtaa

SEQ ID NO: 225637 - DNA, 237 bp, Klebsiella pneumoniae
atgggactccagttaattgtaagagcagattataagaagatagagaaagtgctgggggagctgatgtcagaatgcgaagttttcccagtggcagaaggccttttgggtctctcaatttctgagcagaccctttcatctgagggggaagatgccattctacgcaaactcgaacgactgaagcgttttgacctctggcagggttcctggcaagcagccagacgacgctggctctggtga

SEQ ID NO: 225638 - DNA, 174 bp, Klebsiella pneumoniae
atgctgccggattactatctgcctgctgctgacatcgtggccctgcctggtgagatggccgcctcccgttttccccgaaccgaatatttcatttgtatgctgcgggaggctctgttagtacatcgatgggggttggttctcagtccagtcaaactcaagttgtttcgcggttaa

SEQ ID NO: 225639 - DNA, 609 bp, Klebsiella pneumoniae
atgactatacaggttgggatttatgtttttgataatgtagaagttcttgatttcgcaggcccttatgaagttttcacctgtgccaccagagttaaccggggtgaagttccattatttaatgtttttacagtaggtgaaacgttaagcccggtacgtgcaagggctggactcaaaatagatcctgatttttctttggaaaatcacccggaaatagattgcctgattgttccgggtggggtcgtaagcgctgaacttgaaaagcaaaacgtgcttgagtggattgctaagcaagcatttaccacgacgataaccgcatcggtatgtacaggtacttttttactggcagccgccgggatcatggagggcaaatcggccacaacgcactgggaagatgtctcagatttgcgtgcaatgttcccctggctctcagtaaaagaaggggggcgctgggttgatgagggtgaaatcgtgacttcagcaggaatttcagctggtatcgatatgagtttgcatttagttgagcggcttaaaagcagggaactggcactattaaccgcgaaacaacttgagtttgactggactgagaaccaacccccatcgatgtactaa

SEQ ID NO: 225640 - DNA, 1185 bp, Klebsiella pneumoniae
atgccattcgtaatttatgttttcactatcagcgcttttgcgctgggtctcgccgagtttgtcccgatcgggctgaccgatattatggcccgtggtctgggggtggaagttgaacaatccggagccgcggtgacaacctatgcgctgggggcgacgttctcggcgccggtattgtcggcactgacggctggctggagcaggaaaacagtcatgctggtcacgtcagtcatttttacgctgggcagtctggcagctgcgtttgccttcaccttgcctcagttactgactgcgcgctttattgccggattaggtcacgggttatttcttgctgtcgcatccagtacggcggcccgtctggcagggcctggtaacgctggtcgcgcggttgcagtggtctttggcggttttaccctggctatggctattggcgttccgatgagcacatggctcacaggtgtggtttcatggcgtctggtactcggtgctatcgctgtatttggggcgctgggttttatcgggctctttgttggtatgaaagatccggtacgcagcatgcccggagaacacaccggttcagctacaaaaaatatcggactgttgttgaatcgtaagctgctctccggtgcgctggttacagtgctggcatacgccggttcatttactgcattcacctttatcgccccattgcttactgaggtaaccggtatttccgggacgacaataggcctgtttatgctgatttatggcatcaccgcagcagccgggaacatacttggtggcaaacttaccgacagtatggggattgaccgggccaatatcgtcatcatcagcggaattgtggttgtcgtactgggaatatggctgctttcctcttcaccggttagtatgggcgttctggtagccctgctgggtatgctgacgtatgcggccgttccggcactacaggcaagactcatggatgttgctgaaaggcatgtgccccaggcgcatggagttgcagctggtctaaatatagcgggttttaactccgggattgctctgggctccctgctgggtgggatcactatcactcatgccggcatgatgtataccggtattagtggtgcgatcgtgtgtctgttggggttgttgttactgctctcccaaagcaggcgtggtactgtcacaccctgtcaacaggattaa

SEQ ID NO: 225641 - DNA, 558 bp, Klebsiella pneumoniae
atggcgcccctgatgaaagaaggatatcgcctgcggtttcataccggcaataaacagcgcatttattccctcctgcaggaaggcagtgttgatctggctgtaaccgcatcgatgccggatgatcgcctgtacggttatgcgcatttgctgacagaacgtatgttactggttcattccccccggctgacggaaacgctgggaacacagccgtcggctgccacactcgcttcggttccattgattgcttatgacgaagaactgccactgatcaggatggtctggacggccatgtatcagagggcaccagacatgcaggcatcctttaccattcaggacttacgtattattcgtgatctggtgcgcgacggtcatgggtggagtgttctgcctgattatcactgcctggatgacctgaaaagcgggcgactggtttcagtcacgaaggcagagactgccccggtaaatcacctttatcttgcctggaacaagagtaatgcgaataacagacgaacggcatacgtccgggattatatccttaacgcctttccgctcaactga

SEQ ID NO: 225642 - DNA, 138 bp, Klebsiella pneumoniae
atgacactcactgcatattaccagttaaggaacacaaagtcctcaggtcttggtttcgaattgctgaccagtaaaccgggagcctttattgtgctggaagaatgcagttatgagaaactgtatgaaattacccgttaa

SEQ ID NO: 225643 - DNA, 141 bp, Klebsiella pneumoniae
atgaaattacccgttaatgggcataacgggagtgcaggcgatcgttcgaatgcgtttagctgcgcgatgaataaagccagtagcctgcataattacattggagcaaagctggattacaacgtttatgaagaaactgcctga

SEQ ID NO: 225644 - DNA, 3630 bp, Klebsiella pneumoniae
atgagcgaacaaacatcccgccttgctattattcttgatagcaccggagcagaaaagaacgcggatagtttagccagtgctttaaacaaaataacggcagagggtgaaaaagctgagttcgcaacggataatctttcctcagctactaaagatctgaactcccatcttaaggttggaccaaaacacgccatcgaaaatgcgaagtcaacaaggtcgcagcgggaagaaatagaaaaattactggataagctggatcctacatcaaaggcgtttgatgagctggataaagcaatggagcggctgaaaaaggcaaatctatctggtgtactgggggctgaggaattcagccactacagttccatcattgatcaaactcgcaatcgtcttcagtctgctcaggatgaattgactgggtatacgcaggcccagagagaagctgcgaaagctgctcaggattcagcagcgcaacaggcgcagcaggagcgaattctcacgcaattacaggctcgccttgatcccgtcacccacgcattacaggctcttgacgagcagcagcggcaaattttcgaatatacgtacagtggtgcgcttagtatccagcagtatgatgcctacagtgccaaaattgctgaagctcgtcgtgagttgaacggagaagcgcaggcagaacgtgacgcagtaaaagcgcaggaagatcagcgggcttcgttgcagcgattagttggccaactcgaccctttctcagctgcgttagataaaatcaagaaacagcgagctgaactgtcggcagccaaagacgccgggctgcttacgcctgaataccacgcagagctttcaaataagctggatttaacagagaaggggctcaatcaggtcagcaatgaaatgcggtatggggccatctcggcagggcagtataaaaatgccatgcgtttactccccgcgcaattgaatgatattgctgttggcctagctggtggtatgcctttgttcactatcttcatgcagcagggttcgcagatcgccgattcgtttggcggttggggtaatcttttcgagattataaaacagcagctgctgggggccggagatgccgccgatgaatcaagcgattctctgtcagataacgctaactcattgtttgaaaatgcagagaatgccaaaaaactcactggctttctgaatcccatggctattgggatcggtgctcttgtcgcagttgtgggtactctcacatatgcctggtacaaaggtagtcaggagcaacaggagttcaataagtcccttgttctgaccgggaatattgccggggtaaccaccgggcaattagcagacatggcgaaatcggtcgcagataatacagggaataccacggctgccgccgctcaggcactaaaccgtgttgtctctggtggtaaaatcgctacaggttcaatgcagactgtcacagaggccgttgtcgcaatgaatgatgcgaccgatgaatctatcgatagcatggtggcagacttcgagaaaatcgcacaaaacccggtagctgctattggagaactgaacgacaaatatcacttcctaacactggcaacctataaccagattaaagcgcttcaggacgagggtaatcagcaggaagccgccaggctggcgactgaagcatatgctgcaactatgaagcagcgtgcaaatgagattgctgaaagtttgggtaccttgcagtcagcatggaaatggctcggcgatgaggccaaaggtgcatgggatgcaatgctcaacattgggcgtgaaaagagccttgaatcccagcttgaagaggcagaaaaagccttagaaaacgcacagcgaagccgcggattaggtaatggtctgtggaatacctatggagttaactatcagggcagtgataacgcgatcgcgcaagctcaggcgcaggttgattctctgagggggcagattacagctcagggtgtgctgaatgacgctattagcacctataacaagcggcaacaagaagggattgaagcccaggagcgcattaataagttaacagaccaaactctaacaaatgcccagaaacggaaaaaggcactggatgaattaacaagggatttggtaaaggcaagggcggccggtaactcaattagtgcagaagaagaggcaaaacttcgcgcaaatataaacgagaaatacaaagatcccaaaaagccaaaaacaccaaagggtaaggcttatgttgaggatgctggttctcggctattacatcaaataaatcagcaaaccgctgcgctacaggaacaattagccagcacagaaaaaattaatactgccactcaggcacgtgtaaagtttgagcagcaaattgctgatatccagaagacagtaagtagtggcgggaaactaacggctgcacagaagtctatttttcagcaaaaggaccagatattacaggcctataaacaacaggaggcattagccaatcaagttaaaacccttgatgattatcgtaaaatgcaggagaaggttttcgataagtcggagcgacaaaacgacaccttgcaaaaaaggcttaaacttctgcaaaagatggtagacataggaaggctaacccctgatgccgctgggaagcaggccaatgaattgatcaacaagtctgttttgcctgactcagttatttctggagtaaacaaagcaggcggtacacttacttcgggtgcaaccaacgatgatttgtccaggcaggggatgaacttgatcgggcttcaagtagacccgcagcttgagattatcgacaggttaaaaaaggcacagacggactatgcaacttggctcaatcagcagcaacaggcaataactcaaagtacagttggtaatgaggcccaaagacagcagcaattgctggctttacagcaacagggctccaagaatcaggagatgctgagtaatgccacctacatagctcaaatgcaatcagctcagaactcattttccggtattaccgactcaatgggcacaatgttcggcgagcagtctgcgatgtataaagcggcctttgtaacacagaaagcattcgctatcgcccaagctgctttgcaactccccatggcgatggggcaggcgctggccgggttaccgtttccggctaacctggctgccattgcccaagttatcgctcttatgtccacaatcacttccagcataacgagcgcagcagccgtcggcttcgcctccggcggttacaccggccccggtggtaagtatcagcccgcgggtattgttcacaaaggagagtacgtcttcgaccaggcatcaacgaaccggatcggcgtgtctcagcttgaggcacttcgaaatggccaaccgcttgatgcaactctggggcgtacagggtttggtactggcgtccagaacgttaacagcgacaacagcagcaagaccaccatccatgctcccattgagcagcatttccatacgccgcccggtgtgacacctgatcagatgactctctccatggctcaaacgcagaagcgggcgacaacggaagccctggatcaggttgctgcgcaattgttgagaggagatgggaaagttggtaaggcaatgcgcagtaaatatccaggcagagggttagagtga

SEQ ID NO: 225645 - DNA, 282 bp, Klebsiella pneumoniae
atgaatgaagctaaaccgcaggacggtaccactgtaaaaggctaccgcacgctgggtacgaaagaaatcagtgacatgaatgagcttaagaaggctgctcgtgaatttaacgcgctgcttgagaagcagaaggcatgggttgctgatgagttggcgatgacagcaaatcattctgatgaagcgcatgaggctggccgctgtctggctatcgcccgcaccaaaatgcaggaggcctgcatgtgggcctgccgcgcagtcgcccggccagatgctgactgttaa

SEQ ID NO: 225646 - DNA, 276 bp, Klebsiella pneumoniae
atgggaatcgaagctatcgcggggctggtggttgtcatcctggctgctatcgctggcgcgttcggcattggccatgctcgcgggaccagtaaggcggacgccaaagccgatcagcagcgtaccgaagagaatgccgccgccaccgtcgccgcggcagaacgtaaggcggaagtcatgaaaggggccagtgatgtacagcagactgttagccatatgcctgatgacgatgttgatcgggagctgcgcgaaaagtttacccgccccggtagtcgttga

SEQ ID NO: 225647 - DNA, 276 bp, Klebsiella pneumoniae; identical to SEQ ID NO: 101446

SEQ ID NO: 225648 - DNA, 219 bp, Klebsiella pneumoniae; identical to SEQ ID NO: 101445

SEQ ID NO: 225649 - DNA, 1251 bp, Klebsiella pneumoniae; identical to SEQ ID NO: 193791

SEQ ID NO: 225650 - DNA, 1452 bp, Klebsiella pneumoniae
atggagagcattaataatcaagtgcagtcggtacgccagttgctggccattccccaactggccatcccaagctatcagcgaccttaccgctggggctccaagaatatctcggatctctttaccgatttggcaacccatcaggacaagagcgcctaccggctgggctcggtggtgtttcatcagcacaccgatagtgagcagggcgagatgcttgatatcgtcgatggtcagcaacgcaccctgaccctgatgttgaccgtcaaggcgctgatcgaggtgctggataacgaaaatcgcagtggcaaagagaagagtatccggtttcaacgtcaggatctgcgtgagcaattgcaggtcttgcgtggacctatcgatgcgtttatgcagcgccagcgcttccccagccgggattcggagttcaacctcagacgcaactatctggcgttgcgtcggctggtggcccgccctgagtttgacgagcagcaaattgactttctgctcaaccgctgtcaggtggtctgctttgtgctgcaggatatctcggaggcgttccagttcttcgattcgcaaaatgcccgggggcgcgatctggctcctcacgatctgctcaaggcatttcacctgcgcgagtttgccggtcatgaggccaatctcaaggccgaggcggtcgcccattgggagcgcctgccaagcgacgagctggccaatctgttcgccctctatctctatcgggtacgccagtgggccgagggcaagtcggcccgctactttggcaagggggaggtggatctcttcaagggggtcaacctagatcgggtagggcattatccttacgtggagtcgctgcgcatcgcccaccactttgtcgatgagtacaacagccagtaccagcgcaagattgacggccagtacatgacgtttccctttcatctcgaccagatgatcatcaatggtcggcgctttttcgagatggccgagtactaccagacgcgggtggccgccatcgtggccgaggagtctgattccggcaaggcgcaatctgccaccctgctcggcgaaacgctgacaccgatggccagcaaggtgctatcgaccctgggcagttacgagcgacgccaccgcaccggggatcgttatgtgcgggccatgttcgactgcgccctgatcttctatatcgacaagttcggcagccaagggctgtcactggccatcgagaagtgctttatctgggcctatcgctgccgcatccgccagcaggtagtgcagttggcaaccatggataactatgtgctggagcacaatctgatccgtgccattcgtgatgctcgtctgccgggagatctgcacggcttccctttgcctagcatgagcagtcgagagaacaagaacaatcgcaatggtgccgaagatgagctggtcgggctgtttcgggagatgaaatattatgaatga

SEQ ID NO: 225651 - DNA, 1635 bp, Klebsiella pneumoniae
atgaatgatgcaggcgttcgccccttttccattcgtgcactgcttgaagatcgcgcccgctatctggtgcccatgtaccagcgcaactatgcctggggtgagggagagatcacccagctgctgcaggatgtgctggattatcagcaaaaattggtcagtggtaaggggccgcaaacctactatatcggcaccctggtggtgtttgcccgggacgatggcagtttcgaggtaatcgatggccagcagcgctttactaccctctctctgctggccaattggctcaaacatcacgcgatagattcggtggatatgagctggtatcagaccatcaacctcgattttgagagtcgcccgatatcgagccataccttcgagcgcttatggcagggtgttgccccctacgatttgcgggggagtaccttcaatgaaggtttggtgaacggttttgagctgattgacaaggcaatggcggatcttggtttggtaggggctaaactgacggccttttgcgactacctcttcaagcatgtgcagatctctcgtatcgaagtacccaaggataccgatctcaatcacttcttcgaggcgatgaacaatcgcggcgagcagttggaaaagcatgaagtgatcaaggcgcggctgatggagacgctgaaccagatacccgaggaagagcatcgtcgccaaagtattcatatcctgacccgggtatgggatgcctgcgccaatatggagcgctatatccagtacggctttaccccgcaagagcgccaccgtctgtttggtgagagcgactggggtcagtttgtgccccgtgattttgcccatctgcttgatctgctaggatccccaaacacggccgacgctgccgataaaagccgtgcagctgccggtagccaagggcgcaccttgttggccattttgcaggatgacaagcttgatggtgagcagacggtggaggaggagagcccaggctccgagcgctttaacagcgtcatcaacttctccaacttcttgctccatgtgctgcgactcgtgagccgcgacccgggtgatacggagggggtgccgcttgatgataaacaactggtcgatcagtttgagctgcgagtgataaggcaaccggatccagtagcggcagttcagcgttttatctatggcctgttaaagagcaagtatctgtttgatcagttcatcatcaagcgcgagtttgccgatggcaaggatagttggagtctgaagcggctgcactggtattcggaaaagagcgtcagttacatcaatacctttgacaaggatgaaaatgagaatggtttctctggtgttaaccggcgggtcctgatgttgctgtcagcgtttcatgtgtcgaccccgaccctggtttacaaacattggctgaatggtgcactgagatatctgttcgacaattgtcaccctgatcaaccggtggatgccggggcttatctgtcctatctggagagtcaggctcgccgctttgtcttccagcgctttttggcgcctggtgaaggggcttcctattaccagatgctctaccttgataacgccctgttgcccgccatcaatgtggatgagagttggcacaaggtgattacatccaaacttcggctttgttga

SEQ ID NO: 225652 - DNA, 372 bp, Klebsiella pneumoniae
atgctccggcccgacataagagtggccgagttcgttggaggccacgaaagcacggctgagcgcgtccttgacccggggcgacacgccgatctcgccctcgaacggcttctcgccgcgcttggcttcggattcgatttgccgcttgagatcatcgaccttgatcttgaattgccccagaatggtcttgaccacgtcgctgtcggcgagcgccaacagcaggtgttcggtatcgacttcggggcggccaaattcggcggcatgtttggcggcctcctgcaacagggcctcggactgttcgctgatacggctggccagcccactgccgcgccggcgcgcggtgcccgtaccggccggggcgggttcgccgaatga

SEQ ID NO: 225653 - DNA, 573 bp, Klebsiella pneumoniae
atggacattgatttcaagaagctggctccctggaactggttcaagaaggagcaggaagaacaacagagcactgcctcgctgccggtgcagcgcaatgacctgccggtagcgggtgggcccgtcagtcccatcctgcaattgcaccgcgagatcgaccgcctcttcgacgacacgtttcgaggcttcggctttccggcgctggccatgccacgctggccgtcggactggccgggcctgctgaagccggcgctggacatccaggagaccgacaagcagtacaagatcgccctggaagtgcccggcgtcgaggaaaaagacatccagatcacgctcgacaacgacgtgctgctggttcgcggtgaaaagcgtcaggagcaggaaacgaaagacggcggtttccaccgggtggagcgctcctacggcagctttcagcgcgctctgaacctgccgaccgatgccaaccaggacacgatcaaggccgccttcaagaacggcgtgctcacgatcacgatggacaagcgcgaggccagtgcgcctaagcagcagggccgctcgatcccgatcaacggctga

SEQ ID NO: 225654 - DNA, 705 bp, Klebsiella pneumoniae
atgtgctccgggcagccgcagatcaaacaccgatcctcacgttataaccgagcgcccgcagccccttgctcgtgcgcatgttccttggcggaaactcgtctgggcgcgcccagccgacgatttccccgaggctgctcaggccaacgtgcggaattgcccagtcgtcgctgcggatcgcgttccagagtcgggccgaaacacttccgttgccccagacaacgtagttcaacagtatccgtccgtccaacacaccttcccgacaccgccgccgaaggccatggcccatcaagcggattttccatgccccctcagcgccgtacctacagcaaatctttcgaggcccaggtcattcaggagtgttctgaacccggtgcctccatcgcaaacatcgccttgggctacaagcaccgtccgcccttcgcgggatcgttgccgccagagccacacgccgaacttttccaccttgtcgtcgccggcctgcggtcagtcaggcaagcccaggtgctcgttttcctgcttgatcgcgtggtctcggatcgcgtgcacccgggaaacggcatccacgaactgccacgatctcttagcttggcggggtcaagccagccgggatgcccggacggttacgctggtccgcgcccagttgcagcaccaaggtcggccgcagcgatgaagcgggtcttgatgccgcactgcgccgcccgatag

SEQ ID NO: 225655 - DNA, 747 bp, Klebsiella pneumoniae
atgtacttccccaggctctacccggacgaactgctttacagcggtattgcccggtgccgggtacatctggggataggcaaccacaagaccttgctgcacatgcttttcggtgacagcaaggttgccgcgattaccgatctgcctacacacctgactgcgttggcgaacaacacgggcttggatgcggaaggcatgatcctgaatcacacgctgttcccgctctatgcccctttcattccgccggagcgccgtaccgatctttttcaggccatgcttgctcccgaccggccgacgattggtctgtctggggcctcgacggccttggtcaagtggcccgattggctgcgttactgcccgatctgctttgaagatatggctgcgcgctacggtgaaccctactggcggcgtagctggcagattcaagggatagatgcctgtcccgagcatggctgtcagctcctgaactcacctatcccgttccgtcgagcgcaacggcacgagtttcatccagcctctccactgtttctgccccgtgatcttcgcgtgagtcccgtgggcgaagaggctatcagactcgccaaggctgctatgcagctgctggcgctcgaagaggtgcaatcgcctggttacggacgctggaccaacctgtaccggtacctggctacagagtgcggcgccaggcgcggccggcaggtcagggctgaagtcatctgggagaagatcctggcatcccatcgcagggattag

SEQ ID NO: 225656 - DNA, 1611 bp, Klebsiella pneumoniae
atgactgaagaattccagcgcggagtcattcccctggcgcgttaccaggagcagcagcttcctgagtatcaggacaatccgctcatcagcgcattgcctccgattcctgatctgcaggaggtggtcggtctattgcagcagcttcccggtttcgagccgcaggaggcgcttctggatggtcggctcagggcacatgcgattgcccgcctgttgcacggcttcttccagccgctgagccatcacttggagctggagagcaagatcagtctgatgatccgtcaagggtacatcggtcggaatccggccagtggtgcctggtatgcgcacctgcagaatggctatcgccgtgtcgaggaggaggatctggatgcggcggtgtaccagagtgtctcctctacggccaacagcctgtcgctgttcggctgctccggttgcggcaagacgcgcacgctggagcggattctgggcatgtacccccaagccctccatcaccctgattacaacatcactcaactggtctatctgaaggtcgactgcccaattgacggtgacttggatgagctgtgcctgagcttcttcaacgaagtagacaagatcctgggtacccactacagccgtagccacggacgcaagaagctgggtaccaaacgtctgctggcatccatgtgccaggtagccaatctgcacgcgctcggagtgctgatcatcgacgaggttcagaacctcaacgaggcacgctccggtggtgccgaaaaaatgcacaatttcttcgtgtcgctggtgaacaccatcggtgttccgatcattcaggtcggcacccaccgggccagcaagttcttccagcgcacgttccgggctgctcggcgggtctccgggttgggcagcatccgctgggataggttgcctcgggacgagcattggaagcgtctgttgaagcggctctggaagtatcagtggctgcgaaatgcggcgccgctggatgatgaactggaggctacgatgtacgacctcacccaaggggtcatggacatcgtcatcaagctgttcgcgctggcgcagatccgggcgatagtgacaggtgtcgagtgcatcaagccgctgttgctgcgcagggttttcgaggacgagttcaaaccggtccatccgatgctagcggccttgcggagcggtaggcccgagctgatcgccaaatatgacgacctgctgatgccagagatcgagggacggttgctgaccctgactcgctctctggatagcgtcccccaacctaaaccgccggcccctccggctgatgacaaggcaaagcggctggccgccctgctcgaaggtatggaaatcccgagggacattgccattcccatggccgatgaattgttggcggagaatccggacatcccgctggcggccctgattcacaaggccacggcctacctcgcgcaggacgctcccaagaggcccggcatttccagagttaagcggacggagtggggggggctatccgaggaggatctgcgccgacgttatgccgatgggcctgaaagcgaggcctatgacagattcaagcaggctggcctgatcctcgacctgcggcctctgttgaaggcaatatga

SEQ ID NO: 225657 - DNA, 2088 bp, Klebsiella pneumoniae
gtgttgcccgttaatcaggtgttccggatgggggaactgcgaaagcgcctgctgtggtccggtaccgagcaggcaatctggatcgatatcgattcggacacggcgttgcccgaaccgatatcgattgcagagctggagcgtctgctcatggagcgggagctggagagcattgccgatcccttcgaggagacagtcctacgggaggttgaggaaggttcccttgatcagcagaagcgtgatgaagcttgggcaatgctggccgattttgtgcacgacccccagcttttcgtgcggcgccccagagggctcattgtcagaggcatcatggagcgccatggtgtcaccaatcagacggtgtacaggttactgaggcgctactggcagcgaggcatgtgcaggaatgccctcttgccggactatgtcaactcgggcgcccgtggcaagcgcagaaagccgaaccaggccaagctgggcaggcccagagtggtgatggaggggaaagggtgcaatgtcacgccggacatcgagcgcatttttcgccgggtcatcgaggaacgcttgctcaaggaaaaacatccgtccattccggatgcctacgccgccgggctgaatctgctccgtgctgttctgacggagctgccgacctccgaactgcctacattggggcagttccgttacttctatgggcgcgaatatcacttcaccgacaccttgccatgcagggtgtccgcagtggattttgccaaggacttccgaccgctcagcagtacatcgacgaccgaagcactggggcccggataccgctaccagatcgatgccaccatcgccgatatctatctggtttcagaacatgatcgcagccttatcgtcggcaggcctgtcgtttacatggtgatcgacgtgttcagccgcatggtcgttggtatgtatgtcggattcgaggggccttcctgggtcagtgccatggtggcattggccaacacggtcgccgacaaggttgagtattgccgccagtatggcgtggagatcgatgccagcgactggccggtcaaaggcttgccggatgtggtgctggccgataagggcgaactgaatggcaccaaggtggaagcattttcccaagccttcggcgttcgcatcgagaatgcaccggccaggcgaggagatgccaaggggatcgtcgagcgttatttccggacggtgcaggagcgtttcaagccctatgccagcggtgtggtcgaggacaccaccagccggaagcggggtggccacgactacagacttgatgccagtctgaccttgcccgagttcacccagatcatcattgccggcatcctctaccacaacaactttcataccttgagcaaatacgacaggacctctggtatgccgggcgatctgccagccatcccggtcatgctgtggaactggggcttggccaacctgaccggccggttacgtactgcgcccgaggagctggtgcggatcaatctcttgccccatgagtcggccacggtttcggagctgggaatcaggctgttcggctgcttctacacctgccaggaagcaatcagggagggttggtttcaccgaggccaggggcgccggccgacaggggtaacggtcgcatacgatccacgtagcgccgaccacatctatctgcggccgtccaatagtctcaaggactactgggtttgcgagcttgccgaccgcagtcgacgcttcagggggatgaccttctgggatgtctggctgctgtccagagaggaacggcgtagcgataccaacgcggcggcggaagctttggtagagagaggcaatcttctgaagcagatcgagtccatcgttgcccaggcagaggatgccagtccggtcaatacgggtatgaccacgaaggatctgggaacccagatccgcgagaacaagcagcaggaaaagcgccaggaacgccagaaaacagcattcaaaccggagaaagcacagcaggaaaagccagccgaggtgatcccactgcggggcgagaagcaggaagattatgccttcccagatctcagtgacctgatattcaaggaggaagaggatgactga

SEQ ID NO: 225658 - DNA, 828 bp, Klebsiella pneumoniae
atgtctggaacattcaaggggctgacccaggcccagatcgatagaaggctcaaggacgggcgtggccaaggccagggatcggactacaagccgttcatctacaccagggacgtatcctcgctggggcgctcccaccgcctgcctggcagcaagacccggcgtttacaccatcttctatccgatcttgaactggccatcttcctgaccttggatcggtctccccatgtcaccgatatccgtgaacagtttccgatgcgggtcgaagatacggtgcgcatcgccgaggagcttggcctgccccacggtcgttataagggtaccccgcaggtactgaccagcgactttctggtggatttcgaagatcctcagcgcccgagcatcgtgattcaggccaagtacagtaccgacctgcagaagcctgaagttatcgagaggcttgagcttgaaaggcgctactggcaggaaaaaggtattccctgggtcatcgtcacggagcgcgaggtatccagggtggcatttgccaatatccaatggctctatcctgcccatgctgaagacgacatcgctcaggacgatctcgcccattaccagcagctgtttctgctcgagtttcagcgtcacccagaccggaagctgaccgctattgcccaaggactggatacctccggccagctggaggccggtcaggcgctctattggctacgccagttgctggcccggcactgtttcctgttcgatcttgacactccttaccgggagctgaagccgaaagacctggttgccaacgctcatcaaatgcatcaggagctgagcagtgttgcccgttaa

SEQ ID NO: 225659 - DNA, 801 bp, Klebsiella pneumoniae
atgttcgctaattttggcagcaaagtaaccattttagaggcagcttcgctgtttttgcctcgggaagatcgggatattgctgataatatcgcgacgattttacgcgatcagggcgtcgatattatcctcaatgcccatgtggagcgaatcagtcaccatgaaaatcaagtgcaagtgcatagcgagcacgcccaactggcggtggatgcactgttaatagcttccggtcgtcaaccggctaccgcttcgttacatccagaaaatgccggtatcgcagtaaacgagcgcggggcaattgtcgttgacaagcgattacataccaccgcagacaatatttgggcgatgggagatgttaccggcgggctgcaatttacttacatatcactggatgattaccgcattgtacgtgatgagttactgggtgaaggcaaacgtagtactgatgatcggaaaaatgtgccttattccgtatttatgacaccgcccctgtccagggttggtatgacagaagaacaagccagagagagtggtgctgatattcaggtggtgacattgcctgtagctgcaattccgcgcgccagagtgatgaacgatacccgaggggtattaaaagcgattgttgataataaaacccaacgtatattaggggcatcactgctgtgtgttgactcccacgagatgatcaatatagtgaaaatggtgatggatgccgggctgccttatagcatattacgcgatcagatatttactcatccgtcgatgagcgaatcactcaatgatctattttcattagtcaaataa

SEQ ID NO: 225660 - DNA, 1287 bp, Klebsiella pneumoniae
atgaatatgccagctggcgtagagctgcatgggaagggaataagaattagctttctatatcgcggcatacggtgccgcgaagttttgcggggctggactgtatctaatagcaatatacgaaaggctggtaacctccgtgctttaatagtaagtgagattcagcaggggaagtttgactatgcagagcactttcctgaatcaaaagcgattaaaaaatttaccacgacacaaaaagttaaaacctttggtgaattatgcaaagtttatcttgatgccaaaaagcttgaggtttcagctgcatcatacagaggcgcagaatcacgtatagcaacactttgcgctatcgtcggaagtaatacgcatattgcagatattcagcataccgatctgttgaattacagaaacgcgctgttaacgggaaacacttttagcgatcatgcgccctggttaaaaagaaaaggtcgtgctgtatccacggtcaacggcttgatgaacaacctgactgcgttgctcaagctggctaacctgagcggttttatagagcacaccccgcacgaaggtataaagatgctcaagcgctccaggagagacccggatccgcttctccagagtgagttcgaaggttttataaaagcgctatctcgtcgttatgttttactatggactacagctatctttaccggccttcggcatggagagcttacagctttagcctgggaagatgtggaccttgataagggtgagcttcacgtcaggcgtaatcagactaatgaggggctgtttgtgccacccaaaaccgaagcggggatcagaactataaccctgcttgagcctgcgctgaacgctttacgtgagcaattcaagctaactggcgcattaagcaaaaccgaaatcaccttccatcaccgcgaacatggtttaactgaacaacaaaaactgcggttcgtgtttatcccgcccaaaaactggcgcggggaaacgaagtattacggatctcagtctctggggtatagttgggaggcaggattaaagaaggcaggaatcaggaacaggcgcccttaccagtcgcgccacacttttgcgtgctggttattaactgccggtgctaacccgtcgtttatcgccggacagatgggtcacgaaaacgcgaagatggtttatgagatttactcgaagtggatcggagagatggaccgcaaccaggtggaaatgctgaatagcagtttttctgacgttgtgtcccaagggtgccccaaacgcaaggtagttggtataaaaaacgtttga

SEQ ID NO: 225661 - DNA, 216 bp, Klebsiella pneumoniae
atggccgatattactcaagaagatgaatgggtgatggaaaagggaattgtagcgaagatgtatatgactccccggcaaattaaatcttaccgggaggggagatggattgagggggttcattataagaagcacccacctgaccccaatgcttcagaaggaagggtgacacttctctacaactacaccaggattaacaggcttgtcggggaaacataa

SEQ ID NO: 225662 - DNA, 345 bp, Klebsiella pneumoniae
atgagcaaatcattaaacgcgcgttgtatccgccgctgggaagtgaaatttaaatctgtctgcgactcgaagcataacccctactggcgcaaaagcgacctgcgcgggtatatccgcgaagcggcgcttaccaccgcttacagcatggtcgagagcatggctgaacgtaacgccaaggttgactatgacggcaagctgaacggctggacgccagagttttcggcctggtatcgggagcaccatgagcagtacctgaaagaagcgcgtgactacctggacgaagacgctaccaacgacgaaatcgacgacgagatcgagaacgaacttgaagcatggaacgactga

SEQ ID NO: 225663 - DNA, 225 bp, Klebsiella pneumoniae
atgaaaatagaatttaaagaggatggctttaacgccatcaccacgattaccagcacggtttttgaattccgtcttcataaccgtgccgttgatacggcattattccttgccccttccgttcgcgctaaacgtagcggtttctttattttaaaaacagttattaccggcaaagcttctcacgtattacgtgcgtatgaagcgcttaaagtggaggcatcacgatga

SEQ ID NO: 225664 - DNA, 294 bp, Klebsiella pneumoniae
atggctaatttgctgcatggcaacccagcttttaaagcggcacaaagcaagctggctattgcgcaatttattggcaatggtgaaatgtgggccgaagcattttcctctatgaaagatattttcgagaaagcaaagcatgcagaagattttatgttttgcggtcgcgaagattctctctcagctctgaaattcaatgatgttattttgaattatgacatgtatggcgatttggtttctgttaacgcagacactggcaatgcacgttacaaaataaataccgaagtttcttactaa

SEQ ID NO: 225665 - DNA, 195 bp, Klebsiella pneumoniae
atgaacaaagacgataaggcttggcttttggccgttgcttatgccactactcaaccaaaagaaataacccatgaagagttcctttccgaagttgagcgctctgaagttgattttctctccctgcttacaaagcgcgaggaagaggaaagtgcgcaagcgatcaagacttgggagcaactaggctcttcaaactaa

SEQ ID NO: 225666 - DNA, 219 bp, Klebsiella pneumoniae
atggaaagcaaagatctggtagtgattaacggtcagctatgcagcaaagacgttgccctgctgattattgagaaggttttacctaccgttcttgtagtggtggcggaaaaggtgagggacaggcgaaccaaggatgaagtggtagaagcagccacaaccgtagttgaagccgctatttcggcaattagtttgaagagcctagttgctcccaagtcttga

SEQ ID NO: 225667 - DNA, 426 bp, Klebsiella pneumoniae
atgaaaatcaggcatgaacgcattcgcgaggccatgaatgcctgggcgctttatccaggtggccgcaaaacgcctgtatcggcgattgtcgacgcgtacttctccctggggatgactgcaccagagctgtacgacgaaagccaccctgacgcactgagccgcaatatccagaagatttaccgctgggttgaaagtgattcacctgcatcaatcgaaaagattgcgcagcttcttccggcaattgaacgggctatgccgccgttgctactggcgcgggtgcgtagttattactccgaaactttccgcgaacttcttcaccgcaaacaacgggtggacgacgaaatggaagcgctgttcggcgcaatgattgctatctctgaccggattgctgatggcggtccttccggtaacacgctgattcactaa

SEQ ID NO: 225668 - DNA, 255 bp, Klebsiella pneumoniae
atgtgtaaccagtctgctgctgagctgattgctcgtctgaaacgtgcttatccggcgtatgagccgtccgaaatgggtaatgcctgtgatggtatccctaaggccggatctcgcttccagcacaggcataagagccacatggtgacggtaattactgcaactgacaaagatgtgtcctatcgcaaagcctgcgggaaagttggctggatggggttacgtgagtttttacggctacacaatgaggttttggtatga

SEQ ID NO: 225669 - DNA, 1095 bp, Klebsiella pneumoniae
atgagcaatcaggtctttgaaattgttcaggccatgtcagggcaggggaactgcataacgattcccggtccgtatctggatttctttgcaggagacaggcagcagcatttgctggcagcgattctgaatcagctggtgttctggtcgggtaagtcgagtctggatgatggctggttttacaaggagcatgcggctctggcgaaagaggttcacgccaaagacggcgatgttgtccggaaagcgatgttcaaaattacggatcagtacctgtctggcgttatcgaagaagagcttcgccaggtaggtggaacacccaaaaaacattaccggattgaccaggaagcacttatttcccggatattcccgttaacactggattcggctcaagagccgaatgggaataagtcattgaaaggcatggaaacggcttataagacgaatggaatcggcgcaaaagccgaatcgaagcaagttactgaaaataatggaaacggctctcaagccgaatgcattcgtcccaagagccgaatggaaacggctcatgagccgaatcctggaatcggctctcaagccgaatcctatctctatacagatcttaaaaacagatcattacatacagatcataaaaaccacgcgggagaggtttctcctgtggataactttgctcagccagagcgtgaaactgccatcccggaggcaggcattcctgatgctaccgaagcaaacagcctggctaccgatgacgattttgacctcgctacgtggttctggtcgaccatcatcgagctgtacgaacgcgcggcagagttcgacggcactctggcaaaaccgagagagccgaacttctcagcctgggcgcaagaaatttgcatgctgcgccaggagcacggctgcagccatgaccaaatccgcaccatgattgagcgcattcagcgcgatcagttctggtgctcccgagttcaatccgtgaaaaccctacgcagcaaatggcaggagctggctctgaagttatgcccggcaaacctggcaaccggcagctcgttcggtgtgagcagcaaactggataccgacatcccgaaaggtttccggggctaa

SEQ ID NO: 225670 - DNA, 396 bp, Klebsiella pneumoniae
atggaaaaaattactgacgtgctgaaagagctggagaaggtcacctgccgtgagctggctgtttatttcgacctgacagcacctgaaatgctggcccgcctgatggtgctggagcgtgaaggcaaagcacaaaacctgaatggctactggatgccgggtgggagcaccgagcccgtagcagtcaccagcaaactcacagcgctggatatcaagctgctccagtcagtgccggttggcgtctggttcgagtggcagtccctggctggttttgttgatcgccctcgctaccgctgcgagcgtctggtagccgccgggtttatgaattcgaaggtaactaaccctgctaatccgcaccacggcactaaattccagaaaatccgcgaggtgacccggtga

SEQ ID NO: 225671 - DNA, 222 bp, Klebsiella pneumoniae
atgcgagatatacctgattgcccggtctgtggttcagctgcggagttttattttcgggattatcaggctggtgcctgttccggggccctgagatgcccttacggacatctccgcgtacaggatagttactgggctggtggcaagagcaaatcgaaaatccggctgattgaaaaatggtctcagcaggtcgaacagaaaaaaggtgaagtgaaaaatggctaa

SEQ ID NO: 225672 - DNA, 786 bp, Klebsiella pneumoniae
atggctaaaaactcgatcgacgcgtatggcgccagtggcaaaacgaacgttctgatgttcgaaccggaaaacctgcacctggtcaccgataagagccacccgctttacgatgaacgtattcacctgcctatcaacgaggcgatggtgttgaacatcattgatcagggtgtgcttgagcctatcatcgtctggaaggaccccgaaagcgggctggcctgtgtggttgatggccgtcagcgcgtgcgtcataccctggaggctaataagcgactggttaaacagggtgactctccattgctggttcctgcggtaactaaacgcggctctgccgttcgaatggctcaggcaatggtcagcgcaaacgaaatccgccaggccgatactccgctgggccgagcaaagaaaatggctgatgcgctggagcgcggccacgacgaggacgatttggcgctgatgtttggcgtgagtgtccagaccgtacgcgcaactatgtcactgctggatgccacccaggctgttcgcgatgcagtggagtccggaacggtcaccgttacccaggcgcgtcagctggcatcgcttaaacctgaagagcagcgggagaaggtctctgaaatcgaagcggcaactgctggcacaaccggccatgaaaaagcccggcgtcagcgtcagatcctcggtgatgcaaagcctcgcctgaaaacccgcaaagaaattactaaagccctggaatctgccgagggtgagtatgcgagcgcactccgttgggtgcttggggaggcggtatga

SEQ ID NO: 225673 - DNA, 435 bp, Klebsiella pneumoniae
atgaacatctcaacagtaaacgagctcatcgcttccctggagagcgcaggcgagctgtcgatcagagagacaaaggttatggcgctggcgaaagcgtttaagcagctggctgcggagaatgtggcgctgaagtcaaagggtaaggaattgctaggcgaagcgtgcgcagtgtactcaaagctcaataaactgattgatccatcaatcggtgattttgttgacggtcagacgcttcacgaattccagtttgttctcgacgcggaaacccccgtcaccgatcgcatcgtagccgaagccgaggcgcgcggagttgagaagttcgcggcaaaacttcgaattcctggtgatgaccagttttttgacgctttagcaaaaggggttgcacttgctgctgacgacttcgccaagcagctgcgcgagtgggaagacaaatga

SEQ ID NO: 225674 - DNA, 1071 bp, Klebsiella pneumoniae
atggacctgcctgctctggaagaattactgactcgcctcaaatcactgcctgttgctgaaaaaagtgagaccaatatattttcggttggtgcccgtggacactatgaaaaccctgtcagcgatttactcgctttctttattgatccggatgcgccccatggactgaatacactggttattggggcccttctggaattcctgccagcccatgttgatgcatcacttctctctccaccagcccgtgaggttatgacccagaaaggaactcgaatcgatttgctacttgagtcgaaagaatgggccatggtgttggagaataaaatctggcaccaattgaacaatcctttcaatgattacagtgggtatctggagcaaaaacatccagataagaaaccgttcctggtggttctgtcgccggaaggactggctccagccggttggacaggaataagctacagtatgtttatttctgttctgtcgcccaggctcggcatggcatgtatttcttccccgctcaataaatggcaggttttgctgcgcgaattcattctacatctggagacactgatgggtaaaaatacgattgcagcagagacagaaaccttcgttctcgaaaatttgcgtaatattcaggaagcggtgttactgaaaaatgctgtggtgaaatcacttcaggaggaaggcctacggtttctgacagagcacttttctgatcgtggttatgaggtcacaacggcacttaatcattgggaaggttatccggcactgcgcttcggattgtcgcactgggtgagtgaatctgatgtggtactttttctagacaaaacacctggaagacagtttgaagtacgaacgtacatctgtagtctgacgactcctgcattgcagcatcaagcaagaaagatgttgatacctgcactttatgacgactgctggcctgagagaagcggaagtgtgtttaccttcgtttctcggctgtcacagaagcatgaggaaaaacatctgatgttccagagtgtggcgaaagcgttagagcagttgaacgaatttgaactgcgccatgagagatag

SEQ ID NO: 225675 - DNA, 1098 bp, Klebsiella pneumoniae
atgaacaaaaaaaataaccgaatcaccgtgaaagacgtggcgcgcaaggcgggggtttccaccgcggcggctggccgggcgctgggaggttacggatatgtcagcgaggagctgcgtgaaaaaatcatacgcgctgctgaagagctgggctatgtggcaaaccaggtagcgcgggcgatgatcaccggcaaaagccagaccatcggcgtggtgggcgctgacatcagcaacccttttttcgccgaggcgttgcgcggcatcagcgatatcgcccgtcgccacgagttcggcgtgcttatcaccagcagcgacgaagacgtgccgcgcgagcaggaggcggtgcgcattctgctggagaaacaggtggacgggcttatcgtctcgcctgctgatataaacaattgccaccacctagaccaggctatcgcccaaggtattccggtggtgctgctcgaccgtaagctgccgacgctggccgccgacgcggtgcttatcgacaacgtacatgccagccgcgaagctacgcgctacctgctaagctgcggccatcgtcgcatcgccatcatcactgagttaagctcggactacgatacgcaactggcgctggagccggagaagttttcgacgatcaacgccgaccggcttaactcaagcggcgcgcgcctgctcggctacctgctagcgcaccatgaagcgggcgtggcggtggagaaaaccttaatccgccgcactggcaaatattgcgcccagcacgcgtttgaagagacactggctgtgctggacgccgccgcgcccacggcagttttcgcggtggataacgtcatgacccagggcgcctggcgcgcggtgcgtgagcgcggcatcgctgtgccgcaaaagctctctttcttcgccttcgacgaactcgactggctgacgctcaccaccccgcgcatttccaccgttgcgcagccgattcaccatatgggcgtacatgcagccgagctgcttttcaggcgcatacgtgagacagatttacctgtctcgtggcaaacgtatcaggtggagatgaagctgcgcgagtcggtggcgacgatcgcggagaacgtgaaaggataa

SEQ ID NO: 225676 - DNA, 1038 bp, Klebsiella pneumoniae
atgacgcaaaacaccacagtttcactgccgctgcgcccgctggaagcggacttcatcccgacacttgagaaagtgctgggacagaaaaacgccatcgctggcatcgcagaggccgccgcctcccgcccgctgaaagatatctatttcgtcggctgcggcggctcgttctcttcttccgtgcatgcccacgccctgctctgccgccacagcaaaaagctacaggcgtggaacctgaacgcggcggagtttatggcgcagccccctgcccgtctgggagcgtcgtcgctggtgatcctctcatcgcactccggcgccacgccggaaacggcgcaggcggcgctctttgcgaaatcttacgacgcgtatgtggtctcgctaagccaggagctgaacacgccgctcgccaataccgccgacaccgcgctggtttactacagcccgcgtaccgtgacgccgggcaaacagcttctgctgctgcaactggtgattgaactgctggagcacgtggataacctagacgtcagcgcctggcgcgacgccctgcccgccctgcctgcggcgctgcaacagtacctcgataaacaagaagccgtcggcgacgccattgcgaaatccatcgctcagggcggcgatatttacgtgaccgccgctggcgctaactacggcgcggcctacacgctttcctactgttatctgatggagatgcagtggcgcaacgccaccccggtgctggcgggtgatttctgccacggcccatttgagatgattttgccgggcgcacacctggtggtgttccacgccgatgacgacagtcgcgccatgacgcagcgagccatcgactttgcccgccgctataccgaaaacgtccatgtgtttgacgccgctggctttagcctgccgggcgcagcgccagaagtgaaagcacgctttgccgccatcgcgctgggcctgatgggcacgcgtcttgcagatcacctggagcatcacaccggccactctctcgatgaccgccgttacatgtacaaagtggaatattga

SEQ ID NO: 225677 - DNA, 831 bp, Klebsiella pneumoniae
atgcgaatttgtggagtgggtgacaacgtgattgaccgctacctgcactgcgacctgatgttcgcgggcggcaacgcgcttaactttgcggtttttggccgccaggccggggcgcaggccgcctacctcggcatcaccggcaacgatattccggcgggcgtgattcgccacgcgctttgcgctgaaggagtagacatcagtcgcgtgcggatcaacgaaagctttaacgcgctttcgcaaatcgatatcgacgccgacggcaaccgctttttcgtcggttccgtgccgccgccttaccagctgcggctgagcgaggcggacctggcgtggcttgcggacttcgacctgctgcacaccagcgattacagcgggctggaagcacagcttccccagcttgccgcctgcgcgccgctctcgttcgacttcggctcgcgcgacgacgcctgggccgagccgctactgcgctgggtgcaggtcgccaccttttcgcgcagtggcagcgcgccgcaggcgattgaaacgctgatcgccaacgcgcacgcggcgggtgtcgccaccgtgctggtcacgcagggcgcggacggcgcgattatcagccaccggggcaaacgccaccgccagcccgcgctgccgacgcagattgtcgacagcctcggcgcgggggatgcatttatcgccacactgctggtgaagcttggtcagggatcaacgcttgccgacgcagcgaacgatgcggcccttgcctcggcgagggtttgcgaacgcctcggtgcattcggcagcggcgtgccgctaacgccgctaccgcaggaggcaaaacaacaaccgtag

SEQ ID NO: 225678 - DNA, 756 bp, Klebsiella pneumoniae
atgaagatgaaaaccttagcctgttcagtagcgctgctggccgcaatctcgcttgccttacccgccggggccgccgaaaagctggtggtcggcaccgaagccaacggcattcccatctcctttctgaacccgaaaacccatgagctggacggctttatgctggatatcgcccgccaggccgcaaagcacgcgggttatgaggtggagtttaaagcgatggatttctcagcgcttattccggcgctgcgcaccggcaagatagaccttatcgccaccggcatgtatatcaccgagccgcgcaagaaagtgatcgatttcaccacgcctgtgtatagctacggcgaagggatgatcgtgcgtaaagaggacactaaagactacacctcctttaaagagttgcctggtgcggtagtgggcgcgcagatgggcacgatttttatcgagccccttaagcaggccaacatcttcaaggatgtgaaagcttacgacaccctcaccggcatcatgaaagacgtgaacgccgggcgcatcaaagcgggctttggcgataccccttccatggcctattacctctcgcttggcgaatatcccaacgtgcggctggtgaagagctacaagccggtactgccaggctcgctcgggcttggcgtgcgtaaggacgaagagcagcagttggcgaagcttaacgaagctatcgccaccatgcagagcaacggcgagattacggcgctgctggaaaagtggaagcttaattaa

SEQ ID NO: 225679 - DNA, 663 bp, Klebsiella pneumoniae
atgaacgacttttttaccttcagcgccactgccctccccatcctggtggagggggtgaaatacacggtactggttaccttttgttcgcttatcctctcgaccctgctcgggctgacgtgggcgctgatgcgtctatcggcccaccgtccgctgcgcctggtgagcggtgcggtggttaacgtgctgcgcggcatcccgatgctggttcagcttttctatatctactttgtactgcccgatatcggtatcgaaatgtcggcgctgactgccgccattatcggcctcggcatcgcctattcagtttacctggcggaggattttcgcgccggcattcaggctatcgacaaggggcagatcgaggcggcgcagacgcttggcatgtctaagcgcctgatgatgcgccgcgttatcctgccgcaggccatcaagattatctggccctcatacggcaacaccatggtgatgatgctcaaggacagttcgctcgcctccaccatcaccgtggcggaactttccctgcaagggaagctgctcgcctcggcgacatttcagaacaccaccgttttcacgctggtcgccctgctctatctggtaatgtgctggccgctgatgtggctgtgccgccgggtggaacacgccatgaacaagcgtcggagccactga

SEQ ID NO: 225680 - DNA, 741 bp, Klebsiella pneumoniae
atgattgaatatcgcaatgtccataaaagttacggtgcggtacacgtgctgaacggcatcaacctgaccatcaaccgccaggaggtggtttgcatcatcggcccttcaggctccggcaagtcgaccctgttgcgctgcatcaacgggcttgagaactaccagagcggcgagattattttcgacggcgtgcaggtggacggcagcgagcgcgcgctaagtcaggtgcgcggcgaggtggcgatggtcttccagcgctttaacctcttcccgcaccgcacggtgctggagaacgtcaccgaagggccgatttacgtcaaaggcgagcgccccggccccgcgcgggaatatggcatggagctgcttaaacaggtggggatggaccacaaggcgcattcatacccgcaggatctttccggcggccagcagcaacgcgtggcgatagcccgcgcgctcgcgatgcgcccgcgagccattttgttcgacgaacccacctcggcgcttgacccggagctggtgggcgacgtgctgaaagtgatgcgcgagctggcgaatcagggcaggacgatggtggtggtgacccacgaaatcgccttcgcccgcgaagtggccgaccgcgtggtgtttatcgacggcggtgtggtgaccgaagaaggcccggcgcgccaggtgcttaccaacccttcccacccgcgcacccgcgagtttttacaacgtgtactcaaccccatcagcgaggaataa

SEQ ID NO: 225681 - DNA, 828 bp, Klebsiella pneumoniae
atgcttaacgccagccatatctgcgccaccaactttacctattcgcactatcggctgaaccactgcctggacgatgtcgccgcgctcagcgtgcagtggtttgaactatggggcgttgcgccacacctgcatatcgacaccgtgcaggaagcggacctgcaggcgctcaggcgggagctggcggagcgcgagcttaagctcgcctgtttcacgccggagcagtgtgtctacccggttaatatcgccgctgaaaacccgctgcagcgggagtacagcattaactatttccgccgcagcctggagatatgcgaaagccttgagtcgcctctactgtttatgacgccaggctggggttatgaagaggataagcccgcggaggcacgcagccgcgcggtggacgccctggcgcaactggcgcacctcgcggaaagccgtggcgtgacgctggtgctggaagtgttgcagccgcgcgaaagcaacctcgccagcaccgtgcatgagctggcgtctctggttaacgaagtcagttcgcctgcgctcgacgcggcgctggatatcgtcggcatggcggtgggcggcgacagcgtgaccgattacctcaacgcctttgggccaaagctgcgccactgccattttatcgacggcaccccagcgggccatctggcgctcggcgacggcaacctgccgctgaaaagctacctcagcgcccttcgtgaaggcggctataacggtctgctgtcgcttgagatagccggtgggcgctactggcaggagccgctagagccgatgcgccagagcattacgttcctgcgcgacgcgctcgcatga

SEQ ID NO: 225682 - DNA, 891 bp, Klebsiella pneumoniae
atgatagcgcgaagcggcgcggccatgctgcctgcacgcaaaagcgagagcctgctgttgctggtaacgctctgtgccggggcaggctggatcttctctaaagaggcacttggcgcgctgcctccggtcttttttatcgccgtgcgctttctggcgggtggtctgctgctgggcctggcggtgcccgcagccgaccgacgcgaatggcggcgcagcctgtggcccgccttcgccatcggcagcctgatttgcggctcgatgatgtgctggattgtggcgctgcatcttaccaccgcgctgggcgttggcgcgtttctcacctgcctcgggccgctgttggtgccgttcgcaggatggctgctgttccgccaggcgctgtcgaagcgcatcgggctcgccatgctgctcgccctacccggcattgcgctgttggtgggcaacagctttctccagtggcggttcgaggcgggccagttctggttttttggtgcggcggcgattttcgccttttacttcagcctgaataaccgcttcgccatcgaccagccggtggtgctattcgccgccatgcagatgatcgcggtgggcctgctggcgttgccggtgagcctgtggctggagccgtggcctggcgagctcaacgcggctggttggacatggcttgcgctcagcattctcattcccacctgcctgcgattctttttgcaaaactatgcgcagcggctagcctatactcccaacggagggctcatcatgctgatggagccagtgtgggcggccattttctcggcactatggtatggcgaagtgatgacgctgtcgcaggtgggcggcgcactgcttatcctgctggcgctgacggtcgccagagagcgtcacgtcagcgcctga

SEQ ID NO: 225683 - DNA, 969 bp, Klebsiella pneumoniae
atgataacctggtttacagtgacatgtttctacttttctaggtcgcacgttctcatacggaatataaccatgaacaattcatttgagtgcagcaagagaaccgatatcaccgaacaaccgcagagccatgatctactcatcgcaaacggaaatgaaacggccaatttgctacgccacctggcaaataacgagatcgactccgactattttgcagttgtctcggaatgcgaaagctacgggcaagaaactgacgcagagctatcaatcacggcgtttgcccttcgtgccgctggttacgttgatgcgctggtagagtcactggagaaggccctgcagcgtattgctgagctggataaagactgcagagtatacgaaaataacgtaaaaaatcttcttgaacgtgccggttcagcagagtcctcgtgcgcagaggctgctcggattcttcaaagtggtgagcgcatggcattaactcgcgctatcactattctgctggcaaatggcatgaaggtggaggctgagccagtggcggtatgcactgtaaagggcggtcaaatgtgccctgatggtgtgcacgaacttttcgccgcccctcagccaacgctggtagtgccggaagaagctactccggacagtatcgagattcttgccagcgccaggcgtcgtgaccacgctgtattccagtgggatgaagaccagcgaaatgcggccgctgattcctggaacgctttccgggccgctatgctccaggcagtcaactctccggtaattggcattgaccaggcaacaggtgctgacagaacagtggaagttcgctacgtagcacctcctggttacgtgatgttaccgaaggaaccgacaaaagagatgattgatgccgggtggctgcactacatggccaccaagaacccttcatcaaaaggcacatacaaagccatgctcgcagccgccccacaggaggtgaaatga

SEQ ID NO: 225684 - DNA, 750 bp, Klebsiella pneumoniae
gtgctggtcattaaacgcgtattcaggctgaccctgcgcgctgcgcagggctttattgattccattttttctctgatgaacgttccgctacgctgcccggattacagctgtgtcagcaggcgggcaaagtcggttaatgtcagtttcaaaacgcccacccggggtgaaatcgcacacctggtaattgattccaccgggctgaaggtcttcggtgaaggcgagtggaaagtcaaaaagcatggccaggaacgccgccgtatctggcgtaagctgcatctcgccgttgacagtaaaacacatgaaatcatctgcgctgacctgtcgctgaacaatgtgacggactcagaggccttcccgggtcttatccggcagactcacagaaaaatcagggcagcatcggcagacggcgcttacgacacccggctctgtcacgatgaactgcgccgcaaaaaaatcagcgcgcttatcccgccccgaaaaggcgcgggttactggcccggtgaatatgcagaccgtaaccgtgctgttgcgaatcagcggctgaccgggagtaatgcgcggtggaaatggacaacagactacaaccgtcgctcgatagcggaaacggcgatgtaccgggtaaaacagctgttcggaggttcactgacgctgcgtgactacgatggtcaggttgcggaggctatggccctggtacgagcgctgaacaaaatgacgaaagcaggtatgcctgaaagcatgcgtattgcctga

SEQ ID NO: 225685 - DNA, 219 bp, Klebsiella pneumoniae; identical to SEQ ID NO: 98222

SEQ ID NO: 225686 - DNA, 162 bp, Klebsiella pneumoniae
atggccaacttcaacacgctgatcaaacgtaaacaatatatctggctgggactcattctggcgggcggcgcagcagccgtcggaggcgggctgtatctgtcagatctgaacatgagctctgatgaggaagcccggctcagggcgaacccgcgccggatatga

SEQ ID NO: 225687 - DNA, 222 bp, Klebsiella pneumoniae; identical to SEQ ID NO: 111899

SEQ ID NO: 225688 - DNA, 2808 bp, Klebsiella pneumoniae
gtggaagcggatgcattgtttcaaccaggtgagcggattattcaccatgagttcgggcagggggtggtgcttgatcctgtgcgagatggttacctgcgcgctttctttggggttggtgaacgccgcgtacctgttggcgctgtgcggcgccagctctcacgcaccgagcgcatcctgcgtgccgttgatggcggcgcagatcgggcgcgcaaagcgtggttgtcctatgaggcccatgcgttgcccgtcatggaaagtgcatcggcactgacttccgcaaagattgacctgctgccgcaccaggtggtgctgacgcaccggattgcgacagcatccccccgacgctatctgatcgctgatgaggtggggttgggcaaaaccattgaaacagctttgattttgcgtgagttggccagcagaggggagctgaatcgcgcactgatggtggtacctgcagggttagtgaataactggcaccgggagctgaacgaggtattcaacctcgattttgaagtgttcggttctgagggcgacataactgaccgtaaaaccaatgcatttgccaagcacgatcgattgattgcgagcatcgatacactcaaacgtccggcgcgtattaaacgcttgctggatgctcctcggtgggatctggtggtttttgatgaggctcatcatctgacggcttctcgaacgggtggtaaggtccggaagacggagaattacaagctcgccgaggcgctgaaagatcactctcgtgacctgatgttgttatcggccacgccgcatcagggcaatcactttcagttctggatgctggcgcagctcctgaaccccactttgtttggtagcccagaggaaatgctggagaaccgccaccgtctcaatactgtgatgtttcgccggaccaaggcggatgcttgccaaccagatggttcaccactgtttgctcgtcgctgggttcataccgagtcgttccttatgaatgaggatgagcggctgttttacgagaggttgcgcgagtatctggaggatggttttgacttggctcgtcgtcaaggaaaccaggggcgcgcgctgggctttttgatggccattttccagaagatagcagcatcaagcttcgcggctgtacgccgaacgctcaagcgtcgtctgcttatgttgaccctccacgaggcattactgcgcgataaagatcttgatattgaagggcgtgaacgtctgactgaagaagctcgagttttgattcatgaagaatatgctctgccttacgacagcattgggcgtagcgaagtggatcgagtgttggccgatctcaagttccgtttggtcaaaaagcttgatgcagaggcgcttgagatggcctccgatccttatggcagtgaatacttggcaaccaatgccgaagaagctgcgtcggctgttgtggagcttcacttgccagaagagcgtttgcgaattggcgatcttctcaatgtgtttccgcagcagcgtgaaactaaggcgcagaagctgcttgatggtctgggttatttatggcggcaaaatgccagcgagaagatcgttatcttcgccacctatcttgggactgtcgatctaattgctcgcgagattgaacaggcgtatccaggacagggagtggtggttttgcgtggtggcgatcatggagccaagctggcggcagaacggaaattccgcttgaagaatgggccgcgtgttctggtttgtactgcagctggccgtgaaggtttgaatctgcaatttgcgcgcatcctgttcaatttcgatctgccatggaacccgatggatgtggaacagcgtatcgggcgtattcatcgctatggtcaaaaccacacggcgcaggtctacaacctcgttctctccgataccatcgaagggcgaattttcttgatgcttgatgaaaagctgacggaaatagccaagacagtcggtaaggttgacgatcaaggtaacgtagctgaagacctgcgtgcacagattcttggtcagctatctgagcgtctaaattatgaccgactctaccaagaagctttgtcagaccctgaattgaaacgaacacaagtggaacttgaggctgcgctctcaaattcacgggaagctcgacaggttgtttttgacctattccaagaccttgatggtttcagtcttgatgactacaaaccattttccgatgtttcatctagtctggatcggctggtacgcttcctttcggcagcggtggcagatcgtcagcaacgcttggtcaagatcgacaacgagacctatgacttagtgactattgatgggtcgagtcaacaacgattcacattgaaccgagatttagcgacaagcagcgataacttggagttgatgggcttggatcaccctctggttcaggaagagcttggccgctggcgcagtgttccgcctgaggaaattggcattgccgtttctggcgacttagatacccctgttctgctctctctgtggatggtcgaagcttcttctggcaatggtgaacgtcgagtcgtggttcagccgattgccgttaagcaagatggtacacgagttccggtggttgagcggcaggttgagcaatatctgcaggcaccggtaacattatcgaagtttgcgctcgaacaacggcaggaaatattcacgcatgttattgagccgactctgcagcgggaactgaaacataagggggccgccaatggggatggtagttactctgcagagctaattggctatgtcgagatcatgaaccagggggcacaggtcagtccagcctttgcttccgaaatttga

SEQ ID NO: 225689 - DNA, 501 bp, Klebsiella pneumoniae; identical to SEQ ID NO: 208504

SEQ ID NO: 225690 - DNA, 3216 bp, Klebsiella pneumoniae; identical to SEQ ID NO: 208503

SEQ ID NO: 225691 - DNA, 1794 bp, Klebsiella pneumoniae
atgagcattttcaatttcaccgacgagcagtcattgggcgaagtccgcagtgttgaaacctcgcggatcaccgtgcgggtgacggatggccaacgcctgcaaaaggcgcgcgtcggtcgattggttgccatccagtcgatgggcgatgaatggctgatcggcatcatcgaacgagtttggcggcatccggtggagctgccgacgctacctgaagttgatccgccagcggatctggctggcgtgcctcaagaggaaaacggcgtgtcgatcagcttggtcggcacctatcgtgctcgggatgggcagcgcaaggacaccttcacacgtgccgttttcatcctgccggagatcaaccggcccgtgtttcccattgaagaaaagtcgctcgaagacttcatggggattttgagcgcttcatccaaggcggatgcggcagccccactcaaggtcggtacctataccttggatggcaaggccagtgcctacatcgatggcgacaagcttttccagcgccatgccgcgctgctgggcagcacgggctcgggaaaatctttcaccgtcgcctccatccttgagcagtccgcacaactgcctcaagcgaatatcgtcgtgctcgatttgcatggcgagtattcgagcatgaaattcgcctcgcattaccgcatcgcaggcattggcgatatcaagaccaagaaagacggcgcgatcttcctgcctttctggctgctgacatatgacgagatgcaatccgtttttgtggatcgctccggtgacaatgcgcccaatcaggcgcttgccctgatggattcggtcgttgaaatgaaacgcgctgccatcaatgcgctaggcaagccggagttgctggaagggtttacggtcgacacaccggttccctacaagttgaatgacttggtggaatccctcgaccgaaaaaacgacgaggtcattcccacaggcgaggaatacgtcagcggtgcgaagaagggacagcccaaaaccgaaaaaggcccgttgaacggcaagctctctcgcttcctcattcgcttgaaaaccaaaatgaacgaccgccgctatgcgttcatgtatcaggcaccggaggactacgagacctacgaggcactacacgatctcgccaagaaactgctcggtacaggcaacgtcaacgatggcgtcaatccgggcatcaaaatcatcgacttttccgaggtgccctcggacatcttgccagtggttgtgggcttggtcgggcggctgatctaccaaatccagttctggagcagcccgggcgaagacggcgatgcgcgccacccgattgtcatcgtttgcgatgaggcgcatctctacctgccaagcagcgccgcctccactggcccgctggaaaagcgcgccttggaaaactacgagcgcatcgccaaagagggccgcaagtacggagttgggctgatggtggtcagtcagcgcccctcggatgtcagcacgaccattctcagccagtgcagcaacatcatcagcctgcgcctggccaacaagaccgaccaggcggtggtcaagcagctcttgccagaaagcctggaggggctgatggaggtgctgccgacgctggacgtaggcgaggctgtagtggttggcgacgccaccctgctgccgacccgcatcaagatggccaagccaaaacatgaaccgcgcagtgcaacgatccccttctggacccgctgggccacgcccaaggccgaagtcgatttggttgccgccgtagaaaacatgcgccgccaatcccgcgcacaagaagattaa

SEQ ID NO: 225692 - DNA, 1077 bp, Klebsiella pneumoniae; identical to SEQ ID NO: 208501

SEQ ID NO: 225693 - DNA, 1020 bp, Klebsiella pneumoniae; identical to SEQ ID NO: 208500

SEQ ID NO: 225694 - DNA, 2766 bp, Klebsiella pneumoniae; identical to SEQ ID NO: 208499

SEQ ID NO: 225695 - DNA, 249 bp, Klebsiella pneumoniae; identical to SEQ ID NO: 208498

SEQ ID NO: 225696 - DNA, 708 bp, Klebsiella pneumoniae
atgagcattgattacaacacaataatgaactccagcagtgaacaagtggaagattatatcaacaaaaatgattttaccgataaacagaaactagagatttacagtttttataacagaaaccgaaaagataaaataaccgtcaatgtaaaaaaggaacgaagttctgacatacagccgggaatagcctatgttcatgcttttgtcgataatctggaaaagctcggtaaaaatatgtctggtgttgaatacacaataatgatccgtttgtgtaaactcatgcagcatgggaatctgatagccagtatatctcaatcggcactcgcagaagagcttggtatgagcaaatctaatgtgtgcaaatgctggaaaaaacttatcaataaaggcattcttattcaagacggtaaacacactttaataaacgcaaatctattcctgaaaggccaatacagaacattaaatccaacaaggaaagaatatgttcagaagtcgctgagaacaaccagtgaaggcatagaggacgtattcgtcaccgtttataaagatacgatatttacaaaaaacgaagataaaaaaatcaataaagaagatgacaaacctttgcttttcacgcccaatgaggatattgattgggaccctgtttcagaagacaacatatttgatgattattctcaagaagatgagtttgatgaagaaaaaaacatataa

SEQ ID NO: 225697 - DNA, 480 bp, Klebsiella pneumoniae
atgagaaaagtaaaaacagacaacagtgacttaatccaatatttagagacaatcaaagaactaaaaaaccatattacgattgaagaatacagaaataaatatcgtagactacgctctgatgatgttcctttgattaaagctcagaaatttaagtctgcacatactgaacttcgcagacttgaaaagaagagagaatctcttattgaatactttattgacgagttaaatcctattagcagttcaaaagctaatacatcagcaaaatcatcaggtaatcttgatctgtttaacgaacgtgtattataccgcaaggccatttcagaaaaaagtgatgaagaaattgttgccttggtcataaaacagcgtacagaagctgctgttgagttccagcgttccatagaacaaagtcttgagcaactctctcacatctcgtcagagttcgagccatcaagccgaaagcgcagaaaaatgtctttttaa

SEQ ID NO: 225698 - DNA, 306 bp, Klebsiella pneumoniae
atgcccattcttacatgccagcccaaaccaagttcttgcttgtttcagatttatacttcccccctgaccaagttcattcataacgccaagatcgaactgtgcctgcgcatcgttttgagcagcagccttttcataccaagctctcgcctgatgaaagtcctgcccaaccccttcaccattttcgtatattacgccaaggttatactgggcatcgacatgatcttgctctgccgctttttcgaaccattccttcgcctttcgatagctctgagttacgccctgaccgtagtaatagatctgacctaa

SEQ ID NO: 225699 - DNA, 519 bp, Klebsiella pneumoniae
ttgagcattcagctgattttgagacgcggctttttcaaaccattctctggcttgctgaaagttttgattaactccctcacctttgtaatagagcataccaagattaaactgagcattggcgaaattttgttctgctgctttctcataccagtcttttgcctgctgaaagtcctgctctacaccattagcattggcatacagaattccaagggcgaactgcgcatcagggctattttgagctgcagccttttcataccacatctttgcctgttggtagtcttggcctaccccgagaccatcgtcatacatctctccaagcaaaaattgcgcatcaacatcattttgaaccgatgctttttcataccaagatttggcctgttgataatcctgatttactccgagaccatttgcatacatcaaaccgagtttaacctccgcacgtggatcattttgggtagcggctttttcataccaaatctttgcctgctgataatcaacatccagtatttctccatataa

SEQ ID NO: 225700 - DNA, 291 bp, Klebsiella pneumoniae
atgaaaatagaacttaataggacagagcagtttatcagtgaagccgaatgtttgtataaccattatatggataaacggctacgaaaccagcctgtgcatttttaccacctactgaagaataaggaagatatgaacgaactgattgaaaatattatcgagaaagcaaagaatattttttatgcgagtgaagatgaacaaaaagcggaacggatctccgggagcgttaactatgtgaaagtaaaacagcatcttcgacagctttggattgtctataagtgtgtataccgctga

SEQ ID NO: 225701 - DNA, 210 bp, Klebsiella pneumoniae
atgaaaaacaacacaacgaagagatttatccgcgtcccggaagtattaagacgagtgggctttggtcgaaccaagctgtatgaacttatccggcagggccgctttcctgagcaggtgaagatagggccgaggacggtcgcttttgttgaaagcgaaatcgatgaatggattgaagctattattcggaactcacgtcagaacgcagcataa

SEQ ID NO: 225702 - DNA, 861 bp, Klebsiella pneumoniae
atgaaagcaagtgaagtgatggtgtcggtaaaacgatggttcagcctgcgcaattatgatgttttacaggagatcacggctggcgacctgagcgatgaaatcaaccggcgagcttcactgctacggtatgatttctattacgggaatgatacccgtcgcctgcaatgtctggagtatgaagcccggatactggcgggcaatccccttctggtcagttccacgacaaaagcaccaacggcccggaaaatcaatcctctcactgacgccagccttcatgtccggcatatcacggtcgctgatattggtcgctatgaagcccggctgagtgaactggatttactccggcgcggtgatggctcgtcaggacccgtatcgaaagaggatggcagacgcaggctgaccgatattgatgagctgaacgccgatcatccgctgtatctgtggctgaatatcgccttgctgactgatgaggaagtggtggagcatgtgaaaagaatgcttccccggtggcgaaaagagtatggcactggcgaaccggcgattaacacgtcccggtttgggctcagtacggtgaagaagttgatccactacaggattatcccgatgctggatctgatgctgtgggaaaaacgcaatggtgcccggatctcatatgaacagatgtcgaggctgctctatcccgatgactcgaatgtgatcaggggaggcgctcagattaaggataccgacaggccgcttgctgaaagggcactgacgcgtgaatttgaccgtctgtttaacctctggctgagcaaaaatgactaccttatggacacgaaaatcgctgatgtgatgaagatggatgaggaggagacggcctga

SEQ ID NO: 225703 - DNA, 1242 bp, Klebsiella pneumoniae
atgccaaagaaagccagagaactgtccgccttagccgtttccagacttaaagccgaaggtcgctatgctgtgggtggtgttgacggattgtatctgcggatcgccgggcgctcacgcgcatgggtcctttgcgttgcgatgggcacccgaataaacagggcaggtaagaccgttccccggcgactgaatatgggtcttggtccgtatcaggaagtttcactggcagaagcgcgtgataaggcgcgtgaactgcgcaggcagatccgtaatggcattgatccgcacaaagaaaaacatgcccaaaaagcacatcaggaaaaaacagcccgtaaacagaagacgttccacgaatgtgcggaagccgtgctggaaattaaggggcgcgaactgaagagcaaaaagcatgtcgcacagtggcgctcttcactggagacctatgcttatccggttattggtcagaaaagagtgggtgagattaccaagaccgatctgctggcgatactggaacccatctggttaaccaaaaacgaaaccgccagccgcgtgcggggtcgtattgaaactgtgctggattacgctaaagcgaaagaataccttgaaggggataatcccgctgcgtggaaggggatgctgaagccgctgttgccaatgccaagtaaggtgcagaacaaaaaacatcatgctggattgccgtatggtgaacttggtgcgtttatggctgaacttcgtacccggacaggcgtatcggccagagcactggaattttccatactgacagtggctcgttccggtgaaattcggggagcagaatggagtgaaatcgatctggcggcaaaaacgtggattattccggcagaaaggatgaaggccagtaaagaacatcgtgttccgttgtctgatgcggcgatggcattgctcagaatgctgccccggtttaaggacaataatcttgttttccctgctccgcgcggcgggcaactgtcggatatgtcattaacagcggtattaaagcgcatgggccgcagtgatttaacccagcatggttttcgctccacgttcagggaatgggccggggagaccacatcctaccaaagggaagtgattgaacatgcgctggcccatcagttagcggataaagccgaagcagcctaccagcgcggcaccctgtggcccaaacgcgttgcgctgatggatgactggaccgattattgcggatatgaacctgtcgataaggcagcataa

SEQ ID NO: 225704 - DNA, 864 bp, Klebsiella pneumoniae
atgactagcaaaacactgcgacttatatttcctcaatggcaaggcggtaacaatcctccctactatcttggctcgcagctcctctcgtttctctctcctgaagcaaaagggcccgttgagatcgttcctgttgagttaccaacaacagagccattgccaaggattaatgacatcacggctaaggcatccctcatcaggcaactcaataatgctgccgcactgattgaaaaacatgatcccaatagcattgtcattttaggcggagactgcctggtttcgctggcgcctttcgcccacctgctcgataagttcggagacaaactcggtgtgctctggattgactcgcatcctgacgtgcagacggctgaacaatatccaaacgcgcatgcccatgtgcttggtgcgctaatgggtacgggtgataacgatttagttgcccatgtaaaaaccaaacttaatccgtcaaaaataatgattgccggtatccacgcgccacttccttatgaagctgaatacctcactcgccataacattacgacgctagcacctgaacaggttaaaagcggtgcagatgaagtcctggagtggatagcgaaagaaaagattgcgtatctggcgatccatatcgatctggacgtactcgacccatctctgttccgctccattctttttgcaaaaccggggcgcggaaaacacgattttggcgacgttgctgaaggcaaactgacgattgaggatgtactcaatctgatagcggcagcgacgacaaaagcagtccccgttggcctgacaatcgctgaacatttgccctgggacatgctgaatctcaagaacatgctcagtgaattaccccttctaaagtaa

SEQ ID NO: 225705 - DNA, 447 bp, Klebsiella pneumoniae
atgtatacgtatttcaaaagtaaggatgagcttgttaaggctattgtactggaagaacagaactccgcgctgactgcccataatgcgacctatgcaggctcttattttgatcgcctttgtgcacaagtcacgtcctgtattagcgagatcggttaccctatcacgcatcaactttgggttgaaattatggctgagtctgcgcgtaatccagaactgcgaaaaacgtatatctccagtgatgacatcatgcggaaaagcttcgcgcggctcatccaggagggtatcgctgccggagagtttcgccgtgatattaaccttgaagaaatcacgatcattatttttgcccttattgacggtttaatcgctcgtcaggcaataaacacgaccttctcattcaaggatgatctgccaatgttttttgacgttatggcaaaattgcttaaataa

SEQ ID NO: 225706 - DNA, 906 bp, Klebsiella pneumoniae
atgcaggatctcaatgacttcgcctggtttgtccaggtggtagaccatggcggtttcgccgcggcggggcgagcgcttgaccagccgaaatccaaactcagccgccgcattgcgcaactcgaggagcggttgggcgtgcgtttgattcagcgaaccacccgtcagttcgcggtcaccgaggtcgggcagaccttttatcagcattgcaaagcgatgctgattgaggccgaggcggcgcagcaggcggtcgagacgctgcgcgccgagccgcgcggtagcgtcaggatcacttgtccggtcaccttgctgcatgtccatatcggaccgatgctggcgcgatttatggcgcgctaccccggggtcactttgcatcttgaggcgaccaaccgccgggtggatgtggtcggggagggcattgatgtggcgatccgcgtccggccccggcctatcgaggacagcgatttggtaatgcgcgtgctggcggaccgcgggcaccggctggtggccagtccggagctgatttcccggctcggacgtccgcaggcgccgtctgagctgagcgcctggcctgggctcagtctgggggcgaacaagcatcagcataaatggcagcttaccgggcctgagggggcaagggcggaggtgtatttcacgccgcgaatggtgaccaccgatatgctggcgctgcgcgaggcggcgatggccggcgtaggggtggtgcagcttcctttgttaatggtgcgcgatcagctggcgtcaggggagttagaggtggtactggatgagtggcagccgcggcgggaagtgatccatgcggtatttgcctcacggcgtgggctgctgccctccgtcagggcgctggtggattacctcagcgaagagtatcagcggatggaggaggattga

SEQ ID NO: 225707 - DNA, 603 bp, Klebsiella pneumoniae
atgtcaatacgatctctacgcgggaaccgggagatctcccctctgaccatctgccagtgtcggggatggcccgcaccgggaagacgaggagtcatagccggtgatgtacggagaggagaagtcggactcgctcatagtagcggcgaagcaggcgaacaacccgaaaggagcggagtcagtggagcgaaggagcggggccaaggggaacgcggaacagccacacatgcgccggacacagagccgggaaagcatgtcacagaggctgtcacgcgtgcgggaagctgcgaagcagcggaagaaagaacggtttacagcattgttccacctgctgacagtcgaagcactggaagccgcattcctctccctgagcaggaaagcggccgccggagtggatggcatcaggtggatggactacgccggaaacatgaagaacaacataacagatctgcaccggaggctacatcagggcagctacagggcgcagcccggcaggcgtcactacatcccaaaagcggatggaaaacaacgcccgctcggcatcgcctcgctggaggacaagatcgtccagtatgcgctggtgaaaatcctgaacgcagtctatga

SEQ ID NO: 225708 - DNA, 354 bp, Klebsiella pneumoniae
atgctgaggtcggtggaaaagcgcttcggcgacaggttgcccgacacagcggtgcagtggctgacggataacggttcagcgtataccgcgtatgaaacgcggaggttcgcgagagagctgaatctggagccctgcacaacagcggtgagcagcccgcagagtaatggcatggccgaacggttcgtgaaaacgatgaaagaagactatatcgcgttcatgccaaaaccggatgtgagaacagcactgcgaaaccttgcagtagcgttcacgcattacaatgaaaaccacccgcacagcgcgctgggatatcactccccgagggaataccggcggcagcggacatcgttaacttaa

SEQ ID NO: 225709 - DNA, 753 bp, Klebsiella pneumoniae
atgaatgtggacgaggtcgcttttaaaaaaggacatcgttatataacggtaatctccgatcgtgacgggcaggcgctggctttaacggatgatcgaggtaaggaaagtcttgccggttacctcataaccctgattgacggacagctgcaggccattaaaacgctctcaatggacatgaatgcgggctatataagagccgcgcgcatccacttaccgtgtgcagttgataaaatcgcctttgaccgcttccacgtagcgaaacagctgggtgaggtgatggataaaacccgccagaatgaacatccccgtcttccggttgaaagccgccgtcaagccaaaggtacccgcttcctgtggcagtacagcggcaaatggatgactgagtcccggcaggaaaagctgatgtggctgcgggaacagatgcagcagacaagccagtgctggacactgaaagagctggccaaaaatatctgggatcgcccctggagcacagaacgcaggaatgactggttgcagtggatatcgctggcgtctgaatgtgatgtgccgatgatgaaaaacgcagcgaaaaccatcaaaaaacggttatatggaatactgaatgcgatgcgtcatcgtgtctcgaatggtaatgcagaggcgctgaacagcaagatcagactgctgagaataaaagccagaggatacaggaaccgggagcgctttaagctgggagtgatgttccactatggaaaactgaatatggcgttctga

SEQ ID NO: 225710 - DNA, 846 bp, Klebsiella pneumoniae; identical to SEQ ID NO: 195734

SEQ ID NO: 225711 - DNA, 660 bp, Klebsiella pneumoniae
atgacggatttcatgacgagctttatccactggcttccgatgctgatgcagggagcactcaccaccgcagcgctctgcctgacagcgatggtcgccggctttctggtgggtattggcgtatggcggatgtcgaccagtccgttaccgatttaccgcatgacggcccatggatgggtcagtctgtttcgcgggaccccggttctggctcaactgctgctctgcttttatttaccgtcacaattagggatcgacattcccggctttgccgccgccacgctggcattaacgctgaacacggcggcctatcaatcgcaaattctgaaaagtggtttcgccagcatcaccccaggtcaactggaagccgccgcgatttgcgggctgagcccacggcagattttatggcgcatccaggtaccgcaggttgtccgtactacgctgccgtcactgatttccgagctgattgatgtgatcaaagcctctgcggtggtgtcggtcatcgcgctgacggatctgatgcgcgtgggccagcaactggcctcatctacgtaccagccgctgcaggtctatctggccgtggctctggtctatctactgctgaccagcctgctggcgctgttgggccgtcaggcagaacgccactggcagagggaacaacgatga

SEQ ID NO: 225712 - DNA, 642 bp, Klebsiella pneumoniae; identical to SEQ ID NO: 195736

SEQ ID NO: 225713 - DNA, 816 bp, Klebsiella pneumoniae; identical to SEQ ID NO: 195737

SEQ ID NO: 225714 - DNA, 1254 bp, Klebsiella pneumoniae
atgatggaaacaggcttacgggttgcccgacagctggatgaggattggctgaaccaactgttggcgcagcttgcagaatatggaaagttagcgaatggcggcgtcgatcgccaggctttgagcgcggcggaactcgatgcccggtcctggcttattgatgtcgcccgagagctcgggtgtgaagtctaccgcgatgcggcggcgaatttattcttccgtcgtccaggacgcgttgctgtatcgcccgtgaccaccggtagccacatcgatacgcaaccgtccggtggcaactacgatggctgttacggcgtgatggccggacttgcgtgcctgaaagcgctcaatgaggcacgggttgtcaccgaacgcccggtcgaagtggttatctggaccaatgaagagggcagccgctttgcgccgggggcgatgggctccagcaccttcgtcgaccctgcgagattgtctgaccatcttggcgcgatgggcgtagatggtgtctcgtttcgcgatgcgctggcagaccaccaggcccgctttgcagccatcccgttacgcccggatcgcgagatggcctgcttcgtggaattgcacatcgagcaaggtccggtactggaaagtcgccgcgtgccgctggccgtcgtcagaggtatccagggcgtgcgctggtaccagatcacctgccatgggatatcggcacatgcggggaccacgccgatggcgctgcgccaggatgcgatgaccctggcacgcgaacagcttgcgatcattgagcaggcgatgggtgacacggcagatgacgagttacggttgacgtttggccgttggcaggtcatgccaaatgccatcaacaccatcccgtcgagcgtgcgttttacccttgatttccgccacccatcggccgaaacgctggcccggttcgacgcggtgattgcctctctggcaagcgaacaagtcaccatcgagctgctactgaataaagcgccggtcacctttgacccgcgcatcaatcatgtcttgaaagcggccggaaatgcgctggatattgcccatatggagctgttatctggcgcgtttcacgacgccatgtatctggccgaacactgtccgaccagcatgctttttgtccccagccatcaaggcattagccacaatccggctgaatataccgatcctcgttcactggcggcaggtgcccgtacgctggcctgtgcactgactgagctatcccaatcacttgaaggagttaaatcatga

SEQ ID NO: 225715 - DNA, 702 bp, Klebsiella pneumoniae
atgaccgcaactgcacactacccaatctgctgcgataaagacaatggcgatgccctgggcctcaacccaacggcaacctcaccgatttcagccgatggcgcaccgacgttaaacgaactgtataccatcccgccgcgctgcggacgcgccgttttgctgaaaaaagggcaggtgattaagatcatcaataccccaggcagccaggtctgcgacacgtggtttttcaataccggcgatctcagcgagtttgcgtccatggaacatacccgtgcctttatcgacaaaattattccgcagccaggtgatgtgctggtgaccaaccagcgccgtgctatcgccactctgctcaccgatacctcacctggtgtgcatgacacgttgatcgctgcctgcgacctttaccgctataccaacatggggattacggagtatcacgacagctgcgctgacaatatgcgcatggcgctgaaggcgattggcctgcgcgcgcgtgaagtgccgcagccgcttaatttgtggatgaacacgccagtaaatcctgattattcaatttcctggttgccaactgtcagcaaagcaggtgattatgtagagattcgtgccgagctggattgcgtggtggtgatgtccgcttgcccgcaggacattgtgcccattaacggctgctcaccgaaagaaattcagttcaccgtgatggcatga

SEQ ID NO: 225716 - DNA, 600 bp, Klebsiella pneumoniae
atgaagcagacagatgaaaaaaacgctgacatcaaatctaccggaaccccgctgggaatgaggttgcgccacgcacgtctggtgcaggagctgaccctcaagcagctcgcgcaaaaggtggaatgctcggaaagtctgttatccaaactggaaaatgacgctgcctcgccgtcgttggcgatgttgcaccgcctggcaaaagcgctggagaccagtatcgccgacctgatggccgatgactggacggccgatcggcctgtactgaagcctgaacagcgaaaccgtaagcggttcctgcagcgcagtaaaaagggggggatcgaactggagaacctgacctggcaccacaaaggcgggttgctgcagggtaatattcatattatcgaaccgggcgtcgccagcgatggcctgattgagcaccacggcgaagagatgggctatgtgctggaaggcgcgctggaattgcgtctgggagaccatatctggctccttgagcagggggattcgttctattttcccagccagatcccgcatggttaccgcaatatcggccccgttgtcgccaaagttttgtgggtgaatactccagttaccttctga

SEQ ID NO: 225717 - DNA, 264 bp, Klebsiella pneumoniae
atgaagaagcgtttttccgacgaacagatcatcagtatcctccgcgaagctgaagccggggtttctgcccgtgagctctgccgcaagcacgccaattccgatgccaccttttatacatggcgtaagaagtatggcggtatggaggtgcccgaggttaagcgcctgaagtcgcttgaggaagagaacgcaagactcaagaagctgcttgccgaagccatgctggacaaggaggcacttcaggtggctctggggcgaaagtactga

SEQ ID NO: 225718 - DNA, 471 bp, Klebsiella pneumoniae
atgctcagaggtctcggcggcgcggtcgccgcgcttgcgcagcagccagtaggtcgcacccagagccagcgtggcgcctgccagcgcggctatctttgcggggctcgcgtcggagtcgaggatcacgaacttgcgggagagtgcgatcaccgcgatcaggaccaccgtcttgacctggatgatgctgtcccgacgcagcgccacgcgcacgatggaatgcttgaactccatcgcgatcaagagcgtcatgatcatgccgaacacgttctggaataccttgtggtccaggggattgaaggcatcgagaaccagcagcgtgaagacgatggagatgagctggaacagcgacaccatgatgatgacggcgatcaccgccgacagcacgagcgcgacgacctgctcgaagcgctcgtaaaaactcatgatggccaattggtcacgcaagacctgaaatgggttaaggcgttttga

SEQ ID NO: 225719 - DNA, 357 bp, Klebsiella pneumoniae; identical to SEQ ID NO: 207919

SEQ ID NO: 225720 - DNA, 621 bp, Klebsiella pneumoniae; identical to SEQ ID NO: 207920

SEQ ID NO: 225721 - DNA, 1167 bp, Klebsiella pneumoniae
atggagccacttatgccaatcaaaatcgcagtcctgaaggaaacgaaacccggtgagaagcgcgtctccatggtgccttctgtcgtgcagcggctggaacgcctcggcgcctcggccgtgttcgaaagaggtgcggggaccgcagcgactttcgatgacggcgcgtatagtcacgcgtcctttgcggaaacgcccgaagcgctggttgcggacgcggacatcgtccttgccgtgcaaccgccgccagcggtggtagccggaacgatgaaagcgggagccgtgctgatctcgttcgtctacggccaggcgaaccgcgaactggtggcgaccctgcgcgacaaaaagataacggcatttgccatggagctcgtgcccaggatcagccgtgcacagtccatggacgcgctgtccagccaggcggccctcgccggctactacgcgccgcttctgggtgcggtccacatgccgcgcatcctgccgatgatgacgacggcggtcggctcgctgcgtgccgccaaggtgctggtgatggggctaggcgtcgccggtctctccgcgttggcgacggcgcatcgacttggcgcgatctgtgagggctatgatgtccgcccggaaacggccgagcaggcgcgctcgcttggcgcgaaattcgtcgacacgggcgtcgatgcccggggggaaggtggatacgcgcgagaactgactgctgaggaacaggcgaaggtgcggcaggtcctgtcgcagcatatcgccgaggccgacatgatcatcaccacggcggcggtgccgggcaagcgtgcgccggtactgatcgaggccgatcagatcgccgcgatgaaaccgggcgccgtgatcgtcgatctcggcgccgagggtggcggcaattgtgcaggcacgaagcctggagaaacggtaacggtcgggccggcaatcattctggggccgctcgacgtcccatccgcgctcgctcagcacgcgagcgagctctacgccaagaacattctcaacctgctgacgctcatcgtgaaggatggcgcactcgccctcgacttcgaggacgaggttatcgctggtaccgtgctcacgcacgccggcgaaatccgcaatgaagcggcgcgcagcgctgtcgagggtaaggtttcaagcgatacggagaccgcgaaatga

SEQ ID NO: 225722 - DNA, 309 bp, Klebsiella pneumoniae; identical to SEQ ID NO: 207922

SEQ ID NO: 225723 - DNA, 1416 bp, Klebsiella pneumoniae; identical to SEQ ID NO: 207923

SEQ ID NO: 225724 - DNA, 1392 bp, Klebsiella pneumoniae
atggcctatgcaaccatcaatccctacactggggagaccgtcgcgacatttcccgatgccacggacgcggaggcgaaagctgctctggacaaggcggatgccgcattccacacatggcgcgaaacctcgtttgccgaacgtggccgcattctgcagaacgctgccgatctcctgcgtcgcgacagcgatgcctatgcgaagctgctgacgctggaaatgggcaagctcttcgccgaggccaaggcggaagtcgagctctctgcaaagatcttcgagtactatgtcaggcacgccgaggcgctattgaagcccgaaaagcttccggttctcgacccggccgagggcgaagcggttctggtgcatgaaccgctcggcgtgttggtcgccatcgagccctggaattttccctactatcagatcgcccgcatcctggcgccacagctttcggccggaaacacgctcatccttaagcatgcctccaacgtgccacagagtgcggccgccttcgaaaagctgatgagcgaggccggcctgccggaggggtgcttcaagaacctctatgcgacgcgcgaccagatcaacatgatcatcaacgatcctcgcgtgcacggtgtcgccctgaccgggtccgaggctgcgggctcgatcatcgcggcggaagccggcaaggcgttgaaaaaatcgacgatggaacttggcggcgctgacgccttcgtcgtactcaaggacgccgatctgaagaagaccatcgactgggccgtcttcggccgtcattggaacggtggacaggtctgcgtgtcatcgaagcgcatgatcgtggttgacgaggtctatgatgcgttcctcgatggctaccggaaaggtgtggccaggctgatcgccggcgatccctttgatccgaagacgacgctggcgccgctgtcctcgcaaaaggctgcagacgatatcaaggagcagatccgaaaggcggtgagctatggcgccaaggccgaggaagttggcctgcctgttcccaaccagggcgccttcgtgcagccgaccatcctgaccgacgtcggcgaagccaacccggcccgctactgggagttcttcggtcccgtctcaatgctattccgcgccagggatgaggacgacgccgtgcgcattgccaacgactcgcctttcggtctcggcggttcggtttttacggccgacgaacagcacggctttaaggtcgcgaagcgcatttcgacagggatggtctttgtcaaccacccgaccaaggtggaggccgacttgccctttggcggtatccgccgttccggctacgggcgcgaactgcttggcctcggcctcaaggagttcgtcaaccacaagctgatcgacgtggtcgatatcgaggcccatttttag

SEQ ID NO: 225725 - DNA, 780 bp, Klebsiella pneumoniae; identical to SEQ ID NO: 207925

SEQ ID NO: 225726 - DNA, 327 bp, Klebsiella pneumoniae; identical to SEQ ID NO: 207926

SEQ ID NO: 225727 - DNA, 858 bp, Klebsiella pneumoniae; identical to SEQ ID NO: 152541

SEQ ID NO: 225728 - DNA, 276 bp, Klebsiella pneumoniae
atggatggctataaaccggttgagcagagtgcactccattcgtttggcaacctttgccttatcagccacagcaagaactcgcgcttgagtaacttccagccgcaacagaagcaggagcactttgaagcaagccttgccaataaccagactgatagtcttaaattgcttgctatgattcggctgatgaaagataaaggtcgttggctggaagatgagatagctgtgcatcaacaagatatgttgcaggtcttactatccaatcaaattcagcaataa

SEQ ID NO: 225729 - DNA, 339 bp, Klebsiella pneumoniae
atgcaggcaggacgattacggcacagggtcaccattcagaacttcacaacctccagaacgccttccggccagccggttgaaaagtgggaagatgggaaaaccatctgggccgaggttaaggggataagcggtcgtgagctgttagccgctggcgtagagcatgctgatgcgacaatccgagtctgggtgcgctttcgcagggatatttcagccacatcccgattgaaggtacggacaggcccgtttaaaggcgcagttcttaacgttaccgggcctccggttcctgatatcaaaggtacccggctggaaattctctgcaaacaggggaccgaaaaatga

SEQ ID NO: 225730 - DNA, 732 bp, Klebsiella pneumoniae
atgcaggttgttacgtatcgtcgggtatctactgagcgtcaggggcgctctggtttggggcttgaggctcagactgactacatcgctcacgctgtccgccaacatggttgggagatcattgatgagttcaccgatgagggggtcagtggttcgctggaaccaatgcaacgtaatggactgcgccaggccatagagttgtgtaagcgcaccggggcgtgtttgctggtggctaaactggatcgcctgagtcggtcggtgttggatatcgccacactggtagagcagttgccctgcatcaaagttgccactatgcctatggcagataagtttcaactccatttgtatgcggcgttagctgaacaggagcgggactttatcaaacagcgtaccagtgatgcgctggcgtcgttaaaggcgagggctgcggcgggtgatgaactgtcacaacaaaaggtgcaaacgtggagtgacaatattgcggctgcacacgccagtggggtaaaccgtcagcgtagtatcaaggtcagagccgttcgggccgatgctttcgcggcgaccgtcgaggataatattctcgcagcccggacacgcggccataccactctccaggctatcgctaattatttaaatgagcgcgggatcactacccggcgcggtaaacgttggacacctgcggcagtgagccgggtcgagagccggtttcccactccaccagacagatcggcaatgtga

SEQ ID NO: 225731 - DNA, 1344 bp, Klebsiella pneumoniae
atgccaaacccgaacaacgaaaaaataattgataacgccgccaatgattccgatgggatctccatcgatgaaaaaaacggacatgagcgactggcacaccagtttgcggaatacctgattaaccagggcttcatctatctgtcccggaaaaatggcgcagacctgtacagcacgttgacaggtaaattccatccgttccacgcggagactaacctctatcagcagtggctgcgaaaacagtcagagcacagacgtagtggtcacaatcccctgttacacgatattctccgccagcggattaaatacgcatcggcgcgtgagtttatccccggaggcgctcgccctctggtatacgaggcggacggtgtacccgtactgaatacctggaagccatacgaaccacagacaaccgccgcagccggtgctgatttgtcactctgggttgaatatctggagcgcctgttcccggacgctgacgagcggcacaccgttgtgcaatggctggcgcatatgttccagcacccggaggttaaaccctcatggcacctcatgctgacgagtgcgaccggcacagggaagggattcctgttcgatcaggttctctcacctctgctatgcgggcaggcatcgttactcagttcgtatgacaaactgaccggtcagttcagcactgtgatcgccaataatttgctggtgtttctggacgattgccgcagtagctcaaaatcgctgcatacccggttgaaatccctgctgacagagcgccgccagcagatcgaggagaagcaggagcaggcccggatggtctcaacctatacccggtttatcctcgccagcaacgagcgacgcccgatccgcttttcaccgaacgagcgcgagcgccgttggttcgtcgtccggttcatggagcatcgccataacccagtggagaccggcgaatttatcggtcgattagcacaatggctaacgcaggatggcagcctcgatgccatttactggtggttgatggcctgtgacctgactggattcaacccgcatcattgctgtgcgactgagacactggcggagatgcaggaacaatcgcgatccatgctggatatcgagttatccgactggctggagtcaaaccgggtattcaaaatggaaacggtacgcctgctgtttgatgcaccgccagacctgattaagcacaggctggaggaacttggatatcgacaagcgccaatcaatactaatggtgctggtgttgaccgttcccgctactggttcccggcagactggaagcccaaacaggcggcgcagtggctggaggatgcagcagacggtacgacagagcaattctga

SEQ ID NO: 225732 - DNA, 204 bp, Klebsiella pneumoniae
atgcagcgtgagctggctgagctgagaaagttgatcgagaggcagcaactgttgcttgaggataagcaggaagctgacaggctgcgggaacaggtgaccgggttgcaaaatgagcgtgatgcaaccgctcaggagctggaaaaagtgaaatcagagcttgaggcggagaggaagaaggggttttggtctaaattttttggttaa

SEQ ID NO: 225733 - DNA, 405 bp, Klebsiella pneumoniae
atgaaagtggtgattctattaggcgcattcgttttatctatgctcagtattaatgctttatccgctgaaaagcctaaagacccttggtacgaggtaagcagtaatgctgccggggacgcgaaaattttagcaaaattagatactgttaagaaggatgaaacaggtgtttctgtattgattcagatccttgtcaaaaatctgcctggtggaaatttttctgtaaaatactatcagatgtccatatcaaaaaaagcgtgtgatgatggttatggtgaggtcttgttttcaccagtatctaaaaagaaacaagatgagttttcctctgagtatgttgaaggcggtcagtcattggggtcatttgcggcagaatgcttgtgttacctgtacaaaaaaaaggcatcgtaa

SEQ ID NO: 225734 - DNA, 492 bp, Klebsiella pneumoniae
gtggctattggtgatgatgctatccgtgatgctttcttctttttcgctgagttggcggatgcgatggggaatcagggtttaccacaagatgtctgggacacaccgtgtttcacttacctcttaactaaaaaacagttcaatcagatgaaggtcgtttgccaacggaatggatggcctatgcctgtgtctcctgctgtacctatcacttgggctatgtttagccatgttcttagtgcgagaggtaataaagatcagcttagttggcaggagtgtgccgaaatcctatctgccgctttttctgtacaaagtaatgtgtttgttaatagagattatgcggaacagtccgtcgttcttaacgcgattaagcgtattacggttggaggggcgggattcttcgcgttagcgatagttgatgtctctggtaacaaattggcccccgtaactgcatatcatgcaacggaggccaaatgtaagaaaattcagggtagttga

SEQ ID NO: 225735 - DNA, 972 bp, Klebsiella pneumoniae
atgaatatttactgcgatgatggttcaactaatgttaagctggcatggtttgaaggagatgaacttcagacacgagtctctgcgaactccttcaggcatggctggaaagtggcagaattcagtgcggcaaccttcaattatcaggtgggcacgctgaaatacacctgggacagtgtcagccgggatgccatcccgacaacaaacgtggaatatcagtacggtgatctcaacctgctggccgtgcatcatgcgctgctgaacagcggactggagccgcagccggtgagcctgaccgtgacgctgcccctgagtgagtattacgacggggactgccagcggaacgaggagaacatacgacgcaaacgggaaaacctgatgcgtgagctggttctgaataagggcagagcatttaccgtaacggacgtgaaggtgatgccggaatcactgccggcggcgttctcccgtctcgcggagctgaagcccggccccgctgagaccaccctgattatcgatctcggtggcaccacgctcgatgccggtgtgattgtcggccagtttgatgatatcagtgcggtgcacggtaatccgtctgtcggcgtgtcacaggtcacccgggcagctgcaggcgcgctgcgggcggcagacagcgaaaccagcgccctcatcgctgacactatcatccgcaaccgcaatgatcgtcagtatctgcagcgtgtgatcaacgatgccggtaaaattgacgaggttcggaacaaaattacagaggcaatcacctccctgggcgcgcgtgttaccagtgagctgacggccttcaggaacgttaaccgggtattcctggtcgggggaggggcttccctcatagaagaagctatccgtcaggcctggcctctggctcctgaccgtatcgaggttataggcgatccgcaaatggcgctggccagggagattgccctttacaataaagaggactaa

SEQ ID NO: 225736 - DNA, 672 bp, Klebsiella pneumoniae
gtgccggacggccagtattctttctatctgcacagcgacgatcgcaccgacatcgcggcgatggcaaccatcagcaccatctcacagcccctgcgcggtgagttcatccgtaccgctgccaccgccggggcggtggtataccaggtggatgcccgtttaccggcgctgatcccggtgttctttgccgggcagctgagcgctgtccgcctttgcgccgtgatggccctggtctccggaacctggtcctcactcaccggccttccggatgagcccgaaaatggtgaggcagctctgcccgtgtcaccggagacagaataccagcgccggcgttacaccctgacgcttcagaatggccggagtggagaacgggtggaaagtgtgctgacggaggcgtcatcccgtctgcgtggcgatctgctgagaaacctgattatcaccggtcttgccctccacacgacggcaccggagctgccgcgcctgctggccagtatgccggtaccgcccacctcggtcagtgagctgcaggcactggttcagcagatggccggcaccgctgacgtgaacagggctgcagctgcagtaccggatacgccggcagcatctgccgcgccggtgtccgggtcggatacccgggaaataaagaaaaatatgcggcgtgcattcggtgactaa

SEQ ID NO: 225737 - DNA, 333 bp, Klebsiella pneumoniae
atgacggtaatcaacactgaaacagccatggaacatctcaggctggatgatgaaatcgataaaacgatggtggaggggtatcttgccgctgcggaggatgctgccatgcagtttctcaaccgacgctttttcgctgaccaagctgctctggatagtgctgttgagaatgaaagcgctggcgatcgtcctcttatcatcacgccctccattcagagcgcggttcttcttatcgtgggctggttgtatgaaaaccgcggggatgatctgagtcctgatattccaggacccgcacgctggttgctgaatccctggcgaattcaaatgggtgtttag

SEQ ID NO: 225738 - DNA, 339 bp, Klebsiella pneumoniae
atgaaaattggaccaatgcggtatcggatcaccatccgtaattttattactacacgaaccccgagtggtcagccaacagaagagtggtctgacggcgccactatctgggccgaggttaaggggataagcggtcgtgagctgttagccgctggcgctgagcgtgccgatgccaccattcgagtctgggtacgttttcgtacagatatctcagcttcttcccgcctgaaagtacgcaccggcccgtttaaaggtgctgttcttaacgttaccggccctccggttccggatatcaaaggcacccgactggaaattctttgcaaacaggggaccgaaaaatga

SEQ ID NO: 225739 - DNA, 282 bp, Klebsiella pneumoniae; identical to SEQ ID NO: 208711

SEQ ID NO: 225740 - DNA, 846 bp, Klebsiella pneumoniae; identical to SEQ ID NO: 208710

SEQ ID NO: 225741 - DNA, 519 bp, Klebsiella pneumoniae; identical to SEQ ID NO: 160022

SEQ ID NO: 225742 - DNA, 1116 bp, Klebsiella pneumoniae
atggcggagtcaataatcaagtgcaacacccctgatctgccttgtacccgagcctgccaccgtcctatgggaacgcactaccagcacctgagcgccgaggagcgcgccaccatcatgatcctgctgcagcagggctgctcggcacgcggcattgcccgcacgctgcaacgctcgccttcgacgatcacgcgcgagatccggcgagcgctgcagtggccgcagcgcacggccttcgtgccggcaggcagccgcacctacgatgcgcgggcagccggcgcgcgtgcttgcgcgatgcgcctcaagcgccgacgccaccccaagctggccgaagacggcgtgctcttcggcgtggtgcaccacttcttgctgcagggctggtcgccgtcccagattgccggcacactcaagcgcatgtggcccgacgatctggatcgccgcgtctcgcacgagaccatctacaactgcatctacgcgatgccgcgcggcgagctgcgcaaggaactcatcgcctgtctgaggcgtgcgcaagccaagcgcatgccgcgctcgcgtggccaggaccggcgtggtcagctgcccgacgctgtgagcatccacctgcgtccgcccgaggccaacgagcgggctttcccggggcactgggaaggcgatctgctcaagggggcggccaaccgctcggccgttggggtgttggtcgagcgcagctcgcgtctggtgatgctggccaagctcaaggatgccacggcagcctcggccctggagggcttcaccgccaagctgcgcagcattgctgagccgatgcgcaagaccctgacctacgaccgcggcaaggaaatggcgcgccacccggagctgactgaggccaccggcatccgggtctacttctgcgacccgcgcagtccgtggcagcggggcagttgcgagaacatcaacggtctgctgcgccagtacctgcccaagggcacggacctgtcggtctacagccaggaagagctcgatgcgatcgccgaccggctcaacaaccgcccgcgcgccatccacggcttctaccctccgatcgccgtctaccaggccatgctggaaaagctcacccaagccagccactcccttcagtga

SEQ ID NO: 225743 - DNA, 1737 bp, Klebsiella pneumoniae
atgctttgtagtggcgcaattggggtgttgcgctatacttgcggcatgttcatcaagctcacccgctccaaaagccgcacctacgcccagttggtcgagtccttccgtgacgagcaaggtcagcctcgccagcgcacggtggccactctgggtcgcgttgatgaggacggcggcacggtcgatgcggtgctgagcaccttgctgcgtgccaagggccgcagtggcgtggacatcgccacgccccaggttcgctttgagtctgccctggccttgggcgatgtatgggcccttgatcaactctggcgtgagctgggcttcgatgccctggcggccgtcttccgacgcgcccgttacaccacccccattgagcaggccattcgtgtgatggtcttcaaccgcctgtgcgatgccgactccaagctgggcacgcttcgctggctgcaaaccgtgagcatgccgggcgtcgatgccgacaatctcagccaccagcaactgctgcgcagcatggatgcgctcatggaccaccaggtcgccgtcaatgacacggtggcccatctgctgcgcccattgatcgatgaagaactctcggttgtcttctacgacctgaccaccatccgcgctgaaggcttgagtgagcaaggtggcgatgtgcgccgctttggcatgtccaaggaggggttgatcgcccgtcagttcatgctgggtgtggtgcaaacagccgatggcatgcccatccaccatgaggtctttgctggcaacacggcggaggcgcccacgctgctacccatgctgggcaccttgctcaaacggtatccgcacatccgccgtctggtcatcgtggccgaccgaggcctgctgtcgctggacaatgtggccgccctgtctgagttgaagctgcccagcggccagccgatggagttcatcctggcggtgccggggcggcgttatagcgagttcgccgaagtcctgcaggccatgcaggccaagatggccgacgcatcgtgtgaggtcattgaggaaacccgctggggtgagcatcgcctggtgatcgcccacgaccccgtcaccgcgcaggagcaatcggcccagcggcaaggcaagatcgacgcattgcacgtacgcgctgccgaactggcgggcaagctcgatgcgcaagacgatggcgtgatgcgccgcggtcgcaagctctccgacagtggtgccaaggcgcgcttcttccacgaggtcagcgacgctcacctcagccgcatcatcaaggtcgacctgcagtccgacgtgttcacctatgcgctcgatacgcaggccctgcagcgtgccgcactcatggacggcaagctgatgctggtgaccaacgtggccgatctcagtgccaccgaggtcgtgcagcgctacaaggccttggccgatatcgagcggggcttcaaggtgctcaagtccgagatcgagatcgcccccgtcttccaccgtctgcccgagcgcatcaaggcccacgccagcatctgcttcatggcgctgatcctgtaccgggtcatgcgccagcgcctcaaactcgctggcagcccgctgagccccgaagccgcgctggccagtctgcggcgcattcaacgccacagcgtcagcatcgacaacggcgcacctgtctcaggcatctccagcatcaaccaagatcaggccgccaccatggccgccttgaaggtcaaaaagctcagcaacgaactccagttatccctcctgtag

SEQ ID NO: 225744 - DNA, 354 bp, Klebsiella pneumoniae
atgctgaggtcggtggaaaagcgcttcggcgacaggctgcccgacacagcggtgcagtggctgacggacaacggttcagcatataccgcgcatgaaacgcggaggttcgccaaagagctgaatctggagccatgtacaacagcggtgagcagcccgcagagcaatggcatggccgaacggttcgtgaagacgatgaaggaagactatatcgcgttcatgccgaaaccggatgtgagaacagccctgcgaaaccttgcagcggcgttcacgcattacaatgaaaatcacccgcatagtgcgctgggatatcactctccgagagaataccggcggcagcgggcatcgttaacttaa

SEQ ID NO: 225745 - DNA, 300 bp, Klebsiella pneumoniae
atgacaaaaccaacatcaaccaccaaaaagccacgcaagcagcacactcctgaatttcgtcaggaagccctgaaactggctgaacgcattggggtggcagctgccgcccgcgaacttaacctgtatgaatcacagctctacaactggcgaagcaaacagcaaaatcagttctcttcttctgaacgcgagcaggacatgtccgctgagatcgcccgtctgaaacgtcaactggcagaacgggatgaggaactggccattctccaaaaggccgcgacatacttcgcgaagcgcctgaaatga

SEQ ID NO: 225746 - DNA, 507 bp, Klebsiella pneumoniae
atggctggagaaggaactcctgttctggttgctcctgaaccaaatacatccactaaattgaaaatcccatctcttcaaaacaccagagcgaagaaccgcgctcccatgaacaatagaaagcaagttaaaccacgccagaatggtatgtttaagcgtttcacactacttgtggtgggcttcttcaaagagagatttgtatgggccagaaggaaacccgataccactgatactgaccatgacaaacgtattgcagaaaactatgtcttcgatgaggtgttggggatctatgttccacgctcagagtttgaaaatcgcgttaaatataacaatgaccaaaaatcatcagaagcagagttctgtggaaacgtatcagataatgacaagaccgttcgtttcccaagtcgtcctaagaaaaaacagtccgaggttaataatgatttaattttcattgaggcaaaccagccagataatataaaaaaccatataattcaaaaaccaaaaccataa

SEQ ID NO: 225747 - DNA, 987 bp, Klebsiella pneumoniae
atgtcttctatatcaaaaagaaatcgcaataaaatggcaaaagtccagcaaagaaaactgcacacaggtttatccaagcgaaaagaaaaaagaagtgctatatataacagtttaatttccttagaagaaagccaaaaaatattaaaatatctatcatttggatttgagaaggatttatataaagcatcattgaataatttgagcgacaaaggaaacccacttcgattcaataactttgcatattgcatgcgagaaataatatcgctgattttatctcgatactctaccgatgaagatatattaaggtgctgttggtatactaatgagaccgatgatgaaaacggcattaccagagcacaacggtttaaatatattatccaaggcggtttaagtgatgataaattatctgaattgtttcaatttgatgaagatgaagatgaagatgaagatgaagaaaaccatattgctaaaagattgaaagagtttactaaattatttagagagctaaaccaacatactcatttaagagaaaaaagatttaatattggtgataaaaaatgtgaagcattggctcatgctgtaatctccacagtattcaacatattaaaaataatggaagatctacgtgatattatcaataaacaggtggaatctgtgattgatgagatccttttagaagaattcattagccaaacctatgatgaaatagacgtattatcatcacactctaatgtggataactttgaattagactcctatgccgtatcgaaaatttgcagtcagtttgtgttaattcaaggtcaagggattgcaaattgtgttcttcaatggggatcaaactcagatatgaggaatgatattggtgcaacaatggatgaaagctttgttttcgatttttctatacaagcttcattagataatttaagaaacttatcattagccccccaaggtatagtaattaatacatctccatggtggaatgactaa

SEQ ID NO: 225748 - DNA, 474 bp, Klebsiella pneumoniae
gtggaagcagcaggtatcgtatttttagtagtgctcttcgtcgttatcatgaccgcagtagatatacagaagaaaaagcactacaacaacttcacggaagttctggacggagacattttatcttatgaatgtcagcgaaccgggatcgtcatagataccaaacagcgcacagttcgttttttcgataaagaaagagacaagacatattcttatgacaatatcagagagatcaattatacgctttctgacgctgggaaattttacggtaatggaacattgagaggtatgaataatgctgctatcgctaacggaagagaacagcttttagctaatcaacgctcaggtattaatatcttaaccgatgatattaaaaaacttatgtggaaaattaatgttcccttaaagaataaaaccacttcaaaacaagaactgtgcgaacgctggcttcttgtctttaaacaatatgttttttag

SEQ ID NO: 225749 - DNA, 378 bp, Klebsiella pneumoniae
atgaaaaagatgcttattgctgtattggttattcttccacttgccagttgtaccgtacacggtaataaatcccttacagatgaaaatcagcagacggtaaagctaaaaattgtcaaaggaaaaactacccaacaacagatcattaccgcgttcggagaaccacagacacgcgccacgaacgatgggcaagagatgtggagctactccagcatgacaggagaaaaccagctatctaactatattcccggcctcgctctactgaccagtagcagtacagcacatattaaatcgctggatatttggtttaagcgtgatgttgtggaacgttataattttagtcagacagccagtaaaacttcacgcggtttgatggattaa

SEQ ID NO: 225750 - DNA, 474 bp, Klebsiella pneumoniae
atggcagatattttctacccggatgaatacctgcccatgccgcttatggacgggtacgggtttaagcccatatcacctttactgcgaacggagatgacgtccggtcgcgctcaacaacgaaggcgatatacctcaacacccacccaggcatcggttaaatggatttttaaaactgatgctctggcgcaggtgtttgaggcgtttttcagggatgcgcttaaagatggccagtcctggttctatctgaaacttcagactcccatcggggtaaagccctataaagccaggttcgtggatatttacgaagggccgacgctggtcgcgccaaaatactggcagtacagcgcaacgctggaattatgggaacgcccgttaccgccttcaggctggggaaattacccggaatggctggcgggccagtcgttactggatattgcgctaaacagagagtggccgaagcatgacaattcttga

SEQ ID NO: 225751 - DNA, 423 bp, Klebsiella pneumoniae; identical to SEQ ID NO: 183975

SEQ ID NO: 225752 - DNA, 2343 bp, Klebsiella pneumoniae
atgggtggtggatttaactataacggggaaggtgctactggcaccggattggatcgtgatccatatgttcgcgacagcaatggtaatgctattggtgttaaatcaggctatcacgcggagtcctatgggacctcaagtccagccttagggcctaatggcgctattcagattactgctggggttattgctgtgcctggagataagccccgacctgacggtggtagtggtggtgggaatactgttaacaccggacctgcaggacagctcctggtgatgaataaaggtcagcttggatactgggaaactcgttctacgggcgcgggtaacaatgagcataatacgagtgtatttgttgccgtaggtccttctgaggcagaaaaaactgcttctgcagagaaggcgttaaaggaaaaacagcaggcagaagcagcagcaaaagactttgcggctaaaactgctgccgcatcagccacggcggaaaaagaacgccagcaggcaattgctgctgcaactgcagcgggtcagcatcagtcagtttctgatgcccgtaatagcctgaataacgcgacgtcagatgtgtctcgtctgaaatcagctgcagacagtgcactgcaggaggcaaaggcaaaacggaaggctgctattgatgctgtacctgttgcaacccaggcggaaaataaatatcaggagctgcagcagaagattaaaggcctgaagctgaaaaatgatgagtatggtacggaaaaatgggaaataattggctctaataaggagcatgatcactggggatacaggttttatccatccggaattaccaaagctcaggttgatgcggcgcagagcgatgctgtgaataagcgaaatcaggctaccagtcttgccagtcaggcaacagcagcagaacaggacagcctgaaagctacagctgcctataatgcggcagaaacgcgccgtcaggctgctcaggcggcgttaaattctgctgaacaggctgctgctgctgaacgtaagcggcaggaagctgaggcggctgcagcagctgctgctgagaaaaaacgtcaggcagacgcagcagcaaaagcagcagaggaagcgcgtgcggcagcagaaaaagccaagctgatgcaggagcgtcaggcagcagcagataagctgaaatccacagatattcagtctgttcgcgggatcccgtctacggcatcgcctgcagcgtcacccatttcctgggccgttgcatcacttggtggtatatcgctggatagtgttactgcagggaaagcctggacgcagattgctgaggtgatggctaaactgcgaggtattgccggtgcgagtcttgttggtcccgtggtggcaactgctgtagggctgttttggtcacgtgatgttggtattggcagtgatgtggtgcccggacgtgacatcagcgggctgatgccgggtgatgcactgtcattacctgatctggccactttgattaaagctgctgacagtaaaacgggtgtcagtatgccggttcgaggccggattatcgtgcgtgaaggcgattatctggagtctcagttcgttcgaacacctgttgccggtagtgttccggttgttcgggctactctggataaagctactggttactggggatatacgttgccggcgatacagggcgtgcccggacagacaatactggtaagtccgtcagatgcgccgggcgttaatgctcctctgggacttgctgggccggttcctttgcctgaaactattatacataccggtgggcaaactacggtccctcagggggggactgtgacagtatctcctgttattggtgaagttgattttcgagatcttatccttgttttccctcctgagtcagggttaaagccgttatatgtgatgccagttagcccttatggagatgcaacagaaaaaggcgaacacagcggaagaccttataatccggataaggcaggtggtcctgtacagaatcttaactggcgtagtgcagtcatcaacaaggccgggattgataaggtgaagctacataccggtcgctttggtgaatcagcagcaaacaaagtaatgatcgaccgtctggagaaaatcctgagcggtcagttagaggtaactgatacggacaagcggttttacacccatgaactcagagagctggaacgttatcgtgctttaggagtccctgataatgtgaagccagatgataaaggtgttacgtggaataacactcatacagcaacgctggaagattataaaattaatgaaaaaactgatccgctctatacaaaggatgctgaagaggcagagtataaagcagaactaaaaaataaatga

SEQ ID NO: 225753 - DNA, 264 bp, Klebsiella pneumoniae
atgagtaatccgattgaagatatcattaaaaatgaatcggtaagtgatgtgcttcgctactttggtcctggtcgcgacatttcaaaaattgaccgtatgtatgtttcatataagtttgaagtgatctctgaaggcgttcttttatctgaatacaaaaagttattcgacaatggagaactaaagtatgactctaataaaaatgttattaaggggcctaactggaaagagcctgcttttgtaacacaaaaaaaatacggcatttaa

SEQ ID NO: 225754 - DNA, 630 bp, Klebsiella pneumoniae
atgtctcttctgaatctggatttaattgaagccatttactctgatgccgagcgtgaactcaccaatgatgagttatatagggaggtacagtctcgcctttcaatttcagataatgatttcaataaaaaagaaaaattcggtttggccggtgtgccgcataacaaaataaaacaccgtatccgttggttccaacagacgctaaaagctatgaacgtcattgagcgtataagctcaggccgttctctatggcgccactgtcggaaaaacaagtcagggctttccgaagtcagggaaggggcttgtttagtggcattcagtacagatctcggcgtagcgattttaggaaattcgacaatggtgttaccgggcaataccgagccggttcatctctgcctgacttctccaccttatccgctcagaaagcagcgggattatgctgcagccttcaaaaacgactgtgactatattgatttcatcgtagaagccattcggccaattgcccaccagctggttgacggtggttctgtcgtgctgaatatcggtcaggatatttttaatccgggtcagccttctcgttccctctaccctgagcgcctattactggccttgtgcgagaaactaaataactga

SEQ ID NO: 225755 - DNA, 465 bp, Klebsiella pneumoniae
atgaaagtcgacaaactatatatccgctcacgctttaaaaatctagaaaacgtgaaagtggattttgacgaaaatcatctgatgaccgttgtggtaggtcgtaatggttccggtaaatccaacgttctagaagccttagtatctatattccgcaatcttgacttaggtgaggcgccagcgttttcatacgaactgacttatcgattgggtgaacctcacaaacccaatcgacccagtaatcgatggctggaaatcactattgatgccgatccaaatcgcggaacgctggcaaagcaatacgaagtacgtatgcgcaatcttttgaatgacagcttacctgaagacatatttgatgaaaagactttaggtatagttattccattttcaaaggttaagcgcaataaagaaggtaaagcgccgtacctgcccaactatgtgtttgcctactattcaggtcctaaataa

SEQ ID NO: 225756 - DNA, 192 bp, Klebsiella pneumoniae
atgctagtgcaaaataatatttataataattcggagtcatatgctattcttttgtttagtatgtggcctgtccttattgtacttcttgtcgtgatatcttgcgccttttacggtgtattgatgcataaaactgcaatttgttgttttctgtcagccatgttccttggtgtcgcaggctggttttatggatga

SEQ ID NO: 225757 - DNA, 246 bp, Klebsiella pneumoniae
atgtcagagatcaccgcatccgagcaaatccgcctggatattatcaagaaagtgaattacgacactgcagcggcgaagttagccattgactgggtaggcgacagctatctgaagtctgagttattcgcagactctttcgatcgtgtttacacggaaagcgagattgtctcgaaaactcgtaaagcaattcaggaagcgaccgaagcgctggcgctatttgatactggcgctgagcaggtcagctaa

SEQ ID NO: 225758 - DNA, 237 bp, Klebsiella pneumoniae
atgcacctcacagttcttgatgacgatcctggcgagtacatcgaaccgggtcgcgaacgtatcacggtttatctcaatggtgttgaggtaaagcacgttttttctgctgacgatgaaagaggtgaggtgattgccgctgtgcgcgatagtcatggtcatttcactgtcgagctcggcgaggttaagcgacagacgctgttcggtcaggtgaggatcgtacgcccatccaagcaatag

SEQ ID NO: 225759 - DNA, 216 bp, Klebsiella pneumoniae; identical to SEQ ID NO: 101641

SEQ ID NO: 225760 - DNA, 402 bp, Klebsiella pneumoniae
atggccagagtgtctattagtgaggctgcccgactgacgggtaagagtagaacaacactgcacaggttaattaaagcaggtgacctgtccacctgtagcggtgagcgcaatgcaaaaatggtagatacttcagagcttttacgtgtctttggtccctttgagcaaccgaagggtgaacaccattctggacaggtctctggacagcgtgatacagcctctgctgaccagagtgaacaggtgattcgtcatctgaaacaggagattgaacacctgaacaccttacttttgtccaaggattctcacattgacagcctgaaacaggccatgctccttcttgaaaatcaccagacaacattaactgaatccccggcgccatggtggaagttctggaaaaaatcctga

SEQ ID NO: 225761 - DNA, 216 bp, Klebsiella pneumoniae
atgacgacttggttttactgcgtagaaataacgggggtgaccttacatggccatcagtatgtatacaaaaaagatggaattatcacgtcagaacactttaataatctgcattcagtagaagacgtaattaatcatatcaaagatagtcataccccaaaaacagagatgggcaatgctatcggctctgtagcattgatagcgttcaataagatctaa

SEQ ID NO: 225762 - DNA, 402 bp, Klebsiella pneumoniae
atgatagacatccaaaaattgatttcttggcttggcgttgaaggtgctaaagctggattagataaaagtgaaatgactaaccctgagctactggagtcattcgctcatttacttcctaaaaactcaaataaactaaagcgctctgatattattgaggaaatcattttagcaacacgtaaaatgacacataaatcaattgatgagttaatggaaatgtctaaagaggatctctcctcttattttcaagagcaaaagtatagtagaaaagaacttttagatttgctttatacgcttgagataagaccaggaagttcagccaaaaagaacttaactgaattcactataagtgaaataagtgacatagggatgtacaggcgagtagctaaaggtaatcattcataa

SEQ ID NO: 225763 - DNA, 885 bp, Klebsiella pneumoniae
atggctgttactgttggttttatcagtgaaaaaggcggggttggtaaaacgacctcctgctatcatatagctgaagcacttagtcgcttccataaaaaaagagtgctagtaatcgatgctgactatcagcgaggtggtataactggtcgtttctttcctaaattgattgaaaattttggcaatcactcaccaaaaggaattactctttttaataaataccaacaattatatagtgcagcccagcaaactgacgatattgatataatcaagttcaatgagttaattgatgtaatccctgcagaccctcgcttatctacagtatcaacagataagttaccaagcaccaataacattagatcaaataatgctatactcttacaacatttaaaaacgataaactttgttttatcaccagttacggattattatgactatatacttatagactcacacccggaagtttcagatataatgagatctataatctatgcatctgactactgtgtatcccctgtaaaattggacagacaatcatctatcggagtagcaactgttattggtgaaataaataacgttaacgatgatatagcaatgcttagagatgcacttaaagttggagatgcttacaacgatacgatcttcgcaggtgccatgggtatgatggctagagaatacgcagaagagttaaagcaaacggagcagtacgaatataacagactccgtcaagcgggcgacatcttcaagcactatgttacagaaggtgacggtctaagagtagctgcagcagaacgtgtttcagtgtatgatgtccagataagtaacgcttacaaacaagcgtcacagttcaaaaacttgacgattgagtttatggggacttgtcgatga

SEQ ID NO: 225764 - DNA, 828 bp, Klebsiella pneumoniae
gtgctctgtgtatcgcgttcgaatctgtatgaccggttactggataaacgccagcaccggtcagcccgctacagcaaagacgatgacgcccgactgttaccgcttatccgccagatatgcagcgagcgggcaacaaacggctatcatcgcgtgactgcgcacctcaatcgtgcgctgaaggaacataactggcgagttaaccccaaacgtatttatcggatcatgcaggcgaataacctgttactggcaaaatctggccataaaaagccagaacgctgccataccggcagcgtcgtgacacttaagccggatacgcgctggtgctcagatggcttcgaaatccgctgctggaatcgggaagtcgtgcgggtggtgttcagccttgactgctgtgatcgtgaagccatcagttggtcggccacaacaggcggtataaacagcgttatggtgcaggatctgctgacagagagtgtagaaaagcgctttggaaatacgctttacctgccacacgccgttgagtggctgaccgataacggcagttgctacatagcggacgcgacaaggacgttcgctgcttcactcgggttcatcgtgtgtacgacgccagtgcgtagcccggagagcaatgggatggctgaatcgttcgtgaaaacgttcaagcgtgactacgtgtatgtgaatgacctgccggatgcggtgaccgtaatggaaaaactgacagaatggatggaagactataataactggcatccccataaaggactgaaaatgcagtcaccgagagaatacagaagttcattactagggaaggtgcgaacaagttcctga

SEQ ID NO: 225765 - DNA, 387 bp, Klebsiella pneumoniae
gtgcaaagaatcgaagtgatcactggcgagcaaaagcgccgccgttatactcccgaagagaaagcccgttttgtagcgctcgccatgcagcccggctacatcgtctcactcgttgcccggcaatacggcatcactcccagtcttatttttaagtggaaacgactcatgaacgagggtggcaagtctgcgatcgccgcaggcgacgaggtggtcagcgtctccgggctcaaagcgctggagaaaaaagtcaaacagcttgaacagatgctgggacgcaaaacgatggaagccgaaatccttcgcgacgcgcttgagatagcccaggcaaaaaagttgatatcgcgcatgccattgctgccaccggacgatatcccctcatccgaatag

SEQ ID NO: 225766 - DNA, 249 bp, Klebsiella pneumoniae
atggaccacaacgttttgtgccagcctggatccctgccggatggcacgtttacccgcgagcaggctcaggttgtcgcagcgcagtatcagaatgtggcgattgaagatgagcaggggacccattttcgctttgtcgtcggtcatcaggatgacagcagcatggtctggcgcgtctggaattttgagccgggcggcgaggacctgatgaaccgttacatccgcgactacggagtacgcaaaacgcaataa

SEQ ID NO: 225767 - DNA, 282 bp, Klebsiella pneumoniae; identical to SEQ ID NO: 101482

SEQ ID NO: 225768 - DNA, 192 bp, Klebsiella pneumoniae; identical to SEQ ID NO: 101358

SEQ ID NO: 225769 - DNA, 639 bp, Klebsiella pneumoniae
atgctccataagagtatctccgaaattttcggagtaagtttaagccttcaatcataccgagagcattctgaaaccaatgggttcggtggggtagcggttaacaggccaaccggagcagtcaataatcactttatgttctctggagacactttccaggtggagcttttatatgagccaaagatttttccaatggcaagctcaacacgtccaggcgatttgatcgataccagcaattcctatgccacatctctatatggaaaacatcatttctgtcctgactttgtaattaaaatacattcaaaaaaatggaaaaaatcattaacactaatccttgattctaaatataaagatgcaagaaatgtacgggattacgatattcctaaactagtaccacgctatctctttaatattcattctctatcaaacgacaactcagtaacaccaattgacttgctgattgttttattcccacacgacaaagcaggaacattagtaaaaaccgtttcttctaagcatttcatcactggatctcatccagtattacctcaagcacttggaacaatatacacaccacttaataatgggctagatgacaagttaaaaagcttagtgcaatattataatcttaaaatgatgtag

SEQ ID NO: 225770 - DNA, 234 bp, Klebsiella pneumoniae
atgaaagttgaagtcacaattgataaacataaaaaactccctgatggcgccgtacctgcgcttgaaaaggaactgctgcgccgcttatctcagtcctatgacgactgcaaactaactattcgacgcgcaagtaacgatggccttagcgttctgggcggggctgatggcgataaaaagcatgtagagcaaatcctgcaggagacgtgggaaagcgctgacgactggttttattga

SEQ ID NO: 225771 - DNA, 183 bp, Klebsiella pneumoniae
atggaaataccggatgatttatttccagggtttaaagagcatgccgggcctgtccttgtttatgtcaataacggcgttgtggaaagaggtttcccgcttcgtaaggacgaatttgtcacctcgctcaaatcccttgatgaggcccgtaaaaaagctggtctcccccctgtaagtcaggactaa

SEQ ID NO: 225772 - DNA, 645 bp, Klebsiella pneumoniae
atgactaatttttactgtgaagcccttacggccctgcgttcagctccccatcactatttgaaagaagtcggcgaccagtggcggactccggatctgcttttctggggtatcaacgcgatgtttggtccgttgatgcttgacctgttcgctgatgacagcaacgcaaaatgccccgtctggtacacggcagaagataacgcgctgacacaagactggtcggaaatgctttcctcaatcggcggcgcagcctacggaaacccgccttacagccgctctcagtatcatgaaaagcaggccatcactggcatgacgcacatcatgaactatgcaactgcgcaacgagagaagggcggtcgctatgtcttcctggtgaagtcagcaacaagcgaaacgtggtggccggaagatgcggatcacgtctgctttattcgtgggcgaattggtttcgatctgcccgagtggtttaagccagccgacgacaaacaaaggccaaccagtgcgttcttcgctggcgccattgtcgtgtttgataagtcatgggctggcgagcggtttagttacatcaatcgagcggtgcttgaagctaagggccgcgcatttatgtcactggcgcagtttgctgctggtaagggagatattgcatga

SEQ ID NO: 225773 - DNA, 600 bp, Klebsiella pneumoniae
atgacaccactacaacgccgcagacaaaacaccgctatgtcagaggtcgcgatcgccacacacaaacgttaccttgggcgcccggaactattgaccggcatccagtcagcctggattaagtcgcttcttacagtatggggtgagagccagcgaggggatacatacccacgcaagcccacagcgcactcatgctggtggtcagtaaagggaacccgatggtcagataaagcgttagagcgctttaccacggcaattgagcaggcaagggctgagggctttcgtggtcccaatgctctgaagcgtgctcaggtcattctctggccgaagcaggagagcagcgtgatagatactgccatcagcaacgacgacgctgaattcatggagaagtgcgtactggacgcctttgaggttaccgacccgatttatattgtcggaatgagttactacacaacccgaaaaaaaatatcagacataaccagagagcttcaaaagctggcgccctggctgacggcggaccagtcgagagagcgcgtgaaatggtgcctcaagatatttcaggggaaggcatttttagccgcccgcaaaaacctgagaagttag

SEQ ID NO: 225774 - DNA, 1431 bp, Klebsiella pneumoniae
gtgaccgaccccaatgggctgacatgggcagccaccctcgtgtcgctggcggtcgctatccccacagcggggcatgcggtcatctacaagcgtgaccctcgatcggccacgctgtgggtactgctgatcgccttgctgccgctgggcggttcgctgctgtatgggctgttcggcatcaaccgttaccagcggcgggcgcggcggctcttcccgggggcagatcctgctgttcggcaggatctctcgcccacgatacccgaggctgtatcgccgccacttgccggtctggcccacctggtgggacgcgccaccggccagtcgctgaccggcggcaaccgcatcgagccgcttgtcgatggcgagcaggcctacccggccatgctcgccgccatcgaatcggcgcggtacagcgtcgccttgacctcgtacatcttcgacagccaaggcatcggggcgcagttcgtcgatgcgctgcgccgggctcatgagcgcggcgtgcaagtgcgggtgctgatcgacgacgtgtatgcccgctggacgccccgcagcgcctaccgcgccttgcagcgcgccggcgttccggtggcgacgttcaacccgacgttgattcccgcgcgcctgcatgccgcgcatctgcgcaatcaccgcaagctgctggtgatcgatggcgagacgggtttcaccggaggcatgaacatcttcagatcgtattggcggcccgatgcgccggaccaggcctgtcacgatttgcactttcgtctgcgcgggccggtggtagagcatctgatgcggagcttcaccgatgattggtgcgataccacgggcgaacggctcagcaagggtttctggggcgaaccgcccgtaacggctgatgagccgggaaccagttgggcgcgcggcatcgaggccggacccgatgaggccctggaccggatgcgctgggccttcatgggcgctttgagcgcggcgaagcattcggtgcgcatctggacaccttacttcgtccccgatcagccgatgatcgcggcgctgagcacggccgcgttgcgcggcgtgcgtatcgacgtgctgacgcccgcaaacggcgaccatcccacggtgcaatgggccgcgcgcgcccactactggcaggtgctggagcacggtgtgcgcatcttcgaacggcctggcccgttcgaccacagcaagctgatgctggtagacggagcgtggtgctgcctgggttcggccaattgggacgcgcgcagtttgcgcctcaacttcgagttcaatgtggaggtgtacgacaccgcgttgtctacgcggctggaatctctttttgatgccgctcgtgatgcgtcgggcgagatatcggcgaaggcgttgcgcgcccgcccgctggccatccgcttgcgcgacgggttggcccgtctgttcacccccgttctctag

SEQ ID NO: 225775 - DNA, 612 bp, Klebsiella pneumoniae
ttggcgcagcgcctgcggcgtcaggccgtagcggcgcagcaggttggcggccagcccttcgccttcctcggccagaccgatcaggaaatgctctggaccgacataagaatggccgagttcattggaggccacgaaggcgcggctgagcgcatccttcacgcgcggcgacacgccgatctcgccctcgaagggcttgtccccgcgcttggcctcagactcgatctgccgcttgaggtcatcgaccttgatcttgaactgacccaggatggtcttgaccacgtcgctgtcggccagcgccagcagcagatgttcggtatccacctcggagcggccaaattcggcagcgtgtttggcggcctcctgcagcaaggcttccgactgttcgctgatgcggctggccagcccactgccgcgacggcgcggcgcacccgaacctgcggtggcgggctcgccaaacgaggcatcgaccacgtcatcggtatcggcggcaactggcgtcgcgtcttcgccgatgcggaagaagtcactgccgaggaagtcctcgaacaggccgctgcgcgagccgaacaaggcttccagcggcgaaacggtgcgcttttgctggcgcactaa

SEQ ID NO: 225776 - DNA, 2208 bp, Klebsiella pneumoniae
atgagcagcagggacctggcaaaattcaccgatgtcagacgttacgctacgctggtttgtataataacagaggccagggccaccctgactgacgaagtgattgatctgcacgagcgtatcctgggtagtctgttcagcagggcaaaacgcacgcaggccgaacggctccagcaaacgggaaagcttattcagagcaagctgaagcagtacgttaccgtcgggcaggcgttacttaacgccagagaatccggggaagatccctggactgcaatagaagatgtccttccctggcaggaattcatcaacagcgtggaagaaacgcggtttctttcccgtaagggcaatttcgacgcgcttcatctgatcaccgaaaaatacagtacgttgcgtaaatatgccccgcgtatgctgtcagcattgcagttcatggcgacacctgcggcgcaggcgctcagcgatgcgctggacaccataacggaaatgtaccgtaaacaacttcgtaaagtgccgccatcagcgccaacagggtttatccctgaaagctggcgaaaactggtgctcacgccttcaggcatcgaccgcaagtactacgagttttgcgtactgaatgaactcaagggtgcattacgttccggtgatatctgggtaaaaggatcgcgccgctacaaaaattttgatgattatctcatcccgactgctgagtttgagaaatcccgacataatgaccagttacagttggccgttcagaccgatagccaggcataccttcaggcccgtatgactcttcttgcatctcggctggaagaagttaacgcgatggcgcttgccggtgatttgcccgatgtagatatctcagataaaggcgtaaaaatcactccactggagaacagcgttccttcaggtgtttcgccctttgcagatttggtctatggcatgcttccccatccgaaaattacggagatactggaagaagttgatagctggacgggatttacgcgtcacttcgcgcacctcaaaaataataacgtcagaccaaaagacggaagactgttgctgaccaccattctggctgacggcatcaaccttgggctgacaaaaatggcggaatcctgccctggggccacaagatcgtcactcgaaggtattcaggcatggtacatcagggatgaaacttattcagcggcactggccgagctggtcaacgcacagaaagagcggcctctggccgcattctggggcgacgggacaacatcgtcgtcagacgggcagaactttcgggtaggcagtcacggacgttatgccggtcaggtcaatcttaaatatggtcaggagccgggcgtgcagatttatacgcatatctcagaccaatacagcccgttctacgccaaagtgatcagccgggtgcgcgactcaacccacgtgcttgatggcctgctgtaccatgaaagcgatctggaaattaccgagcattacaccgataccgcaggcttcactgaacatgttttcgccctgatgcacctgctgggattcgcttttgcgccaaggatccgtgatcttcatgacaagcggctgtttattcatggaaaggccgagcgctatccggggcttcagtctgtcatatcaacaacctgcctaaatatcaaagacattgagtcgcactgggatgaggtattgcgcctggcaacctcgattaagcaggggacagtcaccgcatcactgatgatgaaaaagttagccagttacccaaaacagaatggacttgccaaagcgctgagagagattggccgcatcgaacggacactatttatgctggactggttccgtgatcccggtctgcgccgacgcgtgcaggcggggctgaataagggtgaggcccgtaatgcccttgcgcgagcggtctttttgcaccgtctgggtgaaataagggatcgtgggctggagaatcagagttatcgcgccagcgggctgacattactgacagcagcgatcacgttgtggaacacggtatatatagaaagagctattgagtcactaaaacgaaagggtatcccgataaatgagcaactggtctctcatctttctcccctgggctgggaacatatcaatctgagtggagattacgtctggcgtaataatcttaagctgggatccggaaaataccgctcattacgtacagtcgataccgctttgtacaaaaaacagtcttag

SEQ ID NO: 225777 - DNA, 147 bp, Klebsiella pneumoniae
atgctgaatacaccttacagggcctttctggctgatggctcggtattagagggtgtcagtgatggcgaggggtatacgaagttgtttacttctgcacaggtacaggatgttctgctgcatatgataccggaggccatcaatgcctaa

SEQ ID NO: 225778 - DNA, 981 bp, Klebsiella pneumoniae
atgaagcagatgaccttcgccgacgccgagtatgccggcaagggcaagcagacccgcaaggaactgttcctgatcgagatggatcaggtggtgccgtggaaagggctgattgccctgatcgaaccgcattatccgaaaggcgaaggtggtcgcccggcgtatcccttgatggcgatgctgcgtatccatctgatgcagaactggttcggctacagcgatccggccatggaagaagcgctgtacgagacgactatcctacgtcagttcgccggactgagcctggagcgtattcctgacgaaaccaccatcctcaacttccgtcgtctgctggagaaacatgagctggcagccggcatcctctgcgtgaacaatggctacctgggggatcgcggtctgtcgctgcgccagggcactatcgtcgatgccacgctgatccacgcgcccagttcaaccaagaaccaggacggcaagcgcgacccggaaatgcaccagaccaagaaggggaaccagtattactttggcatgaaggcgcacatcggcgttgatgatgaatcggggctggtacacagcgtggtgggcacggcagccaccgtggcggatgtcacccaggtcgacaaactgctgcacggcgacgagaacgtcgtctgcgccgatgacggctacacaggcgtcgaaaagcgctccgagcatgccgaccgagaagtgatctggcaggtcgcagcacgccgcagcacctacaagatgctcgataaacgcagcgccctgtacaaagccaagcgcaagatcgagaaggccaaggcgcaagtgcgagcgaaggtagagcccccgtttcgcgtgatcaagcggcagttcggctacaccaaggtacgtttccgagggctggtgaagaacactgcacaactggtgacgctgtttgccctgtcgagcctatggatggcccgccgacatttgctggcaagcgcaggaaaggtgcgcctgtaa

SEQ ID NO: 225779 - DNA, 759 bp, Klebsiella pneumoniae; identical to SEQ ID NO: 217896

SEQ ID NO: 225780 - DNA, 384 bp, Klebsiella pneumoniae
atgctgtttcggaaactggtgttgttgggaggggcctgtaccttacttttggcctatcacggtggttattggcttagcgactggccgtggttgttttattatgcgttgatctcatggtggtttggatttagctggtatattttcattacccctaaagcagcttctgttccgggaaagaataagaaaaaggaaaaatcattgcctatcgttagtcaatctccgactcaccggtataaacagactgatagtgatgattcttcactgattttacacagcatttattactcatcaataagcaacgttcagtcggatagtatcgttaataatggagcagattgtagttattcggactcgacagattcaggttgcagtgggggggattaa

SEQ ID NO: 225781 - DNA, 507 bp, Klebsiella pneumoniae
atgacttcatcagtaaccgttccggccgtctacgtgggcacatatcaccagtacaacggcggcagtatttttggcaaatggtttgatttaaccgacttcgacgacgaagacgaattttatgacgcctgccgggcgttgcatgccgccgaggatgaccccgagtttatgtttcaggactgggaagggatcccgtctcagtttgcctctgaatcctctgttaagtgggcgtttatcgaggcattccggcaggcgcaggacgaaggacgcgctgccgcgtttgtggcctgggcggactataccggcgagtgcgactatgacgcctttgatgaggcgtattgtggcgaggctgaaagcgaggcggattttgcttatggctttgtggaggatcacggcctgttaaacgaggtgcctgaatccctgcgcgtctatttcgattatgaggcttatgcgcgggatctgttcagcagcggctatgtcttccatgaaggctatgtattcagcaactga

SEQ ID NO: 225782 - DNA, 768 bp, Klebsiella pneumoniae
atgatgaaaaaagaaacccttaacacgcttattctgcgtcacggcgaccggatgctgcgccaggctggctggcccgacactgttgatatggcgcccgtcgcccccgaaaccgtacccggctggcttgccgcctgcggctctctcagtggcgtggaaatcctcacgcttacggaacagctttgtcagccgctgacgtatggccgggcagcgttgttgctcgccagcgcccggcggctggcgggaaccccggctcgtctgcatctctttccggtgcaggcatatccgcatccggagcggctggctgactgtcaggttatccgcctgccttacgctcaggagtggctgacagcggcggaatgtgacgatctgctggccttcctgaaagcctccctcacgcagatatcggaaatcgtccaccgggatacgaagcgcatcgccgccgcgctgaagccgtccgtcactcctcgtctgatggacaggcggatcggtgactggcgcttgctggccgtggagtatgatcatgataactgcctggacgaagacgaaaccgacaggctggatcaggtcctcgatgccattctgattcgcgatgcgcgattctgcccggtcctgctcaccctggttaacgagcgggaggaaactatcaggagcgcaggggttatcgctgatcagctgcgttttacggacactccggtccggcgctggtttgatcgccgggttttaagggaaatggtgagagaggcccgcgccagcagaactcaggagtga

SEQ ID NO: 225783 - DNA, 156 bp, Klebsiella pneumoniae
gtgccggttgacctgcttgaaaccctgctgattaccgccgaacaggcattgtgggacagggaatggaccgcacgggatcgcaatctcccggtgccggaaagcgtaatgcgccgcctggcggatacagcaaaagtgcgggcattactgaaaagctga

SEQ ID NO: 225784 - DNA, 1074 bp, Klebsiella pneumoniae
atgagcgccacctatggccacccggccaccgaggcgctggtggccaccctcgccggcacgcaatatgacaccggcctcaatatccacaggctggagagcatcgcggcctacttccgcgaggtgcgtaagaaataccacgccttcgaaggccagctgaagggcaccgacagccgtatcctcgtggcccaggtgccgggcgggatgctcaccaaccttgaaggccagctgaagcagcagagcgccgcccaccgtctggatgaagtgctggcggaaatcccccgcgtgcgcgaggacctcggcttcatcccgctggtgaccccgacctcgcagattgtcggcacccaggcggtgctcaacgtcctgaccggcgagcgctacaaaaccattgcgaaggagaccgccggtattctgaaaggcgaatacggccgcaccccggcgccggtgaacgccgccctgcaggcgcgggtgctcgacggcgccgacccggtgacctgccgcccggccgacctgctgaagccggagctggcgcagctggaagccgacgtcagacgccaggcgcaggagaagggcatcacgcttgccgaaaacgccatcgacgacgtgctcaccgtggcgctgttcccgcagccaggcctgaagttcctcgaaaaccgccacaacccggcagcctttgagccggtaccgcaggcggaagccgcgcagccagtggcaaaagcagaaaaacctgccgcctccggcgtctacaccgtggaggtggaaggcaaagcctttgtggtcaaagtcagcgacggcggcgacgtcagccagctcagcgccactgcgccggtagccagcgcgcccgctgccgccccggccggcgccggcaccccggtgaccgccccgctggcgggcactatctggaaggtgttggccagcgaaggccagacggtggccgcaggcgaggtgctgctgattctggaagccatgaagatggaaaccgaaatccgcgccgcgcaggccgggaccgtgcgcggtatcgcggtgaaatccggcgacgcggtggcggtcggcgataccctgatgaccctggcgtaa

SEQ ID NO: 225785 - DNA, 369 bp, Klebsiella pneumoniae
atgaaaacagcggtatgggtggtggtgtatttcgcgatgtgttttctgcttttcacaggatggatgttcgcctttgcgcagtatacgccctataacgggcaggaacacgcgttttctctgacgtatctgcttaatttattttttcttcatgttgtgatggtaccttactacgagtttattcagactgaaacatacagcaatacattaatgagtatggcagatgaatccggtcagatgatacgttttcatcacgtagtgcctgttctctggatatatagtctgtccgcactcttaacttttgtggtttacattacatatgcaaaatggttcactcataaccaactgaaagaaaagcatcttccagaatga

SEQ ID NO: 225786 - DNA, 429 bp, Klebsiella pneumoniae
atgcagtatgtgaatacatgcccagccctgaatgttgaagagtctgaccgcctgtccttcatgccgtacctgttcggcacggattttatgctcgcagaattacaggtgtacgccctggccaaaaaatggatgcccggatatgagggcggcttctggcatttcatccgcctgccggaggggggcagctacatgatgccagacagtgggagggtacatctggttagtggcgaaaactggtttgatcgcatggtctgcgccgacgcagcgggcattattctgaccagcctggcgattaatcgccgtctggcggcccatcctgacagcagtaatccggcactgacccgcctttatatgctgcgtgatgcccagctctggaatcacatcacctttcacccgaaatgcagtgctatttacgccgcgctggactga

SEQ ID NO: 225787 - DNA, 222 bp, Klebsiella pneumoniae
atgaattcatcagtaaccgttccggccgtctacgtgggcacatatcaccagtacaacggcggcagtttttttggcaaatggtttgatttgaccgattttgacgacgaagacgaattttatgacgcctgccgggcgttgcatgccgccgaggatgaccccgagtttatgttccaggactgggaagggatcccgtctcagtttgcctctgaattctctgtttag

SEQ ID NO: 225788 - DNA, 192 bp, Klebsiella pneumoniae; identical to SEQ ID NO: 101358

SEQ ID NO: 225789 - DNA, 189 bp, Klebsiella pneumoniae
atgaaaatgggtgaacacatggagccggttgtcgagctcctggaagaactgaacggcaacaacaccgacgccaaattgaaactactcgcccttgttatctcggaatacatgctaaatgcggatgttactggcttcgaggtcaccgcggggaagatgaaagtttccgtagatataagcgtggaggaatag

SEQ ID NO: 225790 - DNA, 282 bp, Klebsiella pneumoniae
atggctgagttgcgcgcaggtgggctggcgataattattcgatcgcgctttcctgaaaacgtcggcaaggtcgttaagttggtggcttgtgttggcgaaatgaattccccctttggatgtggagtttattgggaggttgaagctatgtctgagattaaagggacgctttggcgtgtcaagtctggcttgaatggcttggcgctggctaaaaacctgatgcccattgacggcgacgacttcagcaatgaagaccagcgccagatggagcgggagcatgcctaa

SEQ ID NO: 225791 - DNA, 381 bp, Klebsiella pneumoniae
atgtttaatcctgataaataccgttctgttaaatggcagaagggcggtagagcctacccgctactcgactgcttcggcattgtgaatgagatacgtcgcgaccttgggctacctgaatggccggattttgcaggtgtgaccaaagacggcgggggcctcgaccgggaagcgagaaagctgatgctttcgctgaaacgttgtgacccctgtgaaggtgccggagtggcctgctattcgggttcaacggtttcccatgtcgggattgttgtgatgctcgataaccagctgcaggtcgcggaatgtaatccaggctcgggggttacgtttctgccactggcgcgatttatccgccgctttaaccgcgtggagttctggcaatga

SEQ ID NO: 225792 - DNA, 1032 bp, Klebsiella pneumoniae
atgccgatcatagcaccaataccccgtggcgaacgacgcctgatgcagaaagctattcataaaacgcgcgataaaaatcatgcccgcagactcacggccatgctgatgcttcatcggggtgaacgggtcagcgatgttgccagaactctctgttgtgcccgttcatccgttggtcgctggattaactggtttacgcactcaggtattgaaggcctgaaatccttacccgcagggcgctcccgacgctggccttttgaacatatctgcaccctgttacgtgagctgataaagcattctcccggcgattttggttatcaacgttcacgctggagcaccgaattactggcaataaaaatcaatgagataaccggttgccagttacatgcaggaaccgttcgccgctggttgccatctgcggggcttgtatggcgcagggccgcgccaactctgcgcatccgtgacccacataaagatgaaaagatggcggtaatccacaaagcgctggatgaatgcaacgcagagcatccggtattttatgaagatgaagtggatattcaccttaatcctaaaatcggtgcggactggcagttgcgcggacagcagaaacgggtagtgacgccggggcagaacgaaaaatactatctggccggcgcactgcacagtggcacgggtaaagtcagctacgtgggcggcaacagcaaaagttcagcgctgtttatcgctctgctgaagcacctgaaagccacttaccggcgggcgaaaacaatcacgctgatcgttgataactacattatccataaaagccgcgaaacacagcgctggttgaaagcaaatcccaagttcagggtaatttaccagccggtttactcgccgtgggtgaatcatgtggaacggctatggcaggcacttcatgacacgataacccgtaatcatcagtgccgctcaatgtggcagttactgaaaaaggtccgccattttatggaaaccgccagcccattccccggaggaaaacatggtcaggcaaaagtgtag

SEQ ID NO: 225793 - DNA, 243 bp, Klebsiella pneumoniae
atggatataaataatgttaacgctgcttcaatcttatacgaaaagcttaaggaacttgaagggcaatactcactcgtcgaacgcggggaagggttaggcatcatgattcagagtcgttatcaggatgatgattttgttaatgcggtacgcaggagtgttaccggagagcttagccgacgcattggagcggtaaagcatcagcttactgaactaggcgtaacgtcattcacaaaagagcagtag

SEQ ID NO: 225794 - DNA, 924 bp, Klebsiella pneumoniae
gtggcaaagcaaaagttcagaatcaccaactggtccacctacaacaaagctctcatcaaccgtggctccctcactttctggctggatgatgaggcgattcaggcctggtatgagtcggcaacgccttcatcacgaggaaggccccagcgctattctgatctcgccatcaccaccgttctggtgattaaacgcgtattccggctgaccctgcgggctgcgcagggttttattgattccatttttgccctgatgaacgttccgttgcgctgcccggattacaccagtgtcagtaagcgggcaaagtcggttaatgtcagtttcaaaacgtccacccggggtgaaatcgcacacctggtgattgattccaccgggctgaaggtctttggtgaaggcgaatggaaagtcagaaagcacggcaaagagcgccgtcgtatctggcgaaagttgcatcttgctgttgacagcaacacacatgaagttgtctgtgcagacctgtcgctgaataacgtcagggactcagaagccttcccgggccttatccggcagactcacagaaaaatcagggcagccgcggcagacggggcttacgatacccggctctgtcacgatgaactgcgccgcaaaaaaatcagcgcgcttattcctccccgaaaaggagcaggttactggcccggtgagtacgcagaccgcaaccgtgccgttgctaatcagcggctgagcggaagcaatgcacggtggaaatggacaacggaatataaccgtcgctcgatagcggaaacggcaatgtacagaatgaagcagttgttgggagattcactgacgctgcgtgactacgatggtcaggtagcggaagctatggccatggtgcgtgcgttgaacaggatgacaaaggccgggatgccagaaagcgtgcgtattgcctga

SEQ ID NO: 225795 - DNA, 396 bp, Klebsiella pneumoniae; identical to SEQ ID NO: 145063

SEQ ID NO: 225796 - DNA, 900 bp, Klebsiella pneumoniae
atggagcagattctgccatggcagaatatgaccgctgtcatcgagccgttttatcccaaggcgggcaatggccgacggccctatccgctggagaccatgctgcgtattcactgcatgcagcattggtacaacctgagcgacggtgccatggaagatgccctgtacgaaatcgcctccatgcgcctgtttgcccgattatccctggatagcgccctgccggatcgcaccaccatcatgaatttccgccacctgctcgagcagcatcaactggcccgtcaattgttcaagaccatcaatcgctggctggccgaagcaggcgtcatgatgacccaaggcactttggtggatgccaccatcattgaggcacccagctctaccaagaacaaagagcagcaacgcgatccggagatgcatcagaccaagaaaggcaatcagtggcactttggcatgaaggcccacattggtgtcgatgccaagagtggcctgacccacagcctggtcaccaccgcggccaacgagcatgacctcaatcagctgggtaatctgcttcatggagaggagcaatttgtctcagccgatgccggctaccaaggagcgccacagcgcgaggagctggccgaggtggatgtggactggctgatcgccgagcgtcccggcagggtaaaaaccttgaagcagcatccgcgcaagaacaaaacggccatcaacatcgaatacatgaaagccagcatccgtgccagggtggagcacccgtttcgcatcatcaagcggcagttcggcttcgtgaaagccagatacaaggggctgctgaaaaacgataaccaactggcgatgttattcaccctggccaacctgtttcgggtggaccaaatgatacgtcagtgggagagatctcagtaa

SEQ ID NO: 225797 - DNA, 327 bp, Klebsiella pneumoniae
atgtgctgcactgacatgcctgcgggggcgctttcttcgcatgttgaggccttccagacagtaaatccggtgtgttttcttgtggttaacaggccagccttcccgtcgcagctgaatatgaatacgcgggcaaccgtagcggatccgggtttccgctatttcccggatacgcagggttatcgcccgatcatcccgccggctctgccagtggtaaacggttctgctatgcatcagcagtccgcatccccgtcggacactgatacggtaagcctgccgcagaaaatgtaccgccttacgcttctgagccggcctcagagctttttttga

SEQ ID NO: 225798 - DNA, 522 bp, Klebsiella pneumoniae; identical to SEQ ID NO: 92461

SEQ ID NO: 225799 - DNA, 348 bp, Klebsiella pneumoniae; identical to SEQ ID NO: 219449

SEQ ID NO: 225800 - DNA, 204 bp, Klebsiella pneumoniae; identical to SEQ ID NO: 192392

SEQ ID NO: 225801 - DNA, 366 bp, Klebsiella pneumoniae; identical to SEQ ID NO: 218047

SEQ ID NO: 225802 - DNA, 330 bp, Klebsiella pneumoniae
gtgttcggtgaagcgggcccggaagcgattatgcccctgacccgtggcgctgatggttcgctgggggttaaagctgtagggcgggaatcgccggcggtacagaacgctgcgaggcagcagcaggaaagacaacttctttcaactggtgacatcaacatcaattacaacctcactggtaaaccggatgatgtgatgatgcagacattggatgcccacggccgccgcctggttaaacagataaaatctgaactgacgagcgacgtaaacaatcctcaaaatgccttcggtagagcactttactccaaccttcagcccaaaaaaccacgataa

SEQ ID NO: 225803 - DNA, 192 bp, Klebsiella pneumoniae
atgaaacttgcaccacaaagccgcgatatcctgcgacagtacaaagccctgattaatgcccgccgccgcgatgccggtcagcgggaactgaccactgcgcaggtgatggatgaaatctgcgaatacatgacctgtcagtgcgccgtctatattggcggccatttcattcttcaggggggaaaggcacgataa

SEQ ID NO: 225804 - DNA, 240 bp, Klebsiella pneumoniae
gtgacagcggcaacggtggttgaccacatcatcccgcataaactgaaagaggctctgcgctctggtgacagccaggaaatagcgaaggcgcaaaagcttttctggagccggaagaactggcaagggctgtgcaagcagcaccacgactcaacgaagcagcgaatggagaagcgtggcaccatgatcggctgcgatgaaaatgggatgccactggacccggcttctcattggtttaagtga

SEQ ID NO: 225805 - DNA, 258 bp, Klebsiella pneumoniae
gtgtcgattggtgctcgatatgaagagcgcatcgccgagttggagagtcagctcaaagcggcagaaaacaatgagattgatgctcgctgtcatatcgccgaactggagtcccgcaccgtgaagctgccaaagctcaaaatgctcgaagactatctcgccgaggtagccattgaagagagaaaacagattttggtcggcgtgaaacttgattttcatcgtgcgtgtgttgccgctggcatcaatgtggaggctgagtga

SEQ ID NO: 225806 - DNA, 324 bp, Klebsiella pneumoniae; identical to SEQ ID NO: 222221

SEQ ID NO: 225807 - DNA, 1260 bp, Klebsiella pneumoniae
atggcaaggcacacaagaccattaaccaatagcgaagttaaagcagcaaaagccaatgataagcctgaaacgctttatgatggcgaggggctggagttactgataaagccaggtagtaattccaaactatggcgctttcggtactaccgccccatatcgaagaaacgagcaatgatatcatttggggcatttcccatggtatcgctagccgatgcccgtcggatgagggaacgcgctcgagccctgttagaacgtgatatcgatccgcaaatccaccagcagcaacttcgtgatcaagaactgattgccagccaaaacaccttcgctaaagtagctgccgattggtatgagttgaaaaaaacagagcaactggcacctaacaccattaaagatatttggcgatcgctagaaaagcatgtcataccttggattggcaaccgtcctatcaccagcctagttgctcgtgacttcattacagctctggatccgattaaagccagtggcaaactggaagcattaaagcgggttattcagcgtatcaacgaggtgatggattacgcggtaaatgctggtctgatactttctaaccccgctgctaagatccgtaaagcattccaggcacctgtcaaaaagaatatgcctaccatcaggcctgaagcacttcccgatctgatgaaaactctttctgttgccagcatcgagttacagacccggctactgattgaatggcaattgctgaccgtaacccggccagcagagtctgcgtcagcccgctggtctgaaatagaccttaacacaagcacatggacaatacctgctggtcgaatgaagatgcgtcgcgagcacaccatccccctcccctcacaagcgttagcgattttggatgctatgcgacctatcagcggccaccgcgaatacattttcccgtccgccaaagaccccaaacagtcgatgaacagccagactgccaatgcagcgttacgccgtatgggctacaaaggcattcttgtttctcatggtttgcgggccatattcagtacagcagcaaatgaagccgggtttccgtcagatgtaatagaggcagccctcgcgcatgtagacacgaacgaagtgcgccgcgcctacaaccgttcaacctatctggaacaacgtaaggtattaatgagctggtggggcgaatttgtagaaactgcagctaccgggcaaatgttggctgccgatggcgcacagagattatatctgattggtaagaccgcctaa

SEQ ID NO: 225808 - DNA, 1068 bp, Klebsiella pneumoniae
atggttgatgaaaagttatctaaaagtatttgggaagaaaaagagatgcctccgctggagtactgcagcatcatcagagccgctaatctactgaattgtaaagaagaagattttttacactggcatgatgaggggcttataacactttctgtcaatttacgtgaagaggttcctgctttcattgtctttgaaagtgagaccgcgctctttgaggctaatggtccagtaatacaaaaggcatatattgacgaagaaaatgatggcagaaaacgagggattctcattgaggaaaatggtagcaaaagagttatcatctctgaagagaataacgaagacttgatattcattaacaaagatgaaagagaaaaaataaattcacaattagacaaaaacaaagcaataatggaaagtttaattcgcaatacattttataaacactcacaagttatcctacctaacggccatataaaagtaatcactacaaataccaatgaacatacatttaaaaatgagatatatgggtgttatatttatggtatatgggaaataagtgatgaacaagatctaaccaatgatatgaatagtgccagcgaaatattcccttttgagcttaagcctaaattaatcatcaatgatgagatacacaacgtaacagccacatctgacgaatttggaggcttcacccagaaagatattttcttaacaaagtctgacgtagagaaaatatttcagtgcagtagattaccgcaccttacgcagcaagaaaaatcaaatttaatcgagaaaccgattgacactccggaaaaagcacatggaaacagcatccgaaatgaagagttgaggatggagctaataaaaactgcagaaattattttaaaaaaattccctgaagaatgcaaaagtcgaaaattattaatcagcccagagaaatgggctgaagcaataatcaaacacagggataaccctgaccctgccattccaaaattttttatgtggactgaaaggacaataataaaacaccttcgcgcatacttaaagacaagaaattatatagtcaataaactgtag

SEQ ID NO: 225809 - DNA, 198 bp, Klebsiella pneumoniae
atgaaaaagatcctcaccaaacaggaagtaaaggcaattctgcgtataaaatctgacagctcacttcaggacatgattaacatcggtgactttccaccaggatttcgcataggtattcgtcgcattggttggtttgaagatgaagttattgaatggataaacaaacgcatccatgagtctcggcaccgaaatatatga

SEQ ID NO: 225810 - DNA, 234 bp, Klebsiella pneumoniae
atgagtaatataaaccacatatgtaacacatcaactccaacggtattggacaaagtgatacagcaagaaacgagagacacggtcggtacatccctcgcgaaattacttgatatggaggcttcgctgacacctaccctagaaaatatccagcgtatgtatgacgttgtggacatttaccgtcagcaccagatattcaaggaactccagtcattcagaaggagacaccatgtctga

SEQ ID NO: 225811 - DNA, 1044 bp, Klebsiella pneumoniae
atgtctgatatagccacaacaatcaacgcaatccgcagagtggccgctgccgccactcaatacactgaaattctcgtgccggaatggctgccagaaggtaaacgacaggcttgtgaatggtcgtgtcgcaatcccacccgggcagaccgtcacgccgggagcttctctgtttcgcttctagatggccgctggcacgacttcgccacgggtgacggcggaggcgatcttgtatcactgggggcgtacctctggaacctacgccaaatcgatgccgctcgcattgtggctgacaggctgggcctctgtctgcccccattgtgtaagtccgatactatgaacaccggacagcgtgaggctcagcgagaacggttggaggcagcagagcgggatgtcgtccagttgaggcagaccgaacaacagcagcggcagcgccttcataaactgaccgcctgcagggcgtttgaattactgagtaatgcagagagggccagcccctatcatccgtatctgaccgctaaacggctactgcctcacgggttatatcaatccggtcatgatttgctggtacccctgcacaacgtgcgcggcgaactggtaaatgtgcagactatccgcccggacgggcacaagctgtttttgcgtaacgggcaggtgaagtttgcttttcatgtgatgggggactttgaccaaatgagcccggacgccccacagcatgacgtgtatgtgtgtgagggctgggccaccggggccgccctactgcaattctgggatattcaggccgtagtgtgtgcaatgaacgcaggaaaccttaaacatgtggcgctggcgctgcgtgggcgctacggctcaggcattcagatggtgattgccggggatgatgaccggacatctaaagataaccccggtgaccgggccgccaatgaggcggcgtatctggccgggtgtatggtggtctccccggagtggccgcccggtgcgcccgtcgaactgtccgactttaacgacctgatgatatggacgatagaaaatgagccagaagcctga

SEQ ID NO: 225812 - DNA, 1848 bp, Klebsiella pneumoniae
atgagccagaagcctgacggccaaccagcaaaaaccacaggcgcgggacagcgcaaaaagccccgcgccaaatacccgaaagtcagcccggcacgtccgggctatgccacccatgcacagtatgcgcaggtggatggtggccagatactgaaaccgggcctttactggcacggggtgcgcgatgccaccaataccgacacgcttatttgctctccactggaagtcatcgccatgaccagtgacgacaaaggggaaaactacgggcggttgctgcgctttcttaccccgaaaggcgagtggcgcgaatgggccgcaccaatggaaatgctggcgggtgacggcagtgaacttcgtggcgaactgctgcgcatgggtgtgactatcccgcagaagcaacggcaggcgctgacagattacctgatggattcaaccccaaaacgccacgcgctggccgccacggccacgggctggcactcgcctgatttgttcgtgatgccgggtggcattatcggtgcgggtgatgtggtgtttcagtccacggaggcaggctctcaggaatacaccaccgcaggcacggcggagggctggcgcgatagtgtggccgccctgtgtcgtggcaaccccgttccgatgatggccgtatgtgcggcgctggccgggcctctgctgtcgctgctggacgtggacagcggcgggttccacttcgtgggcgacagttccagcggcaaaagcgtgggcgcactggtggcctgtagcgtctggggtgagcctcgcaactttaaacgcaactggaacgccaccagtaccggactggaaggactggcgaccatgcgcaacgataccgcgctgattctggacgaaatcggcgaggctccagccaaagacattggcgggctaatttaccagttaggcaacggcacgggccgccagcgcggcaaggtgtccggcatggcccgcccggtcaacgtctggcgcactatcatcatttccaccggggaaatgactgtgggtaagcacatggaaagcggcggccagcgcattaaggccgggcaggaaatgcgcctgctggatattccggcgcaacggctttacggggcgtttgattttctccacggcatggagctaccgcacaacccggacaacgacgcggagcgccggggtgctggccagaagtttgccgaaacccttcgcggcaatgcggccagccattacggccacgccgggccggagtttgtgcgctggctcatttcccgcagccagaccagcagcaccagcaataacagcgacagccagacgctgggggaattgttcgcccggctgcgcgaacaattcccggtcagtaccgggcaggaagcccgcgctgccgcgcgttttaccctgtgtgcgctggcgggagaaatggcaatcacggcggagattctgccgtggaagcagggggaagcgctggccgccgtgcgggccatgtttgaggcgtggacggaataccgggggcggggccagtccgaggatgtgaagattcttcgcgccgttgccgggtttattgcccgccatgctgcacgctttgagggaacgggggtacacggggaggccgtgaacaaccgtgcaggatggtggaaaccggacagcaacggcggacggctgtactggtttttacaggatgcactatgcgaggcagccagcggctatgacctgaaacgcattgcggccagtctggatgatgcgggcgcaattgctgaccgtgacgtggacggcagacgacgctttaccaaacgcgtatcggtcaacggggaaaagcaccgggtttatgttatcagccagagcgcattgctatgcgccattgatgaataa

SEQ ID NO: 225813 - DNA, 147 bp, Klebsiella pneumoniae
atgtttatttattgttttatattgtttttatttgtggcggttcccacagttcccaccagtcccaccgcttttttattttctgaaaacgggtttattctgttttattcatcaatggcgcatagcaatgcgctctggctgataacataa

SEQ ID NO: 225814 - DNA, 270 bp, Klebsiella pneumoniae
atgcaacgaccattcattcttccgcccgcgctttgtcacttcattcagtcgctggagcctcccgcagccgctatggttgctacccttatcccaccacaccatgaatttacgtttcactttctggccttgcgccgttctgacctgaacgacaggccgcaccgcgaatcagtcaccgcacccgatgaactgaccgcccgcatcctgctggccgggaactttgtgctgtgctttgccgagcgcgtccctgctcaggggatccatcatgcgtaa

SEQ ID NO: 225815 - DNA, 321 bp, Klebsiella pneumoniae
atgcgtaacgccggatatacccgaatccctgacctgctgattcagacgatgaaaaccgctgacgccgcgcaggctaagcgcctttttgatgatgccgaacttcgcgccgacagaatggccgcgcttctggtctgtatgggaaaaacgccggaacaggcggcggacactgccgacacatccccggatgaaatgcttgacgttggggcgtcgctggcgctcaccgtcgagattacccggggtatgcatgatgtggtggacgtttaccgcctgcgccagatagtcaaggaactccagtcattcggagagggccgcaatgtctga

SEQ ID NO: 225816 - DNA, 1005 bp, Klebsiella pneumoniae
gtgattgaacttcataaaaatcagttgattatctcatttccggaagtccatccgaaggcctctggaacagtctcatttcagcgaacattacgtgtacctgacaatgaccgcatatatccattacctgccgggcttggaaggttccagttggctcatatagataactacgctgaaaaaattcccgcctgtatgctcaaaaaaggcggtgtactcatgccaatatataattcagaggccatgtggattaacttcagcagtgattatcctatagctatgaagattgctacaggaaaaattaatgccattacggggttatcatggcagaatgaattatctcatcacccccaagatttcatcgatttatcacgtcaatattggctggatggctttaatgtcggccagggtacagtacggcagtttacctctgtacctttacaatcaggttatacagtagaagagcaaatcacagggtctgcagaagttggtggattacagattattgcctggccgatgaaagcatccgtatatgatgctattcagagggctaaaagagaaagagaagaacgtgaggcaaaacgaaagaaacgatgcaagagttatctggagccagaatacaatgatctttactgtctgatgggaatgggagctggtggccgaatcactcagaaaattaaagaggatatatatggacctgcagcgtgggatacaaatcatagttcacgctgttttatccatatgattaatgcatctgactggcacaaactaacaggttatccaatgccccgcccccccataaccagcagagattacaaaaataataagttaccatggtttaaatactatgaggaaaacacaaagggactaactggttcagtcatactaaacaaaataaaaagcatacggtttttatcaggtaaaaaacaaagagagaatgtttttacaaatgaagatgacactattcttatccatcaaagtgataaggccgtccgcaatggtaaattctga

SEQ ID NO: 225817 - DNA, 870 bp, Klebsiella pneumoniae
atgatgacaaaaaataaaataagaaattccgattaccaccgatatgaatttgccgctgaatttatcattgaattatcggcaatgagtgcattgtttcagcatccgaaagccacagggattcactcattgcaacgtatatttgacttgatatacccatggggaactatcaacttcacagaagaatgcttagatgataactgtaatcctgatggtgttgagcttgttcgcgttatcatcaaaaacgatgtgaatatatacatttaccgtaaaccagaagttgtgtggtttgatgtcagtcaattgaaggagggagagtttggttccgctgcatatcaggcagtagctgattatgctgtgaataccgggcgaatatttattggcgatcctgcaggactatctgatatcgcgatacgtagacgtaccgaggcgatgctgtcttcagcgatcaaacatggtggcaccgaacatatcgagccgcatgaacgccagctctacggtgaagatatgctaggaattccaccattaaaatggcgcccaggaaataatatttacaatatcagttcaatgataggaacatcattgtgctcagtgaaaaacactctgccggagatagataatgtcagatacgacttcgcaacccgaaccttccgcacaggtgaaggtcagccctttactgatggaatgctacgcgcttggagttcctgtccacgagttagagcggcaggcgctgggggcgcaacacttaaaagaacgatattcctcaataccctggcatgcgcagaaagcggagaaagatcccgactactggaacaggttctatggcagcgggataaattcgtaggagaggcactgacaagtactttttactag

SEQ ID NO: 225818 - DNA, 270 bp, Klebsiella pneumoniae
atgaatccgcgaaataaaatattcaaaaaaaacactacaataccaataataagcatttgtaacctcttctatatcaatctgttaatttttagtggctatttaatcgtctcggatttcttcaggaccgcgtacttcgtcgaccaagatctctcccaatattctagtaaaaagtacttgtcagtgcctctcctacgaatttatcccgctgccatagaacctgttccagtagtcgggatctttctccgctttctgcgcatgccagggtattga

SEQ ID NO: 225819 - DNA, 402 bp, Klebsiella pneumoniae
atgttcattcgttttatcataatgtgttgtgtcactctggtactagcttcctgtgtaacgggagagaaattttctaaaattagacaaggtatgagccgtacagatgtgattgacaagctggggtctcctgatggagtgcaaacacaaggtacagctgaactgttaacctattcgaatcgattcatgtccgactggtcatgggataaagcggattatcaagtgttactaaataacggttttgttgttcagtatggtgcatccaatatttatcacgatacgagcatgggggaaagaatgatagcggctggtcaaatcatgcagcagaatacccccgtacaaactaaacctgtacaaaccaactgtcatcaagttggcacatcagtatattgctcaagttattaa

SEQ ID NO: 225820 - DNA, 339 bp, Klebsiella pneumoniae
atggtaatgctgcaaaactgggtgaatcaggcccggcaacactgggcggaattccagccaacgaagtatcgggagctgaagaaagcgggaacgttggagaccgcgcttcaggacgcggcgaagcggacagcggacgaaatggaccagttggagaacagcgggtatcgggaacacgaggcgtgggagatgacccgcgagaagtacctgtttccgcccgaggaacagagcctgaaggaccagcaggacgcggagccgcagcgcagcggggcggcactcagcgaggtgatggggatgccgctgtacgacgaggacgaggaagccgaccagcatcaggcgtaa

SEQ ID NO: 225821 - DNA, 126 bp, Klebsiella pneumoniae
atgaatgatatcctctctccggaggagtatcaggcggcggtcgcgctcataaagagtgttgccctgccggatgatggggccttcgcactgttcgaggtcggacagaaaccacgggtatcgaggtga

SEQ ID NO: 225822 - DNA, 330 bp, Klebsiella pneumoniae
gtgggattgagtaccaacctcgccctttgcatctggcctgtcattctcccagcccgtcagcaaccatgtcttccgtttcccgttttcatcgagcgacaataccgccgttacgccatcatggtggatacgcacggttttcttggccgggacattcttaacttcggtacccagcgccacagcgcgaagcgcacgggcgacgacgcccggatcacgcttgataccaatgtgctcaagaccatattggcgattgccgtagacaaaatgcacgtcagcgctaccgccgtaccacacgaggtcaggtcgcagattttttgccacatcccgtcatag

SEQ ID NO: 225823 - DNA, 1920 bp, Klebsiella pneumoniae
atgaacaaagaatggcaattgccgcccacttatgaatcggaaaagcagaaatcgtacacaatcgccgagtcgttgattgaagacttcgcagaaggtagcttcgcatctcccgatgcattgatcacgtctgtgacagagtacttctgcgctcaggatgatgcagaagatgctcttaagaggtttaccgcccacctaagcggttcccacgaggacttcgatgcgtcggaccatccgaaaattcaggcggccttggtaattggaattgtaacggtatgggcctcttcagaaaccgaaaaccggtatacagccttcaaggctctcgtccgaaactcatggtgggttgagcatttgtggacgaaagtggcactggttgtagctctaaaaaatgatgttttcaaggaaacactcttaaatttggccgaacaatatttcgtcgatgctgaaaaaaatctgcttcatgaagacgtagttgatccatcctatccaatcaccctcgatgcaatttggtatggacacacctgggaaagtcgggtcgataattccagttggtcatggattgaattactggcgaagctcgctcccgacaaactattaaaatggatgagtgcaacaaaaaatctagtcttgatcaatcgagtactcgaaagcccggagttttaccgtaactacgatctgtgggaacaaatcaccctcggatcttcaccgagtttccaaagcgatggttcatggaatggtgccctattgcttccctgcctactcaggcacggaagtacaaaaatcatccaccttgccaatggccgcgaagatgatccatctgtgctagagcagcgcgtcaggtcattgctcgcttgtttcgttgctactgtcgctaaaagatcagatttcgagggtctgttcaagcgatggggtacatggctcactcgccaacaccttaacttctctgataacagttcggatcaaaaacgacctctaagcagccaagatatattattggcattagccgaaaaactcacacagcccttttccccaaccatttccgaccaattgaatttttcgtgggagcaatgggtttaccaatccatgctggcacttttacattcgaactaccccgataagtttgcgaaaccagacgtcagtgccttcatcgaagaatggaacttgacacctaccgagtggaactcctctaaaggtaagtcgcttcgaagtcatgttagtcaatttcatgccaatcagcctaacaactatgcttgccgggtgctcgggtattccatcgccttgagcgaagacttcacctgtcactggctgagtatgtggaactctagcgttgcgctgagagaaatcctcgaattccatcccattgataggatttccaaagaatgggaaccttcggatgcttcaggactgatgcgtacattggttgacgtaggcctaggaattctaatctgtactgcagacgtacaagaaactctcaatcccgaaatacttaagaagtccgccgcgctatttcaagcgctgtgggaggctaccactgagatgttaagcattgacttctatggtgaagacttctggccaatcatgcagcagtacctagtcattttccggctacggtggacagttgaagcgaagaatgcgaatgaagatcattacagcacttggctggatcaggccgcctacccaacgtcactggaaacattggccttagtctctagcaatccctgttcactcataagactgcttcccctgcttgtgcaaaaccatattcctaaagaagacttaaaggtcttgctcagccaggccggaattgacttagcttctctcgcatcgagtgcagccagataccagaatgggcctgagaagaaattcaagatatatcctcgtcacgtcaacttgattgaagaattagctaaggtcagcaaatga

SEQ ID NO: 225824 - DNA, 636 bp, Klebsiella pneumoniae
atgagtaaattatcgtcccggataaatgtcagtacgaccgagtcggtggtagacataaaatataccccgaagctactcataccttgcgaggcgtcctaccaggtcgaatccagtcatcgtttcccatcttttgatgccatcagagcccgtaaagatgctctgaatgtacggttagtcgaagaatttgaaacagcaattagtactgcgcaacaggtgtggataattgacaagcatttattttctgcagatggtcaggaacccgaccatagtatacgaattcagaaagttgtggattggttttggacagaccatattgaaacagtaaagattttaactggttatcatgattcaaagaaaaaaatcatggatgatttcgagatcttaaagcagttagtaacagaaaatcgtgccaaacttgccccccccatgacaatcgaggtctcatttaacctcagtaacgccaactgcattcacgatcgctttgctattatcgataacgaattatggcattttggcgcaactgtaggcggttttcatcgggatgtaaatgccgttagtagaggctggaatgctgatgctcatgatgcagtgcagttttttgatacagtttggaagatggccaacgagaaaaaatag

SEQ ID NO: 225825 - DNA, 1749 bp, Klebsiella pneumoniae
atggaaagtacagaaagcagtaacccctgtagtaaattgactgacgacttcgaacatgcggtcgtgcatgtcgctgtggttgtaccaccaagctctacatctgagcggtctcctctacgtttgctgtttgcatctgtctggttgctggcatcaggaaggcaagctccttcaagacctcccaagccttacatgaaaaaatttagcaaagaaggcgctatagcggtcgaccgtatagtcatgaccgcagaagaggccatccagtggtatcgaagtgcatcggaagaactttgtacaccatctccccgtcatggtttccgggcgaattctgacgacgaacccctctcagttggcaggctaagcgactttccaagttggcctgtactgggcatacccatggaaagcgaagacatcgcgctgaaatctgagcgttctacactccccttccgtaaccttggcattatcaggtattcacgtcgaatttcagacagtcaggaatggccgagcttccttgacacagctggacaaagcaagcagtgccaggaagccttccaattcctagagcaccacatgtacgtcgattttagggaatatcctgaatatttgggtgggatggtactcgctgtccctgattgcgacgttcattccgtccgacagttcgttgagcccaaagaggacggttccgaatcgttgtacttccatgtgaggccccacccaggccgtaaactccaaggtctaagcttgacctcaatggaaggacaggaagggatgctcacctccttcgatacagttacggtaccggaagatggcttggttgtgattgaaagaccgtcttccatccacggctccggtcttgtccttacacatacggaacgaggggtcttactgcaaacgcccatgcgacagttccttcgacaaatgaacatgaggattgacgtgatcgagcgacgcgtcaaggttactgccccagagacagataaaaagaagagcccagtcaatgagtacttcactgaaaaaaaaacctttgcgtcctcacaaacattgggtgaagcaccgaacacgactgacgccttccagcgtttgctagacgcgaaaaacgagcgtctccttaattacagcgctcaattatatgatcagacgtggtttgcggctgaccagcgcaaggaagcgctcgagcacatcaggaaaaaacttaagcatgctcactcaagcatcttcatcgctgatccctacttcagcgcaaaccaaatttcccaatacctatttgctattgagcgagacgagatcaagatacaaatccttacctcaggcagtgctttcaaacagatcaaagaagcggaagcaagtcccgaagccgatagtgaggcggcgctagacgcacaccagacaatgctgcaaaacctggatatattcaaagccagccacagaaacagcattgaaatcaaagttgccaatacagaaaatagcctctttcatgatcgattcatcgcggtcgatggtcgtgtatggatgataggtagttctctgaactctatcggtatacggccaacgctgaccatgcgcataccccatggcgaaaaaatcctcacccacctcatggacctttataataaggctacccctttgaaagacttaaaagtcctgaaaggaggacccaagaagcaatgcgcgaattacgggcgcggaatggtggacgcgaaagaggcgcaggacgaggaaccgcgcggcgcgaaggacgttaataatgagtaa

SEQ ID NO: 225826 - DNA, 714 bp, Klebsiella pneumoniae
atgggccttctgtgccatgcggtacagttcatcacgctgcttcagcagcgcattatcttcgccacggtgacgctgcccggggtcacatattgtatcccgctgtggcggtgttcttcgttgtaccagcgggtaaatgtatctatagccattggtattgaccatgggcacttcaaccgactgcctccactgaccgaatggctggatgatggtcgcagtatgcagttgaaacgaccgtttggttacgtctcgatgaatggtcgagaatggaacgtccctatcatcaccattgtagacggtgcttccataccgcgagttttctggtccctgataggtggacagtttgaaggggcttaccgtaacgcatccatcgttcatgattatttttgcgatatacgccctcaaccttggccagacgtatatcggatgttccatgacgcgatgctatgcagcggtgtgcccagcttgaaggcgcgaatcatttactacgcggtatatcgattcgggccgcgctgggtcaatgttccatcgctcgaactggcaagctttgggttgagtaaaggtgtttcaattgtcccaacggaattgccagccgaagttttcaatgcagattcttttatcgcggactgcgaactgatagagcaagataaccttgatcttcctgcgattgagcggcttgcagacgcacgaaagtcaatgttcaaaactgctgactag

SEQ ID NO: 225827 - DNA, 2454 bp, Klebsiella pneumoniae; identical to SEQ ID NO: 222261

SEQ ID NO: 225828 - DNA, 222 bp, Klebsiella pneumoniae
atggaaaagctcagatacgcaaagttgtcaaagccaaagggtaacgaagctgatggttactccgttaataatgactttgaaaaagtttatttaaaatatgaagctcaagggttatctaatcaagttgatgcaatgatggatgactggatagataatcgcgtacagaccaaagaggctcatatctttaaaaacataaaaaagcaccatttaataaataaataa

SEQ ID NO: 225829 - DNA, 975 bp, Klebsiella pneumoniae
atggataatagaaagatagaaaaaatactaagaaaaaacagatatattaatgcgcgattcgcaggtcattttgcaagcttcacaagtttgtggaacgcattatttgctcctattatcattggtcttggtgtatcctatgtttttcaaaaaaaagatattaccaatggaataagtgatttcttttttatagcttgcataatgtttttcattctccatctaatccttgcatggggcgctaaatatttggacaaaaaagatgactctacaatcgagcttggtgaattaactaaagaatataatgatagagtaagtgagattgagataatccgggaaagaatggtacaagaggacaaattatctactactcaaaagcttgtcatttatttaacaacattgcaagtcaatagtcatattcgtaagatcctcattgctaacaaagagaaaaaattgactcttgcagattttcccattgataccgaaagttttttttcgactgttctaggttatttatccagaaacagagaaacactatttagttacaagagtgaatcaaagtttaatatagctctttacatttacaacaaagaaagaaatcatttagaagtcatatgtagaatatgtgatgacagaattactaaaaaaaacagagcctggaaacctggttttggtcacgttggtttgacatatttacacaaagaattaaaaatatgtccagacattacaaaaagtaatgagttaaaaatatccaatcctgccgatagaaagaattattgttcattcctttcagttcctattcttgcatatcagcaaaactccagtgaagaagagtgcctcggggttcttgttctaacaagcgcactgccagaccaattttcacttgagagggatcgtgactttcttttgaatcttagttcattaatagcaatatactcagaagttatttacaaaatgtatgtagatacaccggaaaattaa

SEQ ID NO: 225830 - DNA, 444 bp, Klebsiella pneumoniae
atgaatgacgtacttgatgaaattgaccgggcgatcctcacctgcctgactcaggatgccagagtttcgctcaaggtcctgagcgcgcgagtggggctgacctcaccgagcaccgccgagcgggtgaagcgcctggaggagcggggtgtcattcagggctatggggcgcgggtaaatctcgccgcgctgggctatagcctgcaggcgctggtgcgggtccgtccgctgcctgggctgctgcagaaggtggataaatatatccaggcgatgccggaatgtattgaaagtgacaaggtgaccggggaagattgttttgtgatgcgtctcgtggtgcgcgatattgcccagctggataccctgctggacggtctggcggagtatgcgcagtgtaacacctcggtggtgaaaagctcgccggtaaaaaggcggttgccaccgctgtga

SEQ ID NO: 225831 - DNA, 678 bp, Klebsiella pneumoniae
atgcacttcctgaatatgttcttctttgacatttatccgtacattgcgggttcggtgttcctgattggcagctggttgcgctatgactatggccagtacacctggcgcgccgcctccagccagatgctggaccgtaaggggatgaacctggcgtcgaacctgttccatatcggcatcctgggtattttcgccggccacttcctcggcatgctgaccccgcactggatgtatgagtccttcctgccgatcgacgtcaagcagaagatggcgatgatcgccggcggcgcctgcggcgtgatgaccctggtgggcgggttactgctgctcaagcgtcgtctgctcagcccgcgcgttcgcgccaccaccaccggagcggatattctgatcctctcgttgctgatggtgcagtgtgcgctcggcctgctgacgatcccgttctccgctcagcatatggacggcagtgaaatgatgaaactggtcggctgggcgcagtcggtggtgacgttccacggcggcgcgtcacagcatctggatggcgtggcgtttattttccgcgttcacctggtgctgggcatgaccctgttcctgctgttcccgttctcccgtctggttcatatctggagcgcgccggtcgaatacctgacgcgcaaataccagattgtccgcgcccgtcgctaa

SEQ ID NO: 225832 - DNA, 711 bp, Klebsiella pneumoniae
atgattgaactcgtgattgtatcgcgtctgctcgaatatcctgacgctgccttatggcagcatcagcaggaaatgttcgaggcgctcgcgtcatcagagaaactcagcaaagaggatgcccacgcgctgggcgttttcctgcgcgatttagtggctcaggatccgctggacgcccaggcggcctatagcgaactgtttgaccgcggccgggccacctcgctgctgctgtttgaacatgtccacggcgaatcccgcgatcgcgggcaggcgatggtcgacctgatggcgcagtacgagcgccacggcctgctgctggatagccatgagctgccggatcatctgccgctatatctggagtatctggcgcagctgccggaagaggaagcgcttggcggcctgcgggacgtcgcgccgatcctcggtctgctcagcgcgcgcctgcagcagcgcgaaagtcgctatgcggtgctgttcgagctgttgctgaagctggccaatacgcaggtcgacagccagaaggtggcggagaagattgccgacgaagcgcgcgacgatacgccgcaggcgctggacgccgtctgggaagaagaacaggtcaaattctttgccgaccagggctgcggcgagtcggaaatttccgctcaccagcgtcgttttgccggagccgtggccccgcaatatctgaatatctctaacggaggacagcaataa

SEQ ID NO: 225833 - DNA, 1536 bp, Klebsiella pneumoniae
atgaaaattcgttcacaagtcggcatggtgctgaatctcgataagtgcatcggctgccacacctgctcggtgacctgtaaaaacgtctggaccagccgggaagggatggaatacgcctggttcaacaacgtggaaagtaagccgggcgtcggtttcccgaacgactgggaaaaccaggaaaaatggaagggcggctggatccgcaaaatcaacggtaaactgcagccgcgcatgggcaatcgcgcgatgctgttgggaaaaatcttcgccaacccgcatctgccgggcatcgatgattactacgagccgtttgattatgactaccagaatctgcataacgcgccggagagcaaacatcagccgatcgcccgtccgcgctcgctgatcaccggccagcggatggacaagatcaccagcggtccgaactgggaagaaatcctcggcggcgagtttgaaaaacgcgccaaagatcagaacttcgacaacatgcagaaggcgatgtacggccagttcgaaaacaccttcatgatgtatctgccgcgcctgtgcgagcactgcctgaacccggcctgcgttgcgacctgcccgagcggcgccatctataagcgtgaagaagacggcatcgtactgatcgaccaggacaagtgccgcggctggcggatgtgtatcaccggctgtccgtacaagaagatctatttcaactggaagagcgggaaatccgagaaatgcatcttctgctacccgcgtattgaatccgggatgccgacggtgtgctccgaaacctgcgtgggccgtatccgttatctcggcgtcctgctatacgacgcggacgcgattgaaaacgccgccagcaccgagaacgagaaagatctgtatcagcgtcagctggacgtgttcctcgatcccaacgatccgaaagtgatcgagcaggcgctgaaggatggcgtaccgcagggggtcattgaagctgcgcagcagtcgccggtttacaaaatggcgatggactggaagctggccctgccgctgcacccggaatatcgcaccttgccaatggtctggtacgtgccgccgctgtcgccgattcagtccgccgccgatgcgggtgaactgggtagcaacgggatcctgccggacgtggaaagcctgcgtattccggtgcaatatctggcgaacctgctgaccgcgggcgatacccagccggtactgctggcgctgaaacgaatgctggcgatgcgccactataagcgtgcggaaaccgttgacggcgtcgttgatacccgcgcgctggaagaggtggggctgagcgaagcgcaggcccaggaaatgtatcgctatctggcgatcgccaactacgaagatcgtttcgtggtgccgagcagccatcgtgaacaggcgcgagaagcgtttccggagaaaaacggctgcggctttagctttggcgatggctgccacggctctgacagtcagttcaacctgttcaacagccgtcgcatcgacgccatcgacgtgaccagcaaaacggagccgcacgcatga

SEQ ID NO: 225834 - DNA, 3744 bp, Klebsiella pneumoniae
atgagtaaattcctggaccggtttcgctacttcaaacagaagggtgaaacctttgccgatgggcacggccagcttctaaacaccaaccgggactgggaggatggataccgtcaacgttggcagcatgacaaaattgtgcgttccactcacggtgtcaactgcaccggctcatgcagctggaagatttatgtcaaaaacggtctggtgacctgggaaacgcagcagactgactacccgcgcacccgcccggacctgccgaaccacgaaccacgcggttgcccgcgcggcgccagctactcctggtacctgtacagcgctaaccgcctgaaatacccgctgatgcgtaaacgcctcatgaagatgtggcgggaagcgaaagttcagcatagcgatccggttgaggcatgggcgtcgattatcgaagacgccgacaaagctaaaagcttcaaacaggcccgcggtcgcggcggttttgtacgttcctcctggcaggaagtgaatgagctgattgccgcctccaacgtctataccgtcaaaacctacggtccggaccgcgtggctggcttctcgccgatcccggcgatgtcgatggtctcctacgcgtccggcgcccgttatctgtcgctgatcggcggcacctgcctgagcttctacgactggtactgcgacctgccgccggcttcgccgatgacctggggcgagcagaccgatgtgccggaatccgccgactggtataactccagctatatcatcgcctggggctccaacgtgccgcagacccgcaccccggatgcgcacttctttaccgaagtccgctataaagggaccaaaaccgtagccatcactccggactacgccgaaatcgccaaactctgcgatctgtggctggcgccgaagcagggtaccgatgccgcgatggcgctggcgatgggccatgtgatgctgcgtgaattccacctcgataagccgagccagtatttcaccgactatgtgcgccgctataccgacatgccgatgctggtgatgctcgaggagcgcgacggttattatgccgccggccgtacgctgcgcgcatccgacctcgtggattcccttggtcaggagaacaatccggaatggaaaaccgtcgcctttgacgagaagggcgacatgaccgtaccgaacggttccctcggattccgctggggcgacaaaggcaaatggaacctcgaacagcgcgacggtaaaactggcgaagagattgagctacgtctgagcctgctgggcagccatgatgaagtggcgaacgtcggcttcccgtacttcggcggcgaaggttctgagcacttcaacaaagtcgatctggaaaacattctgctgcacaaactgccggctaaacgcctgcagctggccgacggctctaccgccctggtcaccaccgtgtatgacctgaccatggctaactacggcctggagcgcggtctgaacgatgacaactgcgccgccggctacgatgaagtgaaagcctacaccccggcgtgggcggagaagatcaccggcgtctcccgcgcgcatatcatccgtaccgcccgtgaatttgccgataacgccgataaaactcacggtcgttcgatgattatcgtcggggcgggcctcaaccactggttccacctcgacatgaactaccgcggcctgatcaatatgctgatcttctgcggctgcgtcggtcagagcggcggcggttgggcgcactatgtgggccaggaaaaactgcgtccgcagaccggctggcagccgctggcgttcgcccttgactggcagcgtccggcacgtcacatgaatagtacctcgtacttctataaccactccagccagtggcgctatgaaacggtgaccgcgcaggaactgctgtcgccgatggcggataaatcccgttacagcggccacctgatcgactttaacgtgcgcgcagagcggatgggctggctgccgtcggcgccgcagcttggcgtcaacccgctgcgtatcgctgacgaagcgaaaaaagccggcatgaccccggtggattacaccgtgaagtcgctgaaagagggctcgattcgctttgcggccgagcagccggaaaatggcaaaaaccacccgcgtaacctgtttatctggcgttccaacctgctgggctcctccggtaaaggccatgaatacatgctcaagtacctgctgggtaccgagaacggcattcagggcaaagacctgggcaagcagggcggcgtgaagccggaagaagtcgaatggcgggataacggcctcgacggcaaactggatctggtggtgaccctcgatttccgtctgtcgagcacctgtctctactccgacatcgtgctgccgaccgccacctggtacgaaaaagacgacatgaatacctcggatatgcatccgtttattcacccgctgtcggccgccgttgatccagcctgggaatcgaagagcgactgggagatctataaaggtatcgcgaagaaattctctgaagtgtgcgtgggccacctcggtaaagaaaccgacgtggtgaccctgccgatccagcacgactccgccgcggaaatggcgcagccgctggatgtcaaagactggaaaaaaggcgaatgcgatctcatccccgggaaaaccgcgccgcatattattccggttgagcgtgattacccggcgacttacgaacgtttcacctcgatcggcccgctgctggaaaccatcggtaacggcgggaaaggcatcgcctggaacacccagagcgagatggatctgctgcgtaagctcaactacaccaaggcggaaggcccggcgaaaggccagccgaagctggaaacggccatcgacgccgcggaaatgatcctcaccctggccccggaaaccaacggtcaggtggcggtgaaagcgtggcaagcgctgagcgagatcaccggtcgcgagcatacgcacctcgcgctgaacaaagaagacgagaagatccgtttccgcgacattcaggcgcagccgcggaagattatctccagcccgacctggtctggcctggaagatgagcatgtctcctacaacgccggttacaccaacgttcacgagctgatcccgtggcgcacgctgtccggccgtcagtcgctgtatcaggatcaccagtggatgcgcgacttcggcgaaagcctgctggtctatcggccgccgattgacacccgttcggtgaaagcggtgatgggcgagaagtccaacggcaacccggagaaggcgctgaacttcctgaccccgcaccagaaatggggtatccactcgacctacagcgataacctgctgatgctgaccctgtcgcgcggtgggccgattgtctggatgagcgaagcggatgcgaaagatctgggtatcgaagataacgactggatcgaagtgttcaacgccaacggcgccctgacggcgcgtgcggtggtgagtcagcgcgttccagccgggatgaccatgatgtatcacgcgcaggaacgtatcgtgaacctgccgggctctgaaatcaccggtcagcgcggggggatccataactccgtcacccgtattacgccgaaaccgacccacatgatcggcggctacggccacctggcctatggctttaactactacggcaccgtcggctccaaccgcgatgagtttgtggtggtacgtaagatgaagaacattaactggttagacggcgaaggcaacgaccaggtacaggagagcgtaaaatga

SEQ ID NO: 225835 - DNA, 1779 bp, Klebsiella pneumoniae
atgttaaaacgtctttttaccccgctgacgctggtcaatcaactggcgttaatcgtgctgctcgccacgattattggcgtcgccggcatggcgatctccgcgcgcctggtgaacggcgtgcagggcagcgcgcacgccattaacaaggccggttcattgcgtatgcaaagctaccggctgctggcggcgatcccgctgaatgaaaacgatcaaaaactggtggcggacatgaccgccaccgtcttcagcccggagctgcaaaattccgcccgccgcgacggccaggaaatccagcttaaagccctgcagcagtactggcagctggcgctggcccccggcatgcagcgcgcagtcaatcaggcggaagtggcccaggatgtcgccgactttgtcgatcgtatcgaccagttggtcaccgcattcgaccacaccaccgagcagcgtatcgaacgggtggtctggatccatcgcatcctcgccattggtatggcgctgctgctgatcttcactatcatctggctacgcgcccgtctgctgcggccgtggaaacagctgctgagcatggcgcgcgcggtgagtcagcgtgatttcacccagcgggcgcacatcagcggccgcaacgaaatggcgaccctgggcatggcgctgaataacatgtcggaagagctggcggaaagctacgccgtgctcgagcggcgggtgcaggagaagactgccggactggagcagaagaacgagatcctcgctttcttatggcaggccaaccgccggctgcactccagcgccccgctctgcgaacgtatttcgccggtactgaatggcctgcaggggctgacgctgctgcgcgatatcgaggtacgggtttacgacctggaagacgaagataatcaccaggagtttacctgccactcggatgatgactgtgatgataaaggctgctacctctgtccacgcaatctgccgccgctgccggatgggggaacaacgctgaagtggcggctgtcagatgcgcatagtcagtacggcatcctgctggcgacgctgccggttggccgccatctcagccacgatcagcagcagctggtggataccctggtggaacagctgaccagcaccctggcgctggaccgccatcaggagaagcagcagcagctgatcgtcatggaagaacgggccactatcgcccgcgagctgcacgactccatcgcccagtcgctatcctgtatgaagatgcaggttagctgtctgcagatgcaaggcgacgccttgccgacggaaagccgccagctgctggggcagatccgtaacgaactgaatacctcgtgggcccagctgcgggagctgttaaccaccttccgcctgcagttgaccgagccggggctgcgcccggcgctggaggccagctgtcaggagtacagcgcccacttcggctttacggtgcagcttgattaccagctcccgccgcgctttgtgccctcgcatcaggcgatccacctgctgcagatcgctcgcgaagcgttgagcaacgctctgaagcatgccagcgcgaccgaagtgaccgtgacggtgtcacaacgcgataatcaggttcgtctggtggtagcggataacggccgcggcgtaccggaccacgccgaacggagtaaccattacggtttaattattatgcgggatcgcgcccagagcttgcgcggtgactgtcaggtacgacgccgggaaatcggtggaaccgaagtgatcgtcacgtttatcccggaaaaaacgttttccatccaataa

SEQ ID NO: 225836 - DNA, 2601 bp, Klebsiella pneumoniae; identical to SEQ ID NO: 213989

SEQ ID NO: 225837 - DNA, 4068 bp, Klebsiella pneumoniae
atgacgcggcgactggtggtgatcggtaacggcatggcggccacccggctggtgcagcggctggttgagcgcgaccccgcgcggtttgccattaccgtcgtcggcgacgagccgcacccggcctataaccgcattcagctctcgccgctgctggcaggtgaaaaaacggcggcgcagatcccgttgctgccggcggagtggtacacccggcacggggtgtgcctgcggtctggcgaggcggtcgatgaagtcgatattcagcaacggcggctgcgcatcgcggaaacctggctgccgtgggatgagctggtgttcgccaccggttcgcggccctttatcccgccgctgccgggcattgatcgtccgcaggttatgcccttccgcaccctggcggacgtggaacgtattctggcgatacccggcccggcggtggtgattggcggtggcgtgctgggggtggaagcggcggcggcgctgcgtcgtcacggcggagaggtcactcttctgcatcgcggcagcggattaatggcgccgctgaccgacgcttttgccgccgatgagctcaggcagcagcttgaagtgcgcggcattcgctgcgtgctggcgtgccgcatcgccgccatcgacgccgatggcgtgcggctggcggacgggcgcgtattccgcgccgccagagtggtgctggctaccggcgtgcagcccgacagccgtctggcggcgcagtccggcgtgctgtgccagcgggggatcgtggtcgaccgtcagatggcctcctcgctgccggggatcagcgccatcggcgaatgttgcgaaattgacggccagacctgggggctggtggctccctgcctgcgtcaggccgaggtgctggcggatcgcctgtgcggcgcccccggcgagggctttgtctggcaggacgccgggacccgcctgaaggtcaccggcattgaactctttagcgctggcgagcagcaggccggcgaacaggatgacatttataccagctgggaccccatcgaccgccactatcgccgcctgctgctgcgcgatggccgcctgcgcggcgtgctgctgatgggcgactgcaccgccgccgccgcgcttaccgcgcgcctggaaagcgatgagcctgccaccgtggactggctttttgacccctcttcaacgcagccgcaggctgcaggaataatgacgatgacgaaacctgtattagtgctggtgggacatggcatggtcggccaccattttctcgaacaatgcgtgagccgcaatctgcatcagcaatatcgaatcgtggtgtttggcgaagagcgttatcccgcctacgaccgggtacatctctccgagtattttgccggacgcagcgccgagtcgctgtcgctggcggccggggatttctttattgaacacggtattgaactccgcctcggcgaggcggtggcgagcatcgaccgcgacgcacggctggtgcgggacgccgaggggcatgaaatccactgggataaactggtgctggcgaccggctcgtatccctttgtgccgccaatccccggtaacgatctcgcggggtgctttgtctaccgcactcttgacgatctcgaccgtatcgccgcccatgccgccgcggcgaagagcggggtggttatcggcggcgggctgctcgggctggaggcggccaacgccctgaaacagctggggctggagacgcaggtggtggagtttgccccgaacctgatggccgtccagctggataacggcggggcggcgatgctccgggagaagatcgtcgccctcggcgtgggggtgcataccagcaaagcgaccaccgccatcgtgcgcgaggccgacggcctgcggctgagctttgccgacggcggcgcgttgcggaccgacatggtggtcttctcggcggggatccgcccgcaggacgcgctggcccgcggctgcgcgctgcaggtgggcgaacgcgggggaattcacatcgacggccagtgccgtacctctgacccggacgtgctggcgataggcgaatgcgccctgtgggacaataaaatttacggtctggtggcgccgggctatcagatggcgcgcatcgccgcggccactctcgcaggagaggacgcctgctttagcggcgccgacatgagcaccaaactgaagctgctgggagtcgacgtggcctcgtttggcgatgcgcaggggcgcacgccgggctgtcagagctatcaatggaccgacggtccgcagcagatttacaaaaaaatcgtcgtcagtcaggacggcaaagccctgcttggcggcgtgctggtgggggatgccagcgactatgccacgctgctgcagatgatgctgaaccgcatggcgctgccgccgcgtccggagagtctgatcctgcccgcgctggagggagccgcgccgaaggcgctcggcgtcgcggcgctgccggacagcgcgccgatctgctcctgccataacgtcagcaaaggcgatatctgccaggcggtgaacaatggggcgggggatatgtcggcgataaaaagctgcaccagagcggctaccggctgcggcggctgcagcgcgctggtgaaacaggtgatggagtatcagctggcggagcagggcgtcgaagtgaaaaaagacgtctgcgaacatttcccgtggtcgcgccaggagatctaccacctggtgcgggttaaccatatccataccttcgagcagttgattagccgctacggccaggggcacggctgcgatgtctgcaaaccgctggtggcctcggtgctggcctcctgctggaacgagtacctgctgaagccggcgcacctgccgctgcaggataccaacgaccgctatttcgccaatatccagaaggacgggagctattcggtggtgccgcggatggcggcaggggaagtgacgccggacggactgatcgccatcgggcagatcgccaaacgttaccagctctacagcaaagtgaccggcggccagcgcatcgacctgtttggcgcgcggctggaacagctgccggctatctggcgcgagctggccgacgccgggtttgaaaccggccacgcctacggcaagtcgctgcgcacggtgaaatcctgcgtcggctcaacctggtgtcgctacggcgtgcaagactccaccgggctcgcggtacggctcgagcatcgctataaagggctacgcgccccgcacaaaatcaagatggcggtctccggctgcacccgcgaatgcgctgaagcccaggggaaagatatcggggtgattgccaccgacaaaggctggaatctgtacgtctgcggcaacggcgggatgaaaccgcgtcacgccgacctgtttgccagcgatctcgacgaagcgacgctgatccgcagcatcgatcgtctgctgatgttctatatccgtaccgccgatcgcctgcagcgaaccagcacctggatggataacctggagggcggcgtcgcctatctgcggcaggtggtgctggaggatagtcttggcattggcgaggagctggagcaggagatggcccggatcgtcgacagctaccagtgcgagtggcagaccaccctcaacgatccgcagcgtctggcgctgttccgctccttcgttaatagcgaccagcccgacgaggctgtgcagcgccgcgatctgcgcggtcagccgcagccgctgctgactgagacgttgcccgaaggcgaactcccatcccgaccgtggcaggcggtatgcgaccttgacgccattccggcgcaggcggggatcggcgcccgcttaggggagcggcagattgccctgttccgcttcggcgagcgggtctacgccctcgacaaccgcgagccgggcagcacggccaacgtgctgtcgcgtgggctgttaggggacgtcggcggcgagccggtggtgatctccccgctgtacaaacagcggatacgcctgcgcgacggctggccgtgcgacggcagtgaacaggcggtacgcgcctggccggtgaaagtggaaaacggcaaagtgtgggtgggcaaccagcagctgctggcccgcgcggaggcctcctga

SEQ ID NO: 225838 - DNA, 789 bp, Klebsiella pneumoniae
atgaaaccattaattcaggtgcaggccgtcagccaacgcttcaacaccgccagcggcgagttcctggcgctgcagaatgtctccttcgatatcgtcgaaggggagaccattagcctgatcggccactcgggttgcggaaaatcgaccctgctaaacctgatcgccgggatcaccacccctaccgagggcggactactgtgtgataaccgggaaatcgccggtcccgggccggagcgggcggtggttttccagaaccactcgctgctgccgtggctgagctgtttcgacaatgtggcgctggcggtggatcaggtgttccgtcgcaccatgagcaagagtgagcgccgggagtggatcgaacacaacctggcgcgcgtacagatgggtcatgcgctgcacaaacgtcccggggagatctccggcggcatgaagcagcgggtgggtatcgcccgggcgctggcgatgaagccgaaagtgttgctgcttgatgagcccttcggcgccctggatgcgctgacccgcgcccacctccaggacacggtgatgcatatccagcaggagctcaataccaccatcgtcatgatcacccacgacgttgatgaagcggtgctgctctcggatcgggtgctgatgatgaccaacggtccggcggcgacggtcggcgagatcctcgcggtcgatctgccgcgtccgcgccaccgcgttcagctggcggacgacagccggtatcaccatctgcgccagcagatcctccatttcctgtatgaaaaacagccgaaagcggcgtaa

SEQ ID NO: 225839 - DNA, 885 bp, Klebsiella pneumoniae; identical to SEQ ID NO: 213992

SEQ ID NO: 225840 - DNA, 1257 bp, Klebsiella pneumoniae
atgggcgacaaattttcaatttcccggcggcgcttgctgcaggcaggggccgcgctgggcggcgcgatgctgctgccgggcgtgatgcaggccgcctgggccggcggctcggacaaaccggagcaaacccgcgtgcgggtcggatttattccgctgaccgattgcgcgccgctggccatcgccgcggcgaaggggtttgaccaaaaatatggcatcaccctggtggcgagtaaggaagccagctgggcggcggtgcgcgacaagctggtggccggcgagctggacgcggcgcatattctctatggcctgctgtacggcctcgaactggggatcgccagcaagccgcaggcgatggccaatctgatgaccctcaaccgcaatggccaggcgattaccctctccagcgagctgcaggagaaaggggtgaccgacctcggcgggctgaagcggctgatcgaccgcagcgcgccgggcagttacaccttcgcccatacctttcctaccggcacccatgccatgtggctttactactggctggcgagcgtcggcatcgatcccttcaacgatgtgcgcaccgtcgtggtgccgccgccgcagatggtgatgaacatgcgcatcggcaatatgagcggcttttgcgtcggcgagccgtggaacgcccgcgctattaacgaccgtatcggcttcaccgcggccacttcccaggatatctggcccgagcatccggaaaaggtgctgggcacccgtcgcgactgggtggaacgcaacccgaacaccgcccgcgcgctggtggcggccctgatggaggcgcagcgctggatcgccgcctcgccggagaacacccgggagacggcccgcctgctcgccagacgcggctggctcaataccaaggagcaatacctcaccggccggatgcttggagagtatgacaacggccttggccgccgctggcaggatgcccatccgatgcgcttctgggccgggggcgaggtgagtttcccgtggctgtcggacgggatgtggttcctcacccagttccgccgctgggggttgctgaagcaggctccggattacctcgcggtggcgtcgcgcattaaccgcatcgatgtctggcaggctgccgcccaggcggtaggagggatcagcgcgccggcagccaggatgcgcagcagcacactaatggacgggacggtctggaacgggtccgacccggaaggctacgcccgccatttctctattcaacgtaagggggcatga

SEQ ID NO: 225841 - DNA, 1182 bp, Klebsiella pneumoniae
atgaataatacgactggtcatgcgcacgatgcgacggcctggctgcagctggcgcgtcgcctgcaaaaacaacagcttcagcagcttagccaactgggggaactggccagccagctcagcgcgctggtgcatatgctgcagtgtgagcgcggggcgtcgaatatctatctttgctcgggcggcttgctgtatacagcggagtgtcgggcgggaggggcgctggttgacgagcggctagccctgttttatgccagcctcgaacgggcgcgcgcggtagccggcagcgcgctgtgctggcgtatcgccagagcggttgacgagctggcgcagctcccggcgctacgcgcgcagatcggccgccggcaaattgccgctgaagccgcgacggagcagttcagccgcgtcatccgccatctgctgaacatcgccccgcagctcaatgacagcattgacgatccgccggtggctggtcggatggtcgccctgtacagctttatgcagggaaaagagctggtgggccaggagcgcgcgctgggagcattgggctttacccgcggcgagttcagcgacagcctgcgccagcagctggtggaccgtattgacggtcagcagccctgcttcgacagctttcaggcgctgggcagcccggcgaccgtccagttgttcagaacccagtgccacgccggtctggatattgaacagctgcggcggatcgcctgtacccgccagccggctgccgacggcggggaaacggcgctgcgctggtttggcctgcaaacccaacggcttgagcaattgcgcgaagtggaagagcaactgatcgacgatctgctggatgccaccgacgcgctgttagcagacgacgcgcctggctggcaggccggagaggaagacgattgcgtgacgccacggctcgataaacagctactgccgctggtgcgccagcaggcctatgagttgcagcagctctccagccagctggcctcgctgaaagacgcgctcgaagagcgcaagctgatcgaaaaagcgaaaagtctgctgatgacgcaccagggaatgcaggaggagcaggcctggcagacgctgcgcaagatggccatggacaaaaatcagcgcatggttgagatagcccgcgcgctgctgatggtgaaggcgatttggccgctaacaccaaaggagtag

SEQ ID NO: 225842 - DNA, 354 bp, Klebsiella pneumoniae; identical to SEQ ID NO: 138919

SEQ ID NO: 225843 - DNA, 243 bp, Klebsiella pneumoniae; identical to SEQ ID NO: 213996

SEQ ID NO: 225844 - DNA, 231 bp, Klebsiella pneumoniae
atgccctatcgcagtaaacatgaactccccgacagcgttcagcatgtactgcctgcccatgcgcaggaaatttataaagaagcgtttaacagcgcctgggatcaatataaagataaagacgagcggcgcgatgacgccagccgcgaagagacggcgcacaaagtcgcctgggcggcggtgaagaacagctatgagaaaggcgatgatgataagtggcataagaaaaaataa

SEQ ID NO: 225845 - DNA, 1101 bp, Klebsiella pneumoniae
atgacccatgcacatgaggcggtaaaaacccgccataaggagtcttccctcgtctttccggtgctggcgctggcggtgctgtttttctggggcagcagccagtcactgccagtggttatcgcgatcaatatcctcgcactggtcggcattttgagcagcgccttcagcgtggtccgccacgccgacgtcctcgcccaccgcctgggcgaaccctatggctccctgattttaagcctgtcggtggttatccttgaggtcagtttgatctctgccttaatggccaccggcgacgccgcgccgaccttgatgcgggataccctctactccattattatgatcgtcaccggcggtctggtcggtttctctctgctgctgggcgggcgtaaattcgccacccaatatatgaatctgttcggcattaagcagtatcttatcgccctgtttccgctagcgattatcgtgctggtctttccgatggcgctgccgggcgcgaacttcagtaccgggcaatcgctgctggtggcggtaatttcggcggccatgtacggcgttttcctgcttattcagaccaaaacccatcagagcctgtttgtttatgagcatgaagacgacagcgacgatgacgacccgcaccacggtaaaccgtccgcccacagcagcgggtggcataccgcctggctgctggtgcacctggtggcagtgatcgcggttaccaaaatgaacgctaacccgctggaaacgctgttgaccagcatgaatgccccggtggcctttacaggcttcctggtggctctgctgatcctgtcgccggaaggccttggcgccctgaaagcggtgctcaacaatcaggttcagcgggcgatgaatctgtttttcggctccgtgctggccaccatatcgctgacggtcccggtggtcaccctcatcgccttcctgaccggcaatgagctgcgctttggccttggcgccccggagatggtggtgatggtcgcctcgctggtgctgtgccatatctccttctccaccggacgcaccaatgtgctgaacggcgcagcccacatggcgctgttcgccgcctatctgatgaccattttcgcctga

SEQ ID NO: 225846 - DNA, 855 bp, Klebsiella pneumoniae; identical to SEQ ID NO: 139028

SEQ ID NO: 225847 - DNA, 393 bp, Klebsiella pneumoniae
atgaacttattcacggctgtcctctacctgcacattgccacagtggcggtgtcggtaggattgttcgttttacgttactggtggatgtatcaccagagcccgctgctgaaccagcggtgggtgcgaattgcgccgcactgcagcgatacgctgctgtttctcagcggcgcagggttaatggcgataacgcactacctgccgttcacagaagacggcgcatggctgactgaaaagctgtttggcgttatcatttacatcgcattaggttttatcgcgttgggccgtcgtcgtccgcgcagccagcagagccgctttatcgcgttcctgctggcgctggtggtgttgtttatcatcattcaactcgccatcacaagaataccgatactggggtag

SEQ ID NO: 225848 - DNA, 849 bp, Klebsiella pneumoniae
atgacctttcaggcctggcagcagcaggcgatcgcccgcctggcggagagcgacagcccgagacgcgacgccgagatcttgctgggacacgttaccggccgggcgcgaacctggattttggccttcggtgaaacgacgctctctgctgacgaggcggcgaggctggaggcgctcctggtgcgacgccagcgcggggaacctattgctcatctggtcgggcagcgcgagttttggtcgctgccgctgttcgtctccccggcgacgctgatcccccgcccggataccgaatgtctggtagagcaggcgctggcgcgtctgccaaccgcgccgtgccgtattctcgacctcggcaccgggaccggcgccattgccctggcgctggccagcgaacgtccggactgtgaggtcaccgcggtggacgtgatgccggacgccgtggcgctggcgttgcgcaatgccgaacatctgggcatcgctaacgtgacgataagtcaaagcgactggtttagcgcgctggacgggcagcgcttcgccacgatcgtcagcaatcccccctatatcgacgccgccgacccgcatctcgccgaaggcgatgtgcgctttgagccgttgacggcgctggtcgcaggcgaccaggggctggccgatctggcgcatatcatccgcgagggacggcagtatctgcagcccggcggttggatgctgctggagcatggctggactcagggcgaggcggttcgcgcgctgttccgcgaagcgggctatctggacgtcgcgacctgtcgcgactatggcgacaatgagcgtctgaccctcggacgtttacccgacatggagaatgttggctga

SEQ ID NO: 225849 - DNA, 1083 bp, Klebsiella pneumoniae; identical to SEQ ID NO: 214004

SEQ ID NO: 225850 - DNA, 1257 bp, Klebsiella pneumoniae
atgacccttttagctcttggcatcaatcacaaaacagctccggtcgccctgcgagaacgcgtcacgttttcgccggaaacgctcgataaggcgctggagagcttgctggctcagccgatggtgcagggtggggtggtgctgtcgacctgcaaccgcacggaactctatctcagcgtcgaagagcaggataacctgcaggaagcgctgatccgctggctgtgcaactaccacggcctcaacgaagaagacctgcgaaaaagcctttactggcatcaggataatgacgccgtcagccatctgatgcgcgtcgccagcggcctcgattcgctggtgctgggcgagccgcagatcctcggccaggtgaaaaaagccttcgccgactccagccgcggccatcttaacgtcagcgagctggagcggatgttccagaaatccttttcagtggctaagcgcgtgcgtaccgaaaccgatatcggcgccagcgcggtctctgtggctttcgccgcctgtaccctggcgcggcaaatctttgaatcgctctccagcgtcaccgtgttactggtcggcgccggtgaaaccattgagctggtagcgcgccatcttcgcgaacatcacgtgcgcaaaatggtgatcgccaaccgcacccgtgaacgcgcccaggcgctggcggaggaagtgggcgccgaggtgacagccctcagcgatatcgacgaacggctgaaagaggccgacatcattatcagctccaccgccagcccgctgccgatcatcggcaaaggcatggtggagcgtgcgcttaaggcgcgccgtaaccagccgatgctgctggtggatatcgccgtcccgcgcgacgttgaaccagaggtcggcaaactggctaacgcctacctctacagcgtcgacgatttgcaaaacattattcagcataacctggcgcagcgtaaggctgccgcggtgcaggcggaatcgatcgtcgagcaggaaaccagcgaatttatggcctggctgcgtgcgcagagcgccagcgagaccattcgcgaataccgttctcagtctgagcaggtccgtgaggagctgacggcgaaagcgctggccgcgctggagcagggcggtgatgctcaggaaattatgcaggatctggcgcgcaagctcactaaccgcctgatccacgcgccaaccaaatctcttcagcaggccgcccgtgacggggacgacgaacgtctgcatattctgcgcaacagcctcgggctggaatag

SEQ ID NO: 225851 - DNA, 612 bp, Klebsiella pneumoniae; identical to SEQ ID NO: 137152

SEQ ID NO: 225852 - DNA, 852 bp, Klebsiella pneumoniae; identical to SEQ ID NO: 214007

SEQ ID NO: 225853 - DNA, 948 bp, Klebsiella pneumoniae
gtgcctgatatgaagctttttgctggtaacgccaccccggaactagcacaacgtattgccaaccgcctgtacacttctcttggcgacgccgctgtaggtcgttttagcgacggcgaagtcagcgtacaaatcaatgaaaacgtacgcggtggtgatattttcatcatccagtccacttgtgctcccaccaatgacaacctgatggaactggttgttatggttgatgctctgcgtcgtgcttcggcaggtcgtatcaccgccgttatcccttacttcggttatgctcgtcaggaccgtcgtgttcgttctgctcgtgtgccaatcaccgcgaaagtggtggcggattttctgtccagcgtcggcgttgaccgcgtgctgaccgttgacctgcacgcagaacagatccagggcttcttcgatgtgccagtcgataacgtgttcggcagcccaatcctgctggaagatatgctgcagctgaacctggacaacccgattgtggtttctccggacatcggcggcgtcgtgcgtgcccgcgctatcgctaaactgctgaatgataccgatatggctatcatcgacaagcgccgtcctcgcgccaacgtctcccaggtgatgcacatcatcggcgacgttgccggtcgtgactgcgtgatggtcgacgatatgatcgacaccggcggcaccctgtgtaaagcggcagaagcgctgaaagagcgtggcgcgaaacgcgtattcgcttacgcgacgcacccaatcttctccggcaacgctatccagaatatcaaaaactctgtcattgatgaatttgtcgtctgcgataccattccgctggcaccagaaattaaagcgctggataaagtgcgtactctgacgctctccggtatgctggctgaagctattcgccgtatcagcaatgaagaatctatctctgctatgttcgaacattaa

SEQ ID NO: 225854 - DNA, 1653 bp, Klebsiella pneumoniae; identical to SEQ ID NO: 214009

SEQ ID NO: 225855 - DNA, 1047 bp, Klebsiella pneumoniae; identical to SEQ ID NO: 214010

SEQ ID NO: 225856 - DNA, 276 bp, Klebsiella pneumoniae
atgaaacgcaaaaacgcttcgttactcggtaacgtactcatggggttagggttggtggtgatggttgtgggggtaggttactccattctgaaccagcttccgcagcttaacctgccacaattctttgcgcatggcgcaatcctaagcatcttcgttggcgcagtgctctggctggccggtgcccgtattggcggccacgagcaggtcagcgaccgctactggtgggtgcgccactacgataaacgctgccgtcgtaaccagcatcgtcacagctaa

SEQ ID NO: 225857 - DNA, 585 bp, Klebsiella pneumoniae
gtgaccattaaactaattgtcggcctggccaaccccggtgcggaatatgccgctacccggcacaacgctggcgcctggtatgtggatttactggcggatcgccatcgtgcgccgctgcgcgaagagagcaaattcttcggctacacctcgcgcatcaacctggcgggcgaggacgtccgcctgctggtccccactacctttatgaacctcagcggtaaagccgtggccgcgatggcgaccttttatcgcatcaacccggatgaaattctggtcgcccatgacgagctggatttaccgccgggcgtggcgaaatttaagcttggcggtggccatggcggccacaatggcctgaaggatatcatcagtaagctcggcaataacccgaactttcaccgtttacgcgtcggaatcggccatccgggcgacaaaaacaaggttgtcggctttgtgcttggcaaaccaccggccagcgagcagaaactgatcgatgacgctgtcgacgaagcggcgcgctgtaccgaaatctggttaaaggacgggctgaccaaagcgaccaaccgtttgcacgcctttaaggcgcaataa

SEQ ID NO: 225858 - DNA, 1092 bp, Klebsiella pneumoniae
atgggattcaaatgcggtatcgtcggtttgcccaacgtcggcaaatccaccctgttcaatgcgctcaccaaagcgggtattgaagcggccaacttccccttctgtaccattgagccgaacaccggtgtcgtaccgatgcccgatccgcgtctggacaagctggctgaaatcgtcaaaccgcagcgcatcctgccgaccaccatggagttcgtggatatcgcgggcctggtgaaaggcgcgtccaaaggtgaaggtcttggcaaccagtttctgaccaacatccgtgaaaccgaagccatcggccatgtggttcgctgctttgaaaacgataatattattcacgtcgcggggaaagtgaacccggcggaagatatcgacgttatcaataccgaactggcgctgtctgaccttgatacctgcgaacgcgcgattcaccgcgtctccaaaaaagccaaaggcggcgataaagacgcgaaggttgagctggccgcgctggaaaaatgcctgccgcagctggaaaacgccggtatgctgcgtgcgctggatctgaccaaagaagagaaagaggccatccgctatctgagcttcctgaccctgaagccgaccatgtacatcgcgaacgtcaatgaagacggtttcgagaacaacccgtacctcgatcaggttcgcgccatcgccgagcaggaagggtctgtggtggtgccggtgtgcgccgccgttgaagcggacatcgccgagctggacgatgaagagcgtgacgagttcatggctgagctgggcctcgaagagccgggcctgaaccgcgtgatccgcgccggttacgctctgctgaacctgcagacctacttcaccgcgggcgtgaaagaagttcgcgcatggaccatcccggtcggagcgaccgcgccgcaggcagccggtaagatccacaccgacttcgaaaaaggctttatccgcgcgcagaccatcgcttatgaagacttcattgcctacaaaggcgaacagggcgcgaaagaagccggtaaaatgcgtgctgaaggtaaagactacatcgtgaaagatggcgatgtgatgaatttcctgttcaacgtctaa

SEQ ID NO: 225859 - DNA, 330 bp, Klebsiella pneumoniae
atggcaacggcaagaagcggctatacgctgcaggtgataaagtcaggacagcaggggcatgttgaaatgagatgggggcatctcgcagacgttgatacgcgcgcggcggcggcggctatcatgcagcatatcgggcgttcttcgtcctcgcggggccagcaggagatcagcctgtcgctgaccaatgccgccagcggcatctcggtggagcttcatcacccggcctctggggaaagcgccaccccggcttttattgaggctgagttaaagaaaattgtgcagatcgttgatggctacgaggcggcagaagatacccatattgtggagtag

SEQ ID NO: 225860 - DNA, 915 bp, Klebsiella pneumoniae
atgaagcactgtaaaatcatcctgttagtaggccttctggccagttccgcttcggcattagcagagaagatcggcgtctcaatggcctacttcgatcaaaactttctcactattatccgccagtccattgagaaagaagctcaagcccgccacgtcgacgtacagtttgaagacgcccgcggcgacaccggacgccaggccgatcaggtgcagagcttcatcgcctccggcgtggacgcgatcatcgtcgacccggtggactccgccagcaccccgcagctgacgaagatggcgcagcaggccaaaatgccgctggtgtatgtgaaccggacgccgggggataaaacgttaccgcccggcgtggtgtttgtcggttcggacgagcgggagtctggcacattgcagatggaggcgctggcgaagctggcgaactacaaaggcaacgtcgccatcatgatcggcaatctcaccgacgccggcgcgctgcagcgcaccaaagatgtggagcaggtggtggccaagtatccggcaatgaaagtggtgcagaaacagccggccaactattcccgcagcgagggaatggatctgatgcagaactggacgggcaacggagaagcgattgatattgtggcggcgaacaacgatgagatggcgattggcgcggcgatggcgctggagaaaagccagaagaagctgctgatcggcgggatcgacgccaccccggacgggctgaaagccctggccagcgataagattcaggtgacggttttccaggacgccgtcggtcagggcaaaacggccttagcggtagcgctgaagctgattaaaggagaaaaggtcgagtctcatgtctggatcccgtttgagttagtgaccaaagaaaacatgcagacctatgtggaaaagagtcattaa

SEQ ID NO: 225861 - DNA, 1416 bp, Klebsiella pneumoniae
atgatgacaacacaccacgaccgtcactataaagccggtggcgacccgcgcacgctggctgattttatggccctgcgtgcggaaatgaacaagctcagccacccggcgcggccggatattaactggccgtatgccgagcagcttgcccgcgggctgttggagcatcacggcgcggacctgcagactgtcgcctggtataccctggcccgcgcccggctgggcggggtggcagggatcaatgaggggctgacgctgatggagtcgctgctggttcgtcaggggaaaaacctgtggccacaggcgctcccggcccggacagagatcttccgcaccctgagcaagcggctgcggcaggtgatccgtaccctgaatcttaccccagaggatgttgagtcgcttgagcaggctgaacgttcgctgcaaagcttcgacgcagtgctccagcgccttgagatcgctcctgaaaaccagctgagcgacctgcgggcgctactgcacagcacggcaactcgcttcgagagcctcgaccctgcgccagcgcttcccaccgcgccgccggtggcggtgtctgacgcggaacttcccggcactctggtcagcgaagaggatgcggcgaaggttgagccagtgccagacctaaaacgtagaccaaaggctgagccgctggctccgccttcacctgcaaagcggcccgcgccggtggcggcgtctactccggcagccgcgccgcgctggaagccgtttatcgccgggatggttaccatgctggcggtaacgggtattgccgtcggcggatggctggcgctgcgtcagtccgacttgccgcccatttcggtcacccaaaatgccggaccgataccgggcctgccggcgacaacgcccccggggccggttgatctgccacagacgcagcgccagcttggcgagcttgcccgcctggcgccggactgggcggtcagctacggcgaccagctggtccaccaggccctgatccgctggccggatcaggcgcaaccgctggcgcagcagtggcggcagcagctgagtactggcgcattgcccgcggaaaaccttaccggctggtcggagggcatgcagcagctgcagcggctcgccgaccagctcaatgccctcgacgagcagaaggggaagtacctgacggtgagcgaactgaaaaccgcagtatttgccatcacacagtcgtttaaccgcgctgttccgctggaggagcagctgcgccagctggccgcgcttcccgttgatcaaccctggccagccgcgcggggaagcctcgcggagctgcatctgcaacagctgatagtggagtatgccctgctgaagcgaaaacagccggcgtcgccgaccgctgcgctccccgcaaccggtgagccctcggtgagtgaggcggtgaaataa

SEQ ID NO: 225862 - DNA, 444 bp, Klebsiella pneumoniae
atgcctcgtccctccctgtatgacatcctgtacggcaatttcgccggcgggcttgacctgaatactgtcagcgaaacggatcaggtcatcctgtcggtgctcgataacatgcagcgcatcctcaactgtcgggccggaacgctggcgcatctgccggactacggcctgccggatatgaccgctgtcctccaggggatgccagcgtcggcgcatcaactgatgagcacgttgtcggcggtgttgctgaaatacgaaccgcgcctgcagcggatcgcggtggtgatgctcgatcagcatgcgcccggcgaactgcgctatgccattgatgcggagctgaaggatattggcctggtgcgttacggcacggagtttatgcccgagggcagggtgttgatccgccacctcaaacgtcagcagtaccttgacgcccgctccgccctctaa

SEQ ID NO: 225863 - DNA, 537 bp, Klebsiella pneumoniae
atggcgattaccgcagttaaaccctccgccaggttgctggcattcctcatggttaccgtcttaaccggctgcggactgacgcagaccgtgaaagacggcgccgtttccgtgacccagtccattttttacccccaggtgaaaaccctgcatctggatcttcgcgcccgggaaggcgtgaataacaatgccaaaggcgcctccctggcgacggtggtgcgtatttatcagctgaaggaccggcaagcgttcgacaatactgactacccgtcgctgtttgccggcgatggccaggcgctgcaggcggaccgggtggcggaaaaagatgttcgcctgcgtccgggcgaatcggtgaccgtcgatatgcccatggaaaccagcgcgcagtttgtggcggtggcggccatgtttatcgatccagacctgacgcaaaacagctggcgactggtactcacccgggacgaacttgatccggcgaggccgcgcattatcgaagccagccaaaatcaactgacgctgcacccgtttaaggagaagtga

SEQ ID NO: 225864 - DNA, 1047 bp, Klebsiella pneumoniae
atggcgcagctccggcctcagttgccgtacatgaatttttaccgcttctgccagttgctggagaagaaccatccgaaggcgccgatcatcggcagcggctggctagtaggtgatgaacccatacgctttcgcccgcatccggggatgggctttccggctggcgaaatccgtggaatggacgatcctgaaccgccccgtccgccggcggttcgcgtgacttttatgggactctacggcgtggaatccccgctgccgacccactatagcgatgacattgcgcaacggcgggaaggcgtcgaggccaccgaggatttcctcgatatctttaaccatcggctgatcgcccagtattaccgtatctggcgcaaatattcctacccggcaacctttcgggcgggcggcacggacaacatctcgcagtatctgctgggcctggcggggctgggcataccgggatgtgccgccgttgccgcagcgccgctgtcgcgatttctggcgctgctgccggtgatgatgctgccggggagatccggggaaggcatggaggcgctggtggcgctcctggccccggggacccgggcgacggtgtaccaccacgatccctgccggatccccttgtcgcagccgttaacgatgagcgtccgtcagccggttagcctgcaacataggccagtgatgggaacccacgccacggatgtgaacggtcaggtgttgctgcagctggccacggaaaagcctgatgaggttcgcggctggctgcccggcggcgaactgttcagcgacctgatggcgcttctgcacgtctggctcggatctcatcttgacgtgcggctgcagctttgcgtcgcccgccatttactgccggatgcgcaactttgctgccagcaggagcatgccgtccagctcggccgtaccgctgtgctgcgtcctctggatgcgcagaaacaggctgacgacagagtcacgatttatctggggcgctatcagcgcgtccgggaaaatatccaccgcagggagagcgatgaagatggcgattaccgcagttaa

SEQ ID NO: 225865 - DNA, 1764 bp, Klebsiella pneumoniae
atggacgatttaaccctgcgatattttgatgctgaaatgcgctacctgcgcgaggcggcaaaagcgttcgcgcaggctcaccccgatcgggcggcgatgctggatctcgataaagccggtacgccggacccttacgttgagcgcctgtttgaaggctttgccttttccgtaggtcgcttgcgcgaaaaaattgatgatgatctgccggagctgaccgaggggctggtcagcatgctgtggccgcactatttgcgcactattccatcgctatcgatcgtggtgctgaccccaacgctgccggcgatgaagatggcggaaacggtgcccgccgggtttgagattagctcccgcccactggggccgaaaaataccgtgtgccggtaccgaaccacccgcgatctgacgcttaacccgctggcgatagaggaggcggtgatgacggcggagccggacggacgttcggccctgcgactacgattcgcctgtagcgagctggctaactggtcgcagaccgatctccgccacctggcgctgtacctgggggaagacgctgttaccggcagcgccctccatctgtggctgacccgacgccaggccgcgctgtacctgcgtctgccgggtcagacagagcgggtaagcctcgatggctatttttccccggggggattcagcgaggaggatcgtttatggccgaagggggagagtgctttcagcggctatcagctgctgctcgagtatttcacctttcgcgaaaaatttatgttcgtgcagctaaatggcctggaaaacatcaccctgccggcggggatatcgcatttcacgcttgaggtggtgttcagcgaggtctggcaaagtgatttacccgtcagcgcaagcagcctgcgcctgcactgtgtgccggtgattaacctgtttacccttgaggccgatccgttgaccatcagcgggctggagagcgaatacctcctgcgtccgaagcgcctgcaggacgggcataccgaaatctattctgttgacagcgtgaccggctccgggcgcaccggggaggcgcgctatgtgcctttcacccgctttcgtcaccaggggggaatgatgcgtcgccatgcgccggagcgctactaccacacccgcgtaaaacggggcgtaaccggcatgcacgatacctggcttatcctcggcggacagcaatgggaggctgaccgggagctggcgcgggaaacggtctccttgcgcatcaccggcactaacggccagctgccgcgccgggcgctacagagcacgctgctggatcgctgtgagtcgatatcagccacgccgcttaccgtctgcaatctctgtaagcccacgctgccggcctatcccccggcggaagaccgctaccactggcgggtcatgagccatctgggcacccgttttctcaacatgatgagcagcgccgaggtgctgcgcggcacgctgtcgctctacaactggcgggaggatgagctcaataatcgccgtctggacgccattctggcggtcagccatcgccgaattcagcgtttcgagcagggcttcctgctgcgcgggctggatatcgaagtgacgctcgacggtagcggatttaccggtgcgggcgatgtccacctgtttggcgacatgctcaaccgctttttcgcactgtatgccgatatgaatcagttcaaccagctgacgctcattgttcaacctgaagggaaatgtatccggtggaaagagaatcacagtctgcgcctgcccggctga

SEQ ID NO: 225866 - DNA, 1890 bp, Klebsiella pneumoniae
atgttgacccgcccggaaaaaatggacgccgcgtggttcgccactacgctaatgcaggactggccgcagcgctcaggcatcgccgacgccgtctggcagggcagcggcccttcgctgctggcattttatgccgccagtctggtgtcgcatccgcattggcgtctgcctgtcgatgacggtctggtcagccaggtgcgcacacggttaattcgccaactgggccagcgcaacagtgagtccacgctttaccagaagatgctcgcgcaggtggcgaatcagtatgccgatatgcgcctggcggatatgactgccgacaccgatgcttcgcgtctgttcagcactgatgaggtggtgccgggaatgtttacccgtcaggcctgggagcaggccgtgcagccggccattgagaaagtggtcgcggaacgccgcgatgaaatggactgggtgctgagcgatacgaagcagactgccgcgcagtcgacgtcgccggaagctctgcgagccaggctggcggagcgttatttcgctgatttcagcggcgcctggctggatttcctcaacagtctgcgctggcagcgcgcggcgaccctctccgatgctatcgaccagctgaccctgatggccgatgtgcgcctgtcgccgctggtggcgctgatgaacaccctgagcgtgcaggggcgaaccggccagaccggggaagccatcgccgattcgctggtcaaatcggccaggcagctgttcaaccgtgataactcgcccgccatcgatcaacggtccggcgcgcgcggtcctctggatgccaccttcgggcccgtactggcgctgctggacaatcgcgacggcgggacacccaccagccgtcttagcctgcagaccttcctgacccgcgtcacccaggtgcgtctgcgcctgcagcaggtcaccaacgccaccgatccgcaggcgatgacccggttgcttgcgcagacggtattccagggcaaggccgtggatttaaccgaaacgcgcgactacggcagcctggtggcggcggggctgggccagcagtggagtggatttgggcaaacgctgtttgttcgcccgatggaacaggcctggcagcaggtgctgaccctggcggcggaaagtctcaacgcccagtggcgcagcgcggtggtggaggactggaatagcgcttttggcggtcgctacccctttaaaaataccagcagtgaagtctctctgccgctgctggcaaaatacctcgacagcgagaccgggcgcatcgcccgctttctgcagacccggctgaacggcgtgctgcataaagaggggagccgctggatggcggacagtatcaatgctcaggggctgacgtttaacccggcctttctgcaggcgatgaataccctgagccatctctccgacgtcgcgttcgccaacggcgaagcgggattgcattttgcgctacgtcccggcaccgcggacggcgtgatgcagacggagctggtcatcgacagtcagaaacttgtctatatgaaccagatgccggtctggcggcggttcagctggcccgctgacaccgaagcgccgggcgccagtctgagctgggtcagtacccggacgggcacccgccagtatggcgatttcccgggcgcctgggggtggatccgtctgctggataaggcggtggtcagcgcttatcccggaacgagcagcagctggagcctgagctggaaagcgccggatggtctgttgctgaactacacgctgcgtaccgaggcgggggaaggaccgctggcgctgctggtgctgcgaaactttacgctaccggagacgatattcagcgtgcgcgcgtctgcggaacgtgttccgctgaccgacgatatacccggcgaagagggatattga

SEQ ID NO: 225867 - DNA, 1506 bp, Klebsiella pneumoniae
atgaatataccgggtaatggcctgggccggtttggcctggccgggcttacgttggccgggatggctgcaatatggtgggggatcacccgctatggcggcatgctgaatatcaatacgcggggcgagcaggtactggcgtttgtcctggtctgtctggcgttggtatttgttttttaccttcctgcaatgtcccgccgtgtgaaggagagtttatatcgccggcagtcgcagcaggacagcgtcttacccggcgaagaagggcgcgtggcgctgacacctccccatcatattacggtgggggaaattcgccagactctacgctatcagtatggacgcgcctggtcccgcaaagtccgtattctgctgataattggctcagtcagagacgtagaacaactgaccccaaagctcacgcaggaactctggcaggaagatcagggtacattattgctgtggggtggagaccctggggcagcggtagataacgcctggttcacagcgctgcgtaaactgcgttatcgcccggctgatggtatggtgtgggtaacatcgggctttgacggcgttttgacaacgatgaacagaacgaagcccaggctcacgccagatgaaatggacagtgtgtctcactctctaaagctacgctacgaagctcttggctggaaactacccctatacgtctggtcgctgtatgaggggggcaacgaaaaaaatggacgtatcactcagcctgtaggctgcctgttacctgcaggttgtacgccgcaaatagttgccgaacagttcactgccctggcgtcgttactgatagagcagggcatccagcagatatgcgggcaaccacagcacaattttttactcgcgctggccgatcagttgacccgtaaaccggaaacggtgacggagccgttatcggtattgcttaatccttaccgcccgcagccgctggccggggtggtatttagtgaggcgtcagtagaggctggtcgcagtgtccgtcatcactggggacgggataaccgctgggaaacgataccagactcagtgctgtggttgccagccggtctacgtccgcgcaaacagggagtcaactggatgcgtgggatgagcgtggccgccgccgccctgatgttactctgggccgcctcaatgacagtctcttttatcgccaaccgccacctggtggcgatcgcacagcagcaggtgcagcaggcctcggcgggaaaacagccgctggccgtacgcctgcatgcgctctccgcgttacagaaaacgctttctcaactggaataccgctcgcagcacggagcgccgtggtacctccgcgctggcctcagtcagaacgatgacctgctggcggcgctgttcccgcgctacggggagatggcgcaaccgctgctgcgcgatgcggcggcgcatcatctggaagagcagctcaccgccttcgtgcagctgccgccggacagcccactgcgtgagaagatgacgaagaccgcttacggataa

SEQ ID NO: 225868 - DNA, 1158 bp, Klebsiella pneumoniae
atgggctgggtacgaacaaaagcattgaccatggagcagccatcggctccttcactgacccgatggctgtttgccggtgtactgatggcgattatcggtgtcctgctctttaccctccatgcttccggcaccgtaaaaattctctcagtgataaatatctggtgggtatccctgatgcctgcagggtgctggttgctgattttttgcctgcgttgctatctgtgggacagggatctgaaagcgcatcagttcttgctgaaagaggcggaatacggacagcagaggtgggaagactgggcagggcgctggctggccgttctgggcagtgcagtgctgttgccggatcatatttctgcggcgcattgggggagtgagcggcctcagcaatacggacttacccgccggattaattaccttccggcagaagagcccgtgcagctgagtgcgatgcatgcgctgctgaccagtatagaagagcgcgtgcagtgcctgccggaagagctaccgctgtatgtcaccctgatcacggataatccctcgcctgagctgaccagcagtttcagtaatctctggaaagaacacattcctggccgcgccgtgcctgatgatattaccgttaccggctcattctcactgtcggaagtggaggagcgcctgaagcagcctgtactgacggtcaatttactcctggtcatccagctcaacggtggtacagcatactccgacgggctggccgtgctgctgctgaccagcgatgatgtggcgcaaaaataccatctgccgcactcatcacggctgttacgtcctatgcccttagatatgacgaactttgaagacgatatcaccctgtttctggaaacccagactgtcgcctgccatacgccctccgttatcggggacgcaaaaaaatggacggaaagaagcgccgcgcttatcacgcagggcggcaaaatgcataccccatggaaagctgaagatatcgcgctgctggaaaaatggtgcggtattccgggacccgcagcgccctggctcctgaccgcgctggcagccgatctggtcagcctccgtaaacagcccctgctggcgttattttccagcgaacaggaacattttatcagtaccatcaccccagggagtgaagatgaatataccgggtaa

SEQ ID NO: 225869 - DNA, 2148 bp, Klebsiella pneumoniae
atggcctttaacccggagctggggagcacgtctcccgctgtgctgcttgataacgctgagcgtctggataagctggtcaatgggtctgcgctgactgagccggatcgcgctggcgttgagctggatacctggcgcggaatgatggcgaaaaatgatgagatccggcagaacatcattccgctgagcaagcagtatatgacgcttgaggcggctcaggcggatatagctaatattccggatgggtcaacaacctatgtgcgcagtcctgatgatgcttatctggctgttgaatacaagaacgcgggtggaacgctagaggctaccgggcgcaggatgatttcagcagagtatgttgatgctctgcgggttttaattactgaggaagtggcaaagataatggcgtctggcgccgctcagactactgacgcatatccggatattgcagaattaattctggatagcatgggtaattccacgtatcagcgctatgctgatggtaccagcagattccccgcattaatggtgggggattctgttgagtttgttcagatagccggcgggctgatctgtcaagcccgcggtaccaacgtggaggttttcaggattatgtcttcaggaagctttgtttacggtgaccttatctcgtgggtctctgatgacgaaagtctaagtgaatatactgaagtccatatggacgggcaagggaggatatacaggcgcgtactgcgtgacggcactgttgagcaggtgggagaaggaggggcgtcaggagatgaagccagcaactatccaatggttgcctctgttaacgggaacattatttctgtactgaatgatgttatcacacagattacgaatgattcaggagtgtcgaacatagcgccagtcgcttataaaaactttctcaggtatctatccgatggaagcggtaactataaaaattatcgcgcgacttatgatggaaagtttaaggcccgtgaaggtaacaaaaagcttatccatgttttactgacaggtcagtccctggctgctggtggttcaacaataagtcagagtccagtcactactgtagctgaggcagattatggagttatctgcttttcgacgggtccaaaagttgattttaagtacgatacgttgaacgatgcgcttcttgaatcagtgatcccgtgccgtgagaatgtaggcaccagacccggccaggagtctccatcaagtggtattgctaaggctattcttgatgccactggcgaaacggtattgataagcgatgcttgctcctcaggcaccgatattgccggcatttcactcggaactgctactttttcaggcggaaccaaaatgattcaggcggcggttgcaatggcagataagttgggtatggagtatgtgccagttctgatccttatccacggtaaccagaatgcttctgccggaacttccattgcttcctacagaagtgctatggagaatttgcgcgcgtcttacgagaacatcatcaatacggaaaccaatgactcattatctttgagcatgttcattgggcaactttccaatattgtaccgtatggcggaactgcaggcgtgaccaaaactaacacgatggctattgctcagtatcaggaggcccgtgacaacgagtttattcacctggcgagtgcgcagtatgcgcgtccgtattccgacggcgagcatctgactagcgcagggtaccgtactgagggagaggtaattggtacggttgttgggggatggattaatgacaactcgaaatcctcactcgtaccggttgagtccggtgtggtgcagtctggaaacacaataaccattccagtagcaggttgcgtgggaaatctcgtaatcgacacgactcgcgttgtcaatccgggtaattatggttttctgattactggtggaactatcgcctcagtaaccgtggagggggcagatgagactgctcggatcgttattaccaagacggataacactgcgaccacccgcatctcatatgctgaaactggcatcgctggacagagccctggcgctatcaccggctcacgcggttgcatccacgattcacagagtggcacatcgctggcgggacttcctctttacaacgacctcgctgttttcgcattccagctctaa

SEQ ID NO: 225870 - DNA, 882 bp, Klebsiella pneumoniae; identical to SEQ ID NO: 137383

SEQ ID NO: 225871 - DNA, 396 bp, Klebsiella pneumoniae; identical to SEQ ID NO: 100678

SEQ ID NO: 225872 - DNA, 690 bp, Klebsiella pneumoniae; identical to SEQ ID NO: 181391

SEQ ID NO: 225873 - DNA, 582 bp, Klebsiella pneumoniae; identical to SEQ ID NO: 181392

SEQ ID NO: 225874 - DNA, 147 bp, Klebsiella pneumoniae; identical to SEQ ID NO: 188311

SEQ ID NO: 225875 - DNA, 231 bp, Klebsiella pneumoniae; identical to SEQ ID NO: 202470

SEQ ID NO: 225876 - DNA, 957 bp, Klebsiella pneumoniae
atgagcgagagtcgtccggagagttactggccccatctgtactggctgacggtgctggaagaacaaaaaagctatacccgggccgcggaaaagctggggatcagcaagtcggctatcagccagaaaatcagcgagctggagcgggtgaccggtaaaaccctcgtccatcgcaccacccgcagcgtgagcctcagcgacgacggactgcggctggtggcggagctcaacgagccgtttggtcagctgcgggatattttcaccggcgcctgcgatgaaggcgggccgctgcggggaacgctgcgcctgaccgcgccggtggccttttcccgccagcagctggtcccggcaatcgcgccgtttttgcatcagcatccccagctgcatctgcagcttgaggtcaccgaccggctggtctctctggccagcgaagggttcgatctcgccatccgccactgtcgacgcgaggcgctccccgatacccacgtcgcctggccgctgtgtcacaccgcgacgcttaccgtcgcgtccgccgactatattcgccgccatggccgcccggagacccccgaagatctgcgccaccaccaatgcctgacctatccccgtgggccacagcgcccgcagtggacgttcgcctcccgtcagtcgcccgatgctcgggtgaccatcaacgtgcaggggccattcgccaccaataacagcgagtcgctacgtgatgcagtgctggcggggcttggggtggcgctgttgccggatttcagcgcccgggaggccattggccgcgggctggtgcaggagctgctgccggcgtggcagccagtagaggtgtttgccgatcggctgtacgtcatccggccctataccccgcgcgtgtcgcgcgcggtggaaaccttcagccgctacctgaaagcgaccttcagcgagacgcgtccagctcctgcgccagcgcctcgctaa

SEQ ID NO: 225877 - DNA, 363 bp, Klebsiella pneumoniae; identical to SEQ ID NO: 222401

SEQ ID NO: 225878 - DNA, 417 bp, Klebsiella pneumoniae; identical to SEQ ID NO: 23373

SEQ ID NO: 225879 - DNA, 294 bp, Klebsiella pneumoniae
gtggcgcacgtgttcggtgaacgcactctggccacactggagcgtcttctgagcctgctgtcggcctttgaggtcgtggtatggatgacggatggctggccgctgtatgaatcacgcctgaagggaaaactgcacgttatcagcaagcgatatacgcagcgcattgagcgacataacctgaatctgaggcagtatctggcaaggctgggcaggaagtcactgtcgttctcaaaatcggtggagctgcatgacaaagtcatcgggcattatctgaacataaaacactatcagtaa

SEQ ID NO: 225880 - DNA, 2940 bp, Klebsiella pneumoniae
atgagtaattttaattttctaacagacatcagccctgaactcgctcaatttggtaaaagtgccgagctgtattgccatgatgataagcaggtagcactagtgaaacttaggtgttttactgaagtagtcgttggggaaatttattcacgtttatcgctaaccccacctgttcgtgatgatttatataatcgactgcgcagctacgaattcaaggacgttgtcagtgataagggaatctgggccaaattagatgtattgcgacataaaggtaacaaagccgcccactctagcaatggttcagacgagatttccctcaatgaaacactctggttaatcaaagaagcttatttagtcgcccgttggtatgctcaagctattctcaataagcctatcactccgccagagtttgttgatccggtaaaacctatcgatcatacatctcgcttagaagcagagttagaacggcaacgtcaagaactcaataaacgagaggctgaattaaagacccagcttgctgataatagtgataaatatcaacaacagacgagtgagctaatagctcaactagacgaaaaaaacgacacactttccaatgtaaaaaaagagcaagcactattacagattgaacttgaacaaaaacaaaaagatctagtcgcttcacaacaagccttctttgattacaggacgcgtgaagagtttaaacaagctagtatttcatcagcttcaagctttgatcttgatatggaagtgacgcgccgaaatattgatatatttgattgctttgaaggagtaagtttaactaaaggtcaaaaccaaatagttaagcaaataaatgagtttttaaccgataccaaacaaaacgtatttttacttaatggttatgcaggtacaggtaaaacatttataactaaaggaattactcagtacctagaaagaattggtcgtgaattcgctattatggccccgacggggaaagccgcgaaagtgatatcagacaaaacaatgcaacctgccagcactattcaccgcgtgatatacaattacgacaacgtgaaagagtacaaagttgacggtgtggaagggtctgaaacttatcgttgctatgctgaccttaaagtcaatgtagatactgccgaagctgtttatataattgatgaagcgtcaatggtttctgacagatattccgatggtgagttttttcgttttgggagcggatatttattaaaagacttgctcaagtacataaatattgaccacaacgatcataataagaaagttatttttattggtgataatgcacagttgccacctgttggaatgaatacgtcaccagcgctagatgccagttaccttaaagaaaattatcaagtcgctgtggcttcagggtacttgactgaagttgttcgtcaaaaaggtgatagtggtgttttgaacaatgctgccatgttgcgtgacggtttagagcaaaatattttcaataaactgaaatttgaagttaatgatcatgatgtatttaatttgtcctcggaaaatctacttagcacttatctagactcatgtgatagaaaagttagccgtacaggagaaagtattattattgcttcttcaaaccgacaagtagctgagtataaccgtttggttagagagtacttctttactggtcaacagcaaatggtcgcgggagataaagtcatttcggtagcaaatcactatcgagcagacgcttgtattaccaatggtgaatttggaatgatcaaggaagtactatctcctcattctgagttgattagtgttgacattagcgtcaaaggtgacactggtgacatggttaagcgaaaagtaaatctgagttttagggatgtgattctaggctttcgcaacgactacggtgaaccattcttctttgaagccaaaattgtagaaaacctactttacaatgatcagccgaccttatcgtcagatgagcacaaagcactctatgttcactttttaaatcgacacccagaactgagacgtaaaggtaatgaacaaaagcttagaattgcattattgcaagatccttatttcaatgcttttaaacttaagtttggttattccattactggacacaaagcacagggtagcgaatggaaaactgttttcttacagtgtcaaacacaccaaaaagccttaactaaagattacttccgctggttatacaccgctataacgagaacttctggcatcctgtatgtaatgaatccacctcagttgcgcttaggagatggaatgaaaatagcaggagcgtaccaacccaaagcagtaaacctagacaattctgctcctgaaggcgttgaggttgtgcgaccaagtaccgaagcaacgaactcagtagccacagcgaagtttgattttcagactgacatcccgcaacttaaaaagctataccaacttgttgatgcatgtattgaaggtacagggattactgtagtggatgtccttcattataactatcaagatcgttacatcttgcagcgcgggaatgagcaggcttcgataagtttcaattacaagggtaactggaaagtgtctggcgtaaagagcattactcaagatgggttcgatgttgaactcatggctttgcttggtcaattagaaggtactttgctcgatgtacctgagccttcaaaggatactcagttccatttttcagagccattcttagaagagttttatctaaatgtaatggatcaaatcaacagtgttggagctgatataagcaaaattgaatctcgttcattttgtgaaagatatgcatttgttaaaggcaatgagttggcggtaattgagttttggtacaacaagtctagccagtttactaaagttcaacctatgcctcagcttagtaattccacaaggctcattgacgaaataatatgtcaaataggtgtgcttctatga

SEQ ID NO: 225881 - DNA, 1425 bp, Klebsiella pneumoniae
atgaatgagccagctaatcgtacagtaaataatttgagaaagagcggagacctgcaaggggcttgggagtttggttttcaagcgttgcaggcagctccccaagatacttacttgaaaggtgctttattttgggtgtgttatgagtttcttaagcaccagcttgaaaatctaaataagcgagcgagttcttcaaacaactatcgtcctactgattttgaatttgagcaaatagagaacttgctgcaaaccatagtaaatttagatattgctactggcggcctagagtacaaaatgctgctggttcagtttaagaagagtttggaatggtttccaaccttgattcaccttgtgcttcgacatcaaactgtactatttgatgatgaggctaaaacaccttttcaagctgaaaaaggtgaagtgccaagtttgatgctctcaacagcacgccaagtggcgagtgcatggcttagagcacgagagtattggcatctagatcttaaccaagtgatggcatttattaaccaaacacgcgagcaagcctctgacactaaacatatgatgtggcttgattacgaccaagcgaagtgccttgttgttgcgggccaatacgatcaggctcgcgaactcattctacccattttaagaaagaagcaaaaagagtcttgggcttggggagcgttggctgctacttattcaaaacaagatcagcgtttagcaatgaagttttttgctaggggaatagtatccgcacatgacgttacttttagtttacgtttattacagggaattattcctttattacttgcaaatcaacagcaagctgaagcctcaatgtgcctaaaaacggctattgcggcttatcaagcccatgggtggaagctaaagcaagagctagaacagctatctatgcaggcttggtatgattctggtgtcgatgagaagcaactgagtccttttttaaactctatttctcacgacgctttaaattacttgcatgggccgatggagaaggttgttgctatcgtagagaatatccataaatccggtaaaggctttcaagtattcgtaaataagtcgacatcactatcagttcgcatgggggttcataaaggtaagcagaaacctcaggctggtgactatgtcgagctatccgtagcgagtgttgatggaaacaaagaagtagtagcttcctcatcgtccaagcaagtagatatggctgatgtttcgtatgtagagggtacgcttcgaatagcacccaaaggcttcggatttgtcgaggatacttttgttcctccctttgttataggtaatttaaaaaatgaaacaaaagtcagagcactccgtatcatgagttgggacaaatctaaagctcgccacaactggaaagcgattaagttaacggaactaaattttaatgaatactaa

SEQ ID NO: 225882 - DNA, 1398 bp, Klebsiella pneumoniae; identical to SEQ ID NO: 222397

SEQ ID NO: 225883 - DNA, 756 bp, Klebsiella pneumoniae
atggcggaaatagcggttataaaccataaaaaacgtaaaaatagcccgcggattgtccagtcaaatgagctgactgaggcggcatatagtctctccagggatcaaaagcgtatgctgtatctgttcgttgaccagatcagaaaatccgacggctccctgcaggaacatgacggtatctgcgaaattcacgttgctaaatacgctgaaacattcggactgacctccgctgaagccagtaaggatatacgacaggctttaaaaggttttgcgggtaaggaagtggttttctatcgccctgaagaggatgccggcgatgaaaaagggtatgaatcctttccctggtttatcaaacgtgcgcacagtccatccagagggctttatagcgtacatatcaacccatatctcattcccttcttcatcgggctacagaaccggtttacgcagttccggctcagtgaaacaaaagagattaccaatccgtatgccatgcgtttatacgaatccctgtgtcagtaccgtaaacctgatggctctggtgtcgtgtccctgaaaatcgactggatcatggagcgctaccagctacctcaaagttatcagcgtatgccggattttcggcgccgtttcctgcaggcaagtgttgatgagatcaatagccggacacctatgcgcctctcttacatcgagaaaaagaaaggccgccagacgactcatattgtattttccttccgtgatatcacctcgatgacaacagaatag

SEQ ID NO: 225884 - DNA, 531 bp, Klebsiella pneumoniae
atgaaatatccaaccgtatcagtgaacggcgtctccgttcgtgtcgatggcgatggtcgctataacttcaacgatcttcatgctgcggcagtagcaaaaggggaggcaactgagtcgcagaggcccagtaaattcctccgcagcgctcagattaaaagattcatcaaagcattgcagtccaaagcccaaaaaagtgctttggaacaaattcaaccacttaaggtagttaaaggtggggatgagcctggtgtctggggagtggagctgcttgccattcgctatgcagcatggattaagcccgagttcgaaatcgaggtgtatgaggtatttcgtacggttgttcgtatgggcattggagcaatgtcccgcctgaataaaatcgaccatatcatcaacactgaaaccaaagcgattagccagtgtgctagccagatggcgaaatggggagtcggcggacgtaagcaattgctccatgctgcgcgcgatcgtgctgccgatgaagtgcagttgtatttgccaggtatcgcataa

SEQ ID NO: 225885 - DNA, 504 bp, Klebsiella pneumoniae
ttgagctgcgatccgctgctgctcatactgccggtcagcggcatttttcagcgccaaagcattctcatgagcgagaaccccttgctgctcaaactgctgaatcagcgccagctcctgcgcgtgctggttagcgagttgctgcaccgggtcaacttcggcaagtgcctgctgggtggggttaaccacctgctgcgagcgtattttggcaaggttggcctgatgctgctgctccatctgctcagtggctgcgttgtattcctgcagatcaatctttccggcgttcagcgctgctttcaggttctgcatggattcagcgtaagatttattctccgcctgttccggaatggcattaagcgcctccgttacccccttcgccgctgcggctgcatcccatgcggctgctgcgtatttgcctgcttcctggatttgagcctgagtagccgatttaccgagagactgctgcgcacgcaatatcgcctgctcacggctcaattcctgagttga

SEQ ID NO: 225886 - DNA, 369 bp, Klebsiella pneumoniae
atgggcgctaaagttcgcggcatccgccaggcgaaggccaacctcgatcgcatcatcaaagacgtccaggggcgtaaagtcgtgcgagcaatccagtctgcgatgcttattggcagtgcgcaggctgcgctttacaccccgatcgatacgtcgacgcttatcaacagccagttccgcgaaatcatggctaacggcaccagggtaaccgggcgcgttggttattcagccaactacgcggtttatgttcacgacccggcagtgaaacagaacttcacgcgagcaacggcccgtaaggagttcttaacgaagggcttcgaagatacccgcagccagattgacgcggtggtgaagaaggagctttcgctatga

SEQ ID NO: 225887 - DNA, 798 bp, Klebsiella pneumoniae
gtgcggtttgcaaaacagctggataaagagacatggggttttgaagatccttcaattaaaggcacatttgtctggtcccggtctgccgggcagggaaaatttgagtggggttccagccagacgactgttcatgacgggagcgctggcggctataccacaccgcctacacccattccggaaccgcggagcatctgggggttgcctaacccggccccggaatcgttaccgcccgtaccgggaacgccgatcccggaggaacaggaaccaaatattgaaacattgcccatcgaagaccgggatttcgatgactttattattgttgacccgatgggggttatcccggcaatctatgtgtattttaagaaggctcctgccggatttctagaaaccggttattataacgactttgatgggaggtcaagagaaggaatgtacgaggttgaccatttaccatcaaaagcggcggttagagaatatttgattaataaatatcctgaagcagaaaaggatgatataaaaaaattacttggtaaggttgcagtcgtttctatccctatagatgtacatcgtgactgtagtgaaaccttcagagggcgtaataatagtaggatagaaacagaaaatggtgagacaatatctaaaaaagaacttgatgctcgtgatttagaatttgccgttgactcgaattggaatgctaatgctaagtgtcttaaagaaagatatggcataagtgatgagaaaattgaagaagttagagcaaaattgcatgacttaaacagaaaagtggggttgtactaa

SEQ ID NO: 225888 - DNA, 627 bp, Klebsiella pneumoniae; identical to SEQ ID NO: 222426

SEQ ID NO: 225889 - DNA, 1110 bp, Klebsiella pneumoniae; identical to SEQ ID NO: 215013

SEQ ID NO: 225890 - DNA, 702 bp, Klebsiella pneumoniae
atgctgacgagtgcggtagatgcgtttagcggtaatgcctcaaatgccataaccggcctgctaaccggcacaatgtcggcacaggaagcgatgcggtcgctcggcaataccatcctgaacagcgtgatcaacagcattgtccaggttggcgtcgaagcgctgaaaaactacatcctcggtcagacgctcggcgccgcatcggtggcgacatcagtcggactggcagcaactaccgcatcggcatgggctccggcggccgcgatggcatcgctcgcctcgttcggtgctaacgctggtccggctgcagctggtatcagttcgacagtgggacttgctaacgggcttgcgcttgccggcgctcgctacaacggcggcccggtatcagccggcggcctgtatcaggtcggcgagaaaggcaagccagagatttaccaggccagcaccggcaagcagtacatgatccccggcgataacgggaaggtcatcagcaataaggatatgcagtcaggaggaggggtcagcgtgcaggtgaacgtcatcaaccagtctaccggcgccaccgttcagagtgccgacggctacatgcaggacggtagcgcagtggtggatttgctgatcaccgacatggaaagaggcggcccggtatcctctcagatgcagcagacatttggactaagccgcaaagcgcaaggtgcttactaa

SEQ ID NO: 225891 - DNA, 504 bp, Klebsiella pneumoniae; identical to SEQ ID NO: 52325

SEQ ID NO: 225892 - DNA, 240 bp, Klebsiella pneumoniae
atgctgaccaaaatcaagatccctcgcaccgcccaggagacaacgactacggctgccgcgataccttactcgatgccgtcatcgaatatcctgattggggcgtcggttgatgccgccaccaccggcagttcatttatcagagcctccctggttgccagccgcgctttaaccgatgcagagattgcaacgatttactcttactacaaaaactattaccagttaaaaggtaaaaccatctaa

SEQ ID NO: 225893 - DNA, 978 bp, Klebsiella pneumoniae
gtgataaaaagtaagcttttgagaataaaaaaatggattgatgctaatgaagccgctgatcgtttatccctatctcttgaagacaaagtgtctgccttagaccttttagagctagcattagataaagaaattaccttatctgtaaaatttcccagaacaaaacattttgtcataagggaagtaaaggtagcatcgatgccttatattaaacgtttagaggaaacattcgatttttatttgatggggaaattcaagaaggctatagggtatcctgaaagaggcagttcggaatataattctttgtttgaagcttatttggtcgatgaatgtttaaaacacaatttttcacttgctccttctaataaatgtggtttgtctggagaacttccttcgatttataatgttgaatatgaatatttcgattatagtcagaacttgcaatacatggatgatgttatttttgaacttccaatgattggcgctgaatttatagatatagcatctcttattgaaacaaataagaaaagagaaccatctgaactaatgaatattgatggtgtttttctgcgttcctcaaatggtaagctttataacctgatgaatagatttgacgaaggttatgtttctgtttttaatggcggaaaagacgtcgaaaaaaatgtttgctatctagataatagaaattactatcctgccgaaggtcttcctgttggatgtgaaattggtatttcccctgcaaatctttttgattttgaaaggcgactctcagacgatggggatgaggttgatgaagtaatttcacaaaaagcgttagtggttttaggggcagttcttcaagaggttacggagcgaccagttaaatggagtcaaggtaggttagctctatctatagactctagaaatattagaggcatgaaagaaagaacgattaatggtatcttctctcttgctaataaggctttaaaatcaaatggttag

SEQ ID NO: 225894 - DNA, 432 bp, Klebsiella pneumoniae
atgaaaaaagaaaaccgcccgttacaggcggctaacatagatcatcgcggatctgatgttacgccaccagcctacaccgttcaagcctcaagacgcactccgaagaaacaccgtgctcgcacctacatgctgcgctgcgggaccggtgggtggacagagaatgatatcctgcaccattgccacctgtcgtctggccgtaattatgccagcgagttagagcgccgccttgatatcctccttgagcgcacggacgaaaagaatcccgacggtatcggctcacacctccggtaccgttttaccgggcgcggtgacgttctaaaagttattcaactggtaaacagcaatgctgccgctggtggttattacggcctttctgagcaggatatcaccgacattctgaatctctacccggacaacctcaccgccgcataa

SEQ ID NO: 225895 - DNA, 603 bp, Klebsiella pneumoniae
atgaaaatcgaaaaaagcagattcaattctgaggcctccgctcagcctgtagccagccagaaagagatattcaaagccgaagagagcgatatttcagttattaaatttgaggggtataccgtgcgcattgtgaatgtttacggtgagccgtggtttgttgtctcagacgtctgccaggcactggagatcagcaatccaaccagtgccgtttcctctttggattgtgacgaggtaatgaccctaactttaactgagggtcattcgggtaagcgcggcggggcgcgtagctggaatatggccgcagaatctggcttctataaactgattgcccgtagccgtaaagcatccacgtccggtacgttcgcccatcgcttcagtaattgggtattccgcgacgttatcccgtccatccgcaaaaccggctcctacggagtgccgttcgcattcctgaatgaccatacccggcgcaaagagctgtacacgaagaaggccagtaagcgcggtaaagacctgcagtcgtgcaaaggcgagaaggcccgccttgctgctgaagaaatcgagctttggcgcaagtatcagccggatctgctggaggttcattaa

SEQ ID NO: 225896 - DNA, 222 bp, Klebsiella pneumoniae
atgagccatttgcagcttattgatgcgacttgccaggttgagcaggcgcaggccgttttatccctctggctggaaagaacctcgaaagattcagacccagacctcccgcggctcttaggttcaatcatcacgttgttgaatggtgttccggaagccatgagcgaggcagacagcgcgttacatgattatgcgatgcgtgaatttaaggagggcaggtcgtga

SEQ ID NO: 225897 - DNA, 627 bp, Klebsiella pneumoniae
gtgagcaatgtttatccattccagaaaatgtcgggaaataccgaactattccgtgctgagcctacgcctgaaggggtgaggatcaccagcgctggtggcgatggtcgtgaaacagttcagcttattagctatgaggacgccgtgaaccgtcttgacgctggcgattatgacgactccagcacgggttatgacattcaccttgccgtagcagagggcggaaactgtggatatttcgactttaccgcgcagcacaacgtcactatgtggcgctggctgattgccgcggcgttcatcaccgagatgaagctgaaaaacggtacgaccattgttactgagccggacggcacgtcatcgcaggtggcggttttttccaatggcaaagcgtctatcacggtttatccattctctgagcgcctggcgatagcaaataacatcgagggggcaatgattgaacgctacggctcagaagagggcgcggaaaaggctattgtgttttatcaggccatgctggatgtggaggccggagaactaacctcattcggacgtgaaacgctggcagaactacacgatcacttcatcagcgatctgcagcaaaacggatggcctgaaatgccattgacgcactga

SEQ ID NO: 225898 - DNA, 351 bp, Klebsiella pneumoniae
atgattactaagaacttccggcttaatgcgctggcgaaccagtacgcagcggcgctgtataaccatatcaccgccaccagccacggcgactacttcatgattgatgcgggtggcgagcttgtgcgcgtagagattgctggtggcgtgaaaggcgtccgcgacctcatcgacggctacgcgctggaggcgctgaaagaacattatccgcagtgggaaagcgtagggatcgagctgcttagccgctgcgtcaccgctaccggtctgaccgggcgcggtcgtgagatatggcaaagcatggttaacgatatgggcgcaaccgtggcaggcaatcacgggggggagaatgcgtaa

SEQ ID NO: 225899 - DNA, 2763 bp, Klebsiella pneumoniae
atgcgtaatatcgacctcattcgcgaagtgactcatgccgccgctggccgctggccttcggtgctggcgggcctgcatatcaatgtgccggattcaccgcgcaggcatgggccgtgcccgtcctgtggcggttcggatcgcttccgtttcgatgatggcggccgcggcagctttatctgcaaccagtgcggcgccggtgacggccttgacctaattcgaaaggtgaacaaatgcgatacctcagaggccgcgcgactggcggctgatgtgctgggtattgattaccgggcagcagtacaggacgacgccaccgccagccagaggcgggagcagttggaagccgagcgtacacaactggagcaggagcgccagcagcgggcggcagtggacgtacagcagcgccgggctacgttttcacatctgtacgatgagaagcgccagaacgccactcagggcgaatctgaatacctgactggtaaggggctgggcggcttcaccttccctatgctgcccgatggatcaatcctcctaccgctggtggatgaggctggagcagtcgtggcagcgcagactattacgcgtgcaggagtgaagcggctggtggccggttctgcaaagcgcggggcatatcacgccgtgaacacggcagaagacccgcagaccgtgttaattgccgaggggttggctaccgctctaacgtgtcacttaatttgccccgatgctctgacagtagcaggagtagacgcgggtaacctgctgcccgtcgcggaagtgatgcgccgaaaatacccgctggcgcagatcgtcattgccgcagataacgatataaagtcggacgaaccgaatacaggcaaaaaggctgcagagaaagcagctaaagccgtctctggctgggtggctttaccaccaacggtggtaaaggccgactggaacgactaccaccagcagcacgggcttgaagcggcaacggcggcgtttaatgattcgatgtaccaaccgcagggggaagccgtgataccaaagctacaggccattgatggcggtaaagtcgcggacaaagacagcgatcggcttaaatcacgcatcgacagccgcgcagacggaattttttgggtaacaccgaagatggataaagatagcggggagattatcagccacgaagcctggctatgctctccactggaagtggttggtactggccgggatgataaagaccagtacctgattatgcgatggcaggcattcggtgccgatgcgctgacgacagcagcgatcccgctggctgacattggagaaagggagggatggcgcaccctgaaaaatggcggtgttaacgtcacgactaaaagcagcttgcgggctatcctggctgactggcttcagcgcagcggtgcgcgtgaactatggcgcgtggcccacgcgacaggctggcagtgcggggcttacatcatgcccgatggtgaagttatcgggacgcccgagcacccggtgctgttcaacgggcgcagctctgccgctgccggatataccgttaagggaacgcctgatagctggcgcagaaacgtggcgcacctggtcgccggcaactactcgatgatgacggctacagccgctgcgctggcggccccgctgatagggctggcgggcgctgacggtttcggtattcacttctatgaacagtccagcgcgggcaagaccaccacggcgaacattgccagcagcctctacggcaacccggatttgctgcgcctgacgtggtacggcacggcgttgggacttgctaatgaagctgctgcccataatgacgggctgatgccgctggatgaagtaggccagggatctgatccggtaagtgtttcgcagtcagcgtatgccctgtttaatggcgtgggcaaactgcaaggcgcaaaggaaggagggaaccgggatctgaagcgctggcgtacggtggcgatcagtaccggggaaatggacttagaaactttcatcgcgaccgccggccgcaagactaaagccggtcagttggtgcgcttgctgaatatcccactgagtaaggcggtttgcttccacgagcaccggaacgggaagcagcacgcggatgcgctgaaggaggcataccagcaccaccacggcgccgctgggcggcagtggattaagtggctggccgaccaccagcagcagtctacagaagctgtccgggagtgtgaggcccgctggcgcagcctgatacctgcagactacggcgagcaggtacatcgcgtagccgccaggttcgctattctggaggcggcgttgctgctgagtgccggcatcaccggctgggatgcacagacctgccgggatgcggtacagcacagctataacgcctggctgcgggagttcggcaccggcaacaaagagcatcagcagatcatcgagcaaacggaggcgtttcttaacgcctacggcctgagccggtttgcgccgttcccttacagtccggcagacctgccaataaaagaactggccggctaccggcggcgtcagggggaacacgacgagagcccgatatcgttctatacgttcccggcaacgttcgagaaggaaatcgccgcgggctttaatcacaagcagtttgccgaagtgctgaaaagagcgggaatgctgacaccgccgagcagcggacgcggatatcagcgcaagtctccacgtatccaggggaggcagatcaacgtttacgtcctcagctacctgccggaggactacgaacagccagaggaatag

SEQ ID NO: 225900 - DNA, 243 bp, Klebsiella pneumoniae
atggaacttgctgctcgagggctgcatcaattctggagcatggttttagggttggaggcggtggtcggcgtggtgtgggcgcttatctttggcatgctgctgaacagggatgccaatatgccactcaacttgcagaaatgtggtttgctgctgctgagaaaagaggtgagtattcagacgaggctgacaaaggttgtgctgttctttggggatacgtcaaggcacctgatgaagaggttttaa

SEQ ID NO: 225901 - DNA, 309 bp, Klebsiella pneumoniae
atgaaccgtaaaatgaaggctgcattggacgcggcacttaaagacatcttgtctttatcgccggaagagttccttaaagaagctcgggagtgtagggaaggggatgttttctcttttttgaaaaaaagtgaaaagtttaaagattttgatgtaagtactcttgagcccttgtctttgcatttttcagaagtcatgaccgaggatctcgtaacgttgttctctactgtgaagctaaatatatctaattcgttgaatatagataatattttagttattgaagaagaacctgaatttgcactggcggcctaa

SEQ ID NO: 225902 - DNA, 624 bp, Klebsiella pneumoniae
atgtcttcactcatctgcttctctacggatgaattcgcaattgtagcgacggatactcttggcgtggatgccgaagggaatccctttatccttactaataaagcgacatatctaccaactataaaaacgattatatgcggcacaggaacgggtggatttcatgctcgctgggcggaatttgtaaacagccgcatgattttattagacgtggataatcttgattaccatgctccatccacactaaaggatatgtgggaggagtataagaaggaatacaacgtaggggatgagtgcacggttactatctatcatgttggaatctctcaggcatcgggaagaataaagagatttgcctaccgctcttcagaatacttcaggtcagaggaaataattcatggttggttttacaaaccagagtgctcagtccctgacggggaagacatcttgggaattatcaaggcaatgatgtttgaacaaagggcaatacaggatgcaatgccaagtgctgaaagagtttatattggcgggcaaattaacgtcataatccttgagaaagattgcgttaggctcatgacgatagccgacttcccggacttttcatcggtaatcaacaagttgttttaa

SEQ ID NO: 225903 - DNA, 267 bp, Klebsiella pneumoniae
atgagcaaacccgactgggaggccatcgagacggcgtaccgggccgaggtgatgtctctccgtaaaatcgcatcgcagcacagcattagccacgtatccattaacaagcgggcaaagaaagaagggcgggagaaagacctatccgcaaaagtgaaagcaaaggctgatgctctggttaacaaaagggaggttagcaggcaggttaacagcaaaacagctttaaatattagactgtactggacggatttaaaacgcgggcattcttaa

SEQ ID NO: 225904 - DNA, 192 bp, Klebsiella pneumoniae
atgttcgaccgtcacaagcttgaattaacgttgctggagatagccaggcagagtggcgaggggcttgatagccatacccgctacactattcgcaacgggctggcgcaggcgctacaggccaaagagcgccaccggcgcaggatgaacgtgccagcctaccagtggaagaagcccaccacgccgcgtaggtaa

SEQ ID NO: 225905 - DNA, 336 bp, Klebsiella pneumoniae
atgagtgaggttgctaagccactgcgcagttttaccaccataaaaatcaagcactatatctatggtctctttgtggtcttcactcagcttagaggtgtcaccgtctctgaaatctaccgagctaactttgaacattcctcgatgcatattataaaggtgtttgttgaccgggccgttagcccacgcctcaaactcttcagggaagatttcttcttcgtcccacaccaaagcccatgcttggctgtaatacaccaacttttgaagcttcatcgcagtgatttcaccagttttttcaagtatatacttagcggcatcaattacgcttgccatagatag

SEQ ID NO: 225906 - DNA, 600 bp, Klebsiella pneumoniae
atgtcgagaaaagatattcgcttggagcgcaagtcagctaaggctgaaaaaagaagagagaagtctgtacgcttagttgcgtcattccaaaatttagctgttaaaaatcaacctaaagtagcatttcttcccgatttagaaaaaattccaattattggttcttcctttgggacacttgacgtgccaaaacaaccggtagcaaatgaatccggctcgcggttcggtcgtttaatgacttggtgtgcgcggcatgccgatgtgaatggtcaatgggaatggggagaattgaggcagtggaacgaaggcgtgtgggatgaccccataattttaggtatgaatgcccttcaagggttagattggcaagaaatacaaaagatggcatctggtgaaaggcaccttatgcatcatgatcatgacataacagatttatgtgatgaggccgtagcaagatggatggatttgggttacgaacaattcgacaccatttttaggttcagattagggaatactagaagagcttggggtatcgaacttcacgggcatttttatctaatttggtatgaaagaaagcataaaatatatccaacttcagaaccgtaa

SEQ ID NO: 225907 - DNA, 414 bp, Klebsiella pneumoniae
atggcagcattccgcgttccggctgaattgcatggcgtatttaatcaggctgtagcggcggcggactgtgacaaaacagcgtggctgctcgttgccctgcgcatcaaactgaaccagccagatagcaactcacagatgcgcatgcttgagctggtggagcgaatggaagtagcggcggctgctctggcgggtggcaagcaggggatcacgccgaccctgtacaatgaagcggctcttatcgggattgttactgatactatccgagaatggttcgacaatggccgcgttatcgctgagagactcaatgaggctggttatcagtctaaggcgggtaaggcatgggataaagacatttacagcgcctggaagcgtcagggacgcaacgctgataaactgggggtcgagttacactga

SEQ ID NO: 225908 - DNA, 357 bp, Klebsiella pneumoniae
atgaccagacggttcacgctgtacgcttacaaagacttcacccggatggcgtttaatcaagaaaaatacgtggcggatttatcctgggatgagctgattcagatcatccagtttgtgtgtcaggccgaaggtaaggaatctgaacaaagctacgcgctgggactgcttgagaaaaactttgatgccaatccatccgacctcatctactggcctaatgaatggtttcaggataaagacatgcttcatgtcgatttaacgcctgaagaaatcgccggatacctgatggcaaaatctggccggcggctaagcgatgcgccgcaaatcgagctgaagtatcctatcccttcaaatatttaa

SEQ ID NO: 225909 - DNA, 237 bp, Klebsiella pneumoniae; identical to SEQ ID NO: 183035

SEQ ID NO: 225910 - DNA, 2163 bp, Klebsiella pneumoniae
atgtcagttatgaaaaatacctcagtgaaagattccgatgagattgacttgggacgattagtcggtgaattgatagatcatcggaaattgattgtatcagttactgcattgtttacattgttggctcttgtttatgcgcttttcgcaactcctatttatcaggcagatgctatggtacaagttgaggagaagcaagctaatgctattttaagcaatttaagtcaaatgctcccggatagccagccacaatcagcaccagagatagcattgctacaatctcgtatggtgttgggcaaaacagttgatgatttaaatctccaagtaattgttgaaaagaaatatttgccaattgtgggagctggttgggcaagattaatgggggataaatctggtacgattagtgtatcaagattttcaattgagaataatctagatgaagacccagttacagctcaacttactgttgtagataatagtcattatgtgttgactatagatagtcaggagttgaaaggtaaagttggtgaattagttgaaaaaaatggcatatctataaaggttgactccatcgactcaccaaatggtactaaatatgatatttcatcaatatcgcgcttaaaggcaattactgaattacaaaaatccttttctgttgttgatcaaggaaaagatactggcatattagctttgactttgacaggtaaagaccctgtcttaattaaaaaaataatagataatataagtgagaattatctcgctcagaatattgcacgccaagctgcccaagatcagaagagccttgagtttctaaacaatcagctcccccaagtcagaaatgatcttgataatgcagaagataaattaaatacttacagacgaaaaagtgattctgtagatttatcacttgaagctaaatctattttggaccagatagttaatgttgataatcaactcaatgagttaacctttcgagaatccgaaatatcacagctgttcacaaaggagcatcccacttataaggcactgatggaaaagcgtaaaactttgcaagatgagaaagcaaagttgaataaacgtgtgtcagctatgcctgaaacgcaacaagagattttacgtttgagccgagatgtagagtccgggcgtgctgtatatatgcagttactgaatcgtcagcaagagttaaatattgctaaatcaagtgcgattggtaacgtacgtataattgatagcgcagttactgaactaaaacccgtaaaacctaaaaaagcgattgttgtcataattggtattatgttgggtgtaatagtttcagttggtttagtgttacttcgtgtatttttacggcgcggaattgaaagccctgagcaattagaagaagttggtattaatgtgtatgcaagtattcctgtatcggaggtattaactcagaaaactaaacaatttcctggtgccaaaagaaaattatttgacgatgagcagggatttcttgctgttgagaacccggccgatcttgctatcgaggcaataagaggtttaagaacaagcttgcattttgcaatgatggaagcaagaaataatgtcctaatgatatctggcgctagcccaaatgcagggaaaacttttgtaagtaccaacctagcagcagtgattgctcagacagggaaaaaagttcttcttatcgatactgatatgcgcaaaggatatattcataagttatttagagttgctaatgataacggtctttcagatctgctgtcaggtaaaattaatagagacggcgttataaaaaaagtaaactctattggatttgatttaataccaagaggtatcgttcccccaaatcctgccgagttattgatgcaccgtcgctttggcgaacttttaacatgggcaagccaacattacgatatcatcgttttagatactccaccgatattagctgtaacagatgctgctattattggccattatgctggaactaccttgctggttgctcgatttgaacagaatacagttaaggaactcgaggtaagctttaagcgttttgagcaaagtggagtattagtcaaaggctgcatcttgaatggtgtcgttaagaaagcgagtagctattatggttatgggtataaccattatggttattcatataatgatgacaaatag

SEQ ID NO: 225911 - DNA, 861 bp, Klebsiella pneumoniae
gtggtctcgacgctggtcggtatcgccattcaacagggtaaaatccactcccttaatgacctgattaccgtttatgaacccgaactgaaaggcaccgcctgggacggcgtaacgctgaagcagttgattcaacacaccagcggggtggaatggaatgaagactacaccgacccgcagtcgcatttcgcccgcctgacccagtgtgaagcgcaccccggcgcctatgcctgcgtgcgtaagatcgtcaccggcctggcgcgtcaacacccggcgggcgagcagtggtcctactcttccggcggcgcctggctgcttggggatatcctggagcgcgccaccggcatgtcgctggccgcctggcttgaacaggctctatggcagccggccgggatggcccacgacggcgtgtggcatgcttatcagcaagggaagcacgacgtcggcgcccacggctttaacgccacccttgaagactggggccgctttggtgaattcgtcgcccgtgacggtcggttaagcaatggcaaacagctggtgccgactggctggttcgatcaagccgccagctggaccaaggcgctaaactcggtctcggcagcgcatccggagggtatttacggctatcagtggtggaataacgcgattccggcgaatgcgcaaaacgtccagccgacgccgcaggaagggcttaaagggtcgctgtgggcgctggggatctacggccaggtgatcatggtgaaccgcgcggaacacctggtgatcgtccagtggtcgacctggccgcaggcggaaccttccttcaacgctcagccgttggaagcggcgctgatgtacagcgccattgcccgcgagctgcgttaa

SEQ ID NO: 225912 - DNA, 549 bp, Klebsiella pneumoniae
atgctatcttacatgctatctcaatatgccaggctacctgtgtctgaagttactctacgttcatggttaaaacaatggttgtcagagcaggaatcgaggtgtacagacagaaatttctcggcgggatttccctggagagaaactggattatgtcaggaatattttttacaacgaaaactcaaaattgatggaaagcaatttcttactgtcccccgttatcagggcggaaatattaacaaaccttttattgatattgtaggtatggattctgacctaaatcatactgcattagaactcattagtaaggaatggtcacaactcagagctcagtatgtccgcatcttgtacccggccagtccttcccgcagggtattcccgaccagtatatatatgccacttctttttctgaaccccctgaattcaatgataaatctcttactttgcaagtggcgacatacgaagattttgactggtgttgtcaggccctgggtgatgcctataagcatacatggcagacagttcgcgaactatctgcaagcaatttggtag

SEQ ID NO: 225913 - DNA, 2061 bp, Klebsiella pneumoniae
atgacgcaccgggcgagggataatgttccctctgcgctgtgggacgaaggtattagcgcctttcagagtaactatcgttattcaggcgccagccagcgtacccgcgagggcagcaccgagcgcgataactatctgatgttgaaaagcggcgtgaacgtcggcgcctggcgcctgcacgccagcaatagcctgaccgccaacagcgatgataagccccagtggatgaccagcggcgcctggcttgagcgcgacctgacgcgctggcagagtgaactgaccctcggagataccttcacgtcgggcgatgtgtttgacgcggtacagtttcagggaatatccctcgcctccagcgatgcgatgctcccggactcgcagaaaggttttgccccgaccatccgcgggattgccagaaccaacgcccaggtcacggttcggcaaaatggctacgtgctgtatcaaacctacgtcacccccggcgcgttcgtgattgacgatctttatcccaccgccagcagcggcaatcttgaggttgccgtcaaagagtcggatggcgaaatccgccgcttcacccagccgtatgcttcggtgaccagcatgcagcgcgaaggcagcctgaaatacaacctggtcgccgggcgctaccatagcgacgatgccagccagcggccgttgatgatgcagctgtcgctgatgcgcgggttcgcccacaatctgacgctgtttggcggactgcagagcgcggcgcaataccataacctctcgctcggcgcaggacagggtttgggagaagccggggcgctctcgctgcagctgttaaacgcccgcgaccggcaccagcaggatccgatcgatggccgggcctggcagctccagtacagcaaaggttttgatcgtctcggcacgcagttgactttcaccggctggcgttattcgcatcagcgctatgccacgctgagcgaggcgttttccagcccgggtagcgacgacgacttgcaggatagcgacaacaaaaaagcaaccctgcaaatcaccgccagccagagcctgccgtacgatatcaccctctatctgagtctcgaccaggacagctactggtcagggggcgccacacagcgtaccgccaatatggggatcagcagccaggttcacggtatcgcgtggtcgctcagctacagcgactcccgcagcagccacggtgacgaggaggatgacgagccgcattccgacaaagtggtgacgttgtcactttccgtgccgttgagccacctgctgccggggagctatgccggctataccctgacctcctcccgccacagcgttggcagtcagatggtcagcctcaacggcacattgctggacaatcacgcgcttagctacgccgtcagccaaacccgcgatcggcaaaacgggtccagcggcagcctgacggccgggtacagcagtggaaggggcgatctgaatctcggctacagccacgattcgcagtccgctcgtctgaactacggcgccagcgggggcattctgattcaccgccgcggggtagtctttacgccggaaatgaatggcgctgtcgtcctgattgacgccggtggcgccgggggtgtgaccctcgccaaccagaaaaccatcgccaccaatggtgacgggtacgccgtgctgcccttcgccaccgcctatcaccgcaacgacgtctctctcgacagccattcgctgccggagaatgtggatctggccaacagcaccgtgacgctggtccctaccaaagacgcggtggttctggcgcgctttcacacccacgttggctataaggcgctgtttacgctgcagtcgcgaggacaaccgctgccctttggcagcgaagtacgcgccaaagacaccaacagcatcgttgccagcgagggtcaggtgtacctggccggcctggcgccaaaaggcaccctgtatgcgcaatgggggccaggccctcagcagcgctgtagcgcccgctacgatctcaccccgacgctggcgcagcccccccatccactcatcttacagcagacgttatcatgtcctttttaa

SEQ ID NO: 225914 - DNA, 1452 bp, Klebsiella pneumoniae
gtgaaaactttaaaccgtcgtgatttccccggcgcgcagtaccctgaccgtatcatccagtttggggagggtaacttcctgcgcgcattcgttgactggcagatcgacctgctcaacgagcataccgacctgaatgcgggcatcgtggtcgtgcggcctatcgccacagattttccgccttcgctgaacacccaggatggcctgtacacgactattattcgcggcctgaacgagcagggcgaagcggtcagcgatgcgcgtcttatccgctcggtcaaccgggagatcagcgcttacgcagacttcgacgcttttttacgcctggcgcataacccggagatgcggtttgtcttctccaacaccaccgaggcgggcatcagctaccatgccggggatcggtttgacgacgcgccgccggtcagttatccggcgaaactgacccgtctgttgtttgagcgttaccaacatttcgccggtgcggccgacaagggatgggtgattattccctgcgagctgatcgattataacggcgaggcgctgcaggcgctggtgctgcgctatgctagcgaatgggaactgccgcaggcatttatcacctggctgacctcagcgaataccttctgttcgacgctggtggatcgcattgtgaccggctatccgcgtgatgaagtggcggctctcgaggcgcagaccggctataaagatgctttccttgataccgctgagcatttctacctgttcgttatccagggacctgcctcgctgaaggccgagctgcgtctcgataaactgccgctgaatgtgcgcattgtggacgatatcaagccgtataaagaacgcaaagtggcgatccttaacggggcgcacaccgcgctggtgccggtggccttccaggccgggatcgacaccgtgggtgaggcgatgaacgatgcggagatttgcgcgtttgtcgaaaaagcgatttatgacgagattattccggtgctggatctgccgcgcgatgagctggtgtcattcgccagcgccgtgacagggcgcttccgtaatccctatattaaacatcagctgctctcgattgcgctcaacggcatgaccaagtaccgcacccgtattctgccgcagctgctggcggggcagaaagcgcatggcgcgctgccgccgcgtctgacctttgccctggcggcgctgatcgccttttaccggggagagcgggatggtgagagctatccagtacaggatgacgccgactggatatcgcgctatcaaacgctgtgggcccgccatcgcgatggccagatgagcattcgcgagctggtcaccgccgtgctcagcgtggcggatcactggcagcaggatctgagccagatcccgggattggtggagctggtgactgccgaccttgacgctatcctgacctgcggtatgcgcgacgccgtcaaacctctttgctga

SEQ ID NO: 225915 - DNA, 246 bp, Klebsiella pneumoniae
atgcagacaattatccagatcgagccaaacgaatgggtttcagaggacttgctgatggcggtcactgggatgaagcgcggcaccattacacgggcccgtaaatcatcttggctgcttggccgggagtataagcacgtttcccctgaaggagagccaaagccaaccagtgaatgcatgtacaaccgcaaagcggtagacgcatggattcaggctcaaaagcaaccattgggtgatcgggcggtatga

SEQ ID NO: 225916 - DNA, 345 bp, Klebsiella pneumoniae
atgagcaagtcattaaacgcgcgttgcattcgtcgctgggaagtggaattcaaacctttctgcgattcaaaagttaacccttactggcgcaagcgtgacctgcgcgggtatatccgcgaagcggctcttaccaccgcctacagcatggtcgagagcatggctgaacgtaacgccaaagttgactatgacggtgagccgaacggatggacgccagaattttcggcatggtatcgggagcgccatgaacagtacctgaaagaagcgcgtgactacctggacgaagacgctaccaacgacgaaatagacgacgaaatagagaacgagctggaggcctggaatgactga

SEQ ID NO: 225917 - DNA, 222 bp, Klebsiella pneumoniae
atgacgcctgaagaaaaagaaaacgctctccgcgcccaggctcgtcgctgcgcagaagagataaccaaagcgatgagcgtaaagcctaaaccgaagtggaacgctgtatgcccccccatccttcgcaagcactacgagaaggtaaagccgatgggtgtcagcctggtgaaatttgtcagtgttattgggcggctcagcggccgctatggagtggaatcatga

SEQ ID NO: 225918 - DNA, 693 bp, Klebsiella pneumoniae
atgcatcttgatgccattacaaagcaagtcggcgtaatgacgactatggaagtccctcagcaattcaggatggaagggtgggtctatgtcttaagtaacccatgcatgccggggatctacaaagtcggcatgacaacgacaagcccagaaattcgggcgagggagctgtcgtccgcaactggcgttccggcgccattcaaaattgaagctgctttttatacccattccccactggaatcagaaaaagaagtccatgaggttttatctgagtggcgcgtaaatgattccagggaatttttcgagctttctttaggggaaatcattcacgcctgctctcagagctgtgaagcgcaagtaggggagtccgttgaaagcatcgctgtttataacgacttcatcactttcgaaacccttgggaagctcaacgtcaatagtctcttcgatgacattggcattagcgtctttggtgacaaattagcggcggctgagcggctgatccgcatcggcgcagataccgttttgaacatcagaaaaaaacacggcgtcgtcattgccatgtatgactcgaatgcgtacgccattgagccagctgatgaacaggaactcaggaagcacagagaagaatatgagtcttttcgggctgagcgtgagtcccagggcatttacggcccgacacaacctgtggagttttaa

SEQ ID NO: 225919 - DNA, 900 bp, Klebsiella pneumoniae
atggccagatccagaaatatcaaaccaggctttttcactaatgatgagcttgcagaatgccatccgctggggcgacttctgtttgctggtctttggacgatagctgataaagaggggcgacttaatgatcgcccgaagaaaattaaagcgatgcttctcccttttgatgaggctgattgtgacgctcttcttcagcaactcaatgaccataaattcattatccgctaccgggttaatggtgagtgctacatacagatatcgaactggaagaagcaccaaaaccctcactgcaaagaagctgcaagtgagataccagcacctattgagaacgataaaagcaccggacaagaacagtgcaaggaagatacagaggaagaaaagaaggactcagaatcactccaagacgttgaaaataaaggagcaccagaactgcacggtacaagcatggtgcaagaatcagtagagaacagtttaaatcctgctgattcccttaacctgattcctgattcccttaaccctgatcctgattccttggataacacccaagccgcgtccgcgacttgcgaaggtgacaaaggggccgagcaggcaactgttcatcagatggctagtcgatatgcattcgaaggttctgtggttcgtctgaatcacaaagactaccaggcgtggttaaccctatacccgctgattgacctgcagtacgagctgcaaaagctggatatcgaattcagtcacgaaaagccgaaaaactggtttatcactgccagccagaaactgagctaccagaacaagcaggcagcctcaagggcgccacgcaaggtttcaaatagccggcagacagaaaacttttccgctaaagactacgggcagactgaaatcccatcatgggcgagggactga

SEQ ID NO: 225920 - DNA, 396 bp, Klebsiella pneumoniae
atgagcaagacgctggacattcgcgccggtgaccggttcgaaacggtttacccattcattttcgtatgcactgactatcagcaatgggacggaaatgtattcaccgatgaaaggtggattggtggttgccgaaagacatttgagccagctgattgcggttatggtgaccagaccgtttacacagctgatgcagaagggaaaagaattcttgaggttctttcagtcgccgaaatgcctggaaagtggcagcgccggatcatctatgcctgccatcttgttgacccggaagggaaagaaaggaaaggcaggaaggcctatacggtaaccgaggacagattcatcaaaatgtcgtcagggtattttgcggattatggagtggagaacagcgatgactga

SEQ ID NO: 225921 - DNA, 468 bp, Klebsiella pneumoniae
ttgaccggcctggctaaccgcgccgcctttcgtaacgcgctcgccgagctgatgcagaatgaagtcgatcatcaaacctcggcattgctgtttcttgatggcgataatttcaaactgattaacgacaactgggggcatgcggcgggcgataaagtgctgatggaggtcgccagccgcctgatgacttttgccggtaaacgccatctggcgtggcgtcttggcggcgatgagtttgccgttctgctgcgcgaggtgcgctcggaagcagaagtgcaggccctgtgccaggcgctaacggaacaatttcttccgccattcaacctgcacaacggtcatagcgccacgctctcgctgagcgtcggttatgccctggcgtgggagcacgccaccgcggaatcactgcaagaacttgccgatcagaatatgtatcggatgaaaaaccaacgtatccagcagacgctgaaataa

SEQ ID NO: 225922 - DNA, 606 bp, Klebsiella pneumoniae
atggcagagaaatttacccaacataccggcctggtggttccgctggatgctgcaaacgtcgataccgacgcgatcatccctaagcaatttttgcagaaggtcacccgcaccggctttggcgcgcacctgtttaacgactggcgctttctcgacgataaaggtcaacagccgaacccggagttcgtgctgaattttcctgagtaccagggggcatcgatactgctggcgcgggaaaacttcggctgcggctcctcgcgcgagcacgcgccgtgggcgctgaccgattacggctttaaggtcgttatcgccccgagctttgccgatatcttttacggcaacagcttcaataaccagctgctgccggtgaccctgagcgacgagcaggtcgacgagctgttcaagctggtgcaggccaacccgggcattacgtttgaagtggatctggaagcgcaagtggttaaagccggggataaaacctacagctttaagatcgacgatttccgccgccactgcatgctcaacggcctggatagcatcggcctgacgctgcagcatgaagcggcgatctccgactatgaacgcaagctgccggcgtttatgaattaa

SEQ ID NO: 225923 - DNA, 2034 bp, Klebsiella pneumoniae
atgagccactatccgcaccttttcagtccgttgaccatcaacggtatgacgttaaaaaaccgcattattatgccccctatgggcaccaatatggccacgctcaatggcgaggtgtcgcaggaacagctggaatactacgaactgcgggccaaaggcggcaccgggcttatcaccatcgaaaatatttgtattgatttccccttcgcctccaacggcaccacccaactgcgcatcgataacgatcaatatattccacggctgtttaaattaaccgagaccctgcataaacatggtgcctgcgtatccattcagttaaatcatgccggcgcttccgcttatgcctaccgactggaaggccagacgccgctctcctcttctacaacgccgtcgaagaagcacggtaatattccgcgtccgatgacccatgaggaaatttatcatgcggtagagaaatttggtgacgccgcggagcgcgttcggcgcgcaggttttgactgcgtcgaaattcatgccggtcactcctatttaattagccagtttttatcgccgctgtttaataagcgcactgatgaatttggcggcagcgtcgaaaatcgcactcggatactgagtctgattgtcgataaggttcgcgcctgcgtggggccgcgttttccggtcagcctgcgcatcagcgccgacgacttcctcaagggcggcaataccctcgaagattccctgcgtattcttgagctctgccaggagaaggtcgatatcatcaacgtctctgcggcgcagaacgacaacctgaatctgcaaatcgatcagatgtcgctggaggatggctggaagcgctatctctcccgcgcggtgcgcgataaattccataaacccacggtcatcgccggcaatattcgcactccacaggtagccgaagatatcctcgccagcggcgatgccgatcttatcgccattggccgcggtctgattgccgagccggagtgggtgcagaaagtgcaaggcggaaaagagcgtctgatgcgcaaatgtatctcctgcaacatcggctgcgccgaccatcgcatcgcccgctcgcgcccgctgcgctgttcgattaacccggatattattcacggtgacgcctataaaatgcggcgcgtgaatcgcgacactaacgtggtggtcatcggcgccggcaccgccgggatggaagccgcctgcaccgcggcggaagttggttgccatacctggctgctggaagcgaaaaaccacgtcggcggcctcgccaacgaaatctcccgcctgccggagaaaaaacgcatcgctgatttcccgcagtttatgaaaaatcgtatcgcctcgctggacaacctgatgctgcagatcggcaagcgggccgacgtggcttcagtttccgccctgcgtccgcatctgattgtcaacgccaccggctcaacgccgctgctgccgcccattgaaggcttgcgggaaaacattgacgtcgagaacggcaagatcttttccattaccggcatgatcgacaatctggcgaaatttaccgatatcaagggcaaacgcatcgccgtagtcggcgccggcgccgttggccttgacgttatcgaatactttaccgctcgcggcgcacaggcggtgctaatcgagatgcaggacgccgccggtcgcgatctcgacatcattaccaaaaatgccatgttgaccatgctcgacgagcaccaggtcgaacagcacatgaatacccaactgatggcggtcgctgccgaccatttccaggtgaaaaatacacagcaaaccttcgatattcccttcgactacggctttgtctgtctggggatgcgcgccaaccggacgggtctcgacgagatcgagcgctgggccaatgccaataacgtcaaaatcatgaacatcggcgacagcgtgatggcgcgacgcattatcgatggcgtccgcgaaggccgcaacgtactggatgcactggaagacatgggtgcgctgggcagccgcgaagcacaacgaattccctttctaacttattga

SEQ ID NO: 225924 - DNA, 897 bp, Klebsiella pneumoniae; identical to SEQ ID NO: 210116

SEQ ID NO: 225925 - DNA, 999 bp, Klebsiella pneumoniae
atgaagaaggtcctttgcgcgttaggcttgatgttcaccgccgtcagttccgcgctggcaacaacctaccccctgacgattgaaaactgcggctatcaggagaccttcacccggccgccggagcgcgtggtcgcgctggggcaaaatacggtcgaaattctgctgctgctcgggctgcaaaagcaggtggtcgccagcgccttttggccgaccagcgttttaccgcagctggctgagcaaaacgcgaatattaaaaccttgacggtggaaattccgagcctggaatcggtgctggcgcaaaatcccgatttcgttcccgcccagttgccgctgctgctggggccggaaagcaaagtcgccaggcgtgaagatctcgctaccgtcggcgtaaacagctacgtctcaccggggatgtgcgccaccaaaaaggccaccggcgatatgtacggcagccggcaaaagctgtgggatatgacctggctgtatcaggaaattagcgatttttcccgcattttcaacgtcgaagatcgtggtcaggcgctgattgccgatttcaaaaaacgtgaagccgacctgcgccaggagtttggtaaaagcaaaaaggatctctccttcgtcttctggttctccagcgcctcaccttcggccgatgcctatgtcggcggcaaaaacagcgcctccggatttatcgccagcgtgctgggcggacataatgcgattacctccgaaaccgagtggcccacggtgagctgggagagcattattgccgccaacccggatgtgatcgtggtcgccagtctggaccgtaaccgctgggcgctggataaggccgaggagaagatcaaattcctcaaaagcgatcccgccgtcagccagctggaggcggtgaaaaaaggccatatcgtggtcatggacggtcaggcgatgaatccaaccattcgcacgctttacggcgcggaacaggtgggcgagcagctgagaaaaatggggctgaactga

SEQ ID NO: 225926 - DNA, 912 bp, Klebsiella pneumoniae
atgaatacctctattccctgggagtggtaccgaacctttctcgccgtcctgcaggaaggctctttatcgggcgcatcgcgtaccctgaacatcactcagccgacggcggggcgccatattgccgggctggaaaccgccctcggccaggccttatttacccgctcgcaaaccggcctgctggcgaccgacgcggcgctggcgctgcgggttcacgccgaggcgatggacaacaccgcccgggcgctgacacgcaccgcggccaacttcagtcgcgacagagccgatctgcgtggcgtggtgcgggtggccgccagcgaggtggtcggcgccgaggtgctgccgccgctggttgcccggctcaggcaggcgtgcccgaatatcgtcatcgaactgatgctctccaatcggtttcaggatctgcttcaccgggaggcggatattgcggtgcggatggtcgccccgcagcaggagcagcttatcgcccgccgtctcggcaggatcgagcttgggttacatgccaccgccgcctacctgacgcggcagggcctgcccgcgaccctcgacgatctggccagccacgcgctaattggttttgatagcgccacccctctcgtgcgccgggcgctgcaggcttacccccgttttcagcgcgaggcgttcgcgatgcggaccgatagcgacctcgcccagttgagcctgatccgcgccggagcggggatcggcatctgccaggtgtctcttgcggatggcattattcccctgcagcgagtgctggcggccgacttttctctgtatcttgatacctggctggtaatgcatgaggatctgcgccacagccctgcctgtaagcgggtatttgattttctcgcccaggggttgcaggcgtatattcgtggcccactggcgagctga

SEQ ID NO: 225927 - DNA, 996 bp, Klebsiella pneumoniae
atgaacagcagcggcaaggtacttattctgggagcaagcgggggcatcggtggggaagtggcgcgccggctggtggcagacaactggcaggttcgggcgctgaagcgcggcgcccagatacgtgatcccgaagatggcatacagtggatagccggcgacgcgctggaaggcggccaggtcgcggcggcggctgccggttgcgacgtcatcgtccatgcggtgaatccgccgggctaccggcactggcggcaacaggtactgcctatgctgcgcaacaccctgcaggctgccgaacggcagcgggcgcttgtagtcctgcccggcacggtctacaactatggaccggatgcctttccgctgattgctgaagaggccgcacaacagccggtgacccgcaaaggcgccatccgggtggcgatggagctggcgctgaaggattacgtgcagcgcggcggccgggcgttgattgttcgggcgggcgatttttttggtccacgcgccggaaataactggttttcgcaggggctggtcaagcctggtcagcttccccgcatcattagctacccgggggcgatcggcgtggggcatcagagggcctggctgcccgacgtcgccgccaccatcgccgcgctgctggcccgcaggcatgagcttgagccgttcgcccgctttcatatgcagggccactgggacccggacggcagcgaaatgagtcaggcgatccagcgggtggtcgcccgctatggcggcagggcggtagcgaagtcctttccctggtggctggtgaagctggcggcgcccttcaacgccaccctgcgcgaaatggtcgagatgcactatctctggcgtctgccggtacgcctgcgcaacgataaactggttgattttttaggcgcggaaccgcataccccgctcgacagcgcggtgtatcagacgctgcaaggcctgggttgtctgcccgccggcgcgataaaccaagaggcgggtgaggcgtaa

SEQ ID NO: 225928 - DNA, 3825 bp, Klebsiella pneumoniae
atgatattttttgaacttgaaccttctgatatttcaaatctcaatgatgctgatcttagagaattggtcgctaggttgtgtgaagcggaattgattcgtcaagaacttcagacatcttgtgttctgtgggggggagctcaggaagctgctgacggtggtctcgatgtccgagttgtcgatgctatccctttactaaagccgggctttgtaagtcgtgaaaatactggctttcaagtaaagaaaaacagtatgagtaaggcggcttgcaaaaatgaaatgcttgatagaggaacgctaaaaactgttatagcggatctcgcagaaaaaaaaggcgcttatataatcgttagtggcaaagatgattgttctgacaaaatgctatcagaacgccttctgggaatgaaatctgcgctcgaaggtttaccagatagcgaagagcttctccttgacttttatggtagggatcggattagcgcatggttgagacaatttcccgaggttgccttgtgggtccgctcaagactaggcaagccattatccggatggcgaccgtttgggagatgggcttccaccccagtcgataaagatgatgagtttttgcttgacgaacacccttgcgtcatcgatatgaattcacatcacaaagagccttcaacgatttcggatggaatcaggcttgtgcgtgaaagattacaaagatctggctcggcggtaagaataactggtctatcaggagttggaaaaacacgctttgctcaggctctttttgaaagtgatgtatgcgataactcgctaccgagagcgaatgtaatatatgcggatcttggtgatgaattaactccaacagcatctgagcttgtctcatacttggtagctaatgatttttcaagctatttagtattggataactgcccaccagatgttcatagaaaactgcaaaatcagatttcgtcaaatcaagcaaaattgagtcttctcactatcgaatatgatatttcggatgatcgcccagaagacacagaagtaatacacatcgaaccatcaagcgaacagaccgtctcaaaaattatccaaaagagatttccatctctagggcgcgttaattccgataaagttgcagagttttccggagggaatgcacgtgttgcgatcgcattggcgagtcgagtgggtccagatgagaccttgacaaatttttctgatgaggacttgttccagaggctcttcaatcaaagaaaaggtacaaccgaaagcttgcttgaaagcgcagagatcctatccttagtttattcgttcaatatttccccgaaagagtacaatgatgaattgagcgctctttctagaattggcggatttgaacgtgacaggttgaatcgcaatcatgcagagctattgcgaaggcagctatcgcaaaagcggggaaactggcgagcagtgcttccgcatgcaatagctaaccgtctcgcacggcgagcccttcagaatatcgatcctgataaaattaatgctgagttgttaaaggctgataattttcgtttatttaaatcatgtgctcatcgactaggatatctgcatgactttgaacctgctagatatctcgcccatacgtggatgaagattgatgggccatttcataacattgcacggtgcgatgctgagctgcttacggcactaacttacatcgcaccagtgtttccagaagtagtgttaatcgctatagagaatgcctcagaagctcgagatttctgctcacgagataatcaaaatttttctacgctcgttagattgcttagaaaaatagcatatgatgatcagtacttcgaccgttctgccgggctaattcttcgctttgcggaaacagaacaatctggcgagaataacaatagtatcgctagtcaattggcgagccttttttcattatacctctctgggacacaggctacaccagcgcgaagactttgttttgtgaatagaatgctaaattccggcaactttagacagcttgagattgcgcaggatattcttcggtctgcatttcaggtttctcactggagctcgtctggaggatttgattttggcgctcgtagcagggactttgggtgggaaccgacaacgaataaagagacattagactggtacgtaggttatattgagctgttagtgccgtttttagattcggataatgcccccctttgcaattgggcaaaggcgatactagcaaaccactttttaggattatggagctatgcaggctgctttgacattctcgaaaacatagtgcggaaatatggtgctggcggtaaatggccagatatgtggacggccattaagcggacaatccattataacgggaagaaacacgcacccgaattattaaaaaggattgaagcactcgagcatttagccgcaccggctgatccctatttcgaaatcgaggcatatgctctgactaacatatgggatcacgtagaagttagaggtgggagttacacagaaaattctgaaaaaattcatcagaagatagaagaactaggtgagcttgcgtcatctgaacctgattaccttgaaagattggcaccaaggttatgggaaaaacatattgatgcgctttggtcattcggcaaagggttggccaaaggttcatcaaaccaaggtttaacctttgatacgcttgtccgtctgatgcaaaagcaagagctagaagtagtacaacctatcctcttttgtggttttattgctggcgttcatgccggtgatcctggcttgtctcggaagctccaagagtctgtattagatgtaccggagcttaaacagtattttgttaatattttgtctgcaacgccgatagccccttggggttcaaaaaagctaattgagctggcgaaggctggtgaactggaagcatggaggtttcaacagataagttacggtcgagttcatgaatccatttctgatgatgatttatcagaattgcttgccgctcttaatgatttggccgatgggatattttcaactattgaaattttgagcatgcgattctttactgaaaagggtagcaactacagtcctagcgatgacctacgatctgttggaaggcaggccattttgaaactgttatcaatgcatagggatgagattggcaggcgacagctccatagaatggaccgtgttattgcagagtgtttatcagagccagcagcggagaatgaagttcgcgatattattaacttgctttgcaatggcgtagagacgtatcgcttatatagctttgaattagagactatcatagcctatctagtgaaaaattatccagaatttgtattagatagagtgttgatagatagtgagaatagcgaacaacttatttatttgcttttcaaagatagggtcaatcgtagtagttcgccattaaacttagcgccgatagagcgcgtgctgaattggtgtaatggaaatcaagataggattcatgaagtagcaggtgccgtttcggcatacacatccttagacaaggaatcacagccactagacaatccaaagaaagtaactctcagtcaccacattacatcacttttagataccgcagagaacaaagtcgcgatagttgaaactattttctcaaggtcttttcctagtgggtggtcaggatcacttgtcgatattcttgaagttcgttcggaggcattcgcagttctattaaatcatgtctctcctgaggtgcgagagatggctaagaccaagctttctcttcttaatagatctattagagagaatagagagcgtgaggccgaggagtacaaccggcgggaacaaagatttgagtga

SEQ ID NO: 225929 - DNA, 1458 bp, Klebsiella pneumoniae
atgagtgttggatgttcgcttaatgatagaaataacaatcctgtaaatttttttcctcccattttaagagatgccgtggaggagatagaaagagaactacaggctccggtagaactcattgaaacagttgttctggctgctgtatcactggcatgccagggggtaataaaaatacaacatccagacgggagagtgagcccttgcccaatgtattacaccgttattgctgactctggagagagaaaaagtgccgtatttaaattagtcacacaaccattttttgattttgaaaaggaatcacgtcaaaaatatacgttattaatgctggattacaatgcagaacttcagtcatggaaaagtcaggagaaagcactattgaaagtgattagtaaaaaaaccgagaaaggaattgatgttgaatacgatactcagagcatgaaagagctttaccgaaaaaaaccgcaaccacccgcattgcataagttgatctacagtgatacgacaccagaagcactacagcagggactctgcagtcatgtgccttcatcgagtcttatgtcggatgaggccggtattttcttcaaaggacgtgcaaagaataacctgggatttttaaaccttttatgggatggagctccgtttgatatagaacgaaaaagtggcaggtgtagtatggatgaatgtatgtttacaatgttattaatgattcagtccagtgagtttaaaaaatatatcaaacttcagggggattatgcagtaggctcagggtttctgtcccgttttatgataaccggagtaacttcaaaaagaggtcaccgcagctctgttaagaataacagtaaaagtaacaccatcaggtttcatgacagaataaaggaactactgctgctttctgaagagaggtacaaaaataatgaaaagcataaatatctatacttatccgaagaggctcagtcagcactcggtttagtatataaacatattgaatcacgtatacttaaagacagagagaaacatcctgttgtagaaggcatgttgtctaagatgcctgaaaatattgtcagactggctggggtttttcatctttttagtgatgagcacggaaatgaaatatctgaaagaaccattcaggcaggtgcgaaaacagcgtatttttattatcaacaggctcttgatgctatctcatcatgctcagattcaatagagcataacgctgatatattgtacaaatggttattaaaatacaagaatcctgatgttaattaccctcaaatattaaacactcccaccattctgaataaaatgatagtaaggagaaaaggcccatatgctctaagaaactcaagaaaacttaacgatgcgctagcttatctggaagaagatgagaaaataagaattgaaaaaattaaaaatagtaatggcagcaccagcgaaataatacatatccatcgtcattga

SEQ ID NO: 225930 - DNA, 867 bp, Klebsiella pneumoniae; identical to SEQ ID NO: 183726

SEQ ID NO: 225931 - DNA, 243 bp, Klebsiella pneumoniae; identical to SEQ ID NO: 183727

SEQ ID NO: 225932 - DNA, 252 bp, Klebsiella pneumoniae
atgaaagaacatgcatcagtatttaatcataaaaataataatcacatgtcagatacagacctcacaaaagatcgcctcgttaatatggcctttattactgcttacactggattaacagacaaatggttttataaactcatcaaggacggtgaattcccgaagccgattaaattgggccgtagctcccgctggactgaaagtgaagtaaagacatggttaaaacagcgtatggaaaaatcaagaggaaactaa

SEQ ID NO: 225933 - DNA, 363 bp, Klebsiella pneumoniae
atgcttctcagtcaggtactcaacaccgttcataattttacaccggaggcgttttctgcgctttctgaactgctttcacctgaactcattgatgaatgcctcgccgatacaggtatcgtcactattcgcaaacgtcggcttccgatggagatgatggtctgggccgtgaccggaatggcattgtttcgttccctgtccatgaaccagatagtctcacaccttgatattcttctgcctggtaaacgtccctttgtggcacccagcgccgttgttcaggctcgtcagcgactggaagccgatgtcatccgtctggtctttgaaaaaacacgcctgaaccgccccggttttcctggagtgagttaa

SEQ ID NO: 225934 - DNA, 267 bp, Klebsiella pneumoniae; identical to SEQ ID NO: 183729

SEQ ID NO: 225935 - DNA, 147 bp, Klebsiella pneumoniae; identical to SEQ ID NO: 183730

SEQ ID NO: 225936 - DNA, 714 bp, Klebsiella pneumoniae; identical to SEQ ID NO: 183731

SEQ ID NO: 225937 - DNA, 588 bp, Klebsiella pneumoniae
atgaagaaaataaaaatctacactgaagataatatttcaggaatggcaatccagttatttatcagcagtatcaataaaaatattgatgtattacctttctctgaaagttgtaactttaaaatagagaatcacaccagcagtataattttttttaatttagcaaaagataacttgtcctgctatgagaagatcaagtttatcaataataatttattgaatcctgttgattctgtacctgtattcatagttgataatgttcagtcctttccatattatcgactaatcctcttttcaaaaataattgttatagatcttaaatctccgctttcagattatcaaaaaatacttgacggagtatatcatcgatatatttacattcatactttaacacaaagggaattaattattttcgacttaatatccagcgaatatgattgtaaaaaaatatcttcaattttagatgttaattttaagacagtatattctcataggttgaaaatcgtaagtaaacttaaattaaaaaacacacatgacttatataattttatggtcaagttaaaagccgatgatgaattaaattttgaataa

SEQ ID NO: 225938 - DNA, 1038 bp, Klebsiella pneumoniae
atgataaagtatacatgtgttccatcgctgaataaaacggcagcgaaatgcctgatgctgctcggactgctaatggcaggtggtcagagtgcttatgccgcctgttacgtcaataatggctacaaggcgcaagtgatcaacatgaatcttgggcgtgtgctggttacaccaagcagccaggttggggatactttggtcaccgctcagttcacgattaacccggtctctaggtatggcagttgtactaatggcggcaacgcgattggggagatcctccagggcagcccgacgagcttcagcaatgtgtggagtaccaatattccaggtatcgggattcgtttataccgagaagcggggagtataagtacctattatccccataccttgcagttgaacggcaacattgctgtcaacctgaacggtggttatttcaagatcgacattgttaaaaccgccgcacaaaccggttctgggcaactggtccctggaaagtacacgacttattatatggatggctctggacggaacttaccgatgctggaatcgatcgtcgacgccaacagtctgacaatcgttacatcgacttgtaacgtggacagcggttccaagaacaaggtggttaatctggataccgtcaccgcagcctcatttggtggtgtaggttcaacgcagggcgaaaaggcatttgatatcaatattaattgcgttggtggcattggcgaggatctgttgccgggcaatgcggggcacgggatcgtcaatgtacgttttgactatacgcaggatgcttccaatgctcctggcgtgatcaaatccgaacctggtgccaacaccgcatccggcgttgccatccagctgttgactggcaatacgacccagccgatcaagaatggtgatgcggtcaatgccggacgtaccattcctaaccagtccaatacgctaacgttgccgctgaaggcgcgttactatcgcactggctcgacaattaaaggcggcaatataaaatcgaccgccacctttaccatcgagtacaactaa

SEQ ID NO: 225939 - DNA, 2562 bp, Klebsiella pneumoniae; identical to SEQ ID NO: 141535

SEQ ID NO: 225940 - DNA, 729 bp, Klebsiella pneumoniae; identical to SEQ ID NO: 141536

SEQ ID NO: 225941 - DNA, 558 bp, Klebsiella pneumoniae
atgaaaatctctaaactgtctgctgtattggcattggctgtaagcactgctgcaatttcttctttctcagctcaagctactgacgggactattactttcaatggtagagtgactgaccaaacttgtactatatccaccccaggcggtaaagatttcaccgtaactctgccaactgtttctgcctctactctggcagctcagagcgcaactgctggccgtactccgttcgcgatcaatctgagcgactgctctaaaggcaatgtggctacttatttcgagccgggcgctactgttgatttcaatactggccgtctgaataaccaagcgcagactgacgctgcaactaacgtacagattcagttgctgggcagcaacaaccaattcctgccaatccttgctgctggtactaatggcgcgcaggagaactcccagtgggttaccgttgctaacgaaggtgactctgctgacctgaactactacgctgaatattacgctaccagcgctgccagcgccggtgatgtaacttctaccgtccagtacaccattatttatcagtaa

SEQ ID NO: 225942 - DNA, 390 bp, Klebsiella pneumoniae; identical to SEQ ID NO: 183481

SEQ ID NO: 225943 - DNA, 654 bp, Klebsiella pneumoniae; identical to SEQ ID NO: 183482

SEQ ID NO: 225944 - DNA, 588 bp, Klebsiella pneumoniae; identical to SEQ ID NO: 183483

SEQ ID NO: 225945 - DNA, 318 bp, Klebsiella pneumoniae; identical to SEQ ID NO: 183484

SEQ ID NO: 225946 - DNA, 126 bp, Klebsiella pneumoniae; identical to SEQ ID NO: 183485

SEQ ID NO: 225947 - DNA, 1068 bp, Klebsiella pneumoniae; identical to SEQ ID NO: 189761

SEQ ID NO: 225948 - DNA, 1125 bp, Klebsiella pneumoniae; identical to SEQ ID NO: 189787

SEQ ID NO: 225949 - DNA, 1437 bp, Klebsiella pneumoniae
atgcgtctatttcaaaaaaaagggatggtcagcgtttacagctgcagcactattttcctgtcaatctgcgtggtattaacggttgacgcagaggagctttcttttccgcccaccagcatcagcacccagaggttaaacgatactcagcaggtcgccggatatagcgaagagcttatcaaccctgaaagtcatcttgccggtccactggatattgctaccgcagtaaaatcagcagtcaattggcatcctgctatcaatcaacaggtgagtaaacttcaggagcaggtgcaaaaagtggatgtagcgaaagccaaatattatccgcaggttaatgcgggtatgaataatgggtacagtaacacctactctgattctggatattctccctcattagttgtctctgtttcgcaaatgctgtacgactttggcaaagtctccagttcggtgagagcggcggacgctgccgttgcccaacagcaggcgatggtcatgcttaatatcgatcaggtggctcatgataccgcgggtgcagtggtacagctgcagggttatcaaaagctcgtgaaaatagcccaggcccaggtcgattcgttaaagcatattggcgatcttattcgccagcgcaacgacgccggggcgacatcgctttctgatgttgtgcagacggatacccgcgttgagggtgcgcaggcgacgcttatccagtatcaggcagcgcttgagcgctggaaggcaacgctggcgacgtatcttggtctcggaagtattacctacgtaaccgaaagcgtaccgcaggctatggatgccgcctgcgccgttagtaaaattgattatcgaaccgtaccagcggtgctcgccgctttggcccaggctacacaggcacaagcccaggtagataatgccaccgcgcaaatgttgcctacaatctcgctggaacctcaggtaacgcattacctcaatgataattacgccaacagcgcggtattaaataaaacgcagtattcggcatgggtcaaagtagaaatgccgatctaccagggcggcgcgctaacggcttcccgcgaagcggcgcagcaaacgctatctgcggcgaatgcagggatcagaaacgcgcaactcgatgccagccagaagttgagcgcctcccgcgacgaggcggtaaacctgaaacaatctatcgccatccagcgccgccagcaattgcttggcgaacaaacccgcgccctgtatcaggatcaatatttacagctcggcacgcgtccgttactcgacctgcttaacgtcgatcaggaaatttatcaggcgcaatttaatcaggtattaactgaagcgcaactgcgaaatctggaactggactgtctgttcagtacagggaaaatgcgcgccgtttttgctctggataaccaaagaattcagggcgtggagattcgaccatga

SEQ ID NO: 225950 - DNA, 1053 bp, Klebsiella pneumoniae
gtgactctgactctgacagcgattcggacagtgactccgattcggacagcgattcggattctgacagcgattcggattccgacagtgattcggactctgacagtgactcggattcggacagtgactcggattctgacagcgactccgattctgacagcgattcggattctgacagcgattcggattctgacagcgactccgactcggattctgacagtgattccgactctgacagcgactcggactccgacagcgattccgactctgacagtgactccgactccgacagcgattcggacagtgactccgattcggacagcgattcggattctgacagcgactcggattctgacagtgattcggactctgacagcgattcggattctgactccgactccgactcggattctgacagcgactcggatgctgacagcgattcggactctgacagtgattccgactctgacagtgactcggattctgacagcgattctgactccgacagtgattcggactccgacagcgactctgactctgactccgattcggacagcgattcggattccgacagcgattcggactctgacagcgattcggattctgacagcgattcggactctgacagtgactcggattcggacagtgattccgatgctgacagcgattcggactccgacagtgattcggattctgacagcgattccgactccgacagtgattcggattctgacagcgattccgactccgacagtgactccgactctgacagcgactccgattcggacagcgactctgacagcgactccgactccgacagcgattcggactctgacagcgattcggactctgacagcgattcggactccgacagtgactctgactccgacagcgactcggactctgacagcgattcggactctgacagtgactccgattcggacagcgactcggattctgacagcgattcggattctgacagcgactccgactccgattcggataccgaaccgcaggcaaataatgatacccatacggcggctatcgataccgtag

SEQ ID NO: 225951 - DNA, 807 bp, Klebsiella pneumoniae
atgaacgatttcattaccgaagcgtggctcagagcgaatcatacgctcagcgaaggcggtgaaatccatctttctgccgatgcccgcctgacgccctcggcgagggaactgctggaaagtcggcatctgcgggtcaaatttctcgaccgccaggggcgcctgtttgtcgaggatgacgaacagacgccgcagccggtgcatgtcctgaccagcagcgaccatccgccccaggcctgctgcgagctttgtcaccagccggtgggcaaaaagccggacaccttaactcatctgacggccgataccctggtggcgaaaaacgatccgcggctggccttccgcgcggtgctggacagcaccatcgccctgacggtgtggctgcaaattgaactggcggagccctggcagccgtggctgacggatatccgttcgcggctgggcaacatcatgcgcgccgatgcgctggaggaaccgctggcggcgcagtcgatagccggattcagcgaggcgcagctgcatcgtctgtcccatcagccgctgcgttacctgggtcacgatcacctggtgccggaggcccgccatgggcgcgatgtcgcgctgcttaatttgctgcgcggcaaagtgcgcgaggcggaggtgaccgcggcgcaggtgtttattacgccgcaatttgcggtccagcgtgccgatattctacaggcgctcaaccgcctctccagcgcggtctacgtgatgatgatcctgggcgtgacggacgcgccgccggcgctcagccaactgcagcagttgggaggtgaagatgatcattga

SEQ ID NO: 225952 - DNA, 339 bp, Klebsiella pneumoniae; identical to SEQ ID NO: 189598

SEQ ID NO: 225953 - DNA, 777 bp, Klebsiella pneumoniae
atgattaccgccgcccagagtaaaagcccctctatggctggcctgttagcaaatgttagtactttgcgggtgctgtgccgccgcgggaacctgtcaaaacctgtcactttgcgggccactgatagtggcgaacaaaacgcctgtcggagtttcgcgacaggtatgtttgaatttaaagacacgttagaggcgagttttgtgagcagcacgcgcgatggacgtcacaactggagcaaagagttttgcgagtccataaaaaagggcttgatgtcccacgtcatcccggtctatggttatagcgcaccagcaaaatctggtgccgggattggcgtcccggagagtttacaggcgacctatgacgcgccatgcgtctttttttgtgtcgttaattcagtacacctttttttctgcgttgcgggtataatcctcgccgctcacaaaataatggtgggctggatgggggcggagagatccgcgccggtttcctgtaacgccggttacgccaaccctgttcagtccaccaccagcgaaattggcgtttccggtggtgggtttcagacccagttacaggaggctgccactatggctactacccctacccaaaatccacaatttatctggatcatcgctgctatacgccgcgatatcgaatccgtcactgtaaaaatcttccacgttaccgcggtctctgaacgcgaagcccgtcgcactttagtgcgtgatcatgtttgttttttcgctggccgcatccgtctgatggaggtggatcatgcgtaa

SEQ ID NO: 225954 - DNA, 180 bp, Klebsiella pneumoniae; identical to SEQ ID NO: 189601

SEQ ID NO: 225955 - DNA, 597 bp, Klebsiella pneumoniae; identical to SEQ ID NO: 189602

SEQ ID NO: 225956 - DNA, 150 bp, Klebsiella pneumoniae; identical to SEQ ID NO: 189603

SEQ ID NO: 225957 - DNA, 807 bp, Klebsiella pneumoniae; identical to SEQ ID NO: 189604

SEQ ID NO: 225958 - DNA, 414 bp, Klebsiella pneumoniae
atgtacgttgccgtcaagggcggcgagaaggcgatccgcgccgctcacgccttacaggaacagaaacgacggggcgatggacggcttcccgaactgagcgtcgatcagataggcgaccagctcagcctggcggtggaccgggtgatgaccgagggcggcatcgccgaccgcgaactggcggcgctggcgctgaagcaggccagcggcgataacgtcgaagcgatcttcctgctgcgcgcctaccgcaccaccctgccgcggctggcggtcagcgaaccgattaataccgcggagatgcgcctcgaacgccgcatctccgcagtgtataaagatatccccggcggccagctgctgggccccacttacgactacacccaccgcctgctcgattttaccctgctggccaacggctaa

SEQ ID NO: 225959 - DNA, 1137 bp, Klebsiella pneumoniae
atgattatcaataacgtaaaactggttctcgacgacgaggtggtccacggttcgctggaagtccaggacggtcgcatcctcgccttcgccgaaagccagagccggctgccgcaggcgctggatggggaaggcggctggctgctgccgggccttatcgagctgcataccgataacctcgacaagttctttaccccgcggccgaaggtagactggcctgcccactcggcgatgagcagccatgacgccatgatggtcgccagcggcatcaccaccgtgctggacgccgtggcgattggcgacgtgcgcgatggcggcgatcgtcttgagaatctggagaagatggtcaatgccgtggaggagacgcaaaagcgcggtctcaaccgcgccgaacaccgcctgcacctgcgctgcgagctgccgcatcacaccacgctgccgctgtttgaaaagctgatcgatcgcgagtcggtgagcatggtctctctgatggaccactcgccgggccagcgtcagtacgccgatcgcagcaagtaccgcgattattatcagggcaaatatcatctgacgcatgacgaaatggaccgttttgaagccgagcagatggctctggccgccacctggtcgcagcccaatcgccagaccatcgccgccatgtgccgcgctcgccgtatcgcccttgccagccacgacgacgccaccgaggcgcatgtggccgaatcccaccagctagggagcgtgatcgccgagtttcccaccacgctggccgcggcgcaggcttcacgtcagcacgggatgcacgtcctgatgggggcgccgaatatcgtgcgcggcggttcccactccggcaacgtcgccgcccaccagctggcgagccacggtttgctggacatcctctcatctgactattaccccgccagcctgctggatgccgctttccgtatcgccgacgccgaggacaatgccttcaccctgccacaggcgatccgtctggtcagtcagcatccggcgcaggcgctgggccttgacgatcgcggcgtcatcgccgagggaaaacgcgccgacctggtgctggcgcaccgtcgcggcgaacatatccagatcgaccatgtctggcgccagggaaagagggtcttttaa

SEQ ID NO: 225960 - DNA, 3126 bp, Klebsiella pneumoniae
atgtctggcatactgcttaatcgcctcactactaaagtcagagcacaactcaaacgcaccctcaaaggaaataagacatataagaagcatcgctggaaccttgttgaaagggcgcaggtttactgctccacgcattatctgaaggctatgtttttgctctggtctatggcaggcagtgctgtcctcatagcgataggctttcgtgctgaatttagtagctttgcggctaattacctgaaaaacgtcactaaacttcctgaatggatgtcaaacctgctgggcgcccagctgacgataatcgggattgtgttcccgcttgttgtcggactgatcagtgtgctctttcagaaaaaatcctcgcgaatccacattcagaccgcctatcagttgcattcgggttatatgtttgcgggactcagtgggctatcacttgctgcttttatactgataagcgggttatttttatctgccggtgacaaatatcttgatacggcatttgcggttacggccttaatctggatgcttttcaatattgtactttcgatatggttctttattaccagccttaacattttagatgacaagaaacgtgatcacctcatgctgaagtattttcagtcccagattgtagaaaatcatattcttcgttcccttaaatactcatggatacagtatcctggttcacacataggtaaggattatataaagggaataaccattcttccctactctgtctcaagcgaagaaagtatgggctcggttaaattccatattgaggatcatatcgaaatcagcgatgtgtatcttggaccactaaattttcttttacaccggctgaaacctgtgcaggataagaatggctcgattgttattctgccgtccctggcaaaaatggataacaaaataacactgttttcatcaactgacgtgattatccctgggtggtggccgttctttttcagacaatgttttatcaaaggcccgaaagtaaactggaaagagtacagacacattacccgtgatttttatggtgaggtttatgatgctctgggagacaaaaatataagtacctttatcatcgcaacagaccggctgattgatacatacacaacattgaaaaaaagcttccggtatgctgatggaaactatattgatgaatgtcatggttcaggtatgtcatttacattcagccagtcattctatcatgatttttacagtttcagtaacgaggtggtaaagtcactggaaacaacgggtgaatatttccataaaattattgatgtaccattctctgtatatcgtgattcagacagccgtgaaatcgtcgattttcagcagtgtatggaatctcttttctacgtatggtacgtattgaacaactggaaaagaggatatgcagaaactctgtcggtcagtcaggagcagcgtcacagggaagttgtcaaagattttataggtgaatgggaaaactggtacatgtggcgacgtattaaggcccgtggcgagaaccggtttgatgatgactcggccaaactactttatcatctttatgagacagcccggatagtcatgacggctgtgatgtcagacgaccgctatgcctcagatcacagtgcggatatgcttttactctggttcagccggaatcggtttgaacagcactttgaacaataccgctggcacagctttttcctgacgccgtcgtatcttactcaggcatctgacaaaccggcctggcaggccatcctcagaggaaatgcatattcagaaaaagctgcacgggcaatcatttttttcaatgcactgacagatattcgactgcttactgccggatatattctttcgcatgttcagcagaaaaaaaatgtacgtctgaaaaatgttataaagcgacttcttacttctgaacctgtctatccgacaggtgcgcatgatctcatgacgacgtcgttaacttcttcgactgatattattgacgttattatcaggctggaatgtcgtccgtgcgacagtgaggattcctggtacaagacgatgtctaatctcgtaaaggcgttttcatcatttaatgaaactgagatcatatcaggacgtatctatatgggaacctatgaagatgtcaggaatatttatgccagttatgcagatatcgctttttatctttccgctaagtccctgcctgtcacccagcgcgtaaggatggcactgaacgacaacctgtttacctatcatcagaaggaacagattatttatcaactcaagtgtttcaaacgccgtgaagacagcccatcgaatggatatttaatgtctgataaagcctttaaagataaggttgtctgttttaacgaaaccctcgatgcctatattcaggctttcagccggagtatgcattcagagcttcttaacgctgagattgatactgagctgctgaaaaataccgatcttactcttacccgagaactacccttaatgcttgcccgggatgcactgctttcacaattttcttacagtacatcaaacagcggggagatagcatggacagccaagtcagttaacggaggcatgtccaaagatatcttagcccgtgggatcagcagcactaattcggtaatactgacacctgtttctgacattaaacagactctgcttggtgatgtttaccatggactgagtcagctacagcccctccggacaatcaacgtccgcgacgaatatgaactgctgaagcatttaagggagatgactgccgacaacgaagactatacgctgattttcttcggaacccatctgggaagcgagctacgtgagatgagctaccacgcagaaaggtttgcggaactggggatcatactggatatgaagagtgatctcgatggccttatgccagtcaggattaataactgtggaatctatcaggtatgggataatgatggaggatattactccctgcttgtccgaaacaatgtctttggatcctttaacatgctgagcgatcccgacggacagcctttcagtacctcgtggcatgcaagtgatgaagaccctctgtcgggctgggtgactaccagctggaaacaggaactcgggattagtggttccgtagtggcaagatttaatcactcctga

SEQ ID NO: 225961 - DNA, 1956 bp, Klebsiella pneumoniae
atgaaattagatcattgcttatttggttatgatgatggtcatagattgattgcttcatcattacctcttggtgaagaaagtgcatatcttacggagttaagtgatctcgctccgggtgttgttttcggaagttcaaagggttattggactggttctcccgcgccttctattgggcgttatgttttaatgtatacatggcctgctccagagatgccaaggcccgggtgtgtttggactcatgctttattgttagagccagcaatgttggaatctatagaagatttgtctatattacagggcgttattactcgtcctggcgtttctatagagatagattattacagacagcctctggaggttgatctaaacaaaaaaaattcctctcagttaccgttagatattacaattgttgaaaaattgattgattcactgtatggaaaaataagtacgaaaattgaagttctttcttcagataggcttgaccagccattatttgctgtttggtcacagcaatggcctaagcttagacgtaattttcgattccagacagctgtttcccggatgcaaagaccaacaggctctgctcgttttgatattattgctatcttttctcaagatgaatctaacaattctgaaagtgagaacatctcctctcgttggttaaatgatgcgctaacagatgtgcaaagtggaggtaaaacttcattgcgtactttcctatgggaatatgggagagatgttcgcaagcagcgaggatcatttagaccattgactgaaatctattcgcttggttataaatctcaagcgggagctgtgcagcgtataattaatattatttctgaatcattccctactttaaatgatgcgaaacatttaaaacaacatttagttgacggtatcttagcttgtcatgagcaaattatgttgatcagtaacataatgttgagcggtaatgaaaaggaaataatgttcccagcaattacaatggctgggattgataatttaattggtttttggccacaaaaagcagagcctgttttagatctctttattttatcatcacattctagttctgaaagtggaaaaattatatttgaaagcttgatagaggctattcaatcatctgatttttggacacttagttatgctcacccaattgcccgtaaaattgtaactgaaagaaatcctgagtttttactcgcaaatagatacaaattagacgatattgatgtgttaaacttgcttcctttggttccttccactactaaaggacttacacattttataaatgacataatttcgcaggataataaaaatatcgcaagtatggtgtttgattattttcctagtatcgctgtcgcacaagttgtgcaaagactaaatgtaaaaacattcgtaccaaaagtttggaagaaagagtttttatcgcaatataattatcttcttagagatgaggtaattcgtaatataactcattcaagtttactttttgatattgcggatgtgcttggttggttgtcggatgctgtgattgtcgaaggtttagagccttggtataactctttaatggctgttactaacgatcttgatgagccagaagcagatatgcttgattgtttttttattctccttgctataaagtccggtggtgataaagggcttcatgtaattgaaaaattgtatgtaaatattcatcataaaatattgaagtctaagttatcacaaaaagctcgtgatatgcttcttcctcaattaccagatgttggttggttacgtggttgggatttaggttatcgtttccgtttagctattgcagaagcgtacgttcgcaatagatggtctgtagatagttatgttggcttagcttctgatagtaaaggccgtgaattactagccgatgcagcttcagatgtcgaaggtggacgtgaatattctaacgcggcttggcgttattga

SEQ ID NO: 225962 - DNA, 879 bp, Klebsiella pneumoniae
gtgaattcaaatttcataattatgggattacctgcatcaggtaagacaacttttttagcagcactctggcatttggttgaatctgatgagacgaattgtcttttagaattagatgcttatgagggggatcttacctatcttaatcgcatagctgaagcatggcggaactttgaacccgttcctagaacatctcaggtcggtgatatgaacgtagcgattcatttgcgaaatcgcgaaactggtgagaaaggaacagctttttttcctgatctggctggagaggtctttgatcgacaagtagaagatagaatcttccggaaagatttcatgaaaggtttttctgatgacgatgggattttattttttattagctcagatgttagagaagaccatctatctgtaactgagctcaatgcaagattacctggtaatggtgaaacggaagagtctttgaacgatggttctgctgatgagaatgttgaaataagaataactgaatgggaaccaaaattattacctgcgcaagttaaagttgtgcagcttcttagtgatattattaggccaccctttgagcctcgcttgcgacgaatcgctttattaatatctgcatgggatttaatccataattcaggagtaacacctaacgattggcttgaggtaaatatgccacttgtggcacaattcctgaagactaatagagattattttgaccatcagatttatggtgtttctgcacaaggagttagcctttctgataattccgcagttgatgagattgctactttattagcaagtcgaagaattaaaattgttggtccggaaagcgaagggaatgatttgaccgaacctcttgtatggcttatgtcggcgggcgaatga

SEQ ID NO: 225963 - DNA, 942 bp, Klebsiella pneumoniae
gtgacaaatcagctcaatgaagaagaaactgatgttgatgtttttgatcaaccggaatcagttaaggttcaatctgttgatcccacacaagcttgggtatcgctacctacttctacaatgcttactctggaagaggcagatcagcttctgcgttggcgtgatgcttcaataataaccatagttggggagcgtaacggtggtaaaacaacattagtaaccgaaatatatggccgttacctacgcggtgcttttgcaaattcatatttttgccatagcctgacattaatgggatttgaacgaaaaagctttcattctcgggctgagtcaggaaggtcatatccagacactgatagaacttcagctcaagatggcttacgcttctttcatttggcattgtcaaatgaaacagatcttttacgccgtgatcttcttatttcggaacgtgctggcgaagtttatcgagagatccgagatcgtccagatcgtgctgtagacatgatagagattcgcaaggcaacaactatcgcttttatcgttgatggtgagcgcgtagctttaccaagaaaacggtcagaggttttttcttctgtaagaaatatcgtgcgtgttgtgattaattcagggaatatttcatctcacacacagattcaattggttgttactaaatttgatttacttgagggagatgaaaaatttcaagctcgagacgccttagctacctttgagcaaactattgaaactatgttgtctggaaggtttcattttgaaatttttcatactgctgctcgtgcgctacatcctaattcagagccagcacaagggttagctccacttctgaaaacctggttgagagcgaaaccacttgaacatattgataatcctcgtcttcctgagttgacagatgaatttgataaactgctagtgaggagagctgtccagtga

SEQ ID NO: 225964 - DNA, 1071 bp, Klebsiella pneumoniae
atggcaatgttaacattcgcggatcgttatgctgaagcgggtttatctcctacatcagaaacaataatttctcgtcaagaaccggtcaaacggatcgtggaaaatattaatgaacagcaaatacttgatttagcatcattttactacggcaatgctgatgcttctttagaatggtttcgagatgagttcgcagaagaagatgcaagttttagcttgttgaataatgaaagagaagctcgtgtattatccgcatcagttatgggggaactaatcgatcaagaaaatgctgttgctatcttggcgatatgtgttgggagcgtaaaaggtttgcgtcgacctttacagtctttgtggcttttaaacaatgccgaagaaagttttattaagctggccattgcagggagagcatttcaagatattcctatcaaaatagttcccactgttactcccaaacttgacgaagagattgcggctttgagtgccacaaatgattgggcaacgctaatcaccctgcttggaaagattcggacagaagcccaaacatcggcgaaaacagttgcaaatcagagtatgggtatactgaaaaaaattgagcgacaggctgcattgatgcgagaagaaagccagatgctttggtggctgacgggcggttatagtagggcttttaatcgtagtttcactactttctcaacccaacaagcagcaataaccgccgcaatagacttaggggctttgactaattcgtccgaatttggccctgttgctatacctgcaatgcttgaacgcgtaattttaactgctaaaaaagggcgcggggcacagcccaaagaactttctacagctatcgatggtttcagtgtggaggaacttcgttgtcttaaggtgcctgcaacattaccagccaaacttgcccctatttcaaccgcgattgagttagctgagacaattggtattggttcttggtatgtgcaatttcagtcgagaacagggtttgaatcttcaattcagttagagtctctagctttggctgaacaactttaccgtgaatatcttttagggcgactactgtga

SEQ ID NO: 225965 - DNA, 1272 bp, Klebsiella pneumoniae
ttgctcatattgcacttatctgatattcattttcgaaaatctgaaattcagaccgctcaggatccaaacttccatttaaggaatgagttgattcgtgatgctgcacagaagtgtgcgcacataggtgtacctgatgtagtgattgtatcgggagacattgcattttcaggggatcccgaggaattttcatttgctacggactggcttgagcgtctctgcgaagcttgtcagtgctcaatggcatcggtatttgttgtaccgggcaaccatgatgttgtgcgaaacttagcggatcgaaatttagttcagatgatccaccgaacaatcaagtcagcaccaaatcccaatgctgagattatgaaacagttaagcgatcctgatccccgacgattactttatgaaagtctggacaactacaatcaattcgcacagcaatttttctgtgacttacttccccctgataggactcgagttgttcgagaccttgtgttaaatgatggctcgactttaagactttgggggcttaatagttcatttgtttcaagtagctatgatcgtcctggcgagttgtttgttgatcctgctagcctccagattacgcgtggagatggtgttgttaatgcagttattactcatcatcatcttacttggttaggtaatgcgcgtgagcttgaagatcatcttaatgacgtggctccattacaaattttcggtcatatacacactaatcgagtagacatggttcgcgattatgtgcggcttacagctagcgccatgaaccctgatcggcatgaagatggctgggaacccgggtacaatcttattgaattagatgttagcggggagccaacaaggcgaatgcttaacattcgagctcatatcagagtgtggcaaactgcaccaggcggatttcaggcgaaaatggatagaaactcttccatatttgagcattctatacgtctggaagactggaattcatcgactgaaacatcctcaggttttgttgcacaatttcctccgtctgcgcacatatcagaaataatgtctgtgagggaaggaaattcaatgaatacccttcgtgagcttggtctgcgtttctaccgcttaacatttagtcaaaaattagagattgccgggcgtctggagttgttagaagacgacgatatgcgtttacctgactatgaacgttttcgacaagtattgctcagagctcatgagagaggaatgcttgatgagtttgcagcagctgtgaccgaagttgaacaacgataa

SEQ ID NO: 225966 - DNA, 1275 bp, Klebsiella pneumoniae; identical to SEQ ID NO: 193789

SEQ ID NO: 225967 - DNA, 2028 bp, Klebsiella pneumoniae
atgaacgaatttacgggatcggcagcttcacaggctgactttatttggaagaatgcggaagacctttggggggacttcaagcatacggactttggcaagatcattttgccgtttaccttgctgcgccgcctggagtgtgcgctggagccgacccgcgaggcggtgagagaagcgcatgacgctttcaaggatgcagatgttgagctggataccattctgcgctcaaccgctgaataccccttctacaacacctctgaatactcccttggcaccctgggtagtaccaagacgcgccgcaatctggaagactacatcgccctgttttcggataacgcccgcgctatcttcgaggagtttgagtttggcaatacggtgatccggctggagaaagcgggcttgctgtacaagatttgccagaactttgccaagatcgacctgcacccggacgtggtgccggatcgggtgatgagtaacatctacgaacacctgattcgccgctttggtgccgaggtcaatgaaggggccgaggacttcatgacgccgcgtgacatcgttcacctggcgaccgcattgctgcttgacccggatgatgccctgtttgaggccagccccggtttgattcgtactctgtatgacccgacctgtggcacgggtggcttcctcaccgatgccatgaaccatgtgggcgactacggtaaccgcgacaagatcccgccagtgctggtgccgcacgggcaggagttggagccggaaacccatgcggtttgtgtggccggtatgctgatccgccgtttggagtccgaccctggccgagatctgtcgaagaacattcgtcagggcagcacgctgtccaatgaccagtttgccggtgagcgtttccactactgcctgtccaatccgccttttggcaagaaatgggagaaggacaaaaccgccgtcgaagcggaacacaaaaaaggcgagctgggccggtttgggccgggcctgccgaaaattagcgatggctccatgctgtttttgatgcacctggcgagcaagctagaactgccgatcaacggcggtggccgcgccgctatcgtgctgtcgggttcgccactgtttaacggcggtgccgcgtctggcgaatcggaaatccgccgttggttgctggaagacgacctgattgaagccattgtggctctgccaacggatctgttcttccgcaccaatatcgccacctacctgtggattctgtccaacaagaagccgcaggagcgcaaaggcaaggtgcagttgatcaacgccaccgacctgtggacttcaatccgcaacgagggtaacaagcgccgtattgtcagcgatgagcagcgccgccagattctggacatctacgccgcatgcgaaaccggtacgctttcccgtatgctggactaccgtacctttggctaccgccgtatcaaggtcttgcgtccgctgcgcatgaccctggagcttgataaggtgggcatggagcggctggaagccgaagctgcctgggaaaagctctctgaggcgcatcagacattctggcgcgaagccctcaagccgttgatcgggcaaacgcagccctatagctgggcagaaacctttgtcagggacgcgatcaagtccgtcgaagccaagcagctcaaggtcaaatccagcaagacattgatcaccgcgctgatcaacgcctttggtcacaaagacccgaaagccgagccagtcacggattcaaacggcgagctggtgccagacacagatttaactgattacgagaacgtcccctatctggaggacatcgacgactactttacccgcgaagtgcttcctcatgtgccggatgcctggctggatgagagctttaccgatgcaagggatggccaattgggccgcgttggctacgagatcaacttcaaccgcttcttctaccagtaccagcctccgcgcaagctgcatgatattgatgaagacctgaagcaggtagaagccgagattgccgcgctactggcggaggtggccagcgaatga

SEQ ID NO: 225968 - DNA, 1272 bp, Klebsiella pneumoniae
atgtttgccctggccgatgtgaacagcttctatgccagctgtgaacgtgttttccgcccggatttgaaaggaaagccgatagtcgtcctgagcaacaacgacgggaacgtaatcgctcgcagtgccgaggcgaagccctggatcaaaatgggaactccgtggtttcagataaaaaacgaaaggtacccggaaaaaatatatgcgttttcaagtaattatgaactttacgcctcgatgtcggcgcgcgtgatgaactgcctggaggaactggcccccagggtggaacagtattccattgatgagatgttcctcgacctgaccggcgtggagcactgtatggggcttgaggacttcggccggcagctgcgtcagcacgtgtatgactgtacccgcctgaccattggcgtgggcgccggaccaacgaaaaccctcgcaaaatcagcccagtgggcctcaaaagagtggaaacagtttcgtggcgtactcgcgctgaccaggggaaatccgcaaaggacgcggaaactgctttcactgcagccggttgaagaaatctggggggtgggtaaccgtattgcacgcaagctaaatgtgctgggcataaaaaccgcgctcgatctggctctgacgaacccggccttcatccgcaaaaatttttctgtggtccttgagcgaacggtacgggaactgaacggggaaagctgcctttcgcttgaggaagcccctccgacgaaacagcaaattgtctgcagccgcaattttggcgtgaagatcacggagtacgagtcactccgtcaggctatctgtcagcacgcagagcgggcctctgaaaaactgcgtaaagagcaccagtattgccggcatatttccgttttcatcaaaacgtctccgttcgccattaaagagccttactacggcaacgtggctacggaaaaactgcttacacccactcaggacaccagggacatcattgcagccgccacaatggctctggagcgtatctggagggatgggcaccggtatgccaaagccggagttatgctgaatgacttcaccggctccggcgtttcgcagctgcagctgtttgacgaacgcccgccacgccctcacagtgctgagctgatgagggttctggacgggatcaacaactcagggctgggtaaagtatggtttgccggtagaggaattgcgccatcctggcaaatgaaacgcgatatgctctcccctgcgtacaccactcgctggagagatatccccgttgcgaggatcggttaa

SEQ ID NO: 225969 - DNA, 432 bp, Klebsiella pneumoniae; identical to SEQ ID NO: 92438

SEQ ID NO: 225970 - DNA, 993 bp, Klebsiella pneumoniae
gtgaaaaccctgacgcttttcctgagtgccctgatgttgtgggggtacagcctcagtgcggctgctgatccctcctgtgagggccggtttgttaacccgatcaccgatgtgtgctggcgctgcatatttcctttatcactcggcagcgtgcaggttggtaaaggcgatctgcctgataccagcaatccgggtagtcccctgcagctgtgtccggcgccgccaccgatttttgttcgccccggcctggccatcgggtactgggagccgatggccatgacggacgtcagccgttcgcctggctgtatggtcaatctggggggcttcagtatcaatctcggcaagaccggtatggggaccgcgagaaaggacgacaagcaggtgaacggcgctttttatcacgttcactggtacaagtacccgctgacctactggctgaacatcatcacctccgcaggctgtctggaaggcggagacatggatatagcctatctgtccgagattgacccgacctgggtggacagcagcctcaccaccattctgaatccggaagccatcctgtttgccaaccccatcgcacagggggcgtgcgcggctgacgctatggccagcgcgtttcatatgccactcgatattctgttctggtgtgccggctctcagggttcgatgtacccgtttagcggctgggtaagcaacgagtccagtccgctgcagtcctcgttacttgtcagcgagcgcatggcgtacaagcttcaccggcagggacaaattatggagagcatcgggaaggacaaggcggtctgctatgagtatccgtccccgatcatccccaaagagcgctggcgctatcagatggtgaacatgtacccggacagcggccaatgccatcccgtggggcgcagcgtgatgcgctgggaggccggtaaaaatccacccaacacccgtaagaactatggctatctgatgtggcgtaaacgcaattgtgtctttctctga

SEQ ID NO: 225971 - DNA, 639 bp, Klebsiella pneumoniae; identical to SEQ ID NO: 102173

SEQ ID NO: 225972 - DNA, 1956 bp, Klebsiella pneumoniae
atgaagacggttatttccgtgctgaccgcgcatttttttgtcctgagcgccttcatctggctggcatcccccgcctgcgctgacagtggaagtgactataaagccggttcggattttgcgaaacaggtgcagggcaatggtctgaactcactaaaaaatttcagtggtgagcaaaacctgccggggtataccgacaacccggatcagacaaaatactacggcggcgtcactgccagcggagacagctctctgaaaagcgattcagccctggagttcagccagggagataccggcaaaacgattacggagtcgttcacgaaccggccaccggatcagatatctcaggatgcgccgtttattcaggccgcaaaggatacagaatcccgtgccgacagcattgtcggtgataccggacagtcctgtaccgcccaggttgtgaaccgcagcgagttcacaaaccatacctgcgaacgtgatctgcaggtggaaaatttttgcacacgggaagcgaccctgaaggataacgccaccacgcagaaagttaaccgaacctatcagcaggtggtgacgctgaattatgcccggagtacccggcaatggagtggcaacctgacgatcccgaccaacggtcgtctgctgaatgcctcggtggatggtgagcctctggtgatcccctggattgaagaatgcgattccgaagggaaggtgcgggatagctgcaagagtgcagtcagtgaaagcctgaccctctttgaacgaacgttccccatagatgtgatcagctggccacgttcagaatcgatgtgttcaggcggtcagaacacgcattgtacgaaatatacctatgacgggaaggggaagattcatcagtcgtttggtgtggacaaagcggttactgcagggcagaacttttcagtaagcaaaacatcacggaccgtatcatcgggtagccagaaacccgtacaggtcacggtcaccctggtgatggaagaaaccgaaaccgtctacgcacctgaagtcgtctgggttgaaagctgtccgttcagtaaggatgaaggaaaaaaaacgggggaggaatgtatcagtccgggaggaacgcgaaccatcaccctcggaggcagggattactcgttcacggaagcctgctggaaatataaggatacctggctcacgcagccggcggacagcggctcctgtgaaatcctgatgaaaaatacggcctgtactctgtcatcccgccagtgcgccttctccagcgaggaaggcacgtgcctgcatgaatatgcaacgtattcctgcgaaaccaggacgagtggcaagcaaatgatctgcggcggtgatgtcttctgccttgatggtgaatgtgacaaagccacgtccgggaagagcaatgactttgggcaggcggtatctgagctggcggcactggcagccgcggggaaggacgtcgcggcactgaacggggtggatgtccgggccttcaccggaaaagcgaagttctgtaagaaatttgctgccggcttcagtaactgctgcaaagacagcggctggggccaggatgtggggctggcacgctgcagcagcgaggaaaaggcgctggccaaagcgaaaaaagacaagctgacggtcagtatcggggaattctgctctaaaaaagttctgggtatttgcctggagaaaaaaaggagctattgccagttcgactcaaaactggcgcagatcgttcagcagcagggaagaaacggtcagctgcatatcggttttggcggcgccagcagtcctgactgtcggggcattaccaccgcggaactccaggggattgattttaacaagcttgatttcaccaactttatggacgacctgatgaaaaatcaaaaaataccggaaaacgatgttctcaccaataagaccaaggaacgaattaaggaaatcatgagtcagcaatccgcgcaataa

SEQ ID NO: 225973 - DNA, 237 bp, Klebsiella pneumoniae
atgaaaattaattttcacaaacagcctgccattgattttgtcctgagattaacgctgacaataatcattatttctccggtgatttatttctcctgggatgccgtcaaagggacgtcggggaatgattatgtcgagagtgtggtttttattgttgcggttggttttttctggttcgtgagctatctcttttttagttcgcttgccgcgttgttacggaaaaagacggaggaagaatga

SEQ ID NO: 225974 - DNA, 327 bp, Klebsiella pneumoniae
atggaagagaaaaaagcctacgggctggtcatggtttttgtcggggtgtttgtctttttcctggtcaacattatgtcgtacagcctgtggcgggacagacaggttaacgcatttatgaccaccaaccgggcctgggggatccagtgcgacactgtttctcaggccgcgtgggtggtcagggacggggagcgggtggaccttcagataaatcatctgcctctgtactgcagcggttaccgctttgaagcccgtgatgatgcaggaaagatacagcgccagctcgataaatacagtgtctatcagcatctgtcacgccagtcgcaataa

SEQ ID NO: 225975 - DNA, 558 bp, Klebsiella pneumoniae; identical to SEQ ID NO: 110849

SEQ ID NO: 225976 - DNA, 261 bp, Klebsiella pneumoniae; identical to SEQ ID NO: 110850

SEQ ID NO: 225977 - DNA, 270 bp, Klebsiella pneumoniae; identical to SEQ ID NO: 101411

SEQ ID NO: 225978 - DNA, 339 bp, Klebsiella pneumoniae
atgacggtagcaatcaccacccaagtaacagaacaaactttatcagtaattgagtcctataaagcggtaacaatgtcagacgatgatgctcgcgattttgcgactgatttgttggaacaagctatcgtcgatattgaggctaatccccttcaatatccgtttgaacaaaacgcgctggccaacggcgtaaagttgcgccgctggttagatccaaccgggaaatacatctgtcttttccgctataaccaacagactgaagaggcgattctcgacatttttgccagcacacgtcaggactggttatcacttctctatctcgtccagatctcccgcccataa

SEQ ID NO: 225979 - DNA, 402 bp, Klebsiella pneumoniae
atgggggccgctgatgaaggaaccttgtttgggtattccttaatttttgggcatccatcggcaaactattcgttgtactgccataaaatttatgtgtatgagcaatatcgtggtaatggaattggtagccagatgctgaccggaattcttagccttccaaatgaagttggcctggtttgctcgcctgatctgattccgttttacgaatctgccggtatgcactttaaaggaaatttcactacgccatcagacgcgggtttcacgaaaactcgcggtatgtatgaaggtctttgcgtaatgagcactgataatagtggcgagactaatggcttgcccatcttcatgctgaacgatagcgacattgataacatcatacaggccatagtatcagccaaaaaatga

SEQ ID NO: 225980 - DNA, 972 bp, Klebsiella pneumoniae
atgtctagatattctaaagcaaactgggacgaaatattacaaaaatatattaatagtggcgcaatggaacggagggggttgaaatacattcatgatccacgttcattgaaagaactttcatctgttcttgcgagtcatttggagtattcaggtatagatgcctcagttaaagtgggtagtatttggattgatggaacaccacaagcaaaagcaaaagtattaggtaatgctgaaagcgaagtccaatgtgaacttgcagatctccttattattctaaatgtgggaataaatggcgctttggacaggcgttcagccgtattgatccaaggcaagatcggaactaacccaacaaaaataccttcaggaaattcaactaataaagagagagcattactggaaagatttgatgattctcatccacttgaaatatataaagacacgcgaggaaagagcctgcttaactcatcttcaaaatataacattaaaactggtttaagtggttttaaaaaatatgcacgatatttagtaatgcccacaatgctcgacagtcctattgttcaaaagctaggtccatttgtaacaggctgggcaacaaggaagcgaagttatgacctgaaagacattaatttatttacacttataccaatatctttatgggaaggtaaagttggcactgccttattaaatcaagctagtgatgaatggacgcgtttagttgaagatatggctgggcattatgctacaaagaaaatgaagcgttttggtggatttgatagatgtgttgactcaacaatgcatttatccttttggagagatggtgcattctctgttaccgaaaaatttatgcatgatacatcgcatttagatatggatataaatttaggagataagtttgatgaaagtattccaccacgaatatctattatcagatttgatgtaaatgtaattatgacagagcaagaatcgcattaa

SEQ ID NO: 225981 - DNA, 213 bp, Klebsiella pneumoniae
atgaaaacaaaagaagagtttttccaggagctaatcgatattgtcagcaatgcggggctcacgctttctgattacaggctcgtcgaagaccctgacaccgaccatccccttttcgtcgattatccggctatgtggttttactactgtgttgcaggaatgacagctcgggaggcgcttttaatagaatacccggccatggaagtggtgatttaa

SEQ ID NO: 225982 - DNA, 885 bp, Klebsiella pneumoniae
atgctctatggggatgttaactatattggtgttgatggtaccggtactttcactctggccagggttaagggagtgactgcaacaaactttcaggccagaaatttttctggctctgcggcatggtttgatttcgcatcaggtgtgacggcaagtaatattaagggggattctccttactcacgctatggcgtcggattttttacgccgtgtgataacatcaaattatcaaacttcgatatcaaagtgaaaggaccagcgctatggttcggtggaaattcttcgttcactgatttctctatcgacggggccagtaagttcgaaagctacgaaggctatgcggtactgatgcccaataacccacttacaagattcaaaatctcagacactacatttaccggatacaaaatatgtaaccttatctttgaagtggataacgttgaatttgtccataaagggaccgatgagcccgctctttacctgggaagcgccaatcttttccatggcaagttgaagtgcacggggacaacatccgctgttctggtgaatgtgggtgtgggctctggtgtttacctctctgttttggaagcggagaacaaagggtctggtgataccctctctctggtcgccagtgttaactttagcattggtaaggccagaatctggaacaccggctcggggggtggggcagcgctaaggatatctggcggacaacaccagtcaatcctcgacaatctcgatctgtattcagtctcaggaaggcctatagtttcaaccgcaacgcacactgatttagagttgagaactcgcagggaaaacggtgcgctgccatcttcatggtctgataagtccaatgtatacagaacttcaagggcattgatttcatga

SEQ ID NO: 225983 - DNA, 900 bp, Klebsiella pneumoniae
atggcgcatatgggaaacactattttttttggtaatggaataaacagactttctaaaaataacatcacctggagtgatttgctggataatataaaaggtatcaacaaattcgagagtggacaactgcccaacactatggtgtatgaacgaatatttctggaaaaacatgcaccagatacaagcgaaaaaaaagatgagtttgaaataaaaaatgttatagctaacggactgcgcaagcagggaacaaatgaggttcttaaggcgttagcattattacccattgagcattatcttactactaattacgactacgccctcgaaaaggcgcttaacatctcaccagttaaactcagttctgaggatatctacagcctgcgaagaaagaggatgtacgagttagagaacgatacaaagtttctctggaatatacatggtgaaatagataaccctagatccatcatgcttggcttagatcattactgtggttcagttagcaaaatcgatgcatatgttaaaggtaagtactcacataagattaatggtgttgacgttactgttaaatccatgctagaaaaaattagtgactcttcgttttgccacacctcctgggttgatctctttttctcaagcaatgtccacattctcggtttttcattagactacagcgaaactgacatttggtggttgctaaacaaacgcgctcgtttttcatctgaggcaacaataaataacaaaatatatttttacacccacgatattagcgatgagaaaaaagggttgcttgaagcatttaatgtcgaagttattataataaaattaatggataatagcttcgagaatatgtattggtctgccatcaagaatataagtgctaatatcaatcagggtatggtagcctaa

SEQ ID NO: 225984 - DNA, 894 bp, Klebsiella pneumoniae
atgaagttctcgtacagacatggttttgatcctgagtataataaagagccgatacgggaagatgctccagagtggcttcgctctttattttttgtaactgtcctcgataattttttgtacattgatggtgatagccgcattgcgaatgatgagaacaagccgctgggtattaaggctttgatcgagcgactttgcgcagagaatggtcaagaaacagatcatgaggatttcgattcatggtactgccatgatgctttgaaagcgcgtttgcaacatatgcgttggtttcaattttatgatgctgttgagattatcggagatctattaagaaaaagagatgtcgaaagaggccatacttgtagtaagaaggtattagaagacattacttttacatcatatcgtcagaaattgaacgagttattcgcatctcgaaatattgactggaaaatgaattctgctggtaggttagaaacaccactaccaaatgaactagaacaaaaaatcgatgaaactaacaacttattgcaagaccagtttgaacctgcaaggaggcactatgtgaaagcccgggcttttgcattaggtgcgcataaagatccagaaaattccataaaagaatcaataagtgcaatagaaagcatgtgtcggacttattatccttcagcctcaaccttgggcgaggtattaaaattgatgaaaaaagaaaacactatctcacctatgctattaactgtaatagagaaattttacgcttatacaaatgcagagccagcagtaagacatggtagcaacaaggtttcttctgtcttggaatacgacgctgaattcgtgttgcatatatcagcagcatttattagaacgataatacaaaggaaagctgttttggataactaa

SEQ ID NO: 225985 - DNA, 1365 bp, Klebsiella pneumoniae
atgtacggagaggagaagtcggactcgctcatagtagcggcgaagcaggcgaacaacccgaaaggagcggagtcagtggagcgaaggagcggggccaaggggaacgcggaacagccacacatgcgccggacacagagccgggaaagcatgtcacagaggctgtcacgcgtgcgggaagctgcgaagcagcggaagaaagaacggtttacagcattgttccacctgctgacagtcgaagcactggaagccgcattcctctccctgagcaggaaagcggccgccggagtggatggcatcaggtggatggactacgccggaaacatgaagaacaacataacagatctgcaccggaggctacatcagggcagctacagggcgcagcccggcaggcgtcactacatcccaaaagcggatggaaaacaacgcccgctcggcatcgcctcgctggaggacaagatcgtccagtatgcgctggtgaaaatcctgaacgcagtctatgaaaacgactttatggggttctcatacgggttcagacccgggcgaagccagcacgatgcactggacgcactggccacagggctggtacgcactaacgtaaactgggtactggatgccgacatcagtcagttcttcgacagggtgagccacgaatggctgatcaggttcacagagcatcggatcggcgaccggagggtaatcaggctcatacgtaagtggctcacagccgggacgtcggaggagggtcaatggcgagcaacggaggaaggcaccccacagggtgcggtcatctcaccgctgctggcaaacatatacctccactacgtcttcgatctgtgggcgcatcagtggcgacgtcgctatgccacaggcaatgtggtaatggtcagatacgccgatgacatcgtcatcgggttcgacaaacgatacgatgcccctgcgcttccgtatagccatgcagcgcagactgagggagttcggactcacggttcacccggagaaaacccgtctgatggagttcggccgcttcgctgccgaaaaccgtgccatcaggggaaaaggcaaaccagaaacgttcaacttcctcgggttcacgcacatcagcgggaaagatcgcaacggcaggttcatgctgatacgaaagacccgccgggatcggatgacggcaactctgaaagccatcaaagacggtctgcgaaggcgctggcattactcaatccccgaacagggaaaatggctcaggagagtggttcagggatacctgaactatcactcggtaccgggcaacttccccaccatgcagaagttcaggacacacgtaacaaacctctggcgccgggcgctcaggcgcaggagccagaaggatga

SEQ ID NO: 225986 - DNA, 201 bp, Klebsiella pneumoniae
atgatacgacctagacgaaagcaaacaaactggcagccgcatggctaccaagggttcgggttcttcatccatggcctgtggagcggttcaccgccagacacccgaggcaggagcccggtgcgtaaatcgcgcacgccgggatctgtgcggggggtatccggtaacgggtatccctaccgcgacatcagtgaaaagacatga

SEQ ID NO: 225987 - DNA, 216 bp, Klebsiella pneumoniae
atgataaaaagttttaagtcagggttgatcccgatagagaaaatgccgttgagtaagactgaaaggcttatgcctctgaatatcaacaccgctggtaagatatttacacacgcaacatggccgagatgtcgttacattttcgtaccggatgaggtgggaataatgaaactggttaacgtggtcaaattaagattaaaacccttggaggaaaaatga

SEQ ID NO: 225988 - DNA, 444 bp, Klebsiella pneumoniae
atgattttaaaagaagaaattgttttgggtatctacagctggcttcatatgactccggtcagcatgctggtaagaaacataaccagcgatcagggaggggattacgcgatcgtccgctttaccgtcgatagccggggggtccagatggggcctaaggcacagggccagcttctttgttcattcgggtttaatgtaaaggaatcctgtgaggccgaccttaaagacggtccaggcctcataaaggccgaaatgatgaacggtgttatgcagctggtaccggaatgcattgagctcactgacagccaaacccaggcaatcaggaaagaagtgaccgtgtttaacagggtttgtgcaatgcaactcctgggggggcatgggaatgcaaggtctctgtgggagaaagaaattcttccccggatgaaagtgcgcagacaactacattga

SEQ ID NO: 225989 - DNA, 240 bp, Klebsiella pneumoniae
atgccgcgaaactcagatatcgaaatagcctggcgtcaggcaattgtcattgagcctaatggccgtcgcaccgtgacaacgtccggttttatccaggaactcgcaaaagttaactggatatggtcaccgcgccaggctaaccagtggatagagcactatgtgacgacattccgggatgtctcaacgcaggaaggcgatgagcgcacgttccagttatacaacccgaacggagggctataa

SEQ ID NO: 225990 - DNA, 675 bp, Klebsiella pneumoniae
atgagcatttatcaacgcattaacggcgctgactggcgcaatatctgggttgttggcgacctgcacggctgctacaccaacctgatgaaccggctgggcgcggtcgggttcgacccagcacaggatctgctggtttcggttggcgacctcatcgaccgcggcaccgagaacgtcgaatgcctcgacctgattaatcagccatggttccgggcggtgcgcggcaaccatgagcagatgatgctggatgctatcgcagccggatatggcagcaaggagattcactggaggcagaacggcggatcctggtactacttccttgacccggagcaggagattttggcgaagtctctaatccccaaggtggcggcgctgccgcttatcatcgaggtaatgaccgaaggtagcagggtggtggtctgccatgctgattatcctcataacgaatatgcatatggcaggcccgtcgatgcagaacaggtgatctggaatcgtgagcgagtgagcgcggctcaggatgggattgtctcgccgatagccggtgctgatctgtttatcttcggccatacccctgcgcgccagcccctgaagtatgccaaccagatgtacatcgacaccggagctgtgttttgcggaaacctcacgctggttaaggtgcaaggtggtgaccatgagtaa

SEQ ID NO: 225991 - DNA, 744 bp, Klebsiella pneumoniae
atgacaaaaatgagcaccatttacagcagactttcatacggcaccgggaccgcactgacgggctgcggtgtctcagcaaaggcgtatgccggggcagttaaggcagaggtatggattttggccgacaaaatagcggggatgaccctaagtgactgggcaattattgtcggtatcgcctgcaccattaccacctgtggggtgaactggtactaccggcggaaagaacgcgaggatcggctcaatgctatgacaccaaaactgaggaatagcgttatcgctgccgtcggaggtggcgccatagccattgcttctgcgctcatcactggcccaaccggtaacgatggtcttgagggggtgcggtacgatccctatcaggatgtggtaggcgtctggactgtctgctatggccacactggcaaagacatcatgctcggcaagaagtacaccgaggctgaatgccgtgcccttctcagtaaagacctgaacaccgtcgcccgccagattgatccgtacatccagaagacaatcccgataacaatgcgcggggcgctttactcattcgcctataacgtcggagccggaaacttccagacctccacactgctgcgcaaaatcaaccagggcgaccagaaaggtgcatgtgatcagctgcgccgctggacctatgccaagggaaaacagtggaaaggcctggtaactcgccgcgaaattgagcgtgaagtttgtttgtgggggcagaaatga

SEQ ID NO: 225992 - DNA, 177 bp, Klebsiella pneumoniae; identical to SEQ ID NO: 206623

SEQ ID NO: 225993 - DNA, 636 bp, Klebsiella pneumoniae
atggctgattttgaagaccgccgaccattccctcccgtcaacttcactggcgaaaactggctgccgtatacccggctgatccctgctgccgaaatcggcgaatgggtaaaccagaacatcctctccgaagagggccgaatccataaccctgaccatacgcaccttgtcgatgctgatctcgcgtttatgtgggcctctggctcattcgccaaaagcgggcgcattgtgctgggtcagtgtgagcaggtaatgatgcgtgctggcggctggcagaagtcccgcatggagcagcagatgcatgaatggttcggtcgtataccgaagttcatcatcactctggctgccgactactgcgagcaatgcagtgacctcgaattctgcgcgctgcttgaacatgagctatatcacatagcccaggctaccgatgactatggcgcaccgaagttcaacaaagagaccgggatgccggtgctcacacttcgcggccacgacgtcgaggaattcgtcggagtggtccggcgttacggtgccagcaaagacgtgcaggaaatggtggatgcggctaacaggccggcggaggttgctcatatcgatgtagccagggcgtgcgggacgtgcatgctgaaactggcgtga

SEQ ID NO: 225994 - DNA, 513 bp, Klebsiella pneumoniae
atgaaatatccaacggtatcagtaaacggcgtctccgttcgcgtagatggcgaaggtcgctacaacctgaacgatctacatgctgcggctgtggcggaaggcaaagccaccgaatcacagcgacccggtgaatttcttaaaacaaagcaagtaaggcggtttgtgcaggccctgagcgatgcgaagaaaatcgcatcggtgttaaccattaaaggtggaacgcttcaggggtcatgggggctcgaattaattgccatccgttatgctgcgtggcttaaccccttattcgagataaaggtatacgagacattccagatgctaatccgtcatggcattgacgctatgtcacggctgaacaaaatcgaccatatcatcaacaccgaaaccaaagcgattagccagtgtgctagccagatggcgaaatggggagtcggcggacgtaagcagctactgcacgcagcgcgggagcgggccgccgatgaagttcagttgtacttgcccggcattgtttag

SEQ ID NO: 225995 - DNA, 213 bp, Klebsiella pneumoniae
atgcatgacaggcttacccgtattgagacggttgctgaaaaccaggagaagctaattagcgatacaagagctgatttgcgtggcattcggtctgacatgaagtccatggaaaacaggattgttgacaaaatggacgaaaatcagaagtggctggttggccttttggtgtcggcaatactggtgcctttgttcatcgcgttggttactaagtag

SEQ ID NO: 225996 - DNA, 294 bp, Klebsiella pneumoniae
atgagtgaagcaaaaccgcaggatggcagcactgtaaaaggctaccgcacattaaccgatggcgacattgagcggatgaaccgcctcaaaggtgtcagccggcatttttgcagtctgctcgatacagagcgaggtgaattgttggctgtccgcaatggaccggcaatgttaagcgctgagcaggcacgggagattgatgaagctatgcgcagcctggcactcgcgcgcaccaaaatgcaggaagcctgtatgtgggcatgccgggcagtcgcccggcctgatgctgaccgttaa

SEQ ID NO: 225997 - DNA, 417 bp, Klebsiella pneumoniae
atgaaaatcgatcaggaatatctaaaggggctgcttatagcgtttgaagattcgaacgagcctcatacgagtattactaggcttttggcgctggggtttgatcatcgaactaacgaatttcgcttccatattcggttattgcatgatcgtggtttgattggtcgcgtcgatggtgaatatgggattgggtatttcagccctggcagtgatgatcaagatgacgaaggtttttttgacgaagtgccgttgcgtctaactgcctctggacatgatttcctggaagcaattagaaacaaagaagtgtgggcaactcttaaaagcggatttaaggatgccagcattggaacgcttgtgacggtatcgaaaaaattgcttaaccgtgcgttaactaagcaactagataagtattttgattag

SEQ ID NO: 225998 - DNA, 336 bp, Klebsiella pneumoniae
atgggcgtaaaggtattcagaagtgaacttcaaccggatagtgaatctgcgtatcgtcattggcttagcgataatcctgatggatatgtcgtcaacaccttaaaaaccgccagcggtaaggcaagcaagagtgatgaacgctttaccaggattcatcgggctaattgtaaaagaatcaacccgctacttggactgacgaaaaagaaaggcttcacaaccggtagataccagaagctttgcgcagctacctttgaattggctgagagagaagcgaaatcggttactgggctggcaagagtggagacatgcccatgcatgcatctggtatgtagttga

SEQ ID NO: 225999 - DNA, 294 bp, Klebsiella pneumoniae
atggccggattaaccaaagagcagcgtgctgaacgtgctgcagcaaaacttgcggccgcgcaggttgatgccaatgatcctgaacagcaggaacagcaggaacagcaggaacagcaggaacagcaggaacagcaggaacagcaggaacagcaggaacagcaggaacagcaggaacagcagctggtggcgatgattaccgatttcccggcattccccggcggccccaataccgccaacgttcaccctgatgaagtggagaactggaaggcgcacggctggaaagaaatggagtga

SEQ ID NO: 226000 - DNA, 3069 bp, Klebsiella pneumoniae
atgaccattcgtttttacccgtcccggcttcccggtgaacctctcgaaacgcatgagcatggcgtaaccagccttcgaaactggctggcggtgaatgttgaaggttacgaggatcgggatgtaccgccgttaaccattgaggttgacggtctgtccattccgccaggcgagtgggctacttgcgtgatccaccctgaaagtgatgtccggctttatccggtgcccttcgggctggaggccgccaccatcgcgtggataggtgtcggcatctccgttgctgcagcagcttattcgctttttatgatgagcagtatcgatacgggggcctatacctcatccacagggcgcagtctcgacctgaacccggcgaaggcaaataccgcaaagctgggtgatccgattcgcgaggtgtttggccgggtgcgtatctaccctgattatgtggtccagcctgtgacccggttcgacgctgctgatcctacgaaaatgcgcgttcagatgctgttgtgtctcggtgtcggtgaactgatttataccaatggtgatatccgggttggcagtacgccagcttcaacgctgccgggattcagcatcacctattttccgccaggcgcggatgtttccggcgatgagcgcagcgaaaactggttcaactcgacagaggtcggtggcacatcaagcggaacagggctggacatggcccagacctcgcctgattccgacgatattatcgctgacagcatgacggtttctggtgcatccgtaacctttacaggtcttgatacggatgatggtgacgatgacgacgaggatgataattctctcccggacagctgggtaacgggggccatagttgaaattaaggcgccgacaaattatctgatctccacctcttctggttacagtgtttttgccagctcgttgcttaccgaacttgctcccgtagcgggtatgccggtgacgctgagtttcaacagtgtcgattatgacctagtcattgcgtcctataccccgggtcaggacgcagtgcctggcgagggtggcagtgcagcaaaaattcaggccagtgcggctcccgtcacctacgatttttcgaccagctccagtacgttcatgatcacatggcagggcaccacctatacggtgtcgctggtagcgaactacatctcaatgtcgggactgctggcggccatcactgaggggctcactggctcaggcctgatcgcacgggacaacggcggtaccgtactgataactgaggcggccagtccttacgtgggtggggcaatcacatcctcctcgctgcctgcagccgttttcggtgatgccccggtttacacctccggcacggcatcaaccggcggcagcccggcggtaacggcaaacgtgacgcttgcgtataacagcactacgggaaccgcattctcgggcatgcctgaaggtgtgcaacggctttcacttgctcatcgcgggaatgagtaccagatcgtctctgccgacggcacaacggcaacagtggcgcgcctggttaatgggtccgttgatgagtcgtggccgggattcaccgcccggacgatgatcgactatgaggccactggtcttaacgacacgctgagctggctggggccgttcctggtttgccctgaaaatgagaccgtcgatatgttcgaggtgaatttctctttcccgaacggtatctgcggctttgacagtaagggcaaaaaacggattcgccacgttgagtgggagatacagtatcgcgtctacggttccggctcggggtgggtgagtcaccagggcgagtacgcgctgaaaaacgtcaacgggctgggttttactgagcggatcaccctcagttctccggggctggtagaggttcgctgccgtcggcgcaatgagcagggctcaaacaacgcgcgagacagtatgtactggcaggcactgcgcgggcgactgctgacacgcccttcatcctatcccggcgtgtcgctgatggcggtgaccgtcgagacgggcgggaagctggcggcgcagtcagaccgccgcgtaaacgttgtggcaacgcggtcctatgactcaggaacggccagaaccatttcgggggcgctgctgcatgtcgggagctcgctggggctggagatggacgtcgataccatcaacgcgctggaggccgcgtactggacaccacggggtgaaaatttcgatttcgccaccggcgacagtatctcggcgctggaaatgttgcagatgatagccagtgccgggaaatcccgctttctgttaagcgatggtcttgcgacggtcaaccgcgaggggattaagccctggatggggatcataacgccgcatgagatggtggaggagctgcaaagcggatttaccgtgccgtccgacgatgattttgatggtgtcgacgtgacgtacatcaacggcgtcacctgggcagaggagactgttaaatgtcggacacccgataatcccacgccggtgaaaatcgagaactacaaactcgatggggtgctcaatcaggatcacgcctaccagatcggcatgcgtcgcctgatgaagtatcttcagcagcgggttacataccagaccaccaccgagctggatgcgctctgctacaacacaggcgatcgcatcgtgctcacggatgatattccggggaacaacacgatttcctgtctggtggaggcgatgacaacggctggtggcgtgacaaccttcaccgttacggagccgctggactggtctttcgaaaacccccgtgcgctgatccgctatcaggatggttctgcatccggtctgatggtggcgagcagagtgggggattatcagttgtccgttccccatctgagtgattttgatgacccattgaagattgaccagacttcaccagccattgagccagtccgactggtgttctgcggctcaacgcgtcatgtctatgacgccattgttgaggagattgcccctcaatcagacgggacgtgtcaggttaccgccaaagagtaccgcgcgtcattctacgactacgacaacgccagctaccccggcgacgttgcataa

SEQ ID NO: 226001 - DNA, 1089 bp, Klebsiella pneumoniae
atgtccaatttagtcgcaactactgaaaaccagacccagaagatcgacaacgtttctatcctgacgaacggtgaattgttcaaccgcctgcgcacgctctcggaagtaatggccaatagtggaaacttcgtgcctgagcattatcgtgggaaaccagatgcgtgcatggctgtagtgatgcaggcagcgcgttggggtatggatccgtttgcagttgcacagaaaaccttcatcgtgggtaactcaggtgtgcttggctatgaggcacaactggtgaatgcggtaattaacaccatggctccaaccaaagaccggatccattttgaatggtttggtgcatgggaaaatatcgttggccgcttcattaaaaaaaccagcggcaaaggtaacgactacatcgcgccgggctgggatttgcaagatgaagctggcgtgggcgtccgcgcctgggcaacgctcaaaggagaatcagaacctcgcgagcttgtgctgatgctttcgcaggcacaagtccgcaactctacactgtgggcgagcgacccccgtcagcaactggcctatctcgccgttaaacgttgggcgcgactgtactgcccggatgtgatcctcggggtctataccgccgatgaaattgacgaacgcgaagaaagggttatcaacccggcgcagacagaaaaggtcacgctgaatgagataacacactccgttggcgattccaccagcacgcaagagcctgcatctaacgttgactctgttgctgacgaactccgagaccggattgataaagctgactcagtggaccaggccaaagccattcgtgtagacatcgaatcacagaaagctctgctgggtactgctttgtataccgaactgaagagtaaggcggtgaaacgctactaccttgttgatgcgaagaacaaagttgaggccgccataaattcactccctaacccgggggatccggagacagcagcattattcgcgaaggcagaaagtaccttgacctcatcgcgccgccacctcggtgatgaactgtatgaccagttccgcattaccctggacgacatgaaaccggaatacgtgggctaa

SEQ ID NO: 226002 - DNA, 699 bp, Klebsiella pneumoniae
atgatttttaacgctgagatggtgcgggcaatcctcgacggtaggaagacgcagacccggcggcctatcaaatggaaacagactcggttcactgaaattggtgagcgcgaagacggtagcaaatggccgtggagcgaagacgcagagcatgcttgcgacttctggcacccatgcccgttcggcgccgtcggcgaccgcatctgggtgcgtgaaacttggggcgttgtcagtcacgcctttagtgacgatggcttgatgattgactgggttcctgatcgccccacgactgccattcacgaaatgccgtttggcaatggctattactctggctacgccatttatgcagctgatggtgattttacctggggtgatgaagatggttatgaagatggccgttcgtgctggaaaccttccattcatatgccgagagcagccagccgcattcttctggaaatcaccaacgtgcgggtggagcggctgaacgctatcagcgaagaggatgcccgagcagaagtcattattgacggtggctgtcttaattgcggggaacctgagccatgcggatgcgccaatccagagcctgacgctaccgatgcttttgcctacctgtggcaatcagtctacgggcaggaaagctggaatgctaacccctgggtttgggtaatttcgtttgagcgcattgaaggcggtgcagcatga

SEQ ID NO: 226003 - DNA, 474 bp, Klebsiella pneumoniae
atgagactgtctcactgtattctcaccgcagccatactggcttccgcgtcaacagcccatgccctgcccaatatgtggaccagcggatttggtcagggcgtgaccgaatatatcattaccagcccggataaggtggtatttaatctgaattgtactggcaatccggatgcgcagaatattctgcaacacagcgtctggctcaccctgcctgatggcacttccgtcaattccagcgatgacggaacagagataacggtcgtcatggataacagccagtaccccttaccgtcattccttggctggcgaaacggtgacaatgcctgggtgtcatttattaatgcgctgagtcaggctgcgaattttgatgtttacgtcaacgataaaaaagttggctcctttagtccgggtctgaagaatacgcaaaaagaactgtctgacctcagtgagtgtcggaccacacactacagcgattaa

SEQ ID NO: 226004 - DNA, 540 bp, Klebsiella pneumoniae
atgaactggcattatgagaaaaatggcgtgcgtcatgacaatgtgaccgaagccgacataaccgaacgcattcagcgcggagagttgaatgcatcaacgctggtatggcaacagggaatgacagaatggcagccgctgtcagctacacggctcgcagaagtgctgaaacaaagtgcggttccccccgcgctccccggccatcgtatccccggtggcgtggtctggacgctggcttttgctcccctgattgggtatgccctggaaatatggactgcagggctgagcggaatggaatttgaggaagcgtatgccgcagtaagtgaagggcaatactggtttatcacgctgatactgaatattgcgctgggatatctggatgaacggcggctccgtaaatccggcgtggataccaccgcctttggctggctggcctggctggtaccgttttatctgtggcgtcgggcaaaggccctcagtcagaaaccggcttacttctgggtctggctggtcgcgctgatactggtactgctgactggctga

SEQ ID NO: 226005 - DNA, 279 bp, Klebsiella pneumoniae
atgtgtgaagtggtcgcgcaatcggaaaacgggcgcgtcgccatcgtcagaatggtccccaccgactggaaatgccccaacggtatctggggtgtggttgaccgttctgatggtgatgccatggagctggtcccggcggcgaaaatgtccctggagcagtactgcagcaaggcattcagtgcaggttttgtcaaactgaagaacaggaaatcactggccgatgtcgtgatgtactacaacggcaggccagtcgattctttcgaataccttgaagaatga

SEQ ID NO: 226006 - DNA, 135 bp, Klebsiella pneumoniae
atgagccataagctgaaaggtgtcgtctctgctgcagccctgaatctgtatttactgacaccggcccatgctgatgtctctggtggttttcaggggctatcaaaggcggcattccggcctacatccgcgatgtaa

SEQ ID NO: 226007 - DNA, 456 bp, Klebsiella pneumoniae
atgaaaaaaacatacccgcgtattgttgtcactgttctggccgttatcagtgctatcagtgtttccggttgtgacagcaaggaagatgctggcgtgaaagcgatagcccgatttaaggacctgactccaccaccgttcagcgatgtggtggcgcataaatccgacatcgtgcaggaatgggtaaaaaaggatgccttcggcacgccgcaatacacggtaatgaaaacccgccagtcgccggaaggctgtgagtccggcagttattcctacattgccgatatgcagcagaaaacggtgcagccgctgatagccgccctgtgccttgctgacaatatcgccctgagcttccggattgagaccgacagctatacgggtgagaaatcggtggtgtattcgcacgatggcaaggaaatggggaaactctacctgccggagaatcaggagaacaacccatga

SEQ ID NO: 226008 - DNA, 636 bp, Klebsiella pneumoniae
atgaaattactcatcacagcggcgctggtcgccagtctcagcattatctcagcgcccccggtcctcgctgaaaatatcgtgggttcagtcagaacctggaagtccatgcaggcagatggctggaaatccgctgatggatgcgatgataaccatatgcataacgcactctatcaggcggttgtactcgacaattatccctggacgaatcacttttttcttcgcagcagagatggaggctcgctttatctggcagacaaaaaatccctgacggtcagatacattgatataaaaccccgtgacgaatatccgctacatctccggattatttatcagggcaataatgaaggacagggctgttatttcgctgtcgttgatgaccggatggctaactactggacagccgttgaagacaagctgctctaccagtatcccgccgttgaaaatgttgatgaaaaagcggctgaactcaaaaaacagttcacgccggaagtcatgatgatggtaaaggacaattgtgttaacaaacggcagcaggcagcgcttgcagcccggcgtactgaaaaagacagggaactgcaacagtgggtggcacagcagagtcttgctgagctatgccgtcgtaccggtaactgctga

SEQ ID NO: 226009 - DNA, 714 bp, Klebsiella pneumoniae
atgtctcaggctgagcgtcgttatgaccgcctgtctgtccggctttcgctgattatcagccgtctgctcgcgggggaaacgctgaatatgcgcaaactggcgacggagtttggggtctcggagcgtaccctgcatcgtgatttccgcgagcgtctgatttatctcgacctcgaatatcagaatggctgctgccgtctgctgagcgggggacgacacgagattcaggccggggcagcaatgcagtttgcccgtcagtcaggcactgacgcgctgtttcctgagatggaccaccatctggtcagctcattactaagcggtcggggcaccccaccatgccttatctggcatcagggtgcacccataccgccttcccgcccgggcatcttcacccgactggtcagggcggtatcagaacagcgaagggtaaccctcctggctgacgggtgccgttgcgacagccttgctccctaccggctgattttcagttccggtgagtggtttctggcaggagaacacctcggcaggataaccatttttgcactgcacactgttcactctgtgatgtttcacccggaaaccttcacaccagacggacatttcacccgcatcctgtcacgcccggattttttacaggcgttacctcattttcatctttttcattcactgctcgctgacgacagttacgggcagattatccataaggaacaggtatga

SEQ ID NO: 226010 - DNA, 876 bp, Klebsiella pneumoniae
atgactaaaccacacggccttcaggcccttgaacaaccgctgtcgtcgcttcccgatacgcttcgccagcttattcttgaacgtattcagaacctcacccactacgagccggtgattggcatcatgggtaaaagcggtgcgggtaaatcctcgctctgcaacgaactcttccggggtgaggtctcccccgtcagtgatgtgaacgcctgtacccgtgccgtgctgcgcttccggctacgcagcgggcgtcacagtctggtgattgttgatttgccgggcgtgggcgaaaacggacaacgggaccaggaataccgcgccctgtaccggcgtatgctgccggagctggacctggtgttgtgggtcattaaggccgatgaccgggcgctgtcggtggacgagcatttctggcgcggcgtgatgcagccttaccagcagcaggtgttgttcgtgattaaccaggccgacaaaatagaaccctgccacgaatgggatacccgaaccagcacgccttcagcacagcaatgggcaaatcttcaggaaaagcaggtagccattaccgcgatgtttaaaccacatcatcctgtctgcatggtgtccgcgctggccggatggggcactgaggagatggtgggcaccatgatgcgcagtctgccggaccgcgccgccagcccggtggtgacacagttgcatgggcagctctgtacggaggcggtcaggtcgcaggcccgtgacggcttcggtgcggccgtgggccaggtgtttgatacggcggagtcttcgtcgtttctatccgccccgctgaaaacggtgatgcgtactgtgcgtgatgcggtcgtgtcggtggcccgggccgtctgggactggattttcttctga

SEQ ID NO: 226011 - DNA, 486 bp, Klebsiella pneumoniae
atgaatctaggaaatgagttccctaaaaagcagaatgtttataaaggcatgtggtatttaatcactaacaccaaacgatttgtattatccgcggccgaaaactcaatggcatttgagcttgagaaagaagagtatcaacggaagctcgaacaaggaaattacagtcttgatccaaaaaaccatacctactctcatccccagaggctaaaagaattacgaactttgttactcaagacaacaatctatatttttagcattattattttaatagcaggcattggtttttatacgggagaattaaaaataacaccccatctatcatggaaaaatagtgccagcgctttaggtattattttaatttcatggtctacattatttcaattaggctggggaaatggcacatggagtggaacgtgcctggatgaattggtaagaaattctctttttcgtcatatttttagctgtattagctcagacctgatctga

SEQ ID NO: 226012 - DNA, 2871 bp, Klebsiella pneumoniae
atgagccaaagcaacgccataaaaattgccaatcggattagtgcacgactgtcactgcgcgatccgcaggatgaatcattgcgcatcttatgtgacgtgctcgaacagctcggtctcagcaaagatcccgatcttgatcgctggattgaattgctgcgtcagcagtatcccactgtgaaaggatttgaacgtgccttcccttcactatgctttgcactagctacgggtgtgggtaaaacacgcttaatgggagcgatgattgcttggttatacttaaccggacgcagccgccattttttcgtgctagctccaaacctgaccatctatgagaaactcaagatggactttttacctggctcgccaaagtatgtttttcagggcattcctgaactagcacaaacaccgccggtactaattactggtgatgactatcaggaagggcgaggcgttcgtctggattatgcgattgctgaaagtaaaacgggtgatctttttggcagcgaaaccgctccacacattaatatcttcaatatttctaaaatcaacgcgctggaaaatgccaaaggtgcaactaaatccaaagtcgctaaaatccgacgcattcaggaatacgtcggagaatcttattttagctatcttgcaaacctgcccgatttagttgttttgatggatgaagcccaccgttactatgctagtgcgggtgcacaagcgcttaacgatcttaacccagtattaggtattgaattaaccgccaccccgaaaaccgtaggtgcaaacccacgtgattttaaaaatattatttatcactatcccctttcgcgtgcactaaaagacggatacgtcaaaattccagctgttgccacgcgcaaagacttccgtgctgccaactactctgaagagcagttggaaaaaattaagctggaagacggaatccaccatcatgaatacgtgaaaacggaactaaccagctttgccaacaacaccggtaacaaactggtcaaaccttttatgctagtcgttgcgcaggataccgatcatgcggacaggctaaaagtacgcattgaacacgacgattttttcaatggcgcttacaaaggcaaagtaatcaccgttcactcgaaccaaacgggtgaagaatcagaagaaactatgcagcgacttttggccgttgagcatgacaaagacaccgaaatcgtcattcatgtcaacaagttaaaagagggatgggacgttacaaatctgtacactatcgttccattacgtgcttctgcctctgaaatcctgactgagcagaccataggccgaggactgcgccttccctacggcaaaagaaccggcgtcgaagccgtcgatcgcctgacgattattgcccatgaccgttttcaggagattatcgatcgtgccaataacgatgactcgattatcaagaaggttctgtatatcgggctggatgatgatgaaaacggtataccagaagtaaaaccccagcaaattatcgtaccatcaatggctgaattcttgttgggaaatcaagtcattgataatgatgggttgcaggcttgtgaatctcaagcaatatatcagacaaactccatatcaaaaccggtaatcaatacggaaacagaacgtaaagttgccgaacttacgttcaaagtggtatcagaagaagctaaacggttaaccagcagtcagcaactcagcacaccagaggtgaaagcaaacgtaactcgacgggtacaagaagccttgcgtgaatgggaagtcactcaacatcaaatctcatcgtcttcggatcaactcgatttgacggaaatgattgaagagcaagttgaacagccaagtttcctttcaatggaggatacggaagttcaggcgttggtcgggacgatcaccgaaaaactgatggaatatactatcgatattcctagaatcgtggttttgccagaacgtgaagtcaattacgggtttaatgatttcaacctttccggattggatcgcattgcgctcaaacccggcagtaaagagctcttactcacgcatctggaaaataacgaacagcggacaatcagttggcaggaaggtggagaagcggaagagcggctagaaaactatctcattcgttatctgctcgaccatgatgaaattgattacgacgaacatgccgacatgctttacaaactggccggacagatggtgaaccatttgtgcagttatcagtcggaggaagatgcagaatccgttctgaaaaatgcaggtaggcagttggcagaatttatatgggtgcaaatcaaacaaaatatgtggacaacaccaactggctataccgggcgcataactcagggctttgacgtgatacacccggcaacattcaattttgccggaaacgaaaaaccaagagacttccgtgtagctattccgggtggagaaaaaaataaagtccgccagatgattttcactggctttactaaatgctgttatccttaccagaaattcgactctgtagatggggagcttcgtcttgcacaaatactggagaatgatccttcagtaattcgttggatgaaacctcgtccaggtcagtttcgcatcgaatatgctaatggcaagaactatgaacctgattttgttgtcgaaatggacaatggctattgcctgattgaaccgaaaaaagcgacagaaatcgacgcgccagaagttcaggccaaaacgcgagcggctatccgttggtgcgaatttgcaaatcaaaatgctgaaaaacttaatgggaaatcgtggcaatatgctcttatcccccatgatgaaattgagttaagtcggtcaatttctggactaatggctgattttatgatgactaatagtttatctgtataa

SEQ ID NO: 226013 - DNA, 1617 bp, Klebsiella pneumoniae
atgtcaacaaagcaaaaattagaacttaactggattggtaagcataagcgtcctcgtctggagccgcgtattctattggaagataaggctttatcttatggcgatgttaacagtgagaatttacttatccaaggtgataatctgctagcattaaaagcgctggagcaacagtattctgggaaagtgaagtgtgtatttattgatcctccatataacactggaagcgcttttactcattatgatgatgggctagaacattcaatgtggctatctatgctcagagatcgccttgaattaatcagaacattgctaagcgaagatggctcactctggattactattgatgataatgaagttcattatttaaagatattatgcgatgagatttttggccgctcaaattttgtagcctcaataatttggcaaaaaattttcacagtcaaaaactcagcaaaatatttttctgatatgcatgattatatattaatttatgcaaaaaataaaaataaatgggagaggaagctacttcccagacctgccgaattagataaatcatatggcaaccaagataatgatcctcgaggtgcatggacaacaaatgcgattcaggcgaggaattactatagtcaaggcatgtacgaaataaaatcaccatcaggtagagtatttactccgccaaaagggacttattggagaatatctgaagagaattttcacagattaaatgaagatggacgtatatggtggggtaaggatggcaatgccattcctagagtaaagaagtttctttcagaagctaaacaaggtgttgtgcctgcaactttatggttgcaccaggatgcaggtacaaatgcagaagcaaaaatcgaagttagaacgctatttgataacacagatgcagatatatttattacacctaaacctgaaaaattattagagagagttctttctatcgcgacggaagaaggtgaccttgtattagactccttcgctggctcaggtactacaggtgccgtcgctcacaaaatgaatcgtcggtggatcatggtagaattaggtgagcattgccacactcatattgtacctcgcctgaaaaaagtaattgatggagaggacttgggtggggtatccaaaagcgtaaattggaaaagtgggggcggttttcgctacctacgtttggctccctcactccttaagaaggaccaatggggcaattgggtgatcaacaaagagtataatgctgaaatgttggccgaagccatgtgtaagcatatgaatttcacctatgcgccgagccaaactcaatattggaaccacggctacagcaccgaaactgacttcatctacgttacaaccggctctttggcttatgaacaactcaaagttataagtgaagaggtgggagatgaacgcacattattaatctgctgcaaagcctttatgaccgaagggacagagtttcctaatctgacattggtaaaaattcctcgcgctattctaagtaaatgcgaatgggatcatgacgactatagctttacgctaaatgtactctctgattcagaacaacctgacgatattgactacgacgaagatactgaaggcgaagaacaattatga

SEQ ID NO: 226014 - DNA, 2388 bp, Klebsiella pneumoniae
atgacggcgaattatcagcatctaaatatttccaaagcccctcttcagaatgaccgacggacccgtagagtcaatatgcctcgtattcgcagaggcgatttacgtcagcatgggcaaatgttattgaaccagctccagactctgcgcccgatgctgacgcaggtaccaggcagcgccgctgatggtcgatatatactcaagctgaactacagcggcacgatgaacttttcggcattgatacatcatggcgtagagtttgttagtcaggaaaataaacaagtttgcgtagtctttagtgacgagcaagggctggctacatttgcagaacatctgtcctccctcggtctaggtaatacagaactaacctacaaacagatcctggaggcgcttgacggtatcgagggctggtcggcggaagatcgcaaaagctgggctcttcggcgttatggttttcctgtaacggaacgctttaaactggatgtggagctctggccggtcgaagtagcacatcaccccagacgtatcgatctgtatacccgttttgagcactggttacaggagcaggatatttctaggcaggataaagtcaatctggacagcctgttaatgtaccgggtcgaggtttcactcgcgcaagcggaacacctattagctcatcgggacgttaggtttattgatttgccaccgtctagtggcattagctatcaacaaattaaccgggacatcaatacacttccagctcgcctgagctcgccagcggaaaatgcgaccaggatatgtattctggatagtggtattaataccaaccatcctttgttaagcgctgccattgctgaaagcgccagctttattcccaatcaagatgcgtttgatgaacaggggcatggcactgccgttgccagtattgcgctgtatggtgatgttgaggcttgtaaccagagcaatttctggcagcctcaactatggctttataatggaaaagtcctgaacgagcaggctgaattcaatgccgaaactattgaagctacgcttgcagctgctgttgcatattttaccgatctcggctgccgcattttcaacctgtcattgggaaacgctaatgctccctacgacggcaaacatatccgcggtatagcgtatttattagatacgttgtcaaggcagtacaatgtactctttgtcgtttctgcaggaaacttcgctggtagtgacgagcctccggtaccgcaaagcagctggcgggatgagtatcctgattacctgttgcatgaggcaagcgttatcatcgatccagctcctgcactcaatgtactgacagtgggcagcatcgctaggcataacgcaacgcacgatgcacaacgaagacctgaggatattcagcatctctgcccggcaacagaaaatcaaccttcaccttttacccgacatggtccatcaataaaaggggcgtttaaacccgacgttatggcacacggtggcagtgtcgcttctaatgtgcggcaagggcaatggcagccgcatatgcgtggtttgggtgtattaagttgccatcaccagtttcagggcgctaccttgtttaaggagctcagcggtaccagcttcgccgctccgtatattacgcatctggcaggacgactgttaaacgaatacccggatatgtccgccagtatgttacgggcaatgctggttaatcatgcatctgtccctcaggcgatggcgcaggctttcccgcaggcgatgcgagaaagttataaaaacgcacctacaacgagaaaccgcgagatagaacgtgaggtaacgggttacggcatcatcgatgaagatgctttataccgctcttcagaatatgtggtggtcatgcgatgtgaagagcagatagaaaataacgcccatcagttttttgaactacccttcccggcttcttttttaagatcgcagcgatcaacccgtgaaatccgcgtgacactggcttactcgcccgctgtgcgtaccacccgactggactataccgccacgcggatcagcttccggctggttaatggtcgctcgctggatgaggtgcaggccagttttaatcaccagacccagagtgaaacggaaacccgctccgatgatgcccaaactaaccgggttgtatctgctcaacagcgggaacgcggtacggtacaatcatcagtatggacttttcgtcagcgtaacccgaatgaaaaatggtttatcgttgtaacccgtcaggatagagattggggcgaagcattcagcagcgagcaggagccttacgcactggtagtgaccgcgaccgatcgtgataacgaacaggctcagctttatacacaaattcaggcgcagatccgtgaacaggaacgcgcgcgagcacgtattggataa

SEQ ID NO: 226015 - DNA, 981 bp, Klebsiella pneumoniae
atggctaacggtaaagtattaagacagctgataaaagcgggcgcgacgggcgacactgctacgttccgtcgcgtttcagaagccattattgatgaggaacgtcagaaacagcaccatcttctggctaacgatctggagcatattctttatggcgatcacattgttcaggcttcgcgttcacctacgttgcctccggcaccggtagacaaagaaagggggctgccactgttggacctacggcaaccgcagcgcagcctcgacgaaatgatccttccagctaccagcgctacagtgattgatgagctccttgaagagcaccggcgtagcgatgtattgcatagctatggaatgaaagcagccagtaagatcatatttttcgggccacctggctgcggtaagacgctagcggcagaggtcattgcctttgagctggacatgccgctggcaattgtccgccttgatgtactggtatcctcatttctgggtgaaacagccgccaacctgcgtaaaatttttgattttattgcccaacattcgctggtggtcttgttcgatgaatttgatgcaataggtaaggaacgcggcgacagcggagaacacggcgaattacgccgggtcgtcaatgctgtactgcaaatgatggatgcttatcagggcaaaagtctgattctggcggccactaaccatgaacatattctggacagcgccatttggcgtcgttttgatgaggtgattgaatttcctttgcctgatcaggcacagttacgcgagttactggcgttaaagctacgcggcattcgccgccagtttgaactcgacgataatgaattgttatccttgcttcatgggaaaagtggtgcagatatcgaacgcattgttcgccgggccactaaacacatgatcctgcgtcatcaggaattcctgacgctgaaagatttaaaaaacgcgatgcagcgagagaacgccagaactcaccgataa

SEQ ID NO: 226016 - DNA, 2748 bp, Klebsiella pneumoniae
atgaatccccatcaggtagaagccgcaatgttcgcactggcatctcctttgtcgaatggcgttatcctcgcagatgaagtgggactagggaaaaccattgaggccagcctgattttggcgcaaaagtgggcagaacgacgccggaaattattacttattgctccggcaacgctgcgtaagcagtggagtcaggaacttgaagagaaattttcattaccttcgcgcattatcgaagcaaagagcttcaatcaaatgatcaaagagggatgtggtaatccatttgacattgaaaacgcgactggggaggctgcgatatgtatttgttcatacgaattcgcttctcgtaaagaacatgaactggctcgtattccatgggatctggtcgtcatggatgaagcccataaactgcgaaatatctacaagagcgatggcgctaaaacagccaaaaaaatcagtaatgcattatctggcaggaaaaaaattctgctttccgctacgccgcttcaaaacagcatccttgagctttatggtctggtttccgttattgaccttcatttcttcggtgatttggcctcgtttaaggcccgttattctcggcagaatattgacgatgcagaattggcgttactaagggtacgtctgaataagatctgtaaccgcacgcttcgccgacaggttcagcaggaaggtgggatcagttttacccgccgtcattcaataaccgaagattttcgcccgacggaagatgaagaagctctctataaacaggtttcctcatatttgcagcaagacgatctattggcaatcaaaagcggtgctcgtcatctggtgacattagtcattcgtaaaattctggcctcatcgtctacggcgattcagggaacgctggagacgatgattcaccgtttagaaaataaaatgccagttttagatgccctgactgattatgaaaactatgatgattacagtgatgaagaaggtatcgaggatgaagatacgatcgatcctcgggcactacaggcagaaatcgatcagttaaaaagttataaaaccttagcggcatctataactaaaaacgccaaggcggaggcattgttaagcgttcttagtagggctttcgaatttacagtagaactgggtggattgcgtaaagcggtcatttttaccgagtccgtgcgcacccaaacctggctagcgcaactgctttcagacaatgggtatgaaggcgaagttgtattgctcaacggcagtaacagcgatgcggcgtctagaaagatttatagcgactggttggagaagcatcagaactctggccgagtttccggctctcgcacggcggatatgaaagcggcactggtcgaaaaatttagggatgaaggtactctgatgatttgtaccgaggccggtgcagaaggtatcaaccttcagttctgctctctgttaatcaattatgacttaccttggaacccgcagcgggttgagcaacgtatcggacgtgttcaccgttacggacaaaaacatgatgttgtggtggttaattttattaataaaggcaaccgggccgatcagcgtgtgtttgaactattgagccagaagttccagctttttgaaggcgtgtttggtgcatccgatgatatcctgggatcgatagaatcgggcgttgatattgaacggcgtatccatgagatttaccagcactgccgctccgacgagcaaatagaacaggagtttaatcagctccaggatgaactcaaagaccagctggaaaaccgggagaatgaaacccggcgttccttattcgaacatttcgatgtagatgtcgtccgaaacctaaaaactcgacgtacaacgaccctcgcacagttaaacgattatcaggaaaatctgctgctgctagcggaaatgtttctaagtgacaatagcgatttccagcactctgaaactggttttcgctcctcgggaaagtattatgacgttagctggcctgttgcggatgaaaaggatgcagaatttttccgacctaatcagggatacggaaagcaactgattgatatagccctacatgagggaaaagacctttccacattgccggtttgtcagagactcaatttcatctaccaacccaaggcggggcaattggctgatgtaaaattgctttgccaaaaatcagggcagttgttactagcaaaagtcagtatcggaaatcaagaacaacaacgagagcagctacttgtcgctgccgtaacggaaaatggtgaggtagtggcggaagaaaccgcatcccgtctgcttcgcttgccgttgtcagaggtaacatcaatcgatgaacagcctttgttacccactttaaccgcacaatgtgaggttttacggaattcttttatccagcaggtcgaacgtgataacgaactttattacaatgaagaagtagaaaaacttgaacgctggtcagaagatcgtcgcatcgcgctggacctacgcatcaaacagctagatgcagaaattaaagaagcgcgtaaaaccgcccgccaacttccttcgctgaaggagaagatggaagctaaacgcttgctaaaggcactagaacgcgagcgggacaacatcatgttgcagtatcatgatgaaaagaaaaaaattgagcaggaagaagaccgcctgctggaagaggttgaacaaaagctggcgacagagataacgtccagccaattatttgcggtgagctggacattgaattcacctttcgcatga

SEQ ID NO: 226017 - DNA, 198 bp, Klebsiella pneumoniae
atgtacgcaaaatccttcaaggcgcttgacggtaatggtcgtctgattggtgcacgtaccgcgcagaccgccccttatgatcgctatacatgccacctctgcggcagcacgctgcaataccatccagaatacgacacggagcgcccatggtttgaacatacggacacaagccttaccagtaaaggtcgtcagcattga

SEQ ID NO: 226018 - DNA, 654 bp, Klebsiella pneumoniae
atgtttttattcgatgatatccacccaatggtagtgaatcaaaattacaaacctttcaatgatatttatcttaaccgcatcggaggggtgatctgcaatgccctgcaggagcatccacgcaccacggttatcagagtggatttgcacttaccggattgcggggatgtgggcgacagcattgccagtgaggctgatttaagccaggggttaatgtcccggtttatcgactctctgaaagcgcagctggtcgcttaccaacaccagaaagcccgggaaggtaaacgttgccatcgctcttctgttcgctacgcctgggtacttgaatggcctttacccgatggtaaaaagcattaccacctggctctcctcgtcaataccgacacgttcaatattctgggaagctacgatgaacaagggaaagggctggcctccctgatccagaatgcctggctgagtgcaatgcgggttcgtgactggccggaatacctgacgctggttcactttgctgataatcctctggcatacctcgacctcagtaagccggatttcataaagaaactggatgcactgacctttcgtctgagttacatggcaaaacagcgcaccaagcgctacagcagtgccgaacgctcattcggctgtagtcagggctga

SEQ ID NO: 226019 - DNA, 588 bp, Klebsiella pneumoniae
atgaaagactataaaccacgttacgaagaactgaataaatattaccagacctggctgacgggttatacccgactgacggtctgccagggaatgtgccatcagaatatatatcaccatcataccctgacggtcgggagttttacttttccgggagaaggcgacgttattgcgattgtaccccagtgcctgcaacggattatttatggcaaagcagcagttccactgacggttaatgatgacctgagcgtcagtttatttactcaggagcatcttttagcacatcaccccatgctggaagggattttactgtctgagtgcgtgcgtttaaaacaacgccctctggcaaacaagctcatcagtttgttccgccagttcagtggtagcgaattgcgtctgaagctggtctggctgtgctggtacgatttgatgctggggaacagtctggatgactggattgacaatctcagattcaaaaaagaccacgaaatggagatctggatcaataaccggcaggaagaaaaccctgcgctgacccgtctgatggacgagtacgtctgctttgcgtggcgaacgacagctgaacactga

SEQ ID NO: 226020 - DNA, 207 bp, Klebsiella pneumoniae
atgactacccgcccctctcttctggaagaccagtttgttgacatggcatttattacgagtctgaccgggcttacggataaatggtactacaagcttattaaagacggtcttttcccaaagcctgtgaaactgggacgcagctcccgctggttaaaaagcgaagtggaagcctggcttcaggaacgtattaaccagtcccgtaaataa

SEQ ID NO: 226021 - DNA, 810 bp, Klebsiella pneumoniae
atgattaaccgcgatacgctgctgtgcatctccctggcgggtcgccccggcaacttcggcacccgctttcataactatctgtatgacaagctgggattgaactacctctacaaagcctttacgactaaggatattgaggcggcggtaaaaggggttcgcgcattgggtatccgcggctgtgcggtctccatgccgtttaaagagagctgcataccgtttcttgacgcgatcgatccgtcagcaaaagtcatcgactccgtcaacaccatcgtcaacgacgacgggaagttaaccgggctaaacaccgattacatcgcggtcaaaagcctgatcgccagccatcggctcgataccaacgccagagtgatgattcagggtagcggcggcatggggaaagccgtcattgccgccttccgtgatgccggtttccgcgacgtgatcattgcggcccgcaatcgccagcgcggcctggcgctggcaaaacagtatggctttcagtggcagcccctgcccgaagggatcgcagccgagattctggtcaatgtcacaccgctgggcatggcggggggagcggaaagcaacacgctggcgttcagcgaggccatggtggcccaggccagcgtcgtgtttgacgtggtcgcgttgccggcggaaactccgctgatccgcctggcgcaacaacggggtaagcaaaccatcagcggtgcggaagttattgccctgcaagccgtcgagcagttcgccctttataccggcgtacggccggataatgcgctggtggcagaagcctcggcgtttgccagaagctag

SEQ ID NO: 226022 - DNA, 426 bp, Klebsiella pneumoniae
atgtttggtctcttcaaaaagaaagcacgtaaagccgttgttgaagttaagaaaatggaaaatcgcgatgcggttgaggcgactgtatggggcgcttactccattgcgtatgccgatggtacctgcgatgcgaaagaaatcgccacgctggaaaaaactatttcggcgctgccagccttcgcggcgttcgccggtgaaatcgcacaaatgagcagtaatattcgtgctcgttacgaagcttcaccacgttctgctaacgctcaggcgctgcgtgagctggctgatgttgcgggtacaaatgatgctgttgatgttctttgcctgtgcctcgatgttgctgataacgacggtatcggtgaagaagaagagaaacagctgaagaaaatcgctcaggctctccagcttcctctggatcagtatctgtga

SEQ ID NO: 226023 - DNA, 156 bp, Klebsiella pneumoniae
gtgatcggcaaactgcgctgggcagccgccggggttttgttgttcctggtggttgccatcgacttcaccagcaaaatgatttctatcctggcggatggcgtgctggtggccggggttatcgctttactctggccgcttattaaatccagtgattaa

SEQ ID NO: 226024 - DNA, 2007 bp, Klebsiella pneumoniae
gtgccgaagtcaaagaaccggacgcttcgtcgtccgaaagccagcgcaagaagtaattcgtggtttcgtatgcaggccagcgccgataatcaggctgaaatctacatttacgatgagatcggctactggggcgtgacagccagacagtttgttaacgatctgaaatcgctgggcgatatcagtcacattaaccttcacattaattcacctggtggcgatgtctttgatggcatcgccatttttaatgctcttaaacatcatggtgcgtcaattaccgttcatatcgatggtctggctgcgtctatggcgtcggttattgctatggtgggtaacccggtcatcatgccggaaaataccatgatgatgatccataagccctggggctttgctggtggcgatgccaacgatatgcgtgattatgcagaacttctggataaagttgaatctgttctgatccctgcgtatgcagagaaaaccggcaagagcaccgatgaaatagcggcaatgctggaagatgaaacctggatggacggcaaagaatgcgtcgcgatgggttttgccgaccagaccactccctctcttcaggcgatggcctgtatccagtctaaacgtattgaggacttcgaaaagatgccaaaaagtattcgcaacatggtaacgccgccgcgagccaccactcagcgcgatccgcagcaaccacaagtgcagcagccggtggtgagccaacccgacgaaaacaccatccgtgctcaggttatcgcagagcaaaaagagcgcgttaatggtattaacaacctctttgcaatgtttggtggtaaacacgccgaactgcaggcgcagtgtgtagcagatatggattgctctgtcgatcaggctaaagacaaactgctggcgctgctgggtaaagatgcttcaccatcggcgaaaaccacgccagcgcatattcatgcaggtaacggtaattttgtcgccgatggtattcgccaggcattgatggcgcgtgccggatttgaagatcaggaacgtgacaatgtctacaacggcatgaccctgcgtgaacatgcccgcatggccctgactgagcggggaattggcgtatccagctataacccgatgcagatggtagggctggcgctgacgcatagcacctctgattttggcaacatccttcttgatgtcgccaacaaatcgattttgcagggctgggacgaagctgcagaaacgtttgaacagtggacaaagaaaggccagttgtcggactttaagacagcgcatcgtgtggggatgggcggattcccgtctctgcggcaggttcgcgaaggcgctgaatataagtatgtgactaccggcgataaaggtgaaaccatcgcgctagccacctacggagaaattttttccatcactcgccaggcaatcattaatgatgatctgaaccagctcacagatgttccgatgaaaatgggccgtgccgctaaggcgactatcggtgaccttgtttacgccattctgaccaaaaacccaaaactctcagatggtaaggcgttattccacgcagaccacaagaacctgtccaccggtgctatttccgtcagcagcctggacgatgcccgtaaactgatgcgcctgcagaaagagggagaacgatctctgaacatccgcccggcatttatgctggtgccggtcgcgctggagacactggctaaccagacgattaaatcagcgagcgtaaaaggggcggatatcaacgctgggattattaacccgatccagaattttgcagatgtgattgcagaggcccgccttgacgaagctgacgcaaaagcctggtatctgatggcggcaaaagggacggacaccatcgaagtggcgtatctgaatggtgttgatactccttacattgatcagcaggaagggtttaccactgacggtatcgctacaaaagttcgtatcgatgccggtgtggcgccgcttgattaccgcggcctggtgaaatccagcggccagtaa

SEQ ID NO: 226025 - DNA, 552 bp, Klebsiella pneumoniae
gtgacgattaaagggctggaagagctcaggcagaacctgagcaatatcagtaaaaatgccattcctcgggcgacatcccagtccattaaccgggtggctgggcgtgcaatcagccgcagctctacgcgagtggcgaaagagactaaggttaagcgcaaactggtcatgcagcgcgccaaacttaaacgggcaagccctaaaaaaccaatggctaccatcagagtaaatcgtgggaatctcccggcaataaagctgggtcatgtccgtgttcagctttcgcggcgtaagcgtgatagtggcagctctggaagcgttctgaagatcgggaatttcagcttccctggcgcttttgtgcaacagcttaataatggtcgctggcatgttcttcgacgaaccagtaaatctcgttacccggtagaagtggtgaaaatacctctgtccacccccctgactactgcattcaaagaagaacttcccaaactgatagcatctgatatgcaaaaagaaatgatggctgcgatcaaaaatcagataaggctggtgacaaaatga

SEQ ID NO: 226026 - DNA, 1170 bp, Klebsiella pneumoniae; identical to SEQ ID NO: 197136

SEQ ID NO: 226027 - DNA, 1320 bp, Klebsiella pneumoniae
atgagccagacactaacgcagatagcacaagaactaattgctaccaataagaaagtgcaactaatctatgcttttaatggtacaggaaaaacacgtctatcacgtgagttcaaagagcttattgcccctaaaaacattgatgatcctagcagtgccgagtctgaaccatcacggaataaaatactttattacaatgcttataccgaagatttgttttattgggataatgatctagatgctgacgccgatcctaaactaaaaatccaacctaatacatttaccggttggcttatcaaattactacaagagttgggggaggatggtaatatcgttactaacttccaacgatatacgagtagcaaagcgacgccaacttttaatcaggaatatgagagaaaaaccaaagatcagaataacaatgagactgatgttacaatccctgcattttctgaagtaacattccatgttgcaaaaaatacccccccctcggcacctgaaactcttgatgaaattacggaagataatatcactgacgttcagggacagtacgaaaagataaaaatatctaaaggagaagagagtaactttatttggagcgttatatataccttattagaacaggtaatattaacccttaatgagcctgattttacaaatcgcataaccaataagtttgataatttggagtatgtatttattgatgatcctgtaagttcattagatgatacccacctgatagaacttgcgattgatttagtaaagttaataaaaatcagcacatacactgaaggtaatggtctaaagttcatcattacaacccacaatccattgttttacaatgtattgtataatgagttaaataacgatcttaaaaaatacaatcaagatggaacttcagcatgggtctataagcgagggcagtcagaaaaatatagactgtataagcagggcgatggtacttatacgcttaataaatctaatgaccaccctttttcttatcatttgttcctattgtcagaagtatgcaaggcaataaacacaatgcaaattaagaaatatcactttagttttttaagaaatattttggaaaaagctgcaactttcttaggacatcctcgctgggaagatcttcttgacaaaacagccgaaggtaatcccaatccattcgcgagtagaataatgaacctttctagtcactctgctcatgcaggagaagaaactgctgatattgaagaaatagataaagagagactgaaagaattagtgaaatatctgactaatacttacgggttcaaaactcaggaaacattaaatgactga

SEQ ID NO: 226028 - DNA, 408 bp, Klebsiella pneumoniae; identical to SEQ ID NO: 120048

SEQ ID NO: 226029 - DNA, 549 bp, Klebsiella pneumoniae; identical to SEQ ID NO: 187660

SEQ ID NO: 226030 - DNA, 1068 bp, Klebsiella pneumoniae
atgattgatttaattaatactacgagaaaccatcatttcatatcacaagttgaacaaagatggaacgcatcctcaaatcctgataatccttctttagcaagaatttgcaagtacgaaatcgttgataagtcttcttttgaggtgcacgctactaatcggcctctcattaaaaacacttcagccaaagatgatctctatactttagaattatttgaatcaggaaaaagattaaatctagaaaaattttttggtgtttgggaggataagtataataaaagaatttcttcttttcacagttcgattatgtacaaaattgaatcaaataatataacatctaaaagtatagatggctcggatctaattgaagatgtcaaatatttgcaaaaactgaaatttctaaatttcatacgtaaccctcataacataaaaaaatctttaaaatcattttctttctgtaaggatttcataatacagggtgacggagaggaatttgaatctatttttaattctctagtcaataatgataaacggcaaagggatcacatctgttctaaatatggcgtcagtccagccgaatatgatagctggcttaaacttattattctgtttgtttactacgacgaaggtatcgctcattcatccattgatggaatgattgaagaatatttcaaggcgaaagaactatgtactacaataataatttcatattatactaaccctgctctcacaccgttagttcctgacattggttcaatcatatatcctgatttaacttacctgttcaatgtatcaaaaaattgttttgtattattaaagcacaccccaattgatagtgaaaacattgtaatgtcgtgcatgagattctgtgaagaaaagaatataccttacacagaggaagcacttaatttgtgcaaaaatgaaataatgggtaaaattaatacatctattcacgttaatgacaaagaacttttagagagttataataggtattgtataaaagagtcagttaaatttgtttattcagcgtcaccaatcgtagtcggtgccaaggtcataaaaaaaacctag

SEQ ID NO: 226031 - DNA, 345 bp, Klebsiella pneumoniae
atgttgctgacacttacagttaatatctctgattcgaaataccttcaacgtctgcactatcccgtcgacgttattgctcagtgtgtccgctggtatctggcttactcactgagtctgcgtgatctcgaagagatgatggcggaacgtggccttcatgttgatcactccacgcttcacagctgggttatccggctggtaccaatattggatactgtgtttcgtcggcataaacgggcggtgggtcgtcgatggctaatggatgaaacctacatcaaaatcaacggccagtggaagtatctgtatcgcgcggtcgatacagcagggcacaccatcgacttttgctga

SEQ ID NO: 226032 - DNA, 1014 bp, Klebsiella pneumoniae
atgaacacgaaatcgtcaagcctgcaagaatttaccctgacaatattaggtaaagattgccagccgattcgccagaaggtctttgatagcaaagatttcatcctgcctagtgctcgggttggcgctgataaccatgcacccaagactcgcaaagaaaagataggcgcttggactattactcctctaagtgaaggggacatcacaaccctcgcccgtatgcgtcggaaaaaccctttccatcatctcgcaaaggcgattgatacctccctgctcaccctttcgattcccgatacagacatcaaggtcacggtaaaagaccttcgcgaggctgctctgaaggttgcgccagaaggggcaaagattaatgtggttttcgaaacctacaccaaagaacagtacggccattcctattcggatcttatcagcaatgctcggaacagggttatcgctcgattcaaggccgcatttgcggagaatcttgattaccacccaatgaacgacgagtaccacacggatgagaaaattttcttgcacaaaccagtgtggacgtccaacgattccattaaggaatacaagtcgctcgcaaaacaaggtcatgtttactcccagtatctggctggcgtgttccttgcctcgaatgccggtggttataaggtagagtgtgttgagtacctattgatggcgtacgaaaacaagcaccccgaagccatgcgtgtactagctgaattcctgcatttcaaaaaagactactatggtgctgcgcagtgtgcgcttctgtctattgacggcggcgatgactactcgaaagaaatctttcgtgaagtattgggtaatgcctcagttctgtttatacagatgagtcatggtgtagcaccgctcagctatgggatcatggagaccctccgtgcaaacggatttgactcaattctgaaggagcatttcagcgagttcaattctgctccacagcccgtaatgcatattcctggcttcaatcaagggggcgatcatgaatag

SEQ ID NO: 226033 - DNA, 273 bp, Klebsiella pneumoniae
atgaatagcgtaaatatgtgggaaagcaatggttcggatgaagaacaggagtttaagtgtttgagttgcggttgcagtacatccgaggctgatttcgaatctgttgatgatgagtttaatccgcaacatccacgctgtcctgactgtcagcgctggcatcgaatctcccgcgaaacctgcgactgtggccaaccggccgcccatgaggttgagttaggtttcgtttgcgacgagtgctatgagcactatgtcagcggttacatacgggactag

SEQ ID NO: 226034 - DNA, 129 bp, Klebsiella pneumoniae; identical to SEQ ID NO: 197244

SEQ ID NO: 226035 - DNA, 279 bp, Klebsiella pneumoniae; identical to SEQ ID NO: 189792

SEQ ID NO: 226036 - DNA, 588 bp, Klebsiella pneumoniae; identical to SEQ ID NO: 189791

SEQ ID NO: 226037 - DNA, 1083 bp, Klebsiella pneumoniae
gtgaaaccagtaacgctatacgatgtcgcagagtatgccggtgtctcttatcagaccgtttcccgcgtggtgaaccaggccagccacgtctctgcgaaaacgcgggaaaaggtggaagcggcgatggcgcagctgaactacattcccaaccgcgtggcacaacaactggcgggcaaacagtcgttgctgattggcgttgctacctccagtctggccctgcacgcgccgtcgcaaattgtcgcggcgattaaatctcgcgccgatcaactgggagccagcgtggtggtgtcgatggtagaacgaagcagcgtcgaagcctgtaaagcggcggtacataaccttctcgcgcaacgcgtcagtggtctgatcattaactatccgctggatgacgaggatgccattgctgtggaagctgcctgcgctaatgttccggccctatttcttgatgtctctgaccagactcccatcaacagtattattttttcccatgaagacggtacgcgactgggcgtggagcatctgatcgcattgggtcaccagcaaatcgcgttgttagccggtccattaagttctgtctcggcgcgtctgcgtctggcggactggcataaatatctcacacgcaatcaaattcatccgatagcggaacgggaaggcgactggagtgccatgtccggttttcaacaaactatgcaaatgctgaatgagggcatcgttcccactgcgatgctggttgccaacgatcagatggcgctgggtgcaatgcgcgccattaccgagtccgggctgcgcgttggtgcggatatctcggtagtgggatacgacgataccgaagacagctcgtgttatatcccgccgttaaccaccatcaaacaggattttcgcctgctggggaaaactagcgtggaacgcttgctgaaactctctcagggccaggcggtgaagagcaatcagctgttgcccgtctcactggtgaaaagaaaaaccaccctggcgcccaataagcaaaccacctctccccgcacgttggccgattccttaatgcagctggcacgacaagtttcccgacttgaaagcgggcagtga

SEQ ID NO: 226038 - DNA, 1254 bp, Klebsiella pneumoniae
atgtactatttaaaaaacacaaacttttggatgttcggtttattctttttcttttacttttttatcaagggatcctacttcccgtttttcccgatttggctacatgacatcaaccatatcagcaaaagtgatacgggtattatttttgccgctatttctctgttctcgctattattccaaccgctgtttggtctgctttctgacaaactcgggctgcgcaaatacctgctgtggattattaccggcatgttagtgatgtttgcgccgttctttatttttatcttcgggccactgttacaatacaacattttagtaggatcgattgttggtggtatttatctaggcttttgttttaacgccggtgcgccagcagtagaggtatttatcgagaaagtcagccgtcgcagtaatttcgaatttggtcgcgcgcggatgtttggctgtgttggctgggcgctgtgtgcctcgattgtcggcatcatgttcaccatcaataatcagtttgttttctggctgggttctggctgtgcattcatcctcgccgttttactctttttcgccaaaacggatgcgccctcttctgccacgattgccaatgcggtaggtgccaaccattcggcatttagccttaagctggcgctggaactgttcagacagccaaaactgtggtttttgtcactgtatgttattggcgtttcctgcacctacgatgtttttgaccaacagtttgctaatttctttacttcgttctttgctaccggtgaacagggtacgcgggtatttggctacgtaacgacaatgggcgaattacttaacgcctcgattatgttttttgcgccactgatcattaatcgcatcggtgggaaaaacgccctgctgctggcaggcactattatgtcagtacgtattattggctcatcgttcgctacctcagcactggaagtggttattctgaaaacgctgcatatgtttgaagtaccgttcctgctggtgggctgctttaaatatattaccagccagtttgaagtgcgtttttcagcgacgatttatctggtctgtttctgcttctttaagcaactggcgatgatttttatgtctattctggcgggcaatatgtatgaaagcatcggtttccatggcgcttacctggtgctgggtctggtggcgctgggcttcaccttaatttccgtgttcacgcttagcggccccggcccactttccctgctgcgtcgccaggtgaatgaagtcgcttaa

SEQ ID NO: 226039 - DNA, 141 bp, Klebsiella pneumoniae; identical to SEQ ID NO: 36145

SEQ ID NO: 226040 - DNA, 765 bp, Klebsiella pneumoniae
atgactacacctaggctccaggcggcactggtttcagaacagtggcttagaggaaagcacttcgctgatgctcttcctgttgattgcattaagatagctgaaagcctaggaataaaagtccaaggggcccctcttaaggatgaattccaaggggccctctttataacccctgatgtaaaagccattattttcaatgaaaacataaaagaagatgggcggaaaaatttcaccatagcccatgaaattggtcactactgtctacatagcgatagagaggaagttcaatgccgattagaggacatgggagcattcgttctaacaccgcatggtaaggagatagaaaaagaagccaatgagtttgcagcttgtctattgatgccagaaaaagatgtacagcagcaactcttagataaaaacctcgatctcaaactcgtgcttggtctcactcttcggtatggaacaacagtaactgcaacagcttgtcagatggtgcacgtgtctgataaaccacttgcagtcgttatgttaaacgaggataacacgacaaaatggtgtcttcgtaattcgcatttccgtgatttctttatcaaaaaagggactcttataaacatccaagaacacttaccggaggaactgtcaccaacatatcaagacacatggttttcaagctctgtgaaaagcgtgtggaatctaaaggcttcatctttagatatggaggaatacaaacaaagaatctatatgatttcaggcagtaagcttacttaa

SEQ ID NO: 226041 - DNA, 294 bp, Klebsiella pneumoniae
atgcttagcgaaaaaatcagagaactgaggacatctcgcgggctgtccttggatcaattagcatcaaacgtaggttctacaaaaagctacatttgggaattagaaaaaaaaccagggataaaaccatctgcagagcttgtttctaaacttgctcaagcattagatgttacaatggactctctgatggatgagaaaaaagaaaacgaccaagatatagttttctttagagaatacaaaagcttatcagaagaaacaaaagtgcaactgatgaatatattgcgagcaataaaataa

SEQ ID NO: 226042 - DNA, 723 bp, Klebsiella pneumoniae
atgattgatatcaccaaacttacagcggaaaaacttgaagaaatccgccagcgttaccgcccgaccttagcccctaagtgccacatttgcggtgttgaaatgacaattcagcgcatgtcggcaagtcgtatcacttatggctgtgctggcgctatctatgacgaaactggttgtcattatgctgaaggccgaagccttgccgatgaccactacgctgaatcacgcataacggtagtcgatgtaagtgatcctgatgttttggctatggtagaggcgctggagaaggcgcaggcagccgagcgccgttggcatcgggtggcgtcccggatacatgagcaggcttgcgaaagcgacgtgaaaattgatgagcttgaggccatccgcgcagcagcagaaaagcttgttcgctgcaaaggtcgctatcacagcgagcagaactatcgagcgctggcggcgctgtttggcgtgaacactccagatctgccgccgctggagcatgaaaacgtccattatgccgatgctgcagagatggagattgcagcgctccgccagcgcatcgccgagctggagtcccgcaccgtgaagctgccacaacgtcttcaacccggtgctgatggttatgacgactggtacgttcacagtgacgatgatggggaatatctcaaggttgatgatgtgctggcaatgctaaccgccgctggcatcaaggtggaggctgaatga

SEQ ID NO: 226043 - DNA, 921 bp, Klebsiella pneumoniae
atgaccagcaaatttagcatcgacaacacagagctgcttcagagaatcagtagcggagaggctgttgtgggaattgattttggtaatctaatcgtcagggagctagctgcattcaggctggccgcaatggacagcgagccaaactgcaaggagagaaagctattctgttcaaccgatacagccaggatgagaaaggtaatttctgcctcagccggggccgaggcaacaccgctctatcgtcacgcgcagcagccagcgccggaatatcccgaagtgttgccctgcccggtattactagatccggggttgcgatttggcaaaggcattaaaaccagcaccatgcttgccgcactggcgcgcagggccgtatacgaatcagatatggcggcgctatcaccggaagagatagtggagtttcaggcgcgaattgaggatttcaaagtgcttattgcgcagccagcgctggtagtgccggatgaaataaagcaccgcatcggtggattggattggggatgggaaggcgagtttaatcgcggctggaacgcctgccgcgccgccatgctcgaccgacaacttgtcgaccatgtcgatgaggagtcgctaaccagcatcaatcccgcgccagctatgggttcgttgtcaaaaacaggtgaagtgctgcacaccaactctccggcgcaaggcggcaactcttcggtaattcctgatacatggattccggtaagcgagcagatgccaccaagtcgtcatgaggttttggtcgggcgttggtggggagagaagccgcggtggtgttgcaaatgggcaacgtatattcctggccaccctgatgcgcagagtagcggctggttgatccccggcgggtcgtggacgcccacccactggatggagttgccggccgccccgcaggaggtgaagtga

SEQ ID NO: 226044 - DNA, 189 bp, Klebsiella pneumoniae
atggcgtacatcttcctgattttcgtcatcagcagcaatacatcgaatatgcaggtggttcccatgcagagtatggagcagtgcaaagcagccattaaggcgatgaaagttgcagatgataagaggtcctgggacgacgtttcgccgagcgtagataatattcaatgcgtagaggtgaagggtgcctaa

SEQ ID NO: 226045 - DNA, 1056 bp, Klebsiella pneumoniae
atgaaacttgttcgtgaacaatcgcaaccaattagcggtgatagtggtttgcgggagatccagcgtatagctgaaagaaatgaattttcgccggtagtattgagtaatagaggtaattatgagaagacctctgtgcttgatgcatatattgataagctcatgagctttattaatttttctaacctcaccactccccttcgattagttattaattcggggaatggtgctgctggtcatgtaattgacgctattgaagtgaaatttaaaaatgctggtgtccccattgagttcattaaagttcatcatgaacctgatggtaattttcctaatgggattcctaatcctttattaccagaatgtcgtcaagatacaactgatgctgtaattaagtataatgcggatatgggcattgcatttgatggcgacttcgatcgttgtttcttttttgatgaaaaaggaaactttattgaagggtactatatcgttggtttgttatctgcagcatttcttaataagcatccaaattcacgcatcattcatgacccgcgtttaacttggaatactattgatatagttaataaagaaggtgggatacctgttatgtcaaaaacaggacatgccttcattaaggaacgcatgcgtaaggaagatgcaatatatggtggcgaaatgagtgcccatcattattttagggatttttcttattgtgatagcggtatgattccatggttacttgttacggagttgttatgtgtgaaatcgcaaactttgggacaattagttaatgaccgggtcatgctttacccagcttctggagaaattaatatatatcttgaacaaccccaaattgctatccaacgtatacttgaagaatatcggaatgacgctaaagtagttgattctactgatggaattagtattgaatacgaagattggcgttttaatcttcgtggttctaacactgaacctgttctcagacttaacgtagaatctaaatttaatcgggctttgatgaatgaaaagactaatgaaatattaaagttacttgaggcttaa

SEQ ID NO: 226046 - DNA, 381 bp, Klebsiella pneumoniae
atgactgatatcaccgaactggcgcagagcctgaaatcggcagcagagaaagcaactccgggcccgtgggaggttcaatttggcgaggagatttacgcaacagatggcgtagataatgagcaggtggccattgcaacgctcgatgcccgtgacgcggactacatcgctctggctaaccctgccaacgttctagcgctggtagaggcgctggagaaggcgcagcagcgcatcgccgagctggagtcccgcaccgtgaagctgccagacttacggcagattgtatctggggacagatatgtatggtctgatggtgtttataactacagccaggacgtaaaggtagcgctggccgccgctggcatcaaggtggaggttgagtga

SEQ ID NO: 226047 - DNA, 192 bp, Klebsiella pneumoniae
atggcagagaaaacagctttagagcgcctgcgcaagataaacgcagaaaaccagcgccgggtatttattagtattggcacactcaaagcggcgcgcagcgaaatacaggcccacatcaaagtgaatggcaaaggcatcatgactgatatcgtccttgaccagctgaataaggcgattggcgatggagaataa

SEQ ID NO: 226048 - DNA, 426 bp, Klebsiella pneumoniae
atgaccaaatcaaccataaccagagagcgcattcagagaattatccgagccattaatagcgaagcttatgacgaggaagaaatcagagagtggttaagttctgatgaaatcatggagctttcccgcatggcgctggctgcaatggacggcgagccggtgacagttccagagcacattacttatatcagtgagccgacaatccttaatattttggctaacgatgatagctcaccgatggcttacgctgcccggctattagcgtatgaggttcgcttctggcgctcttttccgctttatcgccacgcgcagccagagccggtagtgcctgatgaatatgtagccccagccatgactcctacaaatcttgcgtatgaggctggctggaacgcctgccgcgccgccatgctcaacggaggtaagtcatga

SEQ ID NO: 226049 - DNA, 171 bp, Klebsiella pneumoniae
atggaatggtatttctccatcggtctttttttgtggatttttgctcaaataacaagggccgatgaaaccactggcattaagaataacattctgtgcttgctgctcttcattgtgctgtggccaaagatcattgcaaccattgcttacaaacttattggtggggaggactga

SEQ ID NO: 226050 - DNA, 1236 bp, Klebsiella pneumoniae
atgagtaaagtaagcagtaatatcgcatggttaatgcttgtgcaatgttcaggttatatattcccattaataatgctaccatatatggtccgtacactaggagttaataactttggcatttactctattgtactcgccattattcaatatggagttatgttaactgaatttggttttaacttcacaagtacccgagaaatatcattaaatcgaaatgaaaaaaaagaagtgagcaaagttttttttagtactatttacgcaaaattgcttctgttttttatttttttttgtggggttatagtctatttggagtgtctgaataaaattcatgagtatttctcattgttagttgcgggaggattaacagtatttgcaaatgcattatatcctatttggttttttcagggcattgaaaaggtcaaaataatatcgattgttacagcaatttcaagagcaataacattacttctaactcttttgtttgtgaaaacagagagtgatcttcatatggctattttagtgaattcctttctttacataatcccatctttatttggctgtgcattgatatttttatcaggaagtgtgatttatgtacatgttagtttaaaggatatttatacatgcctaaaaaaatcatttccattattcatatcaaacgtgtcaatatcgctttactcaacattaaatacaatagttttagggaaatattcgagtccaacaattgtaggtaatttcgctgcagctgataaaatgaggcttgcagtacaaggattatatgcgccaattcaacaggctgtatttcctcgtgcaagtcaagtggttatgcaggacggaggcattaagaaagtaattaaagttttcggtattccatttatcatgtttggtctcataattagtttgtcctatttaatttttggtaattttgctgttcgtatttattatggagaggagtttgcattggcagggactttgttctcaatgatgtttcctttaccactaataattagtatagctaccgtatttacgcattgggtacttatagcacaagggcagaataaaattgtgggtaagatatatacacttttttctcttgtgcatttatgttatgtaataccttttgtaaaagagttcgatgcatatgggatggtgtattcagtagttttaactgaatctctaataacattagcaatgattgcctgtgttataaaaagcatcaaaaggagtcatgaatga

SEQ ID NO: 226051 - DNA, 207 bp, Klebsiella pneumoniae
atgcttatgctcggtcaggttcgcattgatataggtctgcagacttaccgggaaatgatgaatttcgctggtggcgccacgaataagggcaaaaatggcggcgcgggaataatccaggatgccaggggttttgcgcagggcagccgaccattccttgaacggactttctttcttctggacgatctctttggcccggcggtgaattga

SEQ ID NO: 226052 - DNA, 327 bp, Klebsiella pneumoniae
atgggtgtagtcagggttgcgatcggttttattaccgccgccagcattcgtacctgcatcggttttcaaaaccgaagaaatgcagttaccggcagcccattccctggtgagaatgccgcggtcaatcgcgttcgtggcgaaccacagcttagcaaactggatacgcttaccgagctcatgccgtttcccttccgggaagacttttttattggcgctggtgaatttccagagcgccggcatatcgtattttttgatttcagggacattctcggcggccagaatcagatcctggacggccgcattatcagtgtccatttcaagagctga

SEQ ID NO: 226053 - DNA, 291 bp, Klebsiella pneumoniae
atgataaacgtgacgttcttcggccatgtactgcgccagcagctgcgcgcgaaaggggagttcggccacgttaaaaagcgcgctggaatcgtcctggtattcatcactaccgaaagtttccacggtctcaccttgtgccgcgtcgatagtggtattggcatcaaccagctcgccagtaacggcctcagaggttactcctgcatcatcgatgtgatgatccgcaggcacctgacctggcttcagagcccaggtgcgaccatcatcgccgagctggtagcgttcgcaccatga

SEQ ID NO: 226054 - DNA, 642 bp, Klebsiella pneumoniae
atgaatggaaaattctttaggtttttcaaagaatatgattctctcttttccattggagagaaattatatataacattaaataccatcctaattcttttcggagcttctggcgtatcagcaatcattgcaataatagaccctaaaaaaaacctaacattaacatcaatatcgcttatatttataatcacaatttcttgtgtttttattattatagcaatgtatcgatggtcacaattaaactcatcaaaaaagacatactatgattacatgggctcatcaagaagcacgataaaccctctctctgagaactttgcagacgaaataataaacatggaacaattgagactgccagctcttcaacaccaagaaaataaaacatttagaaggtgcattttgattggcccatctgcagcagcgatatttgatggcgaaataagagacagtgttttttttgactgcggagatgtattttcaatgtctccaactattggaatggcatatttaaatggaacaattgtatttaaaaactgtagattcatagattgtaagtttattaacaccacattgatactaccagaagtcgcagcaaatctgttaaaacaaaacatgccagaaacaaaaatattgaaagtcacaaggtaa

SEQ ID NO: 226055 - DNA, 1083 bp, Klebsiella pneumoniae
gtgaaaccagtaacgctatacgatgtcgcagagtatgccggtgtctcttatcagaccgtttcccgcgtggtgaaccaggccagccacgtctctgcgaaaacgcgggaaaaggtggaagcggcgatggcgcagctgaactacattcccaaccgcgtggcacaacaactggcgggcaaacagtcgttgctgattggcgttgctacctccagtctggccctgcacgcgccgtcgcaaattgtcgcggcgattaaatctcgcgccgatcaactgggtgccagcgtggtggtgtcgatggtagaacgaagcagcgtcgaagcctgtaaagcggcggtacataaccttctcgcgcaacgcgtcagtggtctgatcattaactatccgctggatgacgaggatgccattgctgtggaagctgcctgcgctaatgttccggccctatttcttgatgtctctgaccagactcccatcaacagtattattttttcccatgaagacggtacgcgactgggcgtggagcatctgatcgcattgggtcaccagcaaatcgcgttgttagccggtccattaagttctgtctcggcgcgtctgcgtctggcggactggcataaatatctcacacgcaatcaaattcatccgatagcggaacgggaaggcgactggagtgccatgtccggttttcaacaaactatgcaaatgctgaatgagggcatcgttcccactgcgatgctggttgccaacgatcagatggcgctgggtgcaatgcgcgccattaccgagtccgggctgcgcgttggtgcggatatctcggtagtgggatacgacgataccgaagacagctcgtgttatatcccgccgttaaccaccatcaaacaggattttcgcctgctggggaaaactagcgtggaacgcttgctgaaactctctcagggccaggcggtgaagagcaatcagctgttgcccgtctcactggtgaaaagaaaaaccaccctggcgcccaatacgcaaaccacctctccccgcacgttggccgattccttaatgcagctggcacgacaagtttcccgacttgaaagcgggcagtga

SEQ ID NO: 226056 - DNA, 261 bp, Klebsiella pneumoniae; identical to SEQ ID NO: 220389

SEQ ID NO: 226057 - DNA, 543 bp, Klebsiella pneumoniae
atgtcaggattaataagcgccagctgttccagcatggcatcacggctgccgctggttttaacaggcgctggcagggtggcgttgtattctttgatgcaggccttcattgctgacgcggtaaagtttttatcgtcaccaacgattcgcttgaactcgtcaggtaattccagatacgcaatgccaattgcatctttgtcgccgcccagcggtacaggagcgggcagggtggcgttgtgcgcctccaactgcgtcttgatatcgtcagcactcaacagcggcggaagcccggcgttgtactcgtcgataaacgcgcggatcgtcgcagtcgtggtgaaggcgccttccgggatttccggctcgatgctgaattctttttccagctgctcaggctgcagcgccagtgcatgcaccagattgcccatatccagaacaggggagcgtaccttctggatggttttggatacatggcgcgcctcgaaatacatcagcgatacccgggcatctttaaccatcgtggagctgatgccgttagcggcgtggtag

SEQ ID NO: 226058 - DNA, 237 bp, Klebsiella pneumoniae
atgtttaacgcgctgacggccaacaactacgcaggtgagccccgtttcggggtctttccagacgatgatcggctccagtacacccagctccgcaatgttcagtaccatcccttcctcgatcggcaggtgtacacgctcatcgtaaagtgggtgggtcttatcggtgaccaggtgcaggttttcaggctcgaaactgagcacgtttgttttgccgctggcaccgtatacatcgattga

SEQ ID NO: 226059 - DNA, 348 bp, Klebsiella pneumoniae; identical to SEQ ID NO: 16878

SEQ ID NO: 226060 - DNA, 705 bp, Klebsiella pneumoniae
atggttgctcaggaagcacagaaggcgcagcccctgaaagtctctggcacaaaggccgatctgattcaggccgtgaaatcggtaaaaccggatgccgtgtttgccgacgagctgctggatgcatggcgcgagaacccggaaggaaaagtgctggttacccgccagcagctggctacggcactggccattcagaaagcactgttgaatcacccgaccgctggcaagttgttgacgcacccgagccgtgccgtcgaggtgagctatttcggcattgatgaggaaaccgggctggaagttcgcgtgcgtcctgaccttgagatagacatgggtggcctgcgcatcggtgcagaccttaaaaccatcagcatgtggaacatcaagcaggaaggcctgcgcgcgaagctgcaccgggaaatcatcgagcgcgattaccacctgagcgcggctatgtactgcgatgtcgccgcactcgatcagttctactggattttcgtcaacaaagacgagaactaccactggatcgccatcatcgaggcatccgaagaactgctggaactcggcatgctggaatatcgcaaagcaatgcgtgccatcgcgaacggtttcgacactggcgactggccagcgccgattactgaagactacgccgaagaacttaacgattttgatatgcgccgtctcgaagcgctgcgcgtacaggcataa

SEQ ID NO: 226061 - DNA, 378 bp, Klebsiella pneumoniae; identical to SEQ ID NO: 182323

SEQ ID NO: 226062 - DNA, 264 bp, Klebsiella pneumoniae
gtggaggctggcacagtcaccgttacccaggcgcgtcagttggcatcgcttaaacccgaggagcagcgggagaaggtctctgaaatcgaagcggcaactgctggcacaaccggccatgaaaaagcccggcgtcagcgtcagatcctcggtgaggcaaagcctcgcctgaaaacccgcaaagaaatcacaaaagcccttgaatctgccgagggtgaatatgcgagcgcactccgttgggtgcttggggaggccagccatgactga

SEQ ID NO: 226063 - DNA, 705 bp, Klebsiella pneumoniae
atgggaccgggcccgaacgatcgccggctttctgcttaccatattcgcaaagcctgcgaggacagtttgcgacggcttaagaccgaccatattgacgtctatcagatgcatcacatcgatcgtcatacaccgtgggaagagatctggcaggccatggaactgcttgttcagcagggaaaggttctttatatcggtagcagcaatttcgcgggctgggacattgcgactgcgcagtcagtcgccacggcccgtcatttcctgggcctggtcgccgagcaaagtctttacaatctgactgcccgaactgttgagctggaggtcattcccgcatgccgccattttggcctggggttgatcccctggagcccgcttgccggagggctgcttggcggcgtactgaaaaagatggcaagcgggcgccgtgcaaggcccgcgtttgcccgtctaatcgaacagtatcgtccgcagctggaagcctatgaaggattatgtgaggacctcgacgaacccccctccgatgtggccctggcgtggctcctgcagaatcctgtcgttaccgctccactgattgggcctcgtacggtcgaacaactccagcaggcgcttcacgcaacgacagtcacgctatcagacgacaccatgagctgtctcgacgaaatctggcccggccccgggggagaagcgccccaggcttatgcctggtaa

SEQ ID NO: 226064 - DNA, 420 bp, Klebsiella pneumoniae
atgaaaaagattttattggctgtagcccttttagcttcctttggtgccagcgctcacactgacacaatgcaatgcagcgttgacagcaaaaccgatattaaagaattaggcaatggccttatgactagcggaatggctcagggcgatggatggcaacaaataggtgttctcacttggacacaagacgctaacaagcctgatgctaaccctaatggatgggatacagagcacagggcgcgcctgattaatgttgaccagactccagaagataaagcagcggcctatgatgaaaagatcggtgattggacagttaactattatatattccgctatgagatcattatgaaggacgggagaacggcaaaactagaatgcccccccctgatctctcttaataaagacggtagcgtgtggcaatga

SEQ ID NO: 226065 - DNA, 492 bp, Klebsiella pneumoniae
atgaaaaccaaatctatctgtgtagcgctgtctgctattgttgctgctatgtcactttctggctgtgcgctaatagtagatggtaaaacacagcctgtagccattaagactaatgccccggcaatgtacacgattagaaatggtgatggtgaagtagtgagtacaggcgttgcacctacaacggtaaacctcaagcgtggcgatgcgccctattctgtgacactccagcgtacagactcagcccctataacctctggcacagtaacagacaatctgaacggctggctctggggtgatattgcttgcgggttgattgtatgtggtggcgttgatcttatcactggcgctgcgtgggatttagacacagcggttacagtgaatacacagccagatccaacacatccagacgctaacgcaagtaatacaatgcatgtggtagctcctacacaagcgcctatcactatcaacaatacagtgaacaataaggcctga

SEQ ID NO: 226066 - DNA, 306 bp, Klebsiella pneumoniae
atgcaggaagatttagaaaaaatccgggaagctaaagcagtagcagaggctaacattgtacccggcgtgatgaatccccatgtaagttactatgaagtgatgctaaagcagggatacgtagtagcggagggaatgtatcagggtaagaatatggcgatttttgatacatatcaggattggcgagatattgagatcaccacactggaggcattcagagagcgccagcaaagtaagcagacgctaaacattatcctttcagtgttcggctttatcgcgctttgctgtttaatggctggggtgatttaa

SEQ ID NO: 226067 - DNA, 1275 bp, Klebsiella pneumoniae
atggctggcttaccgaacagcagtaacgcgctgcagcagtggcaccatctgtttgaagcgcagggcggcccgcgtaccccggaggccagtcagcatctgcagcagctgctgcgccttgggctgccgacgcgcaagcacgaggactggaaatacactccgctggatgccctacttaacggtcgctttgtcgccgatgagggggcctctctcagtgctgaacagcgtgatgcgctggcgctgccgctggacgcctggcggctggtgtttatcgatggccgctatcatcctcagctgagcgacgatcttgccgccagcggcgtggagatcagtgtcgataatcagcgccagcatctgccggatgccctgcagccggaggtgtttctccatctgaccgaaagcctggcccagacggtgacccgcattcgcgtgccgcgcaaccgccgcctggataaaccgctgctgctgatgcatatcaccagtggcctggccggcgatgcgctgaataccgcccactatcgccatcatctggcgctggagagcggggcggaggcgacgattgtcgagcattacctgagcctcaatgagcagccgcatttcaccggcgggcgattgaccatgacggtggccgataacgcgcacctccagcatatcaagctggcatttgagaatgcccgcagctatcacttcgcccataacgacctgctgctgggccgcgacgcctcggccttcagcagcagtttcctgcttggcggccaggtgctgcgtcaccagaccagcacccgcctgggcggcgaaaacagcaacctgcgcctcaattcgctggcgatgccggtgaaaaatgaggtctgcgatagccgcacctggctcgaccatcaggtcggctactgcaccagccgccagctgcacaaaaccatcgtcagcgataaggggcgggcggtgtttaacgggctgatcaacgtcgcgccgctcgcgctgaaaaccgacggtcagatgaccaacaataatctgctgctcgggcggctggcggaggtcgacaccaaaccgcagctggaaatttacgccgatgacgtgaaatgcagccacggggcgacggtggggcgcattgacgaagagcagctgttctatctgcgctcgcgcggtatcgaacagcaggcggcgcagcagatgatcctctacgccttcgccgccgagctcaccgaggctatccgcagcgacgcgctcagagagcaggtgctggcgcgtattggacagcgtttgccgggaggcacagtatga

SEQ ID NO: 226068 - DNA, 1173 bp, Klebsiella pneumoniae
atgcttacaactatcatttaccgtagtcatgcccatagtagcatttcaagaacctcaatcatggaaatgattgagctcgcaaatgcccataatatcaaaagtgatgttactggaatattgatttttaatgggattcactttctacaactgctggaaggccctgaagctcaggttaacgaaatttacaccaggatctgcagtgatactcgtcactttaatattgttgagctcttaaatgacgttgcacctttccgacgatttggtaatgccgggatggaactaattgatatagatttacacagtcatgaagattgcctaagaacaattctgaaccgtggaacagcaaaacatcaacttctttataatgatagagcattgcgtttttttaggacattcatagagtccatacaacaagaaaaatactatgaattaccgtctgctactgaatggtttttttccagggaacctttaatcactgaaagcccttatgttgctaactccttcattataaatccagtggtagaccctctcgcgagaaaggtccattcgttccagttcagtaaccccgtgacgactggtttgtatggaatgggcttgttacagcatgatctggaatcaaaacgtgttgctcttcttgaagctggtagtttccttcactctggacaaagggtttcaattagcctattaccattgactataatcaagattagtgatgccccttgtacgctgcttaagtatattgagcaaagtggtcttatccctgaacaaatcatcatcgaatttttagaaaaagatctgttcgccaatattgatgaatttttacatgcgctacgaacacttaaaagtgctggaataagcgttgctattaatgactttgggtctggacatgcaggattactccttctaacaaaattccagcctgaaaaaatcaaaattcatagtgagctcataagaaatattcacagagatggcgcgaaacaagccgtagttcaaagcataatcaattgctgtgatactctcgagataagaatatgcgctacaggaatcgaaaaagctgaagaatggatgtggctggagtcagcaggtatcgcttacttccagggcccccttttttctggctactcagatgacggcttaccatttgtaagctggccggatcctgtggagatctag

SEQ ID NO: 226069 - DNA, 1119 bp, Klebsiella pneumoniae
gtggatagattgtacgaactgggaaaaagatttgatagattattatacatgagtattgttgttgttatttttagtttcctcacctgctctttattaatcacattaagcagccaaaatctatttgctttaataacctcatacaaagatataaaacagcaaattgaaacaaaaagaattaaaatagaatttatcgaaaaacaaattgcagctattaatgaaaacgtgtcggatattctagattttcgaaaaagaattaataaatcagagggggatacagaaagctataaatcaagaatcgaaaatgaatttttttccattagtaaaaaaacaataaatgagagcttgattgaaatagaccttgatgaggtgagctcaattaacgagttaaattacttcatgtacaatctgttgaaaaaagagattgaaaaatcaagtatgggttatattgtaagggataaaatagaatcggccctccctgaaaaaaataaaatcgcaaactatcatgatgcaatgaactggttggatgaaaaaataaaggacgagagcaattcaaaaatagagatagtcaatatagaatcaaccttaattatcccatttaaaataggtgatatggcatctagtgtatcattgataagcattgcaaaaatagctagttatgttatgcctgtattcatggttttttggtttggttcactgttcgtcacgcggagaatagagatgatgaatcttattaaaataaaggatgtatcattgatatatccacatatttttaatattttctcagtagacacaacaaaatctcaagattttaatctttatctcttaggcgatgaaaagataagaaagcaagtaaacttctctatattcttaataaaaataataaaaggctttttatttatatcattagcactcgcaatgtgtgggccattgtattatggcgaaattgtttacctgatgaactacaatacaacctccctgtcgctatttgttgttttacttttttgtatgacaataaatataattcaagtagttgggtatgtttacttggagtcaatttcatctaatgttatttacagaataaaaaatggtgaagttgatgggtatgaacttaatttttaa

SEQ ID NO: 226070 - DNA, 1266 bp, Klebsiella pneumoniae
atgtttgcgctttgcgatgtgaactccttttacgcatcgtgtgagacggtgtttcgtcctgacctgaaagggcggccagtagtcgtcctttccaataacgacgggtgtgtgattgctcgttccgctgaggcgaagcccttcgtcaaaatgggggagccgtacttcaaacaaaaggacatgtttcgccggcacggcattgtcgcgtttagtagcaactatgagctctatgccgatatgtccaatcgtgtgatgaccacgctggaagagctctctccgcgctgcgaaatttacagtatcgatgaggcattttgcgatctgactggagttcgtaactgtcgcgaccttaccgacttcggcagggaaattcgcgagacggttctgcgccggacgcacctcacggtcggcgtcggcatagcccagactaaaaccctggcgaagctggccaatcacgccgcgaaacagtggcagcggcagaccggaggcgtggttgatttgtcgaacctggaacggcagaggaagttgatgtctttgctgccggtgaatgaggtttggggagttgggcgccgtatcagtaaaaaactggagtccatggggatagacacggtgcttaagttagccgatacggacattcattttatccggaaacattttaacgtcgtgctggaaagaactgtgcgggagctacgcggcgagccatgtcttgagcttgaggagttcgcgccggtaaagcaggaaattgtgtgcagccgttctttcggtggccgcatcactgaatatcatgaaatgcgacaggcgatatgcagctatgcatcgcgcgcagccgagaaacttcgcggcgagcatcagtattgccggtttatctcagcttttgtcaaaaccagcccctttgcgctcaacgagccatattacggcaacagcgcatctgtaaagctgctaacgccaacccaggatagccgggacataattaccgcggcgatgacatgcctcgatgcaatatggcgagacgggcatcgctaccagaaagcaggggtgatgcttggcgatttctacagtcagggcgtagcgcagctcaacctgtttgatgacaacgcaccacgaaagaacagtgaaaagctcatggaagtactcgaccatctcaatgcgaaagacggaataggaactctgtattttgcagggcaggggatccagactgcctggcagatgaaacgagaaatgctatccccgcgttatactacgaggttctgtgacctgctcaaagttagatga

SEQ ID NO: 226071 - DNA, 2964 bp, Klebsiella pneumoniae
atggcagcagatgaactgaatccgccgctgggaacaaccacgcctgaaattttcctggataacgttaaacgggccgatcggctggtgaacgggccagaggagacggtcgatgaccgaggagggaaaccgctggacacctggcgccagatgatggcgaaaaacgatgaggtcagacagaaccttatcccgctcagtaagcaataccagacgctggcagcggcgcaggcggatatcgcggaaattccggtggggtcgaccacgtattaccgcagcccggacgacagcgccctcgcgatcgaggtcatgaacgttggcgggacgctgaccgcaaccggacgaaaaatgccgtccagtcaggctgtagattcagtgaggggattaatagacagccagggcgaaaatccattttcagtggtgtttaaaaatggtctttcaccgttcggctacaaagacgggcgactgtatgctgatgaatttcagaagctctattcttcagatgccgggttagagtttggcggcagcatcattgataacaatccgccggatggatggcgttttgtcatctactatcgaaatggtctggtgatgtgtggtcaacggaatgacggctcgatgatcggtttcggtgagggcggcagcggtggcggctcgattgagccaggcgatacggcagcggactatgattccatccgcaactacacaggcacggcaacggtgcgggatgtcataggtcagcgtaccggcggccgcttcgtggtcaacccggatgatacgacctccggggaaataccgggcgggatactggtcgatgtgctgggacgccgctggtatcgccaggcggaatttgtcagctatgacatgtttatggccccccgcgttccaggtgctacgctccttgctgtgcaggtcgctctggcgatgggcaaccgttcatccgcgatagcatatctgtcaggcgttgaagctgccgatgccgctatccagaatgctcatcgttatgcgaacctgctcaatatcccggttcgtcagaatgatggtgccttcctggtattagttgaccatgaagcagaggttcgcacaaacacgtctctcggagggtcgataatttttacctccgctgactcaggtgttaacgaaatccgctgggggccactgcgactgcttgatcctacagcgcctgagccaaaacgtatgttcaatatcaaggggaaagaacgtattgaactcactcctgctgagctggctacgttcaacaccagttactctcagtacctgaaaaaaggctctaactatctgccgtatccgaaactgtatcattattacggcgggatgttctatgcgctttctaatgaagtggagatttaccgaaacggaaacagggataaccctcgtgaccgggttttataccgtgaattctcccgtattggtagaaatggcgcgctgacggaacggattgtgaaagatattccgaccggatcagttggctacgctgcgattatcccgaaagaagatgattttctggaatttgaatgcccgcattttattgaactgggcgacagtcgtcgattcctgaatatcgaagtctccaggccgatggtacgcattaaaaacctggtgcatacgtcgtggcaaacagcttcaacaagtctcgaaagccgcgtggttatttctgctcgcgaagtttttgacgtcttttgcgaatacggagaaaccacctgtcacccggcggagaacggctcatatgtcatctgcattcgagatacctgcaacgtgcatatcgataactattacggactgcatggctgggggtttcaggggcatcacggaataaagggtttatacggcaacagaaatacgtttaaccgcgttgatttccacagcttcgggtacgatgttttcttcaaagatctgactgtgaaaggcaggcaaattaacctgcagggaggtaatgagtggtcgatagagaaacttcgcctgtatatcacccgcaccagtggcgatgcaatggagtatttccttaactacgccatcggcatgaggcaggactatgccagtgactgcgatggcattctcaatattgatggtgtcacggtgatgtgggacagagggctacccgcatggtacaacacgacccggtcatttgaccttgtcagaattatcgatacagccaactctcttgatcagggcatcgacagcaaactaccgccttccatcaccatccgcaatatggtttttgatctcgccggcatccagaccggaagaccgaatgacaattttgagttctgcgctgttacggccttacgttctcagtttaccgactacgcggtaactggacgtaaaacgctgctacccgacaatatcaccgttgatggaatgacggctattaacgtccagccaacacagaacgctgtcatgtgcggcatcaaattgcctgccgacctgtatcagaacactgtgggctcacgcaacaaaaagggcagtgacgggacgaacgcccgcattacgctgcgcaacctgcacagcgtgatcaacaatccttccatcgagctggccgcagcccagaccgtcgatattccgggagacgcggcaaactggaccgctgattacctgaatagtgattacagctggataccgcggattaccctggaaaattgcatcccggcaattatccatgctccaggagcaaaagctgttgtcgatattcatggcggcaagctggcgcgggtctacaccaacggcaatggcaaccgctgccgggtcaccggtgctgatattgagctgatccctgatgcgtcgggtgtgacctatttcgcagcagataaaacgctggtgacgggctgttcatggctgaacccggccagtggtgcaacctatcctggcacgttgcgtggttctggaaacgaaatgatcggagaaagtgctaaagcaccaaaccttcctgcaaaagcttttattgaggaataa

SEQ ID NO: 226072 - DNA, 147 bp, Klebsiella pneumoniae
atgtttctggtatctttcggtatcgggacgtatattgctatcattgcgttttcgcttattttatatttcattatgaaaagaattctgtatataaaagaagaaaaaaaagggaagatggtatggaaaagagcaatcattacatggtag

SEQ ID NO: 226073 - DNA, 12591 bp, Klebsiella pneumoniae
atggcaaataacataattaaagggcgcaagggtggcggctcaaagcagcgtacaccgacggaacagccggatgatttacagtccgttgcgaaagccaaaattctgctcgcattaggtgagggtgaatttgcaggtggtttaaccggtaaagatatttatcttgatggcaccccgcttgaaaatgctgatggttcgcaaaacttcagtggcgtgtcctgggaatttcgacccggcacgcaggctcagacttatattcagggtattcccggcactgaaaatgaaatcagtgtgggaacggaagtttccagcaagacagcctggacccatacctttactaatacccagctttctgccgttcgtgtccgcctgaaatggccgtccctgatgaaacaggaagatgacggcgacgtggtgggcaataccgtcaagtatgcgattgacctgcagaccgacggtggcgcctggcagacggtgctggaaaccgctgtcacgggtaaaaccacctccggttatgagcggagccatcgtattgatctgccccatgccggcagtacctggacgctacgcctgcgtaaaatctctccggatgcaaacagtgtcaaaactggcgacgtgatgacgctgcagagctataccgaagtgattgacgcgaagctgcgttatcccaacaccgcgctgctttatatcgagttcgactccagccagtttaatggctccattccgcaaatttcctgtgagccgcgtgggcgcgtgattcgtgtgccagataactacaatccggaaacccgcgaatataccggcgtctggaccggcgggtttaaatgggcctggacggataacccggcctggatctattacgacattgttacagctgaccgttttggtctcggtaatcgtctgagcagcgccaatatttcgaaatggacgctgtaccagattgcacagtactgcgatcagctggttcctgacgggcgcggtggtgacggcatggagccgcgctatacctgtaacgtctacgtccaggaacgcaacgatgcttacaccgtgctgcgagactttgccgccattttccggggcatgacttgctggaacggtgagcagattgttgtgcaggctgatatgccgcgtgatgtcgattttacctatacgcgcgccaatattgtcggcaaaccccgttattcgagcagcagcagccaggttcggtacaccaacgccctggtttcctggtctgatccggataatgcttatgctgatgcaatggagccggcgtttatcccggaactggtttcccgctacagttttaaccagctcgaaatgaccgcgattggctgtacgcgccagagcgaagcccaccgtaaggggctgtggggcatactgaccaacaacaaagaccgggtcgttgagtttgatgtggggctggacggtcgcattcctcaacccggttatatcattgccctggcggatgagttgctggccggacgggtcaatggcgggcggatcagcgcggtgaatggccgggtgattacgctggatcgtgatgtggatgccaaacctggcgaccgcctccagctaaacctgccatccgggatctcacagagccggaccatccaggccgttaacggacgccggcagattacggtcacaacggcgtacagtgagacgccagaacgggaatgcgtctgggccgtagaatctgatgacctcttcctgcagcagtaccgggttacaggggtaaaagagaacagcgatgccaccctcacgatcaccggcgtggcacatgacccggataaattcccccgcatcgataccggcgctattatcgaccagcgcccggttagcgtattgccggcgggcaaccagtcacctcctgacgatattgtcatcacatcccgctcggtcgtgaatcaggggatcagcgtcgaaacgatgcaggttaactggtcagcggtcaacggtgctattgcctacgaggcgcagtggcgccgtaacgacgggaactggattaatgtaccgcgcagctcgaccacctcgtttgaggtcagcggcatttatgccggtcgttacctggttcgcgtccgcgcgatcaatgcggcggagatttcgagcgggtgggcgtattccgaagagaaacccctgaccggcaaggtcggcgagccgctggcaccgctggcgctggcaacccgttcgctggttcatggggtccaggttagctgggagttcccgaccggctccggggatacgctgcgcacggaactgcagtacagcaaaaatcaggacggcagtgcgccaatgccgttatcagacgtggcctatccggggaaaagctatcagcagatgggcctcagtatgggcgccgaattctggtaccgggcgcgccttgtggatcgtcttggcaatgaaagcccgtggaccggctgggtccaggggatggccagcgataactttgatgactactacgaaaacctgaccgacgcgatcaaggatacggctgcctgggaggaaacgcagcgcaccattagcgaaacgcaggaaggtatccgcaatacgcagcaggaactggagcagaccgctgaagctctgcgtaaggaagccgaagaccaggcgaagcaggtcagccaggatattgatgcatcggcgaaaagcatcactgctgatgttgacgggaagatctccaccgtgaataaaaccatcacggatgagatcacctcggtcaatgaggctctcgattctggtctggctcaggcaaacaaaggcgttcaggaggcaaaatccgccgtcgcagatgcgaacaagcagatcgcaactgtgaataagtcgctgaccgacagcatcacccaggtaagacagtcagtcactgataccgctgcggaaatcaacgccaccatcgacctggagattgccagggtcagcaaaacgctggccgatggcgatgccgcattgaatgcgcagataaagactgccgaaaatggcctgaagcagtcgctgtctcaggtcaacaccacgctgaccagtgcggtgaagcaggagaccgcggatcgtatcgccgatgttaacgcgaaggcgtcacaggccgctgatgaactgctggcggcaacgcaggggattgaggcgagtatcgagagcctgactcaggtgatgaagaccgccgatgaaaatctggcgcgggaaatgtccagcctcgctgccggcgctaatatccagttcgactcgcaggttatctggcatttcaacaatcagacgaccgagggctggaccggcagcgccggcgtaccgggtgtgtcacaggatggctggttacgcccggcggacagcgccaccgatccgtacattacctctcctggcgggctggctgtcgatggtgcggcgtaccgtttcatcatgctgcgctttcgtaaaaccggcaaacccgtctgggcgggtgagatccgctgggtgtctgccggcgaaaacttcaataacacgaagcgatacattgttgctgagccggaatatgccgatggggtggcaaccctgacggtgcgtgatattccgtggacagggaacattgatcgtattcgcctggacctgacgaaccagcaggataccagcaactttatcgaattcgactggatcgccgttggccggccagcacccggcgccagtacggcggctctgcaggatgtgcgcagtacgctgagtaacgcgctgaccgccgaagcgcaggcacgcagcacgctggcggcgcagatgcgtggctcctatgatgggagcgatctggagaaagtcacctccgggctgctgtaccaggaaaaaaccgcgcgcgttaccgccatctcggcggaagttaaggccagagagtccctgcagacgcagtttaacgacaacaaagctgctgtttctggtgaactgagttctctgacgacagagcagaacgcgcaggcgagccgtatcggtggacttgaaaccagcctcgggaaaaaagccgatgcggccgcgctgacgtccctgacgcagaaagttgagcaacagggcgccacgctgacatcgcagggcgccgcgttaacatcgctcactaaccgggttggccagacggaaacgggcctggctggtacgaatgaggcgctgagcgggctgcagtctgttgttacccagcagggtgacaggataaccagccagggtcagtccatcacgaaactgacgagcgatttgggcacgacaaatgccgcgctggcgaagaaagccgaagcggctgcggtcactgccttaacgcagcaggtagagcaaaacggccaggatattcgcagcaatactgacagcatcaccagcctgtcgaatcagctggtcaatggccaaccgaatcgctggtcccgtcgactctatcctgtgcagctggctaccgccgggacagtcccgtcattcagcgatgttcgcgccgtggcgccaacggtcgtggatgaggtggccgacgcggccaaactggactttacatccgccggcagctatctgatcgcgctgtattcctgccaggtgaaagtggccgcagataccaccatcacactggcgcccggcgccagggtttttgatgataccggcgccatatttgtgaatggggttcaggtcgcctggggtaacgccagctggaataccgtcagttttgaactgaaagccggctggaacaccgttgagtttctggtgaatcagtggaccggccaggcgtatatcaacctgggtctgaagctgtcagacaaggttgctgagatgtactccggtctcggggtttccgcgctggcaaacgcagccggcgtgctcagctcgaatgtcagccagattggcaacgatgtggtcagcaattcgcagaacatcacccagctccggaatgcgctgacgcagacagacgcgaacgtggccagcaaagcggatcagacggcgatgaactcgctaaccggacgagtggagaagacggagtccgggctgacggcggctaacgccaacattacctcgctgaaatccgctgtacgggccggaaacgcatcaggcggggatttaattcccaacccgacgtttgacccggcgtatgaccagatggggttcagcgtggtagccacgacggctgaggcggtcccgccgggctgcccgtatggttatgcggcccgaattgccagccgggatcaccatcctaactttgctgcgttcccggccacgcttaacgatgtgattgagatcagcgcactggttgcctgcggcgccggcacggcgaattttaatctgtatgttggcaccgccgttcggccagatacgagcaccggtgcgccactcatggcggggggcgggaaatcaccctccgcgacctggcagagaaccacctggcgcttcaaggtcacgcaggcgatggtggacaggggttatatccgcccgttcctgcagatctcgcagaacagcccgtatggcaccgtatggttcgttacggactggcatatgcgaaatgtgacagcggcgcaaaaggttcaggatactgcggatgccacggcggcggcggttgactccctgaccaccaccgtgacgcaacagggtaatctgctgacctcgaccggcaaccggacaacccagctggaaaacgggctggcaaccaccaatgccgcagtggccaaaaaggctgatgcgacagcggtgcagactttgaccaataccgtcacacagctgggcaacgacctgacggctgcgaacagcgccatcacgaaactgaccggaaatctggcgaataccgataaagcgctggcgcagaaagccgatgcgacagcgctggccacgctcgacacgaaagtgactcagcagggcaaaacgctggagagccagagcaattcgctgacgaacctgtcgaacagcctctcgcaggtcgcggcagatatcgatgccagcgggcagataccgggtaacctggtcgtgaatccctcgtttgaacgtgggctggatggttacaccgggcggtcaaccgcgaccagtgtggtggaggtttccgttcctcatagtgggacgcgggcgctgaaggttgatccggggaatgtgactccggggcaatacatcccgtttgttcaggggcgaacctatgaaatcggggtgtgggtcaaggaacccggagcgacgacggataatggcgcggggaacaacaagctgcggatcggcaactctgccggccagccggtttttgagcgtccatacaacagcggtacggtggggacaaactggaccctgatttccggtcgctggaaagcgacggagacagccagcctgccggtgacgctgagtaactatctgattagcggcagccgctacttcgatgatttttacgtcactgacgttaccgaccgggtggacatcgatgccaccgccggcgccgttaccggactgacgagccgggtcagcacagcggaaggggccatcagctcacaaagccagcagttgacgaacctgcagaacagcctgaacacgaccaacagcaatgtgtcgaagaaggccgatgcaacggcactgacttcggtcgataaccgggtgacagaggcggaagggaaactgaccacacagagccagcagctgacaaatctggcgaatgtgctgacggccacccgcaacgccggcgacaacctgatcccgaactttgattttctgcagggcagcacggcctgggatattcagtatcctgccggtgtgacctttggcgatttcggggacgggaaagcgggggtccgactgaaccggacgactaacaccagtccggggatcttctccaacaacaacaagccggtgccgctgaatggccagcgcaagtaccgggtggtggtgaaggccaaaggtgtttccggcgcgatgagtctgctgatccgtcgccagaacaaaatcggccagacggacagtacgtatgaggataaaacggtcacgctgaccaccgactggcaaaccatcacctgggaaaccggattgacggctgccggcgcggacgggcagaacttcaaactttattctcatcctacaaacggtgaaatctggctcgattccgtccgggtgtttgatatcaccgatggaaccaacatcaaggcgaccagcgatgctgtttcgtctctgaccgggacggtgacgaaccaggggaacaccctgacatcgcaggggcaatccatcacggcgctgaataacgcgctggaagggatcaaaggcgatgtggcgaagaaggctgatgcgtcggcggtcagttcactgaccaaccgggttacccagactgaaaaggatatccgtagccaggccgacagcctgaccagcctgaatacatcactgcagcagcaggcgacacggggagccaacgtactgccggacggcagttttgaatcctatgccgtcggcgatgttctcagtaatgcccgcgccgttatcaccagtgaagctgcgcacagcgggaccaaaagcctgcgtgttacgcgcagtacggagtacaacccgaacgcgacggataataacgatacccatatcttttcgggcatgcaggttcgcgataacgcggtctattacgtggaggcgtgggttaagttgccggctggctcgaccgccgatccgaccgtttatatggtgctcggattttccttccaggattctgccaatggctggtcgtggcctggcctgaacgtgaaagtctccgagttgtcggtggacaactggacaaaagtcagtggctatctgaccaacaaccgaaccgcgctgaaacaggcaatggtgaggatctccatcccgaatacaccaaaagttcgcctgggtgacgccttcctgattgatgatctgatcatcactgacgtgaccgatgcgaaagcggctctcgatgccgccgatgcgaatgcgcaggcgctttccagtctgtccgcgtcagtcacgcagaacgggaagaatattacgtctcagggcagcgcgatcacgaaactgcagtcggatgtgactcaacttggtaaggatatcagcggcaaggccgatgccagcgcgctgacgaatctgacgacccgcgtgacggctaccgaaggcagcctgaaatcgcagggagacagcctgaccagcctgcagaacagcctgaatacgactaacagcaatgtggcgaagaaggctgatgcaacggcgctgcagagcctgcagaacaccgttgaacagcatggcagggatctgaccacgcaaagcagcgcgctgacgaacctggaaaacaacttttcctccctggccgtgggcgggaccaaccttatccgcaatgcggacacactggaaggatggagcagccgccacgccacagagacctatctgggcgaccgcgtggcctacacccggctggcgaaaggtgcatccggttatacccagctggatgaacagacgctggacgttaccgggcgtacggaatttgtattcagcttctatgcgaaaggggcttatgacgggcaggagatggcgagttatttctataacccgtcgaacaccaccaccacggaaaccagccagggcgttaaaggcggggccggtgacggcaaggcggtcacgaaactgaccaccgcatgggcgcgttactgggtgaaatgggttattcctgccaccagtggcaccaaacggctgattgccgcgcgtctggaaagcgcgacatctgccgacaaagaagtctggctctgccgccctcagctggaaaccgggaccgtgatgaccgactggtcaccgagtccggatgatgcggccagcggtattaccgcgaacacatcggccattaacagcctcaccagtcgggtgacgaatgccgaggggcaactgaccgcgcagtctcagagcatcacgaatctgcagaacagcctgaacaccaccaacaacaacgtggcacaaaaggccagcgcgcagtcggtgagtgatctcaccagccgggtcaccagtgcggaaggcaaaatcacctcccaggggcaggctatcacgaagctgcagggcgatttgagcagcaccaccgataaggtcaacaccaaagcggatcagacggcgcttaacgcgctgactggccgggtggagaaaaccgaggcaggcctcacggcagccaacagcaacatcgtcagcctgacggcggcggtgaacgccgggaatgctgccggggatgattacattccaaacccgtcatttgatccggcgtatgaccgcatgggttatgacgtggtggagaccaccgccgatggtgtgccggctgactgcccgttcaggtatgccgtccggctggccgggcgagaccatgtgccaaaaatcaacaatatcgccgtgacaccgggcgacgttttcgaaatgtctgctctggtagcgtgtggtaccggcagtgctgactttaacttctatatcggtcgggctactaccgccaccggtggcatcggagcgaaagcgtccgggggcaacactaagaccacctccgcgtggaaacgaaccacctggcgctttacggtgccatccgataccagcttgctgcggccgttcctgcaggttaatcagagcagcccgttcggcaccgtctggtacgctgccgactggcatatgcgtaacgtgacggtggcgaacagtgcgcagaaaaccgcagatgcgactgcaaaagcggtggattcactgaccaccacggttagccagcagggcgatacgctcagcagcatcggcacgcggaccacctcgctggagaacagcctccggtcgacaaacgatacggtgagtaaaaaggctgacacgacagcggtgacgcagctgcagggcacggtgacgcagcaggggaatgacatcgcggcagctaacagcgcgctgacaaaactcagcagcgatctggccacgacgaatgcgaacgtgaacaaaaaagcggatgcaagcgcgatgaacaccctgcagaaccaggtcacggagcagggcaaaacactcagtgcgcagggggattctctgacgaaactgagtaacagcctgagccagacggcagcggatattgacgccagcgggaaaatgccgggcaacctcattgtcaacggcagttttgagcgcggcgcggcgggctttaccggctggagcagtaccgcgacggtggccgatttacaggttccgcactcgggtaacaaggcgctgaaaatgtccgccggccagtcgaacctggtcggacaggaaatcagtatcacgcagggccgtacctaccgcatgggggtatgggcgaagcaggacccggggaccacgattaaagatgcgggtaacacgaagtttcgtgtggccgacagcactggcctgctggtcggctcaaactacggaccgtttagttctggctggcaactggtaacgtttgactggaaagccacgaagaccacgacggccagtttccagctgacaaccttcctcagcgcgggggcaatgtattttgatgatttccatgtcctcgatgttacggatgaaaaggatatcgcggctaatgccggggctatctctcagatgaatacccgcgtcaccgctgcggaaggggctatcaccacccaggcgcagcagctgacgaaactcagcggcgatctggctgtcacaaatgcggcggtcagtcagaaagcagagcaaagcgctgtcaccgggctgaccacccggatgacgtctgccgagggtaaactggattcgcagtcgcagcagctcaccagtctgcagaacagcctgaccacgatgaatactgagctgggtaaaaaggctgacacgtccgcggtgagttcactgaccggtcgcgtcagccaggtggaaaacaccatcaccagccagtcgcagagcatcacgtccctgaccagcaccatcaataccatccgcactcagggagctaatccgtgggttgacggtacgtttgaaagctacagcgatggccaggtgctgggcgggaacggcaccgccgttgtggtggcgtctcagaaattcaccggcgataagagcctgaagttgagacgggatgagaacaacggcggcaacagcgataaacagcttggcacctggcagtcagtccgtgaggacgcgaagttccggtttgagttctgggccatgatgccggcggatcaggcgccctcctccgggtggacaacgctggtcggtatccagtcacagaatgctgccgggcaaaatgcctggcaggcggcggtcactgtcagcgaagcatctctgggcgcgcgcgataaatgggtgaaattcacgggtatcgccagtaacaacggggcgggcagaacacgcgcggtggtctggatctccacccgtggcgccaccggcaacggtacccctggctattcactgtatatcgacgatctggtcatcacggatgttaccgatgcgaaagcagcacaggatgcctctgacgcgacggcgagcgccgtgagtggcctgacggcgcgcgtaacggatgccgaagggaaaatcactgcccaggcgcagcagcagacggcactggctacgaaagtggataacgccaactcccgcgtcgataacatggcgaagacgctgagcgacagccagagcacacaggtcagcctgaatacctcgcttcagtcgcagattgacgcgcaggcggccgccaacatcaaaaaccagacgacgctggacaacacgattaaatcggtggccagtatcaccagtacccagcagacgcatgcaacggcactggaggcgctggcaacgcagcagacgaccctgacatccagtgtcggggatctcagcgcttccgttcagaacaccgccaaaaccgtggcggatgtgaatggtacggtgagttcgctgtggtcgatgaaggttgagacggttaacgggaagaatgttggcgcggggattacgctgggcagcaatggtgaaacgagcgacatgatcctctacgccgaccgcttctcgctgtttaaccgtaacaatgcgacggcagtgccggtgatgattgccgaaggcaatgaactgtatatcgatacggcacgtatcaaaaacagttccctgacctcaaccaaaatcgcggacggttccatcacgaacgcgaagatcggcaaagagatccgctcggatgactttgttgacggggcacgcggctggagcatcaacaaggatggtggggcgcagttcaacaatgggatcttccgtggtcacattgatgcggcaagcggcaagttcaaaggcaccctggaagctcagtcatttatcggtgatatcgcagtagctcgccgctacgatgatatggctttccgccgcaaccagactgttcagcgtaacggggcataccagaaccgtggatatgggatgacgattgttctgtcgtgcacactggtttaccagctcactggcgcgggcaatgttcagcagtcgtattccgttgatatcacgttcaacattggcgggcaggaagtaacacgtcgcttctttgccaacgccggcggtttccagtctggtgacttcactcaggaattccgcttcgctgctgatctgctggctgataacaacaatgtcagcttctttatcaaggcgcgcggcaacgatgcttcgattgactatagctgctcgatccagaacatcaccgccacggcgttccgtacaaacagcaactcattcagctaa

SEQ ID NO: 226074 - DNA, 756 bp, Klebsiella pneumoniae
atgagccttaacgcgaattatcagaagttagagccaggcgatgaggtgcgtctcctggagatcgatggccaggcgtttggcctggatgaggttttgtatttccacggctataacgttccccatactgcagccgaaatcctcgccgctggcggcgacctggataagctgccggcgaaaagcatctggtggcaggggcgggagtataaagcttggccatgtgaaatcgaagggatcgagtcatccaccactggcagcgacgcgcagccaacgctgcgggtagggaatatcgacggaaagatatccgcgctctgtcttcattacgacgatctggctctggcgcgggttgtcatccacgacacgcaaaaacagtatctcgatgcgaagaactttccggaagggaatgcctcagctgatccgacgcaggagaaacggcgccttttcttcatcgacgtaaagcattatgaagacgatgagaaggtggaatttactctctccagcccgtttgccctgcaggggatgatgatccccactcgccagctgcatgcgatttgcacctggtgtatccgcaatcaataccgcagcggtaacgggtgcgactatgccggcacccggtattttgacagggacaatcagccagttgatgacccgtcgcaggatgtctgcaacggaacgctcacggcctgcaaattacgtcatggtgagaatagcgaactgccgtttggcgggttccccggcacttcattaatcaggagctga

SEQ ID NO: 226075 - DNA, 270 bp, Klebsiella pneumoniae; identical to SEQ ID NO: 100300

SEQ ID NO: 226076 - DNA, 1362 bp, Klebsiella pneumoniae
atgagaacaatttcagtccgttcagtgctgttggcctccactattacaatatcaaccgtcgtaacggcatacgccgatagtcaatgggcagcagccaccacgacctttccaggtagtattcgtgccggatctcgggaagttcctgttaagcccggagatcacacggtgatcacgattaagaacctgccaacaggtgcgactgtcaccatgctgaatggtgctgaagtccttacgccgaagccattggctgccgatgagaagggaaatctcactattccactaaatgttccggccgacgctgctacaggccttcatccactcactgttatcacgcaaaatcccgcgagcgtttcgcaggttatgttgaaattgtccaaggttgttcccccgaaaaacactgaggctttcaggctgcaaacaattcccgtcggtgagcgggcttaccagtcggcagtgtcggccgatgggaagctcttcgtgacttctgcacgcggcccgaaggatggtagccggctgatgagactgaacgcaggaacgctggctgtcgaagcggaggcgacgctgcctaaagacaaaaagggagagcagattggagtattcggagtcggtgttgataatgcccataaccatgtatggacgacgaacacgcttgccgagacggtgaccgtctatgacgcaaagaccctttctgtggtgaaagtctttcccgaagggtctgttgtacatccacgcgatgtgattattgatgaagcccacaatcgtgcctatgtcagtgcagcgctgaccggatttatcgaggtatatgacacaaaatcacttgaacacatcggtcaacttgagttcgtagtggaacatggcaaaaacatgtttaacaataccgatcttgcccttgacagtgcaggagggaaacttttcggcgtcagccgtgatacgccatgggtaggttggattgatctcaaaacgggtaagagcacgacggtgaaagtgcctgaggcgcagggggcaacagacatcactcgcgatccggcgactggccgtctttacgttgcttcccaggaaacgaacaatgtcgtggttcttgatgcggacggtaaggttctcgcagatacttatattggtgccggaggcgtatctgtcgtctgggatccagtgacgtctcaggttttcgccgccacgcgtgcaggtggaaccgttgctgttctgaacaaggacggtaaactggtcgctaatattccgatggatgaaacaccaaaccacctgactgccgcgcctgatggcgccgtttatgtggtgtcgatgtatggcgctgtcggggacaaaactcaaacaggttcagtgacgaaaatcacccaaaaaaaatag

SEQ ID NO: 226077 - DNA, 339 bp, Klebsiella pneumoniae
atgtcagctaatgatctggcattgaaattcagtaacacaccagctgagcaactcattggtatcctgccggtcctcgaggtgaaagaggcactgcgtgatgaagttgaagaggatgttttagacgaagtatggactgaacataacttcgaaatggaagccatgggcgaacaagtcgatgaaacggccaggcttgcaaggaagtttgagctgattgccgaatcctttggaacagcaataaaactggctcttacgcagcagcatcaggaagcgcaagcaaccttgataaaagtgctagaggaataccctggttacggcaaagagcctgcagaagcctcataa

SEQ ID NO: 226078 - DNA, 273 bp, Klebsiella pneumoniae
atgaagatgatgagaatgtactgccccacatgtcaggcagtagcgcggataggtaaaacaaacaggaaacacccacaactgtacgatgtgtattgctattgctctaatgtggagtgcggtcactcgtttgtgatgaatgttgctttctcccattccgttagtccaagcgcgctgaacgggcaggggagggttaaagagctaattgatgccattccacccgaggagcgggaaaaggctttaaagttgctgctggctgcgcaaaagaatgggtaa

SEQ ID NO: 226079 - DNA, 1422 bp, Klebsiella pneumoniae
atgaatatggctcaatttagattaaaaaaaatccgaatcgaaaagctttttggactttataattatactcttgaagctgatgatttatttgatgatgctatgatcctttatggggataatggcatcggtaagagtacaattctaagattagtatttgatttactctctccatctaataataaggggcaccgaacatccttatcaaaaggacatttttcttatttagaagttcaactttcttctggtgtgaaattaactgctgaaaatattgtgtcagaaactgggcgtaaggttctgaagcttgtaatatttgaaaatgaaattgaggtggcaatttggcttcattccgaaagtaatagtgatgtaagaaagatgaaggtgggtaatgatattgtatatatgaatgctcttgattctcttgaatcttttgagtttgaatatattcagggtaaagttagaaaaagaaaagaaaaaaataatgacaaaagacatatcactggtgagagtatctatataagaaaacttcaagaagttgtgccattaactttcattttgaatgcggatagaatgttggatggtgattccatcagtgatgcagatgatgaaatagaatataggaggataatgcactatggtgaacctagaagtattagagagttagttgcaaagtctcgcgaaatagctttaacgcaagcattaaatgcagcatctcgatggatttcgagaaaggccgttttaggaactaatcaaggtgctgataatgtacactcgacatatatacgaattcttaaacatattgtttctcctaagagtgaaattgccagagagataaataaagaagaaatagacgagttaaaacgaagggttgaatctctaggagacgaaacagcaagactggcaaaatatgagcttgctacggctcttgatatgaccgacttctctcgtgttcttaagacacaacgaaattcaacaagttttttatctattgatttattaactccatatattgagagcttggatgtaaggctggaggcggtacgatcaatttatgtcataattgataagtttataacgataattaatgagcttttgactgataaggaaataggttttcatttaagtcaggggttttatattaagaatagatttgaggaaaagttatcagcttcgcaattatcatctggtgaacagcagttgttacttttattttgcaatgttttagttgcaagagataagccaagtttattcattattgatgaaccagagatatcgctaaatattaaatggcaaagaaagttaattcagtatcttttagatattacgaaggatactagtatacagtttatgtttgcatctcattctcttgagataatatcccagcatagatcccgagttgttaaattggtgaatgaaaatgagtga

SEQ ID NO: 226080 - DNA, 849 bp, Klebsiella pneumoniae
atgagtgatcttccgagaagaacaattgaagagctcaaaacaagatatttttgtgagcctgatttatttgacttgtatgttgagggtgagttcgatcaacagttaataacttcgtggtgtaaaaaaaatcttgaaaagaaaattgtaccatatgaaattgatactgttgatatccctatggagttattaggtaaatataatcttacagagggacaaaaacaaagggtaatcactctcgcgaaagagttggcagatcagggtctccagggatataaatgtttagttgataaggatttagaccattggttggggagggttgaggaagttcccaatttgctatggacagattactgttctgtagaggcgtatttttttaatgaagccttgcttaaacggatagtattagaagtcagcagtgctaaaattgttgattgggcagtgtttttcaactcattcgtcgaagtgctaaaatctttatattgtttaagattaactgatgcctcaatgcagttatctatgaagtggattgagcttgacaaatatatatctgttaaaaactcagaaattcagtttgatggtaaattgtatgcggaaagaactattttgcagaataaacactcaagtaagaaggaacaattcttgagtgagttcattgcttggatgggaaaaattaaaggagatcctcggttatacacaagaggacatgattttgttaaaatgattgcaattactaataaaaattgtaagggcgttaaaggataccaagatgtggaaaccattgagcggttgtttattgctctagtcgatgagattgaagagttgatagatcacattatcaagtcgctgtaa

SEQ ID NO: 226081 - DNA, 1017 bp, Klebsiella pneumoniae
atgatttcttttggcgtatatggcgatgtgtcgttagcacaggcacgtgctaagcgtgatgaagcgcgttcgatgttggccaaagggatcaacccaagtgaagccagaaaagcagataagattgctttgcagttcgcgcatgagaacagctttgagtcagtggccagagaatggcactcatcaaaagcagcaacatggtcacagggttatgccaaagaagttctgaactgcctagaaaaagatgttttcccatatataggtcagcgccctattgagcagatagaaccgctggagttgctcaccgtactgcaaaaaatagagaagcgaggggcgctggagcaaaccagcaagatccgacgccgttgcggcgaagttctgcgatatgccgttgctaccggacgcgcaaaatataactttgctcctgatctggcaatcgcactcaacaagccgaaaacacagcacttccctttcctgactgaaagtgaactgcccgagttcgtcaacgctctggataactatcagggtagtttagtcaccaaatacgccacgcagctgctgatgctgacgggtgtgcgtacaatcgaactacgcgcagcagaatggactgagtttgatttagaaaatgctctctgggagatcccaaaagagcgcatgaaaaaacgtcgcccgcacctagtaccgctctcaacccaagccatcggtatactctacaaactttatgcgataacgggaaattacagcctagtattccctggtcgtaatgatgtcagaaaaccaatgagtgaagccagtataaataaagtaataaaattactcggatataatggtcgtttaactgggcatggattcaggcacactatgagcacaattttacatgagcatggtttcgaaagtggctggatcgaaatgcaactagcgcatgttgataggaattcaattaggggaacgtacaatcatgcgcaatacttattacaaagaaaatctatgatgcaattttacagcgacttgataatgtga

SEQ ID NO: 226082 - DNA, 2160 bp, Klebsiella pneumoniae
atgtcaccaaatattaaaaagattgccgaaaagggaaatgataatttcgatttaggcaaactccttggcgagttgatcgatcatcgaaaattgataatttcattaacgtctttattcactcttattgctctggtttatgctatttttgctaccccaatctaccaagctgatgccttgattcaggtagaacagaagcaagctaacgcaatattaagtaatttgagtcagatgttacctgactcacaaccgcagtcagcgccagaaattgcgctaatgcaatctagaatgatattgggaaaaacagtcgatgacttaaacttacaggcgagagttaaagaaaatcactttcctatattaggtaaaggttgggctaggttatctggtgaaaaaaaaggatcattagaagtttcgcatctgtatatagattcaaataacgatgaaacgccagaaatttctttaacagtgagagataatactcattttattgttgagaatggaaatgacaaaatactaggtaccgtaggggaattaattaataaagatgggttctcaataaaaattaataaagtagatgctcttcctggtacggtattcacgatatcttatgtgacaaaattgcgtgcgataacagacttgcaggagtctctttccatcagtgaccaagggaaagacactggtatgctaactatatcgcttacaggtgaagatccagtattaataaaaaaaataattgatagtgttagtggtaactatttggcgcaaaatatcgctagacaagctgcgcaggatgcaaaaagtcttgattttttaaatcaacaattaccaaaggtcagggctgaactagatgttgctgaagataaactaaatcaatacagacgacaaaatgattcagtagatctttcattagaagctaaatccgtccttgatcaaattgttaatgctgacaatcaattaaatgaactaacttttagagagtctgaaatatcacagctttatacaaaagagcaccccacatacaaggctctgttagagaaaaggaaaacgcttcaagatgaaaagaataagttaaataagcgagttgcgtcaatgccagaaactcaacaagaagttttgaggttgagccgtgatgttgaatctggccgcgcggtttatatgcaattattgaaccgacagcaagaattaaatatatccaaatcaagtgctataggtaatgttaggattattgatgacgctgtcactcaaaccaaaccagttaagcctaagaaagttttaattgtgcttttgggtatagtggctggctcaatgttatctattggcttggttttattaaaagtctttttaagacgtggaatagagtcacccgagcaattagaagaactggggattaatgtatatgcgagcattcctgtttcagaggatttcgctgcaaaatcttctaagaaaaaacaatgggcaaaagtagagcatacggatattgattttcttgctattcaaaatcctgcggacctagccattgaatcaattagaggattgcgaactagtctacattttgcaatgatggaggctagaaataatatattaatgatttccggtgcaagtcctaatgcaggtaaaacattcgtaagtacaaatttagcagccgtaatatcacaaagcggtaaaaaagtacttttcatagatgcagatatgcgtaagggatatacccataaactgttcaatacagaaaattcgaatgggctatctgattacttgtcagggaaaattgaactcaaagcccttattaaaaacgtaaaaaatatcaattttgattttatatcaagaggtattgtgcctccaaatccagccgaattacttatgcacaagcgcttacaagaactattgacttgggctaatcaaaattatgatttggttattatggatactccacctatattagctgtcacagatgccgctattattggaaactatgtaggaacaacactattagttgcaagattcgagcaaaacactacaaaggaaattgaagttagttttaaaagattcgagcaaagtggtgtgattgttaaagggtgtattttgaatggtgtagttaaaaaagccagcagttattatagctatggctacacacattacggatattcttataaagataagcattga

SEQ ID NO: 226083 - DNA, 1098 bp, Klebsiella pneumoniae
atgaaaaaaatattaatcatcagtcatacgggtgatatatcttttttcaaaataggtagtcatcattatgctaacggtttagctcaaaacaatttagtctcctatataggtacacctagttcgttgatacataaaatgatgaggaaaacagttaaagggcaaaagaaacttgatgatagtgtaaatgttatcaagcctgttacaatctttcctattacgttaaaatacaataaaatatgctcatcaataaataaattattttggcaattatctcttttacatttaaaaaaaaataactttgatgttgtaatttgtgactatccatattttgaacctttgttaggcattctcagttataaaatgctgatatatagacctaccgataattacttgcaaatgtcaggagataaagtcaaatattatgaaagaaaaattattgctaaaagtgatatcgtaattggcacttctcaagatgtaattgcgagtataaaaaaacaatatccagatgaatttaaggcaaaaaaatattttgttattagcaatggctttgaccacttacatttcgatagtagaactaaagactcagtaagaactggcagcgtgtatattggctcgttagattatcgttttgattttgatgctttagaactattatgcaaaaatttttcagatcatttttttgatatctatggtccaatcgagaaaaatagtgaagataaagtaacggcattaaaagaaaaatataataatttaaatttctacggtgccatctcttataatgacgtaccaattatactaagcaaatataaggtggggcttcttctattaaatgatcatttatctaataaaggtagaagtccaatgaaattatgggaatatgcggcgtcagggttacaggtattgtattcgcaagtggagcatgaatgtacttatgattttctttttaagtatgataaatgtaatcttgtagaaaaatatcttttagcgtatcaagcgccttgtaaccgagatattaaaacttcccttatgcaatactcttggcaaaacaaagttcgtgaaattgaaaatataattagcgagtttattaatgaccaatga

SEQ ID NO: 226084 - DNA, 741 bp, Klebsiella pneumoniae
atgataagcccacagactgaaactaatgcacttataaataaaatactaccttctatcgaggaccctcgagtattccttactgagtttgagttagctggcattactcgtaaggcgcgtaacataccggctcgagacgaggggttactcattgagggaattgcgtatttagcagcgggagatgctaagaaagggattgaactgtgcgagcgttctttatctctaaatccaaggagtcatgtggcttggatgaactatgcctcattgcttggtaatcgcggttattatcgtctgcaaagggaagtatttcaaagggcgatggatttggatatttttgccatctatatacctgctcttcactgttctattttttggctgtacgaagagcattttgaacgtagtttaaatttttttataaagacaaatgtaatcaaaaatgaattaactgaacatttaaaacaaaaaattggtgatatgttaagttggagatctaacttaccaatcatatctccatttgctcaaatagctttcgagatagctgataatgagcggcttttaacattcgataattatatttgtcaggatgaagagattggatttcattattcgctaagtattgattgcaatgatgcaagtcggctttgtaagttgaataaaatagccactgacatgatattagaaaggaatctccagcatgttgattgtacggtgatttttgttgcagaggtaaataatgcccaataa

SEQ ID NO: 226085 - DNA, 1146 bp, Klebsiella pneumoniae
atgaaaagaaaagtactggcactcatggttccggcattattaatggctagcgccgctaatgccgccgaaatctataacaaaaacggtaataaactggacctctacgggaaagttgacggcctgcattacttctctgacgacgcttcagaggacggcgaccagacctatgttcgctttggtctgaaaggcgaaacgcagattacttccgagttaaccggctacggtcagtgggaatacaacattcaggcgaacaccagcgaaaaagaaggcgcgaattcctggacccgtctcggctttgccggcctgaagtttgccgactgcgggtcgctggactatggccgtaactacggcgtggtctacgacattgaatcctggaccgatatgctgccggaattcggcggcgatacctacacccagaccgacgtttacatgaccggccgtactaacggcgtggccacctaccgtaacagcgatttcttcggcctcgtcgacggcctgcatttcgccctgcagtatcagggtaataatgaaaacgccggttctggcgaaggcactaataacggtgggaaacgtaagctggcgcgggaaaatggcgacggttttggtatctccagctactacgatctcgatatgggcatcagcttcggggcagcgtattcgtcttctgaccgtacccataaccagctggcggccgcgcgtagcagccagcgttatgccaacggcgataaagccgatgcctggaccgtcggcgcgaaatatgacgccaataacatctatctggccgccatgtatgctgagacccgcaacatgaccttctatggcaacgatagttttggcggaattgccaacaaaacgcagaacttcgaagtggtcgcgcagtatcagttcgacgactttaatttaccgctgcgtccgtccgtggcctatctgcagtcgaagggtaaagatctctacgcctattctcgctacggcgacaaggatctggtcaagtatgtcgacgtgggcatgacctactacttcaacaaaaatatgtccacctatgtggattataaaatcaacctgctggatgaagacgaccgcttctacaaaaacagcggtatcgcgaccgatgatatcgtcgccctcggcctggtctatcagttctga

SEQ ID NO: 226086 - DNA, 387 bp, Klebsiella pneumoniae
atgctcaacattgacaaatacctgactgtccgctggcagatgggcggccgcacttttcctgttctcgactgctacggcattgtacatgaggtccgccgggacctggggctgcctgaatggcccgcgtttgaggcggtgattaaagagcgtggcagcactgaaatggggaaaatctgcgagagtttttcgcgtgacctgactccctgcaagccgtgcaacggtgcggttgccgcctgctatatgggaaatatgatcggccaccttggtgttgtcgtcgaaatggagggagcgctttacgttattgaatgcaatccccggcgcaacgtaaccattcttcccctggcgcgttttgaacgtcagtttctgaaagtggagtattaccagtga

SEQ ID NO: 226087 - DNA, 2697 bp, Klebsiella pneumoniae
atgtcccagccagtgggtgatctggtcgttaaaattgacggcgatagcgcaaaatttgatgaggaagttgctcatctgaataagcagctgagcgggttaggtagagctgcgaacgacagtacagcccaggtcaccgcagctttcacgcggcaggagcgtgctgcaaaacgtgccggtatttcaatcggccaatacaataatgcaatgcgtatgttgcctgcgcagcttactgatgtcgcaactcagttagctggtgggcagagcccgtggctaattttgctccagcaaggcggtcaggttaaagactcatttggtggcctgatcccaacatttcgaggattacttagtgctgtaagtcctttggccgttgggattacagctttgactactgcgggtgccggaattggatatatcttctatcagggatcttcaatcctttccgattttaataagacgctaacgctttctggcaacacggcaggcctgactaccaacagaatgctggtactggcaaaatcgggacagcaagcaggactcacctttgatcaaaccactgattctctgactgcattaattaatgctggcgtgggggcgggtgcgtgttttgatgaactaagccagtcagttgcaaaattttctacggcatctggtatccccgttgaaaaggttgcggaagcgttcgggaaactgaccaacgacccgacgtccggcctgattgcgatggcgcaacagtttcataacgtgacagccgagcagattgattatgttgctcagctacaacgttcaggagatgaagccgctgcacttcaggcggctaatgatgcagcgacgaagggatttaacacccagactcagagcctgatcgataacatggggacgattgagcgctctgctgattcgttgaaacgcgcgtttaaatccatgtgggacgctgcactcgatctcgggcggccagataccgcgggtgagatggtcagcaaggcagtggctgcttttaaacgggctgatgaaatatggaatctcaggaaaaatgaccgctatgtaaatgatgaagccagggcccttttctggaatgacagggagtcggcccgtctggcccttgatatggcgcagcaacaggctggtattgccaaagccagcgcagcagcggcagaaaaggaagcggaggcagaatctgataaacagaaatatgccgctcaggcacaggccaattatgctaaatcgcagactgcgcttgaaaagtataccgccaggcagaatgaattaaataaagctctgaaagaaggacatattctacaggctgattacgccatcaatatggccgcagccaagaaagaatatgaggccaccttaaaaaaaacgccgaaaccaaaaggcgttaaagtttctgctggtgatcgttcttctgatcagactgatgccgaaactctgcagttgatgacccagttaaagttgctgcaacagcatgcggggcttaacgataccatcagccagcaacgtaaaaatttgtggtctttacagtcaaaattcacggttatcgaagaggcatcgaaaacacgcgcgctgagcaaagatgaacaatctttactcgccagcaaggataaggttctggcgcaggcggaggttaatgcgaaactgggcgatcaaatcgttgctcaggaacgcctgaataagcttcaggataactcgttaaaatatgttactcagatgcaggaaaagactgctgcactgacagttagtgctgggttaagtgacagggatgcactgcgtaataatgagagggcgcaattaaggcagggctggaaaaaccaaggcggaagcctggaagatgaagggtatcagaaagagctttccgcccttgagggctattacgctgcgcaggatgaaatgcgtaataactggttggccggcgttcagtcgtcatgggaaaactatgctgacatggccgccaactataaccagattgctgcggatacgaccaatactgcgctcagcggagtaacaagcaatctccagcaggggttatatgaccttgcgactcagtctgaagatgctggcgatgccctgagtaacatggttgagggctttggcaagacagtcattcagactttggcccagcttgcagcccagtggttagtataccagggtgtacagttgcttgtcgggaaaaccacgcaagcttcggctatcgccccgatggtttctaatgcgcaggctacggcattgcaggctcaactggcagcatatgcatccactgcggctattccaatcgtgggcccggctatggctcccgcggctttgactgcagctattggtgtcacagagcctcttgttgctgcgatctcaggattagccctttctggcatggcgcacgatggtatcgataaaataccggaaacgggcacctggcttttgaaaaaaggggagcgtgtaacaacggcaggaacatcagcaaaactggatgccactctggaacaggtgcggcaacagcgttcccttgccggaaactctctgcatgttgagttcaataacacctacaccgggaaaccggacgatgcaacgatccaaatgtgggatcagcggcagcgtgcatctgaaaaaaggcttaagcaatattttacttcccaggttattaatccaactgagaattatggtcgctcacttaaatcagtttatccggggaggcgtaagaaataa

SEQ ID NO: 226088 - DNA, 246 bp, Klebsiella pneumoniae
atggcagagatcacaccagcagaacagattcgactgaatctgctttccaccctgaactacgacacagcagcagcaaaagaggctattgcgttcgttcaggatagccagctcaaatatcagctgttcatccagcagtacaaccgcgtgacaactgaatcagaagttgtggcgcggaccatcaaagcggttcaggagtcggcggaagcgttagcgctgtttgataccgcggctgagcaggccagttaa

SEQ ID NO: 226089 - DNA, 630 bp, Klebsiella pneumoniae
atgaatcaaacacaattccagaaggcggctggtatcggcgccgggttagctgcgcgctggtttccgcatattacagccgcgatgaaagaaatcggcatcactgctccactcgaccaggcaatgttcattgctcaatgcggccatgaaagcctcgggtttaacagggtagtggagaatttcaactacagcatcgccgggcttgctgattttgttcgttacggcagattaacgcaggatcaggccaattccctcgggcgcagccagtcggaaactgtgttacctctggagcgccagcgggctatcgccaacattgtctatagcaagcggttgggtaacaacagggcaactgatggctgggtttatcgagggcgcggacttattcaaataaccggactttctaattaccgggactgcggcagcgggctgaaggttgatctggtggcacagccagaattactggagcagtcctcgtacgcggcacgtagtgcagcgtggttctatgtctcaaaaggttgcttgaaatatccgggtgatcttgtccgggtcacgcagattatcaacggcggacaaaacgggattaataaccggcgcgctcgcttcctcaaagcaaaatcggtactggtggggtga

SEQ ID NO: 226090 - DNA, 669 bp, Klebsiella pneumoniae
atggactcagcgaatctaactacagttgccactctactcgtagctttaattgttggccttttagcttatgcctccacttcttcctcaaaggaaaaggaggtaaaattatccgtttacgaaaaactaggcatcgaagctcatgaggctctagaaagcatacaaaacaacacagaatatttaatacaagtttttctattccaagcaaatgtaaccagaaaatcaattaaagaggcgcatgataaagttctgccaaacatagataaattaagagaattaagagtcagacttatgttttttgataaagatgtatttgaccaatatgagaacgtattaaactctcatggaagtattctcccgaagatatttgggtatggtaaccataatggtaatgaacctctacgcgtagacagaaaattcactaactacgaaaagagaatatacatatttaaactcagaaagatactcaaactaactgaggacacgaagagtctgttaataagcgaaacttcgaagagataccaaaaaaccatatcatcatcgaaatggctgaatttaataatattcccattaattattgcgtgttttttgattatgggatttttgtctcttaaagctacagagaaaaaatctccagagcaaccaactaatataattataataagaaactaa

SEQ ID NO: 226091 - DNA, 600 bp, Klebsiella pneumoniae
atgactgatatcaccgaactggcgcaactgcgtggccgtactgtcgactatccgtattacctggttgagtgcgactgtggaaaaatttatcccagcagtgaattgagtggtggcgaacctatgggcgactctggtgattattcagattgctattgtccgcactgtggtgaaggcgaagagcattttgcggaatgcgcagacccagaaactgcgtggaaagcgcagcaagacaagattgatgcgctggtagaggcgctggagaaggcgcagcagcgcaacgcagaacttgaagcgcaaaacgaatatatccgtaagcgctatcagcagctcgatctgctgatcgggaaaaatatcctggttatgcaggctgcaatcatcgaatggcaggccactggcgatgctaaaaacgggctggcgtggatttataacacgctcttcgggccaggcgaattgcctgatgaagcggagaaagacgcacaggcctatttcgaccgcaaatatgctccgctcgatgaagagcttatggcgcttcacaagtggttttgggaacagagcgaggctgaacgtgccgccgctggcatcaaggtggaggctgagtga

SEQ ID NO: 226092 - DNA, 1263 bp, Klebsiella pneumoniae
gtgcattctacagaatatgcaattcagcaagctctttacgcagtcggtacagctccgacacgtagtgcagcccttgccagttttgaggaaaatcagcatttattaaaagactggaggatcctgtatgccgacgagagtaaagcaggaccgctctcccttaggcgagctcaattttctgaaaaaggttgtgtatcaacgttattctctgggcattcattatgggttctggatcatgatgtcatttcatcatcagataccatgatgtttcaggttggctacggtacttatattgattctaatgcagcaagttttattcgttctttggcctatcgtgaagagcctaaagaacatctgttgaatttttgtcgaatgctatcagattcattctcattcgatgaactatccaacattaatccctatctttatttatgggaagcgcagagagacagatcgccagaaacggtaactgggatccgggaaacaatggctgcattgtttgccctttcttggattaaacaccccctgaatgcagaatggggaaaaatgtacaggaaattataccaggagcaggcggaagcagaagctgaccgttttctgtatcaattttaccagaacttagatgccggtttaggaaaagcgatcgaagaccaggttgacctactggaagctatgctgttaagaacgaagttaatcgaactgtcttccaaaagatcagcccagaacaaaatgaatgaactgttgcaattcatgcatgatgaattatctaccatgatgattcgcgaattacttgtttgtgccgacatcctcttccgtgaaggaaaatcacagatgtcacaaaaactcgatggcttacaaaagaaaaagagacccttcgatgaactgaggaactgcgccagagatttaaatatgctcaggagcatggatcagctaacaaactctatctcggatcacacaaattcttcattttacatcgccaacttaattacatttgatcgcgatattatagatattattcagttaacagaactgcgcgctattgctctacgtcgctcatcttcagacgcgttcccgatttataatcggcaactggatacatggttatcagagaaattaggtgaaaaacgtttgagcggcttagaaaatatattcaggaaggatggcttcgacacacgctccagagccagaagtcggagtaccgtgaaaacgatactgcaagaagacagacaaaaactggcctgtatcatcgaaaaaatcaatagttaa

SEQ ID NO: 226093 - DNA, 6279 bp, Klebsiella pneumoniae
atgtctgacagcctgcttgttcgcaccagtagagatggcgatcagtttcattatctttgggcggctcgccgcgcccttcgactactgaaacctcagtcaactcttgttgccctaaccattgaaggggcatcaacgacggaaatgggctctcagccagtggttgaggatggggaggagctgattgatattgctgaatattacggcagtaacgagctcgcaacagcaacaactgttcgttatatgcagctaaagcattcaacgctgcactcaggtactccatttcccccgagtgggttacaaaaaaccatcgaaggttttgccactcgttataaagcacttatacaaaaaataccggtagaaacgttgcgaactaaactggagttctggtttgtaacgaaccgtccagtcagtagcagcttcaatgaagcgatcaatgatgccgcgagccaacacgttacacgccatccacatgatctggcgaaacttgagaaatttaccgggcttcaaggcgctgagttatcgatattctgccagcttttacatatagaaggtcagcaggacgatttatggagtcagcggaatatcctgctaagagaatcagcgggatatctccccgacctagatactgaagcccctctgaaattaaaagagctggttaacagaaaagcgttaaccgaaagcgccgcaaatccttccattaccagaatggatgtgttgcgtgctttgggggtggatgaaacagatctttttcctgcgccctgtcgtattgaaagaatagaaaattccgtctcaagaactcaagaggcgacgctggttcaacgtgttgttgaagcatccggcgcacctgtgatcatccatgccgatgctggtgtggggaaatcaattttctctactcatataggggagcatcttcccactggttcagttagcatcttatatgactgcttcggactgggtcagtaccgtaacgcttcttcttaccgccaccaccatcgtacagcattggttcagatggctaatgaaatggcatctcgtggtctctgtcatccattgatcccaaatgctggtactggcatatcccagtatatgcgtgcgtttctgcatcgcctttctcagagcatttcaatactccgggcctctgagccactggccgtattgtgtattattattgatgctgcggacaatgcacagatggcggcggaagaaattggtgaaacgcgttcttttatcaaagatttaattagagaaaagcttcctgatggagtctgccttgtcgcactttgccgaccttatagacgagaattgcttgatccacctcctgaagcactcacattatccctacaagcttttgatcgcgatgagacagccgctcatcttcaccaaaagtttccagatgccagcgaaagtgatgttgacgagttccatcgtctaagctcttgtaatcccagggttcaggcgctgtcattatcacaaaatattccactgaacgacacactgagacttttggggccaaatcccaaaacggtagaagatacaattggtgaagtgctggaaaaatccattgcacgcttacgtgatacggccggaatatctgaacgtgctcaaattgatacgatttgttccgcactggcaatattgcgtccattaattccattatctgtgctatctgacatttccggagtagctgattctgctattaaaagtttcgcacttgatctgggacgtccattaatcgttagtggcgagactattcagttctttgatgaaccggccgaaacatggtttcagaggcgttttcggccatcggccgctgctctgcatcagtttattactaaactgagaccactaacaaaagatagttcctatgcagcatctgttttacctgcattaatgctggaaggaaaccagctttctgaactgatcgagctagcgatatcctcacaagctctgcctgaaaccagcccggttgaacgcagagacatagaacttcaaagattgcagtttgcgttaaaagcggccttacgcacaggtcgataccaggatgcggctaaactagcactaaaagcaggtggagaatgcgcgggagacaacaggcaaagagtcctgctaagggacaatatcgatctggcagcaaaatttgtgggaagcaacggcgttcaggagctgatttcccgtaacgcatttccagatactggctggccaggctccagaaatgcttattatgctgcaatactttccgaatatcctgaactctcaggagaggcccgcagccgccttcgactcaccatggagtggttaacaaactggagtcaactaccagatgatgagcggagcaggcaaaatgttaccgatcaggacagagcggcaatgctcattgccagcctgaatattcatggcgcggaagcggcagcaagggatctcagaaggtggcggcctcgagaactatcttttgaagctggaaaaattgtcgccatgcaattactggcccacgcccgttatgatgaacttgatcagttagctattgcggctggaaacgatatcagcctagttatgggaattgtactggaagcaagaaaacttcaccatccagtcgctgaacaagcaatcagaagaacctggcgcttgttaaaaagtcagcgagtcagcattaaagacagaaaccacgctaataaccagacaatagcagcaatcactggcatggttgaaatggcgcttattcaatctgtttgtactgaatcagaaagcatccagttgttggatcgttatttaccaaaggttcccccctatgctctaacttctcaatatagtaaagaaagagttgcttacgtccgggcatatgctctgcaggcaaacctgatgggctctcaattagcgcttagcgatttagcctccacagaggttaaaaaagaacttatggctgaaaaacgccacggcgaatctgatgacctgcgtcaactgaagcagtatagcggagtattaatcccttggtataatttatgggccaaagtaattcttggtaaagcaaggaaagcagacttagaaagtgagctaagtgatgctcaaaaagaatcgacggctattaagggtcattcttactctgagcattcattatcatcaaatgagatcgcaaatgtatggtttgatattctgatcgaagcaggtaatgcatcaaaagacgatgtagaaaacatcatcaaatggaatcagcataaagggaatagagtattcacaccaacgcttcaccgtttcagttctgtatgtgcagagatttcagggcttgaagagctttcatatcacttcgcagaacttgccttgtccttatggagggatgagcactctgatgctcagatcaaagctgacggctatatagacctttcccgttcactcctttcacttgatgaaccagaagctaaagaatactttaaccaagcgattgaagttacaaataagctgggagatgaaaatttaagtcgatgggaagcgatacttgatcttgctgaatgtgttgctggtaaaacgcaagtcccccctgaaattgcctataaactagcccgatgtgcggaactaaccagagaatatgttgatcgtgataaacattttgcatggagtgatactgttgagattttggctgagttatgtccatcttcagccatagcaataataagtcgttggcgtgaccggagatttggcaatcatagaagcatactggcatggaccattgagcatcttgtaaagaaaaataaaattaatgcactcgatgcacttcctttaatcacatttgagaatggttggcataaatgcggcttgcttgactcagttttatcctcatgtactgatgaaaaagataagagcatggcattcgaagtggtttatcaatatacaaaatttgatttgccaaatatccaacatcttaaaaatctggatactattgctacatcattaggtattgaacactcagagctgaaagaaagaatctcaggtcttcaacatactgaggcggtttcaaaaaaatccagtctctcatcggatgataatgagcaaggtcatgaaaaagaatgggagttcatttttaaggattgtgacttatcgtctattgatggtattagtgcagcatacgaaaaatttcgtagcgttcctgaattctattccaaagaaaccttcatcaagaaagcaataagccgagttaaggcgggcaaagaatgtagtttcattactgccattagtgctatatttcactgggggctttatgattttaaatatattcttgaatctatacccgatgaatggacatctcgtttaagcattagaacagtcctagcaggtttaataaaagaatattgccaacgcttctgtatgcgaatcagaaaaagtcgtgtttacgagatttttcccttcagtctggccagcagtctctctggtatgagtgaaaaagagattttcggtattgctctggaggccattgcggaatcgccagagcccgcaaattctgaccgtttatttagccttccaggccttcttgttagtaaactgaagagtaatgaagcattaaatgtattatcttatgccttggatttattcgacgaggtgctaaaagatgaggatggtgacggcccatggaacgagaaattatctccgccaactcatgtagaggattcacttgcaggctatatttgggctcgactgggttctccggaggcggaaatgcgctggcaggcagcacatgcgattctggcactatgtcgaatgaatcgtacaagcgttatacaaggaattttccagcacgcgataaatgctaccactttacctttttgtgatcgcaatctgcccttttatacccttcatgctcaattgtggttgatgatcgctgctgcaagggttgcgctggatgatggaaaatcgctgattcccaatattggttatttctaccgttatgccactactgatcagcctcatgtattaatccgtctttttgctgccagaactttacttgcgctgcataatagcggcctgatctctatcccagcacaagaagaagataaactccgaaatataaaccaatctacgactctccctgtgcttgatgaagttgaagatcatagagatgaagattcatatacttttggtatcgactttggcccttactggctaaaacctctgggacgttgtttcggtgtatctcaaaaacagttagaacctgaaatgcttcgcattattcgtgatgttcttggttttaaaggtagccgcaactgggatgaggatgagcgtaataaacgacgctattatcaagacagagataatcaccacagtcatggttcctatccacgggtcgatgactaccatttttacttgtcataccatgcaatgttcatgaccgctgggcagttattagcgacaaaaccattagttgctagtgactacgacgatgtcgaggatgttttcctggactggttaagaagacatgatatttctcggaacgatcatcgctggctcgccgatcggagagatattccccccaaagaccgctccagttggtttaatagcagttctgacaatagggatgaatgggtggcgtcaatctctgaaaatgtatttaacgaaacactatgtcccagccccggactattaacgctatggggacgttggtctgacgtttgttcagatcgaaaagaatctattgttgtccattctgcgttagtatcgccggagcgatctttatcgctcctcagagcattacaaacaactaaaaacgtatatgactataaaatccctgatgctggagataatcttgaaatagatcacgcacactataagctaaaaggatggattaaagatattgctgaatactgtggaattgatgagtttgatccttgggcgggtaatgtaaggtttccaatcccagaaccagcctcatttattattgatgcgatgaaattaactactgataaagatcatcgggtatggtattcgccttctagtgttgaaccggcgatggtttccagtatctggggccatctatcaggtaaaaatgaggaggaaaaatcacatggctataggctatgtgcttcaatacacttcataaaatcggcattagaaacattcaatatggatctcattttagaggttgatgttgatcgctattcacgaaacagcagatatgaacggaataatgaaaatgagctcgacaatatcccttcaagcacacgactcttcctcttccgacatgacggaaccatccacacgctatacggcaattatagaactggggaaaaagctagttga

SEQ ID NO: 226094 - DNA, 726 bp, Klebsiella pneumoniae
atgacggaaccatccacacgctatacggcaattatagaactggggaaaaagctagttgatgagcttgagctaaatgactcagttgatacattaagcagatggatggctcatcatatctcagagctcatttatgatgctgaacattgtacagacgatatcgtccgtacaactaaacaagcggagattagggactctatctggtcattctggtctaaccgatacgaattgccaattggtaccagaccatttcaggagctcgaacctattctaagaaccttaaaaggtcttgatcctgaaaatgagcaaccgagatttttttcaccttaccgagatctaattaatgtagaaaaagaaaccagtgaggtccaaaaatggctaaccgccgctaaggatattgattctgcagcaaaaatactgattgattactgtttatcattagcagcagagaatgctatcgataaatcccaagaatgggtgaagttagcacagaaagctggattggacgaagatgttgatctgcttgaaattcgtatctttcagttacgaggtaatccggccaatacagacaatcccaataatgcgcaacggagaatactggaaaaaaggcaaaaaaggcttgacgcttttctcttattgggctcccagttaaacgaacaactcaaatctcagcttgaagccttaccagcaattgaggatgagccaacggatgacgacgaagacttttga

SEQ ID NO: 226095 - DNA, 681 bp, Klebsiella pneumoniae
atgtcaatttccagatttctaatcgaaaataatggttcaaatcaagataatataaaaatagccttaagtaaggcctaccatctatgcaaagatgcgggacttcaacgagtatctctgctatttcctgcgaaaggaacgttttctcattctgatatagcaacattccttggaacccaagcaacaaaggcattgataaaaggtcaaaccgtcgatctaggtaacaaggttcggctagagtttaatacccctaaaaattctccaatatatggaaatcatgacattgtattagctacatatttaacagataaagacatggatattgttgatagtattcaaaacatcaatagtatcgtctttttaccttggtcagagaaggaaggtaaacgatggctatctacatgggagcctgaaatagttggcccatctacttggaaaatcctaaaaccagaattgccagaccctattggtaatgaaattttaagactcggtcgctgcatcaacatgtcaacagggcttagtcacccatctgataaagacagggcaaaacgaatttttgctggcctgaaaaagcaaggacttaaagcatctgaagaagcaatcagacaatttgcagtcaacaatggctgggccccagtcagagcgcaggagctagctagttttgccaagaaatatgtggggtaa

SEQ ID NO: 226096 - DNA, 1155 bp, Klebsiella pneumoniae
atgaaagataaaattaatatcggtgttgtagcagattggttggtaacctatgccggtgctgaacgtgtattgagtgagatgtttgatatttttcctgatgcagagttatattctattgttgattttttgtctgatgaagcgcgtgagtatttccataataaaaaggctaagacaacatttattcaaaatttaccatttgctaagagcaaatatcaaaactatttaccattaatgcctcttgcaattgagcagttagatgtttcggggcatgatataatcttatcgagtagccatgctgtatcaaaaggcgtattgactggtccagatcaattacatataagttatgtacattctccaattagatacgcatgggacttacaacatcaatatttaaaagaatctggtcttgatcatggtgttaaagggataattgctaaatggctactacataaaattagaatatgggattatcgtacagcttcaggagtaaaccattttgttgcgaattctaagtttattgccagaagaattaataaagtttatggaagaaccgctgatgttatatatccccctgttgatgtgaaaagattcactttaaatgaaaataaaaaagactatttcgttacagcttccagattagtaccatataaaagagttgatctcattgttgaggcgtttagtcatatgcccgataaacaattagttgttataggcgatggttctgatatgaaaaaaattaaagctaaagcaactgctaatatagaaatattgggatatcaacccaactctgtaatggaggagtatatgagaaatgcaaaagcatttatctttgctgctgaggaggattttggaatcactccggtggaggctcaagcttgtggaactccagtaatcgctttcggaaaaggagggtcattggagacggttagaccgcttggtgttaatatgccgacaggtatgtttttcgaacagcaaaatatctcatctttgatatctgcggttaatttattcactgaaaatcaggagttttttgaacctgctaattgtagagctaatgctcttaaattttcagttgaacgctttaagaatgaaatgaataattatgttagccagaaatggacggatttccaaaagttcaaagccgttacatactaa

SEQ ID NO: 226097 - DNA, 396 bp, Klebsiella pneumoniae; identical to SEQ ID NO: 137637

SEQ ID NO: 226098 - DNA, 1248 bp, Klebsiella pneumoniae
atgacggcattacctactggtgtagaaattcacaatggaaaaatcaggatttggtttctctttcgcggcaaacgctgcagggaaacactcaagggatggactgttaacaatgccaacatcaaaaaagcaggaaatcttagagctgcaataactggcgagatacaaatggggactttcgaatatgcaagtcggttccctgagtcgaaatcgaagacatttggcggggaggttcaaccggtagaaacatttgacgacctctgcaatcttttccttgaaaataaaaggcttgagattgcagagtcatcctacttcaatctcaaatcaatgctgagggtcctcactcggatcatcggtaaaaacacgctgattaaagatatccagcaccacgacatcctggcctgccgtagagagcttctttacggcgctgttatccacgatgattccccttggctgaacaagactggcagagccgttagtacggtaaattttcgcattaatgcgctatgtctgatgctcaagtttgcccaccagagcaagtttgtatcccatgcggcttacgagaatattcgtccattaaaaaaggaaaaaaccgttccggatccattgctgcacgatgagtatgagctatttattaacgcaattacggaatatcacgcaagaatttggcgagttgcgatttttacaggactccgtcacggtgaaatttgtgcactcgcctgggaggatgtagacctccaaaacgggaagatttacgtaagccgcaacgtcacgcaaaagggaacgttttgcccgccaaagactaaggctggagtccgtacaatcactcttctaaaaccagcgctcgaagcattacgggaacaatttgagctaactggtcatcttgacgcgactaatatcgttttccatcacagggagataggtaaatctgagcagcaggctcttcgcttcgtgtttcgtccaaaacctcaatcgaagagtaaggccgggttctattcacgaggttcaatatcttacagctggaaaagagggatgatgcttgcgaatttgagaagccgcgatccttatcagtcaaggcatacctatgcatgctggtctttatctgccggagcaaatccctcgttcattgccagccaaatggggcatgaaaatgccaaaatggtttataccgtgtattcaaaatggattggcgatatggacgaagatcaggtcgggctactcgatagcaaattcgcaaagatgtccctataa

SEQ ID NO: 226099 - DNA, 3042 bp, Klebsiella pneumoniae
atggaatatttttatctgataaaagcgactcaaaaatcgggtaaagctgatgccgtaatctggcgcacaaataaatcagaagctcgcgcccttctgcagctggacgtcgatctggaagacgctgggatcgaaacaggccgcggaaaagactatcaaaaaccaattcgcaccgatttcccggtattcaatgatttgccggcagaaggtgttctcgattactcatggtgcgaacgctaccagctcggcgacgatggccgcacctggactcttaagccaggtcaggcgcctgcggatcatcacatcgatgatgccggagtatccgctgagcccgttagtggcgtgctggttgatgccaatactactggcgacgcggcacaaggtgagaccgtggaaactttcggtagcgatgaataccagaacgattcaagcgcgctttttaacgtggcagaactcccctttcgcactcagctgctggcgcagtatatggccgaagaacgccacgtttatcatatcagcatgcctcaccggcaggagctgtcagttcttgaaatggacactgataacgcagccgtccaggatctgattctggccgccgagaatatccctgaaatcaaaaaatacgatatgccggcgctctggaaattcaccagtgccaataaaaaagtcttcccggaagggaagcggcatgagctcggcaagcgtatccagtttgcaaagctgtggttcgccacgaacgcgattgaccgcggcattctcaccagggaatgggctgccggtaactgtatttcttcagttatgaaaactgatacaggtacgaatgctggcggcggtaataaaaccgatcgcaatcctgactacacccatacccttgatacgctcgatgtagaaatagccctggccacaatgccaatggatttcgatatctacaatttcccggcatcaattcaccgccgggccaaagagatcgtccagaagaaagaaagtccgttcaaggaatggtcggctgccctgcgcaaaacccctggcatcctggattattcgcgtgcggcgatttttgcactgatcagggaagcatccagcggaataactccttttccagatcggttgcgtggctacatcaacgcaaatctgactgagcataagcatgacgccccttcccctgaaacgcttgccaaggcagggcatatttcatctgcctccgtcactctggacgctgtgaaaaaggctatcgatggagatgaaggtgtgcctgacctggaaactctcccaactgactttcaggtaattggcaccgaactggtgaaagaagctaaaaagaaacgtcctgacgctaatcaggttctggccgccgaacgtggcgaatatgtcgaaggtatcagtgaccccacggatccgaagtggataaccgaagaccttaccaaacccagagccccggaaattgcaaatctcggcggcggaatgttttcaattgaaggccttatgacttcaccggctactaatgccaccgaagaaggaaccaccagcaatgtgcagatggaaacggctcagccggtcgaagacgaaaataataatacggtatcagcaggcgaaggcgctgatgagcctcctgcgcaaacaactgccgtgaacatgagcaaaatactggctgaacgctgcccggatcttacctccgaagtgctgaaaagccaggtttccgagagtgctcatagcgatgaagaggaagtggctgaacaagcagcgccagcatggccggagtatttcgagcctggtcgatatgaaggcgtgccaaatgagatctaccacgccgctaacggtatcagctccacgatggttaaagatgcacgggtatcgctgatgtatttcgaagcgcgccacgtatctaaaaccatccagaaggtacgctcccctgttctggatatgggaaatctggtgcatgcactggcgctgcagcctgagcagctggaaacagagttcagcatcgagccggaaatcccggaaggcgccttcaccacgactgcgacgatccgcgcgtttatcgacgagtacaacgccgagcttccgccgctgttgagtgctgacgatatcaagacgcagttggaggcgcacaacgccaccctgcccgctcctgtaccgctgggcggcgacaaagatgcaattggcattgcgtatctggaattacctgacgagttcaagcgaatcgttggtgacgataaaaactttaccgcgtcagcaatgaaggcctgcatcaaagaatacaacgccaccctgccagcgcctgttaaaaccagcggcagccgcgatgccttactggaacagctggcgcttattaatcctgacatggttgctcaggaagcacagaaggcgcagccgctgaaagtctctggcacaaaggccgatctgattcaggccgtgaaatcggtaaaaccggatgccgtgtttgccgacgaattgctggatgcatggcgcgagaacccggaaggaaaagtgctggttacccgtcagcagttggctacggcactggccattcagaaagcactgttgaatcacccgaccgccggcaagttgttgacgcacccgagccgtgccgtcgaggtgagctatttcggcattgatgaggaaaccgggctggaagttcgtgtgcgtcctgaccttgagatagacatgggcggcctgcgcatcggtgcggacctgaaaacgatcagtatgtggaacatcaagcaggaaggcctgcgcgcgaagctgcaccgggaaatcatcgagcgcgattaccacctgagcgcggctatgtactgcgaaaccgcagctcttgaccagttcttctggatattcgtcaacaaagacgagaactaccactggatcgccatcatcgaggcatccgaagaactgctggaactcggcatgctggaataccgcaaagctatgcgcgcgatcgcgaacggtttcgacactggcgaatggccggcgccgattaccgaagactacaccgaagagctcaacgattttgatgtgcgccgcctcgaagcgctgcgcgtacaggcataa

SEQ ID NO: 226100 - DNA, 582 bp, Klebsiella pneumoniae
atgggtaacgaaatcgaaaaaattgcgcagcaaaacgagatgagcattgagtttgttacctggttctttaacgagaagaaagtggggtgcgggaatgtctggttcatgatgatggctgcaatgtgggagggctggaaaggtcgtagcatcgaaatggataagctggctgcggagaatgtggcgttagctctggaaaatgtagcgatgaaacagatcgttggctccgtaaccaacctggataacgaacctcagtaccacgccgaaggcatggggtgcggactggaagaccgtggcattactgaccggtacgacgcctgccgctatggctgggatgaagctatggagcgcatatacgtagaggttattccgtgtgcggaggaaattgcatttccggcgaccgacgctttcctggctgaattgcagtcgcaggtcatcagaaacgcacttaacgagtgcacagaatatctggacagggactgcatcatggagtccaacggcatcagttatgaagatgctgcgctgcgtgaaactggtgcaatgacacttcaggaagcgttacttcgcagaggagccgcccaatga

SEQ ID NO: 226101 - DNA, 495 bp, Klebsiella pneumoniae
atgagcactggtatcgaactcatgcagcacgcgctgggtatcaacgagcgcaacaggacgccgtaccgcaactatttccttgctggcgatggtcatacggacaactcgaagtggcaagcgcttgtcgctgatggggttgccacttcccggcctgctcctgattttgcgggtggcggaacgctctatcacgtcacagaaaaaggtgaagcaacagcaatttctgcgctgccagagccaaaaaagcgcacgcgttacgatgaatatctgcactctgaagtatgtgaatcgttcggggaatggctgggtattgagttgccggtctatgaagagcgtgagattgggcgttacaagtgggagtaccgcatggttcgtcgttcacgagcatattgggatttgtactgtgatgttcgtggtgagtggtgcccgacgaagaaagcagccaaggccagctacaaagaagcgttgcgcaaatcaaaaaaggagcgtgcagcatga

SEQ ID NO: 226102 - DNA, 285 bp, Klebsiella pneumoniae
atgaaattcacagggttacagtccgcagcgttgcccgatgcctctgattcagttaaagagtgtgtgaatcttgggcagtggatgctcttcaagtcaaacaccgaggcgaaaggcgtagtgttctttttgcgtgccggaaaagaaatctttggtcttaacgagacgggtaaggttttatctacatcgcctatacacgagcctttggacatgacagagattttctatttttgcgatatacaaaagccagaatctttaagtaatacctccttccagttagttcgttag

SEQ ID NO: 226103 - DNA, 894 bp, Klebsiella pneumoniae
atgagtctcagatctgaacgtacaaaatgggtgatgttcttaccgtgctcagatgtggtcgcggaacaacgtcatgtcatggatttggtgtatggagtattttgccttgagacggcaggtatctccccgcaagatatatttatttatattgatagtccaaatcaaaattataatggtttctttggacttgcctcttctcatccatatgtttcgcaaccaagcgcaaatttctttacagacctgacacaaaatgattattcaaatcttgtgatgttcgtttcaggtcatggtagcccacatgggatggatggtccgcaacccatcacccctaacagattgcttaatgctttaaaacaaactcctaacttaaataatgcagttatttacttaggacaatgttttgcgggaacatttaattacattaacgcaggcaggggtaatggatctggacccgagatcatcattgcaggggcgacaaatctgcatgaaagtttgagcttaagtaccacagaaaaatttcaggctatggaattcccttggtacgctaatgtctttttacttcatgtttttaagtggatgtcttcaccttcagatgtagatggtgatggcatgttcacggtaatggattcttacaaacatgcaggcatgtggtctaactattataataaaggctacaagaccaatggttttatgagaatagttgacgctcatcacgaatataaaaggcttaaagctatagctgatgttgatactggagatatggctgtaaatgctcagaacacccttgagtgtaaagcaaaatatgatatttatatcagccagcttgacttacattatattcaccaagaaagttggatactcaactctcggccagctcaatcaatagaattttaa

SEQ ID NO: 226104 - DNA, 126 bp, Klebsiella pneumoniae
atggtttgtaaggaaaaatctcagtactggcttcagtatgacagctacactcaggagaaagttatcgaattgggcatagagttggaaaaaattgccactcagcttgaagttttaaagcataaatag

SEQ ID NO: 226105 - DNA, 333 bp, Klebsiella pneumoniae
atgaagaaactaatgatggtaatagctgggatgtttgttatttctggatgcgctactaagcagtatccgcaagctccatccgtaactagcgaagagtctgctgcgttagattgtgccgcaattaagcaggaaatcgcaaaaacgcacagcattcagaacgaaatcgaaactacaggtcagtttgatgggcgtaccgtattgggggctttgggagatttcggtatcggtaatggtatggccaaaagtgaagcgcgtaaaaaggcgcaggcacgtcttcagcagcttgaatctcttaaaacagttaagtgttcagatagcaaagtctcaggttaa

SEQ ID NO: 226106 - DNA, 1419 bp, Klebsiella pneumoniae
atgaggttttcagaggcttttggagttgaaggcagacaagtagcgttagattttttggatattcctctgcacactgatttaagattttttttagatccaacatctataaaggttttaaaatcccaatgggggcaggatttagtttacgcgttacaagactattttacagaaataatggtgtctataaaaaataataattttaaaaaagctgcttatttattgtcatcactaagagagtccaatgcctttcatttaggatattcaacaaaagaatcatccggaactgctcttggtgaaaaaactgctgaagatattttggattctctaaagagtagtcaggctgcaaaatcaggaatattaactgatctagaagatacagctctgactatcccaggtattggttctgaccgaatatcggattcagtttgtaatattcttaaaggtttttttatagaatatactaaggatgtttgtatattttacggcattgagactaaagaggtttcagaagtcaaaacgtgggacaaggttagtagtaaatggcataaaaagcgttgtcatctccctgtttttgaaggcgaggaaattatacttattcctaagatacttgcacgtgaagagataatctattcacatagggatttatatcggagacatattatcccggaaatgaaaaaggaattgataagctctggttcggcattagttaaagtgcttaaaggggaacggattgttaccacgacaagtatcattgatgagtatggtcagactaaggcatttatcgaatcccagctcgtaaaatatcctaacacattgaaagattataaaaaagatctggagattaatcctccgaatcctctagcacatagtgattttgataaggatgaagatcctgtaattctccccataaaagatctaatgaaagatattgatttagcaattaaaaacaacgactttagtaattacactaaagcatacaagaagatattgatttcaatcttctatcctagcttgttttacccaaaattaataagtgaagatgaacagtgctgtctcttttcattaattaatgaagctaagaaaggtttcttttttgatttttcagtgtacaacattatttcagagttgatagttgtgaatgtcattgaccctcagcataaattgaacaaggaacatatttatactacacttagaaaactcgaagaatgtaatgctaagataggtttgatattctgcgaaaatcctgctgaggaaaagtatcttgatagagtgaaagaaatatcgaaagatgaaggtttgtatattttcttgattagccgaaataacttaatggaaatgattaaggaattttcaaccataggtgaacagacatttgacgtattaaggagtatgtttaaaacataccccggtaaagtatga

SEQ ID NO: 226107 - DNA, 567 bp, Klebsiella pneumoniae
atgaccaccctcacgctacagcaggcctttgaggcctgtcagaataacaaaaccgcctggctgaaccgtaaagccgaactcgcggccgcagagcaggaataccgggaacaggtgctggccggggatgagcgtataccgggcagaatgcagacactgcgcgatattatcgatgtcaaaaaatgggagataaatcaggccgccgggcgctatatccgctcccatgaagcggtgcagcgcatcagtatccgcaaccggctgaatgactttatgcaggcgcacgggacagagctggccgccacgcttgccccggagctgatgggactcagtcagcagcccgcactcctgaccggccatgcgctcgaccgttcggcgcattacctgcgcgaagccctgtccgtgtggatgagtaccggtgaagaaattaattatgcggcagaagacagtgatattttaacggccatcggattcaggcctgacgcggcttcacgggtggataatcaggaaaaatacacccccgcacagagcctgatttatgcccgccggcgcgcggaactggccagtaagtag

SEQ ID NO: 226108 - DNA, 738 bp, Klebsiella pneumoniae
atgaccgacaccccctttatccctgattacctgaaaccggcgctggagcgactggccgcagccagagcggcccatcttgaacaggcccgccggatggaggacaccctggcggccatcacccgtacggaggagcagaaagcggcgctggagcaggacaacggcagcgacacccgcacatggcgcgccgctttccgtgccgggggtgccatgctgaccgatgagctgaaaagcggtcatatcgaacgcgtggcccgccgtgagctggcgcaggaatgtgacaacctgaccgaagtgctggcctttgaacgtgaccagctgaaagtcgcctgcaacagcaccgcgcgggcattccgccaggcgcatcatgccgtactgtctgaatatgccagggaagagctcgaccgcgcgctgaacgacaccctcgggccactggtccgggcgatggtgctgaaagcggatgtgatggcaaacccgctcgccaacaccattggccatcaggggcacaccgagccggagaaagaggtcatgcatcaggtggtgaccttcctgaccgggaaagtgagcgccttctccgtcacgccagccgatgagccggtgctctccctgaccggcttcccggccgtcgcgcttgcgcatatggaccacgacgccgccagcacgcccggcgagcgtaaggtctggcaggagaaaatgcgtcagcgcgaggctgacctgaaagcgcgggggctgctgccatga

SEQ ID NO: 226109 - DNA, 1917 bp, Klebsiella pneumoniae
atgaaagaattagccagaacttatatcaaatatggtgtcccaagtgacttggcctcaaaatatgaacaattagcgttatccgcctcgtctttcagagccttgtcaaagacactgttgaagcaaaactacatgttgaatgataacgagatagaaatagttaaaaattatttaaatcgacagcctataccttcagatattatacagaaattattagaaaataacaactttacttgttgttgctgtagtggggcaaaaagtgatagttacattattcatcacattgtcaaatatgaggagtctcaagataattcatatgaaaacttagctgttttatgtcctaacgaccatgatctcgctcatcgagggacagggcttactaacagtttaactggcgatcaaataagaaaagaaaaggagaaatgggagcaacttgtgaaagttagaaggcttgttgctgcttcgccagcagagcttaaaatattttacttatctattcctagatatcaagagataagcaaagaaattgagagattaaagtcaatcatttccgataaagaagatgttgccagtatgagcatggcagctttaaaggccgaaagagaaaataatgaagtaaaaattactagattggttgatgaaaaaaataaccttgaactgcaaattaaaagtctaattggtaaattagctcatttccaaccagaccaacacactagcctatacaatacaggattaaatttgtttctaacgggagacatcaatggagcccttgaagccttaagcgagatcgaactagattcgcaacttgaagaaatcattgatgctcataacactgtttataaaagtcttaagggaaatattgattctcggttacttcgagtaaatttactatttattaatggtaatgaacagcaagcatgtttctttgggggcgaaaccctaaaaatctgcgaagaactttgtgataaacatccggaattattatcaaaacttgcgttttgctttgaaaggataggaagcttatattattgctctaactatattgatgaggctgaagtactatttcaatcaggccttaatctatgccgctatttaattgataataacgacccatcaataacccctctgataccagattttttacataacttaggcacaatatactactctagaaatgagctaggggaggctaaagagtttcttgaaagttctctatattggtatcgggatctatatgatatgtatagtggttttgaaaaattatctacaaacccactagcagatagtctcgtgaaaaactacgtaaatctaagtgttacttatcaagccttgaatttaacaacagaagcactagatgcaataaaagaagcagataaattaaaaaacggcttaccaaacccagatgtaaattcagcatatcaagtggaattaaattcaaggtatttatcaagtaaggctagtgttttattaaaatcaggcaatgcatgtgaggcaggtaataactttaaaaatttaatattaactcttgaggaacaagcaaaggctaatccaaaaaaacacacgagggaattagttaatacttaccttgaaatgtgtgccgctttatttatgaaagatatcggcaaaacagaaacagaaacagaaacagaaacagaaatgacatactattgtcatcttgccatgcaaaaagcaaaagagttaataagcattgaacctgagggcgatcctagtccacttgcatatgcattaatgtataatacattaaacaacatgcataaaggcactatcagttcatcagattttgaaaatttagaaaaggctaatttgttagttactaacttaaaaccagatgaaggtgaccagaatctgcgtggaggaataagaattcttaacgaattaatacagaaagtgcctaagtag

SEQ ID NO: 226110 - DNA, 189 bp, Klebsiella pneumoniae
atgcggttagggatgtctccgagcctgaatattcgttcttacatggtttttattacaggatcacgcgacagcgtccaaaagcaattgagagttatatgcgagtattacgccaaaggccaagtgattatcgttcaaaaagtgaattggttttgttgtatttacaaaatgacgagcatgagcttgctttag

SEQ ID NO: 226111 - DNA, 132 bp, Klebsiella pneumoniae
atgcaaccgttcaagaatttcctctaccaaaccgggctcaatattagcatcatctttgtaaaacaggcaattcaagtaattattagcattgatcggattatttttctgtctttcataaacttcttttgctaa

SEQ ID NO: 226112 - DNA, 276 bp, Klebsiella pneumoniae
atggcactaacagatcgcgctatagtccacgccaagccttgtggcaagccgtataagctcagtgactcgcatggactttacctgctggttaaccctaacggttcaaaacgctggtacatcaagtaccgctttgtaaacaaagagaaaaagctcgctttaggcccttatccgcttttgacgcttgcacaggcaagacgcatgcgtgaagaggcccaattactgctgatttccggcatcgatccgagcgcacaccgaaaggctgaacgccttctgtaa

SEQ ID NO: 226113 - DNA, 1350 bp, Klebsiella pneumoniae
gtgaactggtcggcggaacataagaagcgggtgctgcgttatttcgagctttacgtattccccacgaacggcagttgcgacatcaccaaaatgaaggttaaagacctgctggtacccatcaaggaggtggagaaagcgggtaaactggatgttgcttcccggcttcagcagcgcactgcctgcgtgatgcgctacgccgtccagaacggcattatcgatcataaccctgcatcagatttaaccggcgcggtttccacgcccaaagtacgtcaccaccctgcattagatttgaatcttatccctgatttcctggatagaatcgacgattacaacggccgtcaactgactcaactggcggtaaagctggcgctgctgctgtttatccgctccagcgaactgcgctttgcccgctgggatgagattgatctgcgtaacgccatgtggacaatccccgccgagcgtgagccgatccccggcgttaaatattcagcgcgtggggcgaagatgcactccccacacttggtcccattgtcacgtcaggccatcgaactgctgcacgaggtgcggcagcattgccgaccgggaactgaactggtattccccggcgatcataactaccgcaaaccgatgagcgaaaacaccatcaacaaagcgctgcgggtgatgggctacgacacccagaaagatgtctgcggtcacggttttcgcactatggcctgtagcgcgctggtggagtcgggcctgtggtcaagcgacgcggtagagcgccagatgagccatcaggagcgcaagcgcgtgcgggcggcgtatatccataaggcgcagcacctggaagagcgccgggagatgatgcagtggtgggcggattatctggatgcaaaccggttcaggcatgtggtgccgtatggcttcaaaaaatcgccgggaggcgcactcgaccatatgagcttccaggagcgcaatgaccgacaaatggaggagctgaaagcccggatactggccgactcggaatggctgacggcgtctgagttatcggcaaaagcgggtttccgttctgccgatcctgaggcaggcccgaaaggctggaaagccgccgggaagatattctcgctgaaggtcgatggtgaggatttatacccggattatgttctggatgagaaaatgcggcctcttaaggttgtccgtttgattctctcactgtttaaggagcgtaaaacaccgtgggggctggctatctggttcggttcggcaaaccgcaggttgcgaggtggaaggccgaaagatttgctgacttcgaagtcagagttggttctgatggcggcgcaggatgaggtggaatcgggggagtag

SEQ ID NO: 226114 - DNA, 999 bp, Klebsiella pneumoniae
atgaaagaagaacagcttttgtctgatgcgatagagaatctgccaaaaggattccatttgcagtatgaacatagcggtagacatggtaagcacgatgccttgggtaagctaacagggccggatggtgagtcagtgacatttgctctggaagtaaaatttatccaccgtaaagagtcactgatggctgttcgcgaacaaatggttcgctttcctgcggattttcctgttctgctggtgtgtaaccgcctgacgtctgcactggcggaatattgcgccgacagccagatcaactttatcgatacggcagggaatgcccgtatccaggttccggggttgtatgtgcggatcgaaggccgctatgaaaagaaacccgtttccgccagcagtcgttttgctgaaggggtgatgaagcttctttttgttttgctgtctagcccagagaccctgaacgagacttatcgcagtttggccgggaaggcgggtatttctctgggaatggtcagtaaggcttttgattatctcgaagcgcaacgctatttccgcaaatcgcagaaggggcgtcgcttaatcaatgaaggcgagttagaggttttgtggctgaaagattatgctaccgctctgcgccctaagctggattcgctttctttatccgcgcctgtttcatgggatgagttgacgcttgcgtccggggaatactggagcggtgagattgcggcggcagagctgagcggaggatacctgataccagaaaatggcgtgatttttacatcccatccgttgttacaaaggcgaaaggaactgggactaaaacctgttccgggggggaaactacagctgatcgccggtttttgggggagctttgtcctgaaccgcagagccgaggcgatgctgtgcgtggctgaattgctggcaagcggcgatgacagaaactgggaaacggcaaggataatcaatgacaaatatcttcaccttaatgaatccgatctcttcagctactga

SEQ ID NO: 226115 - DNA, 813 bp, Klebsiella pneumoniae
atgacaaatatcttcaccttaatgaatccgatctcttcagctactgaaaagttactgagccagatcaaccgtatttgcatcgcgcaggggatcccgttttttattgcaggtgcaacggctcgtgaaattctgctccatcatgtacacggcagaagtattggtcgccgaacccgtgatattgatattgccgtttttgtggatagctggccgagatttgatgcacttaaaaatgctttctttgctgaaggcgcagaggctgtccgtgataacgcccatcgtatgattgtcgaagggatcgaactggatattattccttttggtggtgttgctgaagggaatcaaattgcctggccgccagagcgcgagatcatcatggctgtggacggatttgccgaggtatcttctcatactgtaaccgtacgactagataatggtgaaaatcttccgttttgttccttaccaggactggcgctgttaaaactttttgcctggcgcgaccgtgggcatggaagcaccaaagacgcgaccgatctctttaagattatccgtgaatatggtgctattgaggatgaacgcatctatgagtcgcccgtagaaggggaacgcctggactgggatcccatacgtatgggtgcttttctgttgggaagcgatatcgcgacaattagtgagcattcatccttgcaggatttacggcatcttgataaagaacgcctgatagatgcgatagtacgacaacatggcgtgggtgatatcgccgggattgagcagatcatcagtgattgctgggatggtatggcaagtgatggttga

SEQ ID NO: 226116 - DNA, 489 bp, Klebsiella pneumoniae
atggctaaaaaaacggctcccttacttcccggtactaatcagttgcttgctgagtttggcgaacggcttaagctggcgcgactgcgacgtaagctcacagcaaagcgggttgctgagcgagccgggatgtcgccaataaccttgcgttctcttgaatcaggcgggacgggcgtgacaatcggcgcttatttgtcagttatgcagattttgggtcttgaaaaggatctgaataaacttgccgctgaggatgaacagggacgccagcttcaggattcccggctaataaataaaacgcgtgtttctcgtcctgctgccatatctcacacaaacaggtataccggaaacgtgataaaaaacgatgtcttcgacaagcaattctcgatatcacaagaaaaatcaatcgattctgaagtaaaaacgggagtcgtgacatcggcatctcttgctgcactgctaaaaccaataaagaaacccagaaaaggtagctga

SEQ ID NO: 226117 - DNA, 252 bp, Klebsiella pneumoniae
atgaacgtaacctcacccaaaatgctggctcaggcaatcagggatgcacgcaagcaacgtaacctgacccagcgtgaaactgcagcaagtatgggcatgaaacagtcaacggtttcagagtttgagaaccatcctgaggggactcgcctggatacgctctttaagctgcttgccgctctggaccctaagcttcaggtcgtaagccggaggggtaaaaacaattcttctgatggctgggaccaggagtggtga

SEQ ID NO: 226118 - DNA, 267 bp, Klebsiella pneumoniae
atgttaccccggacacaccgccagctcgtgagcgttgaagtgatgtggcctgctcagacgctaccgcttcccctgcaacaggtagtcgaagcattgaatcagggcgaaacgcccgatcagattattatccgcatgaaccaacggggtctgctggcgtggcgtgaggatgcatccgtgcaggatacacacgatatctttcaggtacgtctggacaaccagaatgaggcgcgatttctctgccgctacgttacgctgccgctgcactga

SEQ ID NO: 226119 - DNA, 1644 bp, Klebsiella pneumoniae
atgaacacggtgcttattccacccggtcccggcggatacggtaaagggctgtggctgcctgtcgccagtggcaaaaaagtgctgtcgctgaccgggcgggaaatccatccggttgcgatagaaatcggcgcgctcaccgaatcggaaatcgttaacggcttctctgacattccgccggataacgacatcctgtgcgtggtgattaccctgtttgatagctggatcctcacggcgattcatcgcttcgccgcgttggtacaactgctgcccgcctcacaaagtcatcaccattccattcccggtgggctactggatcattcactggaggttacctgcaacgccgtccgactgcgccagggttatctgctgccaccggaagcaggagcagaagaacaggcccggcaggccagcgcatggacggtcgcagtggtctgcgcggcattactgcacgatacgggaaaaatcgccgtggatatggagatccatcaactggatagcacccgctggcatccgtggcaagggaatctggtgcagccttatcgctggcagtaccagagccacggtcgcgactatcatctgcatccggcggctggcgcaatgttgattaatcagttgctaccctcgccattactggactggctggccggatacccggcggcttttgcgtccctgatttatcagctcaccggacactacgaacgggctggcgcgctggctgaactggtacagcaggccgataaagcctctgtcgctcgatacctcggtggcaatatcaaaaccgcgctggcgcaaaagccctcgtccttcccccagcagcttcttacagccttacggtcgctggtacagaacgagtaccggctcaataatcccgaatgcggatccgatggctggctgacggaggatgcgctgtggcttatcagcaaaaccaccgccgaccgggtccgcgcctggctgctccagcatggcgtagccagcgtaccggaaaacaataaccgcctgtttgacgaactgctgacgcatcaacttattgttgccaacgaagataaagcgatttggcgctgcattatccgatcggatagaggctggtcgcccgttgaaccgctgacgctactgcgcctgacgccgtctgtaatctgggggcaggatgatcaacgtccggcctgtttcgatggtgatgtgacgccgataattgaagccgaacccgcccctgaacttagcgcaccgactcaaccgttaccggagatagcagacgacccgaggcttggtgacaataacaatttcctgcagtggctgaagaaccacactagtccttcaaccacggtgaatacccggaacggcaaggtacatgtggtggaaaaccatcttttcttgatttcgccggggatctttaagatatacgcatcagaaaccactggagacaccggcgacggctggaagctggcacagcgaatgtttcaggagtcagggctggccctgcgctgtaatgatgacagttttatctggacctgcgaggtttgcgcaccacaaaagaaaagtagtcagttgaaagggtttctgatggaggatcctgggcgggtgcttggagagataataccggtgaataacccgtggctgaagctggttcccgcaatggaaaaaccatga

SEQ ID NO: 226120 - DNA, 375 bp, Klebsiella pneumoniae
atgatgatttactgcgcacttattactgccatcgggctgtttgtcgccgatggcctgagcgacaagatgctcatcaccttcgacagcaacggcccgaaggactgtctcgattactccctgtcgctggagtcgtcgttccgggaagagagcctgatgatactccccggcgaccgcctgctgctggcgggccatgattatctggtgaccagtgttggcaaaggtgcacagcaggcgctgtttgaactcggccacctgacgctggtgttcaatggtgacctgaatccctgccacgtcggggcggttcacctctccggcccggtgccgaacctccgtgacctccacggcaatctggtgattgaggagggacgcccatga

SEQ ID NO: 226121 - DNA, 522 bp, Klebsiella pneumoniae
atgtttctggtctccctggctgaaggctttattcacctgttccaggccgcaggcaaaatcttcctcgacatgatgaccgggcttatcccgatgctcatctgcctgttgctggccattaacttcctgatgaagctggtcggcaccgtcagaatggagaaagtcgccgccctgctcggccgctcgcgcatcctcacctacggcgtgctgccggtgctcggctggttctttatgagcagccccggcgcactcactttaggtaagctcctgcctgagaagagcaagcccggctatgaagatgcgctcggcaccaccgctcatcccctcaccagcctgtttccacacgtggtgccgtcggagctgtttgtctggctcggcgtcgccgccgggattaaggcgctcggcctgcccgttacctcgctggccctgcgttatatcgccgccgccatgctgattggcctgatacgcggaattatcaccgagtacctgttcctgcggctcagcaagcgggggaatgccccatga

SEQ ID NO: 226122 - DNA, 1269 bp, Klebsiella pneumoniae
atgactgatctatataccaacagaaattcacggcaggattttgttaaacatgcatttacacatcacattcagaataatatggatatatttattgcttctgctttttttactgaatttaatgtaattgacagtttgctagaaaaaggatgccatattagaatcattgtaagattgggattccctacatcgccatttgctttagagaaattactttcacataaaaatgttgaagcaaggttctttaccaacaattcattccatcccaaactttatatttttggagatagctcattattagttggctctgccaatttaactaatgccgctctcctgacaaatcaagaagtaatggttagtttgaattcagaggaccacagattcgaagaattaaccagtctattttctaactattgggagtctgcaaatgtactaagcaaagaagcaataaaagattacaaaaatatttacaataaatattcaaaactatcatctcaaataataagccttgacaacgaagttttggataaaataggagatataaattactcaaatataaatagagggaaaaaacacatctcacagagctctatatttttggagtcttatcgaaaatcatatcaaacatcagtctatgcttttgaatgtattgaagagatatactcatcttttcaaagaaaagttcctgaagaacagattccgttacgccttgaaattgattcatttttcagttttgtacgtgattgctatgcaactcaagaaacttggttagcccaaccactcggatggactgatatgcaaaaatctcatctgcgtacactagtaaatgaatggttatcaacaccatgggagcattttgaagaaagaattgtccctataaattaccctctcatttacaatgtatttaaatcaccagactcaattgagcaaagcaatgccggagaaatagttgatgcattatgtgttcttcactcttttcatgatcgcttaagattttacaaaggaggactggacacattaatagaagaattctcaacaagcaatgacatcagtcaaataaaaaagaccatcacttatttattatatgggaaaggagatattatcaaaagaatgtctgattgtatctataacgatgaatttaaacttaatgcctttggacaatcaaatgttcaagagctgattggatggataaataaagaaaatctacccgttattaacggccgaacaaccaaggtgcttcgatattttggctttgatgtgcgacaattataa

SEQ ID NO: 226123 - DNA, 2232 bp, Klebsiella pneumoniae
atgcccccacacaaaatccgccaggagtggctgacgctggacgaggccgcagaagtcatccggcagcacaacatcacgttgctgcctgccgacctgatccgtcatgccctgcacggtgatctgccactctcggtctacttcccttctcccgtacttctgagaccactcaatcctccttgccgctttgcctgccgattcagcaagcctccctttccgccttcgcagtgcaacaaacccggcaaccgcaaagtgatggcgaactctccgccatgtagacgcgacccgactctgcaactgaccaccagccatctgtggaatttgccgttaatcggccttgaacgcctgctgctccaccagcaactggcgaaatcgttgaatcacccttgccccaatgatacccactgctgcaaccagattggcatcgtggtctgcgatgagaacgacagctattaccaactctgttgccgcaaatcgttgcgggagcttttactggaactgctcgccacgcaaaacaacctccaggaagagcttcatctgctgattggccagctatatggcaatggccgaaatgacctgaaatcccggctcagtctgtcagtctgctacctgcaggacacgctacctcctgacgcactgttcgtcatccgccgcactcatctcgaagccttcctgacccgtcatcagccagaatcaaaggagcggatcacctccgcgctttcgcgtttgctgtggctggcctgcaagcacaacccgcaattggacgatgaaatgctggagcatccctacaaactgctgaacattttcgaatgctgggcgcgtgaggaaggtacccggttcaactttgtgcagcatatcgccggactgctgccggtgtacggacgggaaaccggcaccgggcatccggggatttgttacttcaatcgcggcggcacgccgctatgcttcgatccgctgaacaagcttgaccgtgcgcagaatgggcacctgctgctgctcggcccgaccggagcgggcaaatccgccacgctgaacgcgaaaatcgcgcaactaatggcgctgcatcgcccgcgcctgtttatcattgaggccgggaactcgttcggcctgatggccgactacgccgccgcccacggcctgacggtgaataaaatcagcctgcgtcccggctccggcgttaccctgcccctattcgccgatgcctcgcgactggtggaacaggcggttaccgacgccgaaccgccggaggacgaagagagcgagggcgacgaccagcgagacgtgctcggcgaaatggagatcaccgcccggctgatgatcaccggcggcgaagcaaaggaggatgcgcgcctcacccggccggatcgggcgatgatccgccaggcgattatcgctgccgcgcatacctgccatcaggaaaaacgacagacgctgacgcaagatatccgtgacgcactattcactctttcccgcgacagcagcctgccggaagtccgccgccagcgggcgtatgaaatggcggagtccatcaacctgttctgcgccgggtttgaaggcgaactgtttaaccgcgaaggacagatgtggccggaagccgatatcaccctggtggatctcgccacctttgcccgcgaaggctacgaagcccagcttgccatcagctatatctcactgattaaccatatcaataacctcggcgagcgcgaccagcatctggcgcggccaatcgttaatattaccgacgaggcgcatatcattaccgttaatccgctgctggcgcggttcctcacgaagggctcgaagatgtggcgcaagctcgggatctggctatggctggcgacgcagaacctggcggattttcccgacgaggcgaagaaactgctaaatatgattgagtggtgggaactgctggtaatgccgtcggaggagattgaacaggtgtgccggtttaaggcgctgaccgaggaacagcggcaactgctgcgctcagcggtgaaatcgccggggcagtataccgaaggtgtcgtgctgtcgccgcgcgtggaagcgctgttccgggtggtgccgccagcgctgtatcttgcgctggcgatgaccgagaagcatgagaaggcggaaaggatgcggattatgaaggagaccggatgcagtgaagtggaagcagctatgattacaagtactaaatcaattttaactggtaatgctctttcgaaacaccatcacacttcatcataa

SEQ ID NO: 226124 - DNA, 954 bp, Klebsiella pneumoniae
atgttaacaatatgggctgaatctcctgaggaagcgagaaattttatacgtaatatatattctaaggtaaatttaccaatcatctcaggtatccgggttgccaaaaaaaatccatcatcgcgtggtaataattatgttgcaggtagctattatatagcaacaaatgatgagcatgttgatgtaactaatgaattgattcaagcacctcaggccatagttgaattagtacagtggtgtacctgtgatataatgatttcggtcggcgaccatccagtgtgtgtcattgaggatactactcatattgtacgaatgaatgtctttcaacgagtaccaagaataattaaagctgctcaactaggtgtgcacgccataattttacaaggtacacaaggtttagatcttaataagcgaggtgataactgggctatttatcgatatatgttgccatatcaaaaggcaaacaaaatatatcctacactaatagcacctgttttatacttgccaaatgatgaagatcagtgtagagcggaaatggaagttgcaaatttattagcaactatattttatgctcccaatttaatctcagataagaaattatctattggcaaaaatttagatgatattgttttacatggatttaatggtaatatagctccaccaattaattctattagggtttcagataaagaagtagttgttaaaattggcgcaagacccgagcgtgcaagctggaggagtaaaggtagtggacaaatggatccatatattggaatgattgctgctgctaaatatgcttattgctttgaccacgcgggaaataaaactagagatttagttgttgagtttacttttcttcctgatggtttcttttattttacagactgggaatcaagtacatcattgtacaaaagacttgctttcgaaatagctgataaggttgttttttgtggctga

SEQ ID NO: 226125 - DNA, 1224 bp, Klebsiella pneumoniae
atgtttaatatcatacctaaaagacatatttcaagctcattacctatccatccttattttggcaaggtcgatccggcgctagcttcaactttaattcttacattatccaacgaaaaagatgttatcttagatccattttctggtagtggaactgttttacatgaagcaattttgagcaatcgttctgctgaaggttgggatagtagcccacttgcatgtttaattgctgaatgtaagttacttggcattactgataatgaaataaaagaaataaaagaatttttagaaaaattgaatagagacttttcaattataacagatttttctcgatatgattatctgattccggagatgagaagagttcatgatatatctaagtggtttactgaaatttcattaaatgaactatcatttatcaaatatcatttgataaaatacaatcaaaagaatttagaaaatcatcccgtatggtcttttcttagaattgcctttagtagcataattatcaaagcttcaaaccaaaaaggagaatctcattattcttcagttaagaaaaatgatttcagaggaagagttgtttctctctttaatgatagtgtaacctcggttataaaatgtgccaaaagtttcacttcagagttaggtgaagacaatttacgaaaaagaatagaatgccaggataataaaaagacaattgaatttagcaatggtagaacaataacactggttaatacagattcacgaaaaaaccataatcccttaccatccatttcagcagatttggtcgtatcttcaccaccctatttgatgtcatgggactatggcctatatcataaatttagattctattggctagactttaatcttgacgaatatgaagataccgaaattggaagacatcttcgtagacaaaatgatgatatcgaaagatataaactagatatgacagatatattttccagactatcaaaatccgttaaaaatagtggacgaattgcattgataaatgcaccttccatagtacatggtcaacttgttgatacaaatgagattctttccgaatgcgccaatgaagtcggttggaaaatggatgaatgtgttgagtcaatagatatacccggccctcatcacggtatgtatggaagcctagaaaaaagaaatgttatggcaccgggtaaagccggaaaaaaagagcatgtgttaatattctcgaagagaatataa

SEQ ID NO: 226126 - DNA, 1329 bp, Klebsiella pneumoniae
atgaaagatatttttgaaataactagaataccagaatcaccattatataatggtatttatatctttaataaaatcccaaaaaatgatcttattgggaacagtcatggacaccacaaatacccagcaaaattcatacctcaattccctaaatgggcattaggtaggaaacagcaaatccataatcttactgttcttgatcctttctgcggttcaggtacaacattaattgagtcaggcatggtaggagcaacctcaattggtttagacattagtgatgtagcgatcactatatcaaaagccaaaactaccatattgcaagagaataatgtcaatggatacattgatcgtgtgaatgatattatttctttagctgataagaaatacttaaacattaaaaatgattttgacaactcattttttaaagaatgccataatatggataaaacctggagcacatggtttaattctgagtctatatcaaaaatcgtggctattcgatatgcaatccaagagtcaaatgatgttgaactttactatatttatctctcagtattatcatctatcgtaaaaaaatgttcctatttagatgaaaatcaagtaaaagttaagaaaatttatgaaaaggatattcctgaagtttataaaacatacactgacaactttgaaacttttataagggaacatttactaacctctcacaagtttaatgaaaatcagtcaaaatttagtatatataaagcaagcgcaactgatactaaattagaaaaaaatactgttgatttaattgtaacatcaccgccgtatatcaatgctattgattatacaatggcacataaatattctatgttcgcattgggcttaattaagccatgtgaatttaaagaccactgccgagaatatatcggtgttacagaaagagctgtaagagtttcagactacaataaagatattgagtttcctgaaaactctagcatagacagtttcataaagatgttaagagaacagagaaatacaactgcattaaatagaagttatatagtatggcagtatttcacattaatgagtgatttttttgtagaaatggaaagagttatgaagcatgatgctgaaatggtctttgtcgtgggagaaagtaataatatctgcggtattgaaattccaactgctgatttgcttgaatcactagcaattaactcagggttgcatgtaaagaataaattctaccatgtaataaataacagaagtggtatgagacttaacagaaatagttcaggcgggagtataaagagtgaaatcgtcttttgttttgggaaaaaaaagcatgtttaa

SEQ ID NO: 226127 - DNA, 249 bp, Klebsiella pneumoniae
atggcctctcagagcgcccagaatgccaaaagagcgcgcgatctacagaagactatggattcgcagcaaaaacgcctacagagcgttacagagccttttaaaggactttcccgggagcagatgacccatattctgacgatggcgcagacgttccagcaacagaatcacgatcgtgaaaaacagcgccagcttgaacgggagcaggaacgccagcaacgtcagaaaactgacagaggtattagccgatga

SEQ ID NO: 226128 - DNA, 225 bp, Klebsiella pneumoniae
atgcgcttacattcaaaaagcaacctcttgttaaccctccagaaaaagaaattccgtactgacatacctgagggcgaattactcatcgcccttatgatttattctaaggtagtaatccaatatttctttacgcccttgttcataacttgtttcgccagagataatcctcgttttcaaacattcataacgaggtactccactaggatccattccctcaagtcttag

SEQ ID NO: 226129 - DNA, 711 bp, Klebsiella pneumoniae
atgttatattggaaaaaaatgccatcactctggatcggtaatagactgacagagtttaatagtttagagacttcacatgccattgccgccataaagatatatataactttttgtctctttggaaaagaagaggatgatggagtgcgaaccgtaaaacttacgtttacagaaataagcgaaatagcttctatcagccgatctttggtaaatgaaggtctcaaattgctcgataataaaaaactaattaaatacctatcgcccgcgtcaaaaagaaagaaaatctatacagtggatgttgatgggtgcattcatgacggatggtgtaagctgcctatggcaggcatcgttagcgaagacaggacaatcagcgccttccagtcaatgcataatagataccattttgagcttgtagcgcttcagctatatttataccttctatatgccagagataacttccaggagcatgtgttagctagaaaacaaactatttgcgaaaagcttgcttgccgcaatgtagatttaaataaagcaataacatatttaatacacataggtcttttaaaaggaattaaacaaaaggcagtggagtcttatcccatagagctttttcatgattcattttatttttatgtaaaaacaggagcaagcaatgcgcttacattcaaaaagcaacctcttgttaaccctccagaaaaagaaattccgtactga

SEQ ID NO: 226130 - DNA, 600 bp, Klebsiella pneumoniae; identical to SEQ ID NO: 35542

SEQ ID NO: 226131 - DNA, 1023 bp, Klebsiella pneumoniae
atgcgctatatatgttttatctttatgctttttttctccatcacaagcgctgcagaagaaaagtttctactaggagctggtgttcacccttctaaatactctcttacacctcagcaattagttagcttattagtaaaatataaaatcaaagtgatacgatatgattatccttggtcacaagttgaattaattaaaggccaatacacccctccaaactataagttggatgagctggtgaaggttgccaacgataatggtattaaggtaattttaatattaaactatagaaataagttatatgggaatggtaaacctgttactcatcaagaacaagttgctttttctaaatatgcagcttgggttgcaaatagatttaaagatttaaacgttatttatgaaatttggaatgaatggccttatttagaggatgaaagattaggaccgccatttagcaaagaatcagcaatagcatatgttgagttagttaaaaacgcttcactagctatacatgacgctgtaccaaacgcatatattatagcgggaagttataaccctttaaatgatagatttgatggatggtctgaagaaataatcaaagcaggaatctttaattatatcaatgcactttctgtacatccttattcatatcaaaaattaaaattttcggatccaaattatggaatagccgttctagataaactacatagcaagataaaaaggatgataaatagagatgttcaattttacgtaacagagttcggtttccctgattatcaggcaagcaataatctgacgaaaattcaacgattcaattttactaaacaatatatcctaaaagctaaagagcgtggttatatcttagggttggtatggtatgatctcataaatgatggtaatgatagtagtgttaaggaacataattttggtcttttagattcatcattaaatgaaagggaaaatatgagtggattttccgccgcagagaaatccttgttaaataataataaggtaaatgaccaatga

SEQ ID NO: 226132 - DNA, 1443 bp, Klebsiella pneumoniae
atgaatttactttctaacgctaaatggaatgccttctcgcaattttttaagatttgtgtacaactagttaacgttatttatctcgcaaaaatcattcctccttcggaatatggtttaatggctatggccttagttattattaacttaggtatgctgttgagagacttaggtacttcttcagcaatcataagacaaaaagaacttactaatgacttgattaacactgttttttgggtcaatgttttgatgggctgtatatttgcacttctggtcattttgggatcgcctgttatatcagagatatataaacaaccaagattgatagaagtactgatcagcatgagtattatctttccactttcgagtagtgctagtgcccatttggcattattgcaacgagaatcaaagttcaaagtcatttcatttattgagatattctcgtctacagtttcagtaattttggcgttaattacggctaagatgggctttggtgtctatagcttagtaatacaagctgtttcattaaatttaatctcagcgattcagttttggatttgttctaaatggcatccctctttctcaaaaataatagtatatcatgagttaaagaaaatttttgggtttagtgcaaacgtttcattatttaatattattaactactttgctaggaatgctgatagttttattataggtcgatatatgtcgattgtggtgttgggaagttataatttggcatataggattatgttgtttccattgcaaagcctaacctttgtagcaactaggtctttgtatcccgtacttagtcatcaccaagatgataataaaaaaattgcgtcaatatacttgaattgtacattttttgttctttttctttcagcgccattaatgtctggaatagcagttttaagcgttccatttgtaaattgggtttttggcccacaatggcatattactgcaaatatactaacttggttagcccctattggcattatgcaatctgttctaagcactactggttctgttttcatggcaaaaaacaaaacaagaactcttctatatttaggcatattcggtacattacttcagttgacgtcattcatcattggagccaaattagacattgtcagcttcgttaaactctacttcattgctaatgttattaatttttttcctgcaatgtattttgtttttaaaattcttgattcaagtattgttgttttccttaagaaaattctcccaattatactttcaactttattaatggtgtcagccatttatatatatctacaaagtttagttgcgagaagtgacgtatttatagttttgacttcaacatgtattggtgtggttgtgtatttcttggctagttttttttcgtcatctgatatcagagaattaatcataaagaagatttcaaaaaaacagcatcaatcgttttaa

SEQ ID NO: 226133 - DNA, 564 bp, Klebsiella pneumoniae
atgtcaagcagtgactttttcattaaatcaataaaatataggtctttttttgttcagccatgcatgtacgtgtttaaaaaatatttatttgaaggaaatgaattcattcctaatattctacatgaggataatctattcaccataggattgctactgaataaagatgtaaatgtattttgtataaatgataaaatttaccaaagacgtatccgcagtaattctataatgacatccgcgcactcagaaaaaaacgccgatggatatctttattctgttaagaatatttattacagatattatgacaaagctggatcatcgagtaaatttaaagcgctccgtttttttatattaaaactgataaaatgtggctacgtcattagtgatgagattaattctaattatcataaaacagagcttgcaaagatatataatcaactgaatcctaattggattgagagatggagatttaattctggttccgtatataggatagccagatttataaaggtaagatattattatctcagtggtaggtttttatcactaactaggtttttaaaatga

SEQ ID NO: 226134 - DNA, 243 bp, Klebsiella pneumoniae
atggatccaatggacaaaatttgtgacggatgcggcttacctggtagcgcttgcacttgcagctactgtagtgagtgtaatcagaaagaggtggattgtgtctgcgagcgttgtaatgactgtgaaaaattagtggatgagtgtatctgcgagcgctgcgacgagtgtggagaaaagatagatgagtgtgtatgtgatgactgtgaaaaatgcggaaacagaccgcatgagtgcacctgctaa

SEQ ID NO: 226135 - DNA, 192 bp, Klebsiella pneumoniae
atgacgaaacaacagaaaacagcgctgaacatggctaaattcatccagcatcagtctctgctcctgctggagaagcttaacgagcttgatcttgatgctgaggctgacctttgtgagaaactccacgatgatgcggagcatcttttccgtacactgtcctcgagactggatgcattacaggatggtaactga

SEQ ID NO: 226136 - DNA, 402 bp, Klebsiella pneumoniae
atggccagagtgtctattagtgaggctgcccgactgacgggtaagagtagaacaacactgcacaggttaattaaagcaggtgagctgtccatctgtagcggtgaacgcaatgcaaaaatggtagatacttcagagcttttgcgtgtctttggtccctttcagcaaccgaatggtgaacaccattctggacaggtctctgaacaacgtgatacagcctctgctgaccagagtgaacaggtgattcgtcatctgaaacaggagattgaacacctgaataccttacttttgtccaaggattcgcacattgacagcctgaagcaggccatgctccttcttgaaaatcaccagccaaaattaactgaatccccggcgccatggtggaaattctggaaaaaatcctga

SEQ ID NO: 226137 - DNA, 213 bp, Klebsiella pneumoniae
gtggattacgaccagggcggggataaccacggctggaagctgacgctgtcgcagaacatcgccatcggcatggggccggagttccgcccgatgctgcgcttctacgtcaccggcggccaggtggataacgagcacaccgcgaaggtaaacggcacccaggaccagcagctggattcgctgaacgtcggtgggatgtttgaggcgtggttctga

SEQ ID NO: 226138 - DNA, 1815 bp, Klebsiella pneumoniae
  misc_feature (1781)..(1790): n is a, c, g, or t
atgtctactggaacaaagaaagaaaacgtacaggctggcgatgaaatagatttaaggaagttaattggtgatatcatagatcacaggaaattaattatcacattaacatctttattcttatttctttctataacatattcaatgtttgccactccaatttatcgagctgatgcattggtacaagtcgagcaaaaacagggtaatgcaattttaaattccctaagccaaatgttacctgacggtagacttcaatccacgcctgaaatagtacttttacagtcgcgtatgattttaggtaaaaccattgatgacttgaatttacaagctgaaataaaaaataaatatctaccgattattggtaaaggatgggcgagactaacctcacaaccaaaaccatcaataacattggggtattttaaatttacaggcgaaacatcagaaaatattccggtatttgatatcaaaataattgatgataaaacatactcaattaatttcaacggagttgagtatgaaggtttagtagataaattattagatacaaaccagtttgctattttaataaaacaattaaatggaaaaaaaggagatgaatttaccttaagctatataaacaaacaggacattttagacgcattgcagaaaaatttagttgttcaagatgaagggaaagattctggaatgctgactcttagtctgacaggtgaagaccctattcagattaagaacatacttgatagtataacgcaaaattatttagcgcaaaacattgctaggcaagcggcacaagatgctaaaagcttggaatttcttaatgttcaacttccaaaggtgcggaacgatttagattctgccgaagacaaacttaactcctatcgaaggaaaaaagattctgttgatctttcaatggaagctaaatcagtgctagatcagattgtcaatgttgacaatcaattaaatgagttaacatttaaggaatcagagatttcacagttatatacaaaagagcatccaacttataaagctctgatcgagaaaaaacaagttttagaacaagagaaaaacaagttaaacaaaaaagtatcagctatgcctgaaactcagcaagaagttctaagattgaacagagatgttgaatcagggcaggctgtatatatgcaacttcttaacagacaacaagagcttaatattgctaaatcaagtgcgattggcaatgtgagaattattgatacagcgcaaacgagttcaattccggttaaaccgcagaaactattgattgttcttgtcggtttgattgctggtttgattatttctataacaacagtgttaattaaagtctttcttaatagaggcattgaatctccagagcaactagaagatgttggtatcaatgtatatgcaagcatccctatttcagaatgggcatcaaagaaaaactctcaacagaataaaaaatggcaaaaaagcaacaagcaatctgatgataacactttattagctattagcaatccagctgatattgctatagaatctatacgcggtttacggacaagcttgcattttgctatgatggaatcaagaaataatgttcttatgatttcaggagcgagcccaaacgcaggtaaaacctttattagtagtaacctcgctgcaatcattgcgcaggctggaaaaaaagtattatacattgatgcggatatgcgaaaaggttacattcataatatatttaataaatcaaatgaaaacggactctctgattatctatctggaaaaataagttnnnnnnnnnnaaaatattccagaagtgaaatttga

SEQ ID NO: 226139 - DNA, 984 bp, Klebsiella pneumoniae; identical to SEQ ID NO: 210810

SEQ ID NO: 226140 - DNA, 930 bp, Klebsiella pneumoniae
atgccatcgcccggcggcgctgcgcttaccgggcctacagacagtcggagccggacgagtaggccgggtaaggcgcagccgccacccggcataaacgcagctccgtgcctgatgccatcgcccggcggcgctgcgcttaccgggcctacagacagtcggagccggacgagtaggccgggtaaggcgcagccgccacccggcataaacgcagctccgtgcctgatgccatcgcccggcggcgctgcgcttaccgggcctacagacagtcggagccggacgagtaggccgggtaaggcgcagccgccacccggcaataaagcggctccgtgcctgatggcatcgcccggtggtgctgcgcttaccgggcctacgaggtgtgagcctgtgagaggccccggtaggccgggtaaggtgccagccgccacccggcaaaataacggcgcaaccggaaatgtccctgcccgcgctgcgcttagcagggctacagcttctatgttacttccgggccgattgcgctcccggttaattgtctgcgttatggcagtcatggtgcagggagcgcacagggggcggccagtcgccgccgccccctgtacccccgggctccggccagcaacatcgccgctgcgcggtcccttcgacttatccctgcaggcttcgggtcgggccgaggcagcgtccctgcaaaacacggccctcagcccgcatccatgcgggctgccccggccttccgggaacgtctcagcgatgttgaggccgccagcaccggcagtttcagcagcccctgcgccagcggtgatttggggttgtaggccgggtaaggcgcagccgccatccggcataaacgcagctccgtgcctgatgccatcgcccggcggcgcagtccaagttgcttgccgggcctacagacagtcggagccggacgagtag

SEQ ID NO: 226141 - DNA, 408 bp, Klebsiella pneumoniae; identical to SEQ ID NO: 211729

SEQ ID NO: 226142 - DNA, 546 bp, Klebsiella pneumoniae; identical to SEQ ID NO: 213358

SEQ ID NO: 226143 - DNA, 2967 bp, Klebsiella pneumoniae; identical to SEQ ID NO: 59353

SEQ ID NO: 226144 - DNA, 780 bp, Klebsiella pneumoniae; identical to SEQ ID NO: 15299

SEQ ID NO: 226145 - DNA, 729 bp, Klebsiella pneumoniae; identical to SEQ ID NO: 214752

SEQ ID NO: 226146 - DNA, 771 bp, Klebsiella pneumoniae; identical to SEQ ID NO: 153772

SEQ ID NO: 226147 - DNA, 909 bp, Klebsiella pneumoniae; identical to SEQ ID NO: 213149

SEQ ID NO: 226148 - DNA, 3006 bp, Klebsiella pneumoniae; identical to SEQ ID NO: 152274

SEQ ID NO: 226149 - DNA, 933 bp, Klebsiella pneumoniae
atgttattatcaataatcataccatgttataactgtgagtcaaatatcgaaaaattgcttctctcaataaaagagcagcttaatgaaaccgtacaactagtgttgattaatgatggctcatgggacgcaacgcatgacataataactaaatttacaagtgacaacccctctataaaaataaaatacattaatagtattaatcagggggcggcaaaagccagatcaacgggcttaaattacgcagagggagattatgtattcttctgtgattcagatgatatgatttctgctaatttcatatcggtttttacagagttaagtaatgataaaccggatatgatatatttttgctctacggtattagattcgcaaggaaacaggtttaaaaaggtacattttccattagcatacatcgaaagcaatagtaacgaagtttttaattatcttttgaagaaagggctgtggacagctgctgtatggacttatattttccggaaagatctcgtattgaaatctggcgctatatttacagacagaaaggtacatgaagatcacttattcacgctgagacttctcgctggtagtgaaaaaatatcaatatgtaattctgagctttactttcagaatgtgacttcaggttcacttactaaatcccctaaaaaaattgattatttaactgagcgttataagtcttataaagaggctagggaagatatcatatacaaattcagtcaggaaagcattgttctttatgatcgatggtctatgtcttcgctactgcaaatattaacagaaaataaaaaaatggtgtttcaggggataatgcatacagctatatatcgagtattgtggaaggaaaaattagtgattttagattttgttaaaagcaaagttaaaaaaaaaatcacgagatctaagagcctatcccaatag

SEQ ID NO: 226150 - DNA, 1467 bp, Klebsiella pneumoniae
atgaatttaaaatcgaaaacaatacatgctgtgaagtggaatttgttgtctacagtgtgcgtcaccgggcttggtatggtctcactgtggatcttgtccagcttatttacaacgacagattatggtatcattagtgcggcattaatattaagtactgttttctcaatcataactgattttggtatatcaaactcagttataagatctgaaaagttaaataaatatgaactgtcttcactgtatataataaatgtctttttaggtatgatattttgtctcggcttgtttatttttagtgctcagttagcatccttattcaatggtggaacagaactggcaaaacagataaaaatcatgtcattttctcttataatatcgtctttcggtggacagccaagagctttgttagccagagaacttagatttgatgtaatatccaagataacaatccagtcagctatttttaattttgtgttcgctgtcttcttaagctatgtctatcgttccccctggtgtgttgccgtttcactgttggtttcctcatctattagtagcgtattgtatatatattcaagcaaaggcttgagagatattaagttacagttctttactttgaaggaaataaaaaaacatgtcagctacggttctcagttggtcatggactctatcattaatcagatcagtgtgaatacatatcctgtactaatggcacgcttaataagtttgactgctatcggtggatataatatatcctacaacattagcgtggcgctttttgaaaaattgaatcctgttttatcacatgcgttatttccagctttttccaagatacaaaatgatgcagtatctctgaaaaaaacttttctaaaagtaactatgttttcgtctttggtgaatttccccatgttattgggaatgatgttaatttcagactatgtagtgactgttttttttgagcagaaatggcagttcatcacccctattgtacagattttatgtttggttggggcggcgcgatcccttgatgtgccagttatctctgtcttgcttgctaaagggcaaatgtacagaaatgtttacctgggagtatttaagttagcgcttggtattcctttaacatggtttctgggtaaacaatatggtcttacagggatagtgttttcattcttatgtattcaaatagtaaattttgttatgggatattttttccaggttagaccctgtttaaatatcaaagtaaagagttacatctatgccgtcttcgtaccgcttatacacactttacctatgcttgtaacgggttacctgttgattctttttttaactattacctctcctattttgtcaatggttgtgattattttttcatgtatgtctgtatacattgcttctatactcacctctccagtaaaagagataaaggaatttaacgcaatcgttctaaacaatatactgaggaatagatga

SEQ ID NO: 226151 - DNA, 828 bp, Klebsiella pneumoniae
atgatatcagttaatttaactacaatgcattctcgactggatttatgtgccgccacagtgtggtcaattataaaccagagtgttcagccagataaaataaacctttggatatcaaatgaaccatatttgtcagatcatgggatatatgagatacctgcttgggttgaagagctaaataaaataaataacatagtgaatgtacattatgtaaaaaataccggcccataccgtaaaataattaacgcaattattaactcagagattgatgacattcttgtatatgctgatgatgatgtaatatatggtcggcagtggcttgagttcctattaggccagttttatgagaacaactgtaatgtggcaattgctgctagaattagaataatggagaggaatatttttaacaagtacaaatcttatagctcttattctattagtatgaaaaaggataaatttgaaaaagattttataataactggcgttgggggttgtgttttaagcaagagaatgattaagcctagcattatcggagatgatgcatatttaattatttcacctaagacagatgatatctggattagtaaaatgttagaggcttccaatacgaaggtcgagtcatccccagatgcactgcgatgtgttcatgaaatattacatggctataacacacttagctcaataaatacattaacatctaaaaataacggtttaattataaaggcaatcaggatggttaaaaacaaattctattcatattttgggttgcaaaaaacaaacaatgacaaatccatcaagatggttaatttgcattttaatggtaaattataa

SEQ ID NO: 226152 - DNA, 819 bp, Klebsiella pneumoniae
atgggcgtgtcgcgtgcgcagctgtcactgcggattaagcgctctgccgactggcaggacaggcgctgtcaccggcgtaatgacgacgcagacgctgaaatcctgtcggctatcctcgatatcatcagcgacatgcccagctacggctatcggcgcgtgtggggtatcctgcgtaaacgacgttgcgcagaagagctgccaccggtaaatgccaaacggctttacaggataatgcatgagcatcaaatgttgttgcatgacaaatcagcgcggccaaagcgtgagcataagggcaaaatcgcggtggtagaaagcgatatgcgctggtgttcagacggcttcgagttcaactgcgacaacggcgaaaaactgcgggtaacgttcgcgctggactgctgcgaccgtgaggccatagactgggcagcaagcacgggaggctatgacagttcgaccgtgcaggatgtgatgctgaggtcggtggaaaagcgcttcggtgacaggttaccggacacaccggtgcagtggctgacggacaacggttcagcgtatacggcgcatgaaacgcggaggttcgccgtagagctgaatctggagccctgcacaacagcggtgagcagcccacagagcaatggcatggctgaacggttcgtgaaaacgatgaaggaagattacatcgcgttcatgcccaaaccggatgtgagaacagcgctacagagccttgcagcggcgttcaatcactataatgaaaaccacccgcatagtgcgctgggataccactctccgagggaatatcggcggcagcgggcatcgttaacttaa

SEQ ID NO: 226153 - DNA, 876 bp, Klebsiella pneumoniae
atgcttgatagttgtataaaaaaagaaagtagtttaactgtgaaaaaagttgcgacatgttttatcattttagttatcggtgttgcaggcagttttataatgtcaaaagtacttcctgtctggctatatggggaatcattatcgagagccgagttaaccgcagatatcggtggaaagatgaaatggttcataaatgaatcactaataaacgctgtaaataactataacatacaaccagtaaaaatatattcttggttctcctcgcttgcaattttaatcggcttatacactatttttgtgggaaaatcaggcagatggaaaacgttcatagtcatagcgatcgggataggttcctacgctccaaatttagcgacaaaagagaattgggcagcattccgctcgttagtggccttagaacttattatatcaactctatttcttattggcataaatagccttgtcagtagaatttttaagcaagcatttgtctggcctcttatcgctttaacaattatgataatagctcagtataatattataaatggatttattattcctcagcgctctgaaattcaggcacttgctgcggaaataactaataaaatacctaagaattacacaggaaaattaatgttcgatctcacagatcctgcttacaatgcctttacaaaaacacagagatatgatgagtttgggaatatttcattagcagcgccctgggcgctcaaaggtatggctgaagagatcagaattatgaaaggatttaatttcaaactatctaacaacgttataatttctgaggccaatcgatgtattgatgattgtatggttatcaaaacgtcagatgcaatgcgaaggtcaacgataaattattag

SEQ ID NO: 226154 - DNA, 1209 bp, Klebsiella pneumoniae; identical to SEQ ID NO: 214343

SEQ ID NO: 226155 - DNA, 1893 bp, Klebsiella pneumoniae
atgatgatctcatatcaggaacttgttcgcaccttccctagtgcttttcttaatgctgcaattatcaaacctctgcatgtcggcaaagctaattcttgtaatgaaattggttgtccaggagatgacagtggcgataatatttcctttaagaatccgttttattgcgaactaactgcgcattattgggtttggaaaaacgaagagctggcagactatgtcggtttcatgcactatcgccgtcatcttaatttttccgaaaaacaaactttttctgaggatacctggggggtcgtgaaccacccatgcattgatgaagaatatgagaagatctttggattaaacgaagaaacaattcaacggtgtgtcgaaggtattgacatcttgctgccaaaaaaatggtctgtcactgcggcgggaagtaaaaataattacgatcactatgaacgaggtgaatacttacacattcgtgattatcaggctgccattgccatcgttgaaaaactatatccagagtatagcacggcaataaaaacgtttaatgatgccagtgatggctattacacaaatatgtttgtcatgcgcaaagatatttttgttgactattctgagtggctcttttccattctggataatctcgaagatgccatctcgatgaacaattataatgcccaggaaaaacgcgttattgggcatatagctgaacggctgtttaatatttacataattaagctgcaacaagatggtgagcttaaggtaaaagaattacagcgtacctttgtcagcaatgaaacattcaatggtgcactgaatccagtttttgattctgcggttccagtggttatcagtttcgatgataattacgcaatcagcggtggcgcattaattaattccattatccgacatgcggacaaaaataaaaattatgatatcgtcgtactcgaaaacaaagttagctatttgaataaaacgcggttggtaaatctaacctctgctcatccgaatatttctcttcgtttttttgacgttaatgccttcactgaaattaacggtgtgcatacccgagcgcattttagcgcgtcaacgtatgctcgtctttttattcctcaactgttcagacgatacgataaagtcgtatttattgattcggataccgttgtaaaggctgacctgggtgaactgcttgatatccctctgggcaataatttagttgcagcggttaaggatatcgtcatggaaggttttgtaaaattttctgcaatgtcggcatcagatgatggcgttatgccggcaggcgaatatttacagaaaaccttaaacatgaataaccctgatgaatattttcaggcagggattattgtttttaatgtcaaacaaatggtcgaagaaaatacttttgctgaattgatgcggatattaaaggcaaagaaatactggttcctcgaccaggatatcatgaataaagtattctactctcgagtcacatttctgccattagagtggaacgtttatcatggtaatggcaacacggatgatttcttccctaatcttaagtttgcaacgtatatgaaatttttagcagctcgcaagaagcctaaaatgattcattatgcgggtgagaacaaaccatggaataccgaaaaagtcgatttttatgacgactttattgagaacatcgttaacactccatgggagatggaaatctataaacgtcagatgtcgttagcggcttcgattggtttaacccatagcgagccgcaacaacaaatcttgttccagaccaaaatcaagaacgtactgatgccttatgttaataaatatgcaccaataggcacgtcaagaagaaacatgatgactaaatattattacaaagtacgccgtgctattcttggataa

SEQ ID NO: 226156 - DNA, 1521 bp, Klebsiella pneumoniae; identical to SEQ ID NO: 221211

SEQ ID NO: 226157 - DNA, 918 bp, Klebsiella pneumoniae
atggatgattttatttcagtcgttataccaacctataatagttcaagatatatagttgatactattttgagtatttcagactattatccagaagaaaagttagatgtaatcttagtagatgattgttctgaggatattcaagatttaaaacaactaataactcaatttgactttgtaagagtctgtgaaaaaacaaagaaaacgaatgcagctgattccagaaatattggtataaaggaagctaagtataattacatttttttattagattcagatgatctttatactgatggttacttgaaacatagagttgcattaatgaattcttcattttctggttcaatattttttggcgcttttattgaagtgagcgaaaataaagaagaaaaattaatttgcaatacatataatggtgaggacataagagattatattttccttaaaaaaggagatttcagaacttcaactatctcaataaataagtcgcgatttaaaccgacaatgtttgaccctctgcaatttaaacatcaagattggggctttggtattagagcatatgataataaagaaaatatcatctttgatgaacagccatttgttaaaatatgctcaggacggcataggcaaatgagttcgagaatgaatatagatgcaagtgattattttttgagaaattatctcattgatgtaaaatatcgtctttattttatccggattcattatgtgaactctattatacagagggataaaaaagcattaatattctttgatgggatactgaaagattgtgcactatcgacgcgcgataaatttagatactttattttaaaaaaaatgcatagcaaaattttattttcagtttcccccatgttgcttcaatatcttaaaaataaaccaacttttctaattaaggaataa

SEQ ID NO: 226158 - DNA, 660 bp, Klebsiella pneumoniae
ttgataccaaaaattattcattgtatatggcttggtggtagagagttaccggcacttgaaaaaaaatgtattgaatcttggtcgatttataacccagattataaaataataatttgggatgagaaaaacttagtgatagatgatcccgaatataagagcgcatatctaaaaaaacaatgggcatactgtgcagatcttgcaagaatgagattactttacgaatacggtggaatttatttagatacagatatggaagctattgcatcatttgataatctgctaaaatattctttttttgcaggtaaagaagatgatgaaatgattaatggagccatactaggtgctgaaaaggggcatgaatttgtattttctatttatgaagaagttaaaaagtcactacgcactaactttattcctattccaagaataatcacctatatctatcaaaaaaatacaaaccttaaagatattaagattttcgaaaaagaagttttttatcctttcaatccatatgcatcaccgataaaacaattgttatataaggatatacaaaaaaacactgtggctatacatcactggagtaagtcatggaacccatcgtttattcaaaaatgctatagaagattaaagcgaattctttctaaaagtaaatactattaa

SEQ ID NO: 226159 - DNA, 555 bp, Klebsiella pneumoniae
atgattgcaatactattttctctggataggactataaatttcaaaaaactaatctatatattgctaataccaattgcaggcttagcagtttttgcaatttttcaggagaggctgtcgcatgatggttatacatcatatgaacaaattgatagatttaggtttttacttgagtttttatcctcaacatcaaattggccatggtggaggtttgttattggagcggaacctttaactcccttaacacccttatcgtgttataacttgtcatcatatgtcgatttattttcatattctggagatggaacttgctattcggtaatattacattcctttttattacgtgttatatatgatcatggattattaggatttatgtttctaatgggagtcgttaccatttatttgaataaattctcccttaaggcaaaaatatgtatattgttaatcatcatatccacagctttatctgtatcttccttaaataatgtttatgtcgcacttgccataattatgtatattggcattgatgaaaaatatatagaaatgaaaaagtaa

SEQ ID NO: 226160 - DNA, 267 bp, Klebsiella pneumoniae; identical to SEQ ID NO: 214999

SEQ ID NO: 226161 - DNA, 981 bp, Klebsiella pneumoniae; identical to SEQ ID NO: 214345

SEQ ID NO: 226162 - DNA, 210 bp, Klebsiella pneumoniae; identical to SEQ ID NO: 214998

SEQ ID NO: 226163 - DNA, 924 bp, Klebsiella pneumoniae
gtggcaaagcaaaagttcaaaatcaccaactggcccacctacaataaagccctcatcaaccgtggctccataactttctggctggatgatgaagctattcaggcctggtatgagtcggcaacgccttcatcacggggaagacctcagcgctattctgatctcgccatcaccaccgttctggtcattaaacgcgtgttcaggttgaccctgcgggctgcacagggttttattgattccatttttacactgatgaatgttccgttgcgctgcccggattacaccagtgtcagcaagcgcgcaaagtcggttaatgtcagtttcaaaacgttcacccggggtgaaatcgcgcatctggtgattgattccaccgggctgaaggtctttggtgaaggcgaatggaaagtcaaaaaacacggccaggaacgccgtcgtatatggcgaaagttgcatctggcagttgacagcaacacacatgaaatcatctgtgcagacctgtcgctgaacaatgtgacggactcagaagccttcccgggtcttatccggcagactcacagaaaaatcagggcagcatcggcagacggcgcttacgacacccggctctgtcacgatgaactgcggcgtaagaaaatcagcgcgcttatcccgccccgaaaaggcgcgggttactggcccggtgaatatgcagaccgtaaccgtgctgttgcgaatcagcggctgaccgggagtaatgcgcggtggaaatggacaacagattataaccgtcgctcgatagcggaaacggcgatgtaccgggtaaaacagctgttcggaggttcactgacactgcgtgactacgatggtcaggttgcagaggctatggccctggtacgagcgctgaacaaaatgacgaaagcaggtatgcctgaaagcgtgcgtattgcctga

SEQ ID NO: 226164 - DNA, 504 bp, Klebsiella pneumoniae
atgccgggcaaccgtccgcattatgggcgttggcctcaacacgattttacgtcacttaaaaaactcaggccgcagtcggtaacctcgcgcgtacagccgggcagtgacgtcatcgtctgcgcggaaatggacgaacagtggggctacgtcggggctaaatcgcgccagcgctggctgttttacgcgtatgacaggctccggaagacggttgttgcgcacgtattcggtgaacgcactatggcgacgctggggcgtcttatgagcctgctgtcaccctttgacgtggtgatatggatgacggatggctggccgctgtatgaatcacgcctgaagggaaagctgcacgttatcagcaagcgttacactcagcgcattgagcgacataacctgaatctgagacaacatctggcaaggctgggacggaagtcactgtcgttctcaaaatcggtggagctgcatgacaaggtcatcgggcattatctgaacataaaacactatcaataa

SEQ ID NO: 226165 - DNA, 525 bp, Klebsiella pneumoniae
ttgcctaacccggccccggaatcgttaccgcccgtaccgggaacgccgatcccggaggaacagggaccaaatattgaaacattgcccatcgaagaccgggatttcgatgactttattattgttgacccgatgggggttgtcccggcaatctatgtgtattttaagaaagcccctgtggaagagtatgaggttgactattatgaaaattttgaaggccgttcaaggcagggaaaatatcaagtcgatcatattccatctagagatgcggttcgtgtatatttagaggatttatatcctgatgagggaagtaaatatatagataagatggttgataaggttgcttcagttgctattccaatagctgttcatcaaaaatgtagtgaaacctatggcgggcgtaataatcgtaaggtagagacagaaagcggcgagatgataactaaaaaagagctagatgctcgtgacttagaagctgccgtcaatgccaactgggatgcgaatgctgaatgccttaagaatgaatag

SEQ ID NO: 226166 - DNA, 555 bp, Klebsiella pneumoniae
atgacaaaattagcacagatggctggtatagaagcccacagggttagttttgatatgacatccttagcacctattgtattttcatatgcgcaaaaaaatcataaaaaaattgctataattggaagtgatagtgattcaaataaaaaagctataagtatagtattagaaaaatatccgaatttgcttctcgttaaaacaaggcatgggtattttaaagatgaaaaagagcgttctcaatttgtacaagagttagtagagttagaacctgatatagttattgttggcatggggacgcctgctcaagatatttttttaaatgacatgtttctgaccaaatggtctggtgtggcttttacatgtggtggttttttacaccaaacagcaaagaatggtagcacttattatcctgaattttttaacaaatataatttaaggtggctgtatagaatgattgacgaacctaaactagtatcaagatatttgtttggttatccaaagtcgatactattttatttggtcgatttgttgcgtttcaaatttatgaaaaaattttaa

SEQ ID NO: 226167 - DNA, 396 bp, Klebsiella pneumoniae; identical to SEQ ID NO: 100678

SEQ ID NO: 226168 - DNA, 3111 bp, Klebsiella pneumoniae; identical to SEQ ID NO: 209778

SEQ ID NO: 226169 - DNA, 294 bp, Klebsiella pneumoniae; identical to SEQ ID NO: 224037

SEQ ID NO: 226170 - DNA, 735 bp, Klebsiella pneumoniae; identical to SEQ ID NO: 4868

SEQ ID NO: 226171 - DNA, 9621 bp, Klebsiella pneumoniae
atggataatacctctggagattttccatgtaataagatggacacgcgtaagcagttaccgctaacaccaagtcaacaggggtttttattccattccttaaaggataagaaaaggagtaactaccatgagcattttacatgcattttttctcagcatgtagatagcgcccacttcaagtgggcgctggaaacgttatttcgaaagcatgagtgttttcgcactgattataactgggagattgatgagcgcccttgtcaggtggtgaagaccgatgtgttgccggatatatatgtgttagactgtgagcaagaggaaatacgttttctactagctaatgatgacattatcattcctgtcccgcaggatgacggtattgatgctataattcctcaactgctacaggctgatttaaaatacccattttccttgaaaacgatcccagtccgggcctaccttattcagtcaacgaaagaaagtgcttttatactatcataccatcatattgtgatggatggctggagcttatcccttttcattaaacagttgctccaactctatggagcggctgtggtcagtggtgtgagggatgatagcgccattatcccctcatctctgaaaccccttgtagacacactgtcggcccgacgtcacacctttcagcacgactattgggctgcatatcttcgggagggaacaccaacttgtatcgtgccgctgtcacaatatcacacagatactgaagccgagaacaattcttacgttaatcaaacaaatcatgtggagatcaatttgtctccggatgtgtgtcagaaaatacagacgctatgcagcgattatcgtatcacccccgcagtaatcttctatgtggcctggggcatcctgctacaacgttggtgctatgctgacgatgtgttattcggcgcgacaatatcagggcgaaatataccaattgatggtatagaagaaacactagggctatttattaacacgttgccgctgcgtctgcgtgatgatggggcgacactgttgcaacacttacaacgtatgcaccaaacactaatagctcactacagcaatgaacatgatgccttagccagcatacaacggttggtacataaagaaggtcatgctggggatctttttaataccttagtggtgttggagaattatcccgttgatatgacattattgtcatgcgcgtcgcccgtggcaattcgccatctcagtgtacatgaacaaacgcactatccgctgaccttgaccatcactcaacagaagggattccgtttcagtattgcatatgcccttaactacctgaccaacaacatggcgcaagcgttgctgatgcacctgagttatctgcttgaacaactggtggacaatccgcagcgccccattgctgcgttggtaaacttgtccccatgccagcaggcgcaggtacttcaaccctatctggaacgcatggcatgccgggattgggatagtcaatccaacgtcatcgaacaatttcatcaagttgctgcgacttcgccagcacaggtcgcagtggttgatgaattgtgcgcgttgacctattcggagttggcagcacaagctgagcagctcgcggcttatttggtacagcagggtgttatggttggcgatactgtaggcataattagcgaacgccgggtaaacaccgtggttgccatcatcgccatcatgttgatcggggctgcttatgtgcccatcagccccgactacccagtgggtaggatgcaggaaattattgatgacagcggcttggcgctgttgctggtacatggcaaaccgctagatgcattaaacgttgcgcagagtgacctctgtgcatttcccgtcgcgccctcggtggtatttccggttatcacaccagattctcgcgcttatgtgatttattcatcggggtcgacgggtaagccaaaaggtatcgcggtggcgcaccgcggtttattgcgcctgatacaaggcgacagcccgctgaaggtggagagcggtgagacaacgctgctgacctgcccatttgagtttgatgtttcggtgtttgagatgtggtctaccttgctcaaccacggcaaactagtattactcagcaaacaggcattacttgatatcaatcacattcgccgcacgatcgctgatgaacaggtggcgcgcgcctggtttacctcatccttgtttaactcctatgtggcagaaggtgccgatttcttcggtatgttacaacacattacggtgggcggcgaagcagtatctgcgtggcatgtcaacgacgtgatgcaaaaatacccgcatctggtggtgacaaacggttatgggccgacggaaaacactatttttaccacagcatatcgtttcaacgggttgcaacccgcccgagtcccgataggatacgcggtaccgggcacctcgctctacattaccgatctccatgggcatttgttgcctatcggtgccaccggtgaactagtggcgggtggagtgggggtcgccatcggctatcagaacaacccggcgctaagtgcgacggtttttgtccctgatccttttattcccggcggtatgatgtacaaaactggcgattatgcccggttgctggatgatggctgtgttgactgttttgggcgtaaagacggtcaaattaagatcaatggacaacgaattgaaaccggagagatcgagcagcgcctgctggagtgctccggcattatcgaggcggtagtggttccttaccgcgtacgtgaaacgctgcatattgcggcagtggtctgcgtcaatgatagctatgatgaggtggaagttcgagggcaattggctgacagattgccgccattcgctattccggaatccttggtggtggtgacggagattgcaaaaagccatagtggcaaggccgacttggcgcagttgcggtatctcctgcccgcaactcagtgcaacgccgtgtccaccacgatatcagaggtgcatagtgacatggaacatgcgctgcatgctatctggcaacgcgtacttgatagacaagacattgatagcaatgcctcctttttcgccctcggtggcacctcattggataccatcagggttaaaggggatattaagcggcaacttggcttggagattgatattaccgatctctttaagtacccaacgctcacggcgttagcacattttctcgatactgccgtatcgccggaggatgcaattccaacgcgtgctgttgtctacagcgacatgccggtggcgattgtcggtatggcgggacgtttccccggtgcggcgaatattgcagcgttgtggacgctggttgtaggaggggaatcgggattaacactgttcagtgatgaagagttgcgcgcgcatggtgtgacacctgacacgcttaaacaagcgaattatataaaaaccaaagggattgttgatgatcacgaatggtttgatgcggatttctttggttatactcccaacgaggcggaatgtatggatccgcaaattcgcttattgcatcagtgctgctggcaaactctggaacacgctgggtgcgatcctgccacctttactggtgcgattggcatttatgccggactgctgacatccccccactggcttaatgcggtaatgcaagacactaccgactctaccgccctgtacaaggccagtatcctgaatatccattccgtcacagcattgattgcccatgcgcttaacctcaccggccctgccgtgacgcttgacaccgcctgctccacttcggcagtggctatccaccaggcctgcatcgcactacgtaaccgggattgcgatgcggcattggcgggcggcgtttctatcgagatgcctgcgtaccggggctatgaatatcatgaaggcatgatcaatgcgcgagatggtgtctgtcgtcctttcgatagccaagcctctggcacagtcaccggtgatggcttaggaatgctgctgctaaaacgtctggacgacgcgctggcggatcgggactgcatctatggtgtgatcaaaggttcggcggtcaataatgatggcaataacaaaatcggctataccgcgccgagtgtgatcgggcaatcaacggtaatccgcaccagtttgcgccgtgccggttttgatagcgacagtatcggattggtggaagcgcacggcaccggtacggtgctgggtgatcctattgagttacgtgcgcttaatgaggtgtttggcccaacacctgttccgttttgtgtggtttcagcgctgaaaagtaatattggccacctcaactccgctgcgggagtggcgggcgtcatcaaaacaacgctcgccctgcatcatcaagtgttgccaccaacagcgcactttcgccaactcaatcctgctatagatctatcgcgttctgcattgtacgttaaccagcaagtccaaccgtggccgtcgacgcgtcctcgtcgtgcactggtgagctccttcggcatcggcggcaccaatgccagcatcgcactagaagcacatcaacatgaggacgacccttcagcgacgggggtacgcgacagctatctgttgttgttctccgctaaaacacccgctgcgttagagttgcgcgtggcctccacactggaatatgtcaagcatggagtaggggtgcgcctgccggatgtggcttatacattgcaaactggacgcacagcctttgaccatcggcgggcttatttggtgagtcgtgggtcgaaaatcgatctctcctgtgccacgatattgcaagcggaaatcttcaatggtcagcgcacgacagcggagatctgcttcatgtttcctggtcaaggtagccaatatcacggcatggccagcgcgctctatgctcatcaacccatgtttcgccagcacatggatcgctgctttgctgcattccaacgctattcgacggtcgatctcaaggcgttgttgtttgacgatgaggatacgcgggatattgatcaaacgcagttcacacaaccggcgttgttctgtgtcgaatacagcctagcgcgcaccttgattgatctggggattacgccggacagtatgatcgggcacagtctgggcgagtatgttgcggcctgtattgctggcgtatttactcttgaggatgcgctgcacgtcattgaggcgcgcggacgtttgatgcagtccatgcgtcccggtagcatgatggcggtctaccttagtcgcgaacagttgaccccatggctagctgcagaacggggtattgaactggcagctaataatagcgcgcatttttgcgtagtcgcgggcgagcaggcggccatttcccgtttgagcacacgcttagtcgagggcgggatacagcacaggcgcctgaaaacctctcacgcattccactcggccatgatgacgccgatgctgcacgattttgcacagttgctggggcaaatcccgatgcacgcgccgcacaagcgctttatatctaatgtaagcggtacatggattactgaggagcaagctacctcgccggattactgggtgcagcaagtgcgcaacgcggtgctgtttagcgaaggtgcggcgcaactgttggtacaacccacgctgtttatcgaatgtgggccgggtaatacgctctctacctttattcaaggacataaccaatacagcgatcagccgaccctgttgacgctacgcaaagccaacgcggcgatcgatgatgagcacatgttgcatcgtacgctggcggcgctgtgggtcaggggggagaatattgattggagacgctttaaccagacggcactcggcaagcacattccattgccggattaccccttcgaacagacttattactatcgctatggtgctgcactttccggttatcgccagtatccaaatcctctgcgccgtccgcaagatgagtggctccagcgtgtgctgtggcggatgcacgacacatccttgcgggaggcgttctatgcgccgggcgaattgatcatcattattagtgctgacggcgacaagttacagcagacgctgatgagtagtggtgtcgacagcatcacaatgccgctgccgatatcgtcagaggacgacgtgtgggataatgaccgtattctgacgcatttccacgacatctgcgcacttttagcacacaaaacctaccgacagttacattgcttgtatgctcccggtgcggaggcaggatcatcgttgacacagtcgctctcgggactttatcgtgttgctcgctggtgtatgcacagcaccacgccgctggcgtccttaacagtattgacccatggtgcgtttcgcgtacaggaagaggataatcccgaaccgacgctggcagcgttgtcgggcgcagtaaacgtgtttgcccaagagctgcacccgaccgaagtacgattgatcgatatcgatgcgcagagcagtgatgagaatctgaacttgctaacccagcgtctggccccgaaacaagaaacggtaatggcgctcaggcaggggatgctttacctgcgacgctttatcccgacacggctgttggcgcacttaccccctcaaacagggtgtataccgggcaacgtactgtggattatcggcggtgaaaaggggattggccgcatgatcggcgaagcgcttgctcagcgtgagggagtccgtgtggtactgagcagccgcacaggttatcaccatgaagcggtgcagcaggacgcattagacgttatccactgcgacgtgacgcaggcggaggcggttagagcttgtctggcaactctgctcgaacgctatggacggttggatggcgtgatttttgctgccgacgctaccaccacattgacactgcatcaattgagcgaatctgcgctacgcgacacgctaacggtgaaagaacggggtactgctaatgtgctgcatgcgttagcgcaacggaatctgctggatgagcgtctgctactgctgttctgtaactcgttggctgccgtgaatgcggagattggccagacaggctatgctaccgccagcgcctatttggatgcactggcacagcaactgcgtacccgctacaaggtgaatgcgctcagtatcgggttggatgcattgcgtgagcagggcatgttgttggatgctataaacggcagtgaatacgatgtcttgcgtggactgcgcccattgatgacgggaacgttgctacaggcttataaacaacaaggggctgacaccagctactacgcgcgattatcccccgagtccgattggctgctggatgagcaccggatatccggtatcgccacgctgccgggaaccggctatctggcgctggcgtatgaagctctgcgccattactttgtgcaagaccaaatctgcattgatgaattggtctttttggcaccgttgactgtgatggacaactgcagtgttgacgtttttgttgacatttcacctaacgggcaaggagttagtgtcgaggtgaaatcaatgacggagcgctttagtggcacgttaacaacccatgccagaggcagggcgacgcgtctgatggtagacgataatgttgtgtgcgatctcacggggctgatgcgcgagatgcacactatcactcctccaacaaaggaattatcgagcacgcacttccactatgggccgcgctggcacagcgtacaacaactgtatggcaataccgcccagactcaggttttcgcaacgctggccctgcccaccgttgccgctaatgatacgatcgcactgcaccctgcgctgttggacatcgccagcagtgttgtcgaacaactgcctggttttcatactgattcggtacctttcctttatcaggatttacgcctgtaccgcccgttgccgaacaccttacatgtggcgctgactgtcaatcggcacgatgaggagggtgacagctacgctttcacgctctacgacatggcaggcgagatggttgcccgctgtgcggcaatggtgaagcgcaaggtacagctccacatacaagatgtcgatgacgacacgcgactgcgcgtgcccagtgccgataactaccaactgcggctggccgctgagggggagggggcaggaaagctagcgttgtgccctacgccgcgcttagcgctgggggattcacaagtagagattgaggtactggccaccggactgaactttaaggatgtgctgttcaccacgggattgctccggcagcagccgggtgaggctccgctgcaattgggactggagtgcgccggacgcattactcgcgtgggtaaaaatgtcactgaatttgccccgggagaggatgttatggcggtgctaaacggtggttttgtccagtacgcacgggtagaaagcgattgcgtagtgagaaaaccagcccattgtcgcatcgaacaggcggctgcgctgcctatcgcatacctcaccgcctattacgcactggtggtgcgcgctaatttgcaacccggagaacgagtattgatccacagtgcggcggggggcgttggcttggctgcgctacatattgccaaacgctgcggagcacagattttcgccacagcaggtagcgagcagaaacgcgattacttgctttcgctaggcgtacatgccgtagctgattcacacgacgaacagttcgctgccactctgctgaccgcatcggacggacaggggatggatgtgatccttaactccctcacaggccgtctgcttgacgctagcctcgcgctgctggcaccgctgggccgttttcttgagctgggcagcaaggacattgtggaagacaaagcgctaccgatgcgtttcttcgcccaaggcggcacctttattccgattaattttcacgcggcgcatggtgcgtttagtcgctacctgcaacagattgtcgcttggatagatgataacacgctaccgctccttccatgcaaatccgtaccattgcccgaggttgcacgcgccttcgccaccctgaccacgccgcagcatattggcaaggtggtggtaacgcatcgcactgcggcaggcatggaccggctgaacgccatgatagcagaaaggcgcctcggcggctatgcgctcagcatgagcaatgccgaggtgatgcgccaattgtggccgatactgaacactcgcagtccgtgggcgcaactgctgctctcacctcgggcgatcgatagattagcgcggggcaaccgggtggatcgcggtgtaccgtctgccgctaacgatacgattactcagcagacagtgaaaaagcggccccgtccggaaattggcgtgccttacagccccgcgacacgtgaagtggaacgcgtgctctgccaaatcctggaagagtatctgggtctggatagagtaggcattgacgacaactatgccgaattaggggcaacctcactcgatatggtgcaactgagtgggcaaatggcgcgtcactatccgcaagtgagcgtggtgtcgctgtacaaccacgccaccgtgcgccagctggcgacgttttgccagcccccggagggcgagtcaaatgcgccatcaccacagcctgcagtacagacgaatacgcgcgcgaatcagatagcaaaacgtgctttgcaaattgcgaaaaatactgcgcgcagtcacacgtctttgcattaa

SEQ ID NO: 226172 - DNA, 2601 bp, Klebsiella pneumoniae; identical to SEQ ID NO: 4871

SEQ ID NO: 226173 - DNA, 867 bp, Klebsiella pneumoniae; identical to SEQ ID NO: 71859

SEQ ID NO: 226174 - DNA, 249 bp, Klebsiella pneumoniae; identical to SEQ ID NO: 4873

SEQ ID NO: 226175 - DNA, 1131 bp, Klebsiella pneumoniae; identical to SEQ ID NO: 4874

SEQ ID NO: 226176 - DNA, 1269 bp, Klebsiella pneumoniae; identical to SEQ ID NO: 4875

SEQ ID NO: 226177 - DNA, 4797 bp, Klebsiella pneumoniae; identical to SEQ ID NO: 91442

SEQ ID NO: 226178 - DNA, 3033 bp, Klebsiella pneumoniae; identical to SEQ ID NO: 71854

SEQ ID NO: 226179 - DNA, 6501 bp, Klebsiella pneumoniae; identical to SEQ ID NO: 71853

SEQ ID NO: 226180 - DNA, 6465 bp, Klebsiella pneumoniae; identical to SEQ ID NO: 71852

SEQ ID NO: 226181 - DNA, 1464 bp, Klebsiella pneumoniae; identical to SEQ ID NO: 4880

SEQ ID NO: 226182 - DNA, 1440 bp, Klebsiella pneumoniae; identical to SEQ ID NO: 4881

SEQ ID NO: 226183 - DNA, 4368 bp, Klebsiella pneumoniae; identical to SEQ ID NO: 4882

SEQ ID NO: 226184 - DNA, 2460 bp, Klebsiella pneumoniae; identical to SEQ ID NO: 71848

SEQ ID NO: 226185 - DNA, 1506 bp, Klebsiella pneumoniae; identical to SEQ ID NO: 71847

SEQ ID NO: 226186 - DNA, 723 bp, Klebsiella pneumoniae; identical to SEQ ID NO: 4885

SEQ ID NO: 226187 - DNA, 513 bp, Klebsiella pneumoniae; identical to SEQ ID NO: 71845

SEQ ID NO: 226188 - DNA, 765 bp, Klebsiella pneumoniae; identical to SEQ ID NO: 71844

SEQ ID NO: 226189 - DNA, 1740 bp, Klebsiella pneumoniae; identical to SEQ ID NO: 71843

SEQ ID NO: 226190 - DNA, 306 bp, Klebsiella pneumoniae; identical to SEQ ID NO: 71842

SEQ ID NO: 226191 - DNA, 303 bp, Klebsiella pneumoniae; identical to SEQ ID NO: 71841

SEQ ID NO: 226192 - DNA, 1026 bp, Klebsiella pneumoniae; identical to SEQ ID NO: 71839

SEQ ID NO: 226193 - DNA, 321 bp, Klebsiella pneumoniae; identical to SEQ ID NO: 71838

SEQ ID NO: 226194 - DNA, 957 bp, Klebsiella pneumoniae; identical to SEQ ID NO: 135621

SEQ ID NO: 226195 - DNA, 792 bp, Klebsiella pneumoniae; identical to SEQ ID NO: 135622

SEQ ID NO: 226196 - DNA, 213 bp, Klebsiella pneumoniae; identical to SEQ ID NO: 92510

SEQ ID NO: 226197 - DNA, 1224 bp, Klebsiella pneumoniae; identical to SEQ ID NO: 74993

SEQ ID NO: 226198 - DNA, 207 bp, Klebsiella pneumoniae; identical to SEQ ID NO: 74992

SEQ ID NO: 226199 - DNA, 1650 bp, Klebsiella pneumoniae; identical to SEQ ID NO: 74991

SEQ ID NO: 226200 - DNA, 1131 bp, Klebsiella pneumoniae; identical to SEQ ID NO: 74990

SEQ ID NO: 226201 - DNA, 1383 bp, Klebsiella pneumoniae; identical to SEQ ID NO: 74989

SEQ ID NO: 226202 - DNA, 453 bp, Klebsiella pneumoniae; identical to SEQ ID NO: 74988

SEQ ID NO: 226203 - DNA, 1200 bp, Klebsiella pneumoniae
atgaaaagaacaccgctcattatccttaatggttttctgggggcagggaaaactactctgctaaaaaaccttcttacacaggcacacaaacggcgaatgactgtatccgtcatcgttaatgacatgagtgaacttgatgtggatggcgtcctgatagccaacacagaaatcgttgatgcagccagtaacaattttgtgagtatttcagcagacagtatcagcagcagaagcgggatccagaagctggattccgcgctgaaaaacctgctcgaaaaacggtctgcggattttattttactggaaacctcaggtagcagccatcctcttcccctggtccgctatctgcgagaacatacccaggtaagtctcaaagcatttttgtctcttgttgatacggtcatgcttaatgatgactacgacggtggaaagaagcttattccggttttccaggagcacctcaataaaggaacccggggagtggaaagcctgctggcagaacagattatgttctgtaatacgctcttattaaccaaaaacgaccggttacccttctatgtggttactgaggtagccagagccatacatccccttaatccccaggttgcaattatggccgtgccctggggaaatttacagctggatgaattgctttccatgccggattacgattttcatcgggtggcgttacttatcgatgagcttcaggatgccattgacgcagttttgccggatgaaaccgataaaaaatacgatatttcgtggagggtcattgaggatgaccgtccatttcatccgcagcggctgtgggatacctgccatcgcttcatgggcgcaggcgtttaccgcagcaaggggtttttctggctaccgggaagggatgacctggcattattgtggaaccaggcagcagggagcatcaatctcgaattcataagctactggaaagccggggtcctgactcacactgataattcattgacaaaggaagaacgcgcagctatccgtcagcaactggcaaaaatgcctggcagatttggtgaccggcgctgccgcctgactgttattggcgagagcggcgaaattgacgattttgccctcgcattgcgccagtgtttactcactgaagaggaaattctctggtggcagcagggggggattttccacgatccctggcccacgaaagtggcccggctggcttaa

SEQ ID NO: 226204 - DNA, 423 bp, Klebsiella pneumoniae; identical to SEQ ID NO: 74986

SEQ ID NO: 226205 - DNA, 936 bp, Klebsiella pneumoniae; identical to SEQ ID NO: 74985

SEQ ID NO: 226206 - DNA, 561 bp, Klebsiella pneumoniae; identical to SEQ ID NO: 74984

SEQ ID NO: 226207 - DNA, 867 bp, Klebsiella pneumoniae; identical to SEQ ID NO: 74983

SEQ ID NO: 226208 - DNA, 810 bp, Klebsiella pneumoniae; identical to SEQ ID NO: 74982

SEQ ID NO: 226209 - DNA, 828 bp, Klebsiella pneumoniae; identical to SEQ ID NO: 74981

SEQ ID NO: 226210 - DNA, 861 bp, Klebsiella pneumoniae; identical to SEQ ID NO: 74980

SEQ ID NO: 226211 - DNA, 822 bp, Klebsiella pneumoniae; identical to SEQ ID NO: 74979

SEQ ID NO: 226212 - DNA, 915 bp, Klebsiella pneumoniae; identical to SEQ ID NO: 74978

SEQ ID NO: 226213 - DNA, 1953 bp, Klebsiella pneumoniae; identical to SEQ ID NO: 74977

SEQ ID NO: 226214 - DNA, 903 bp, Klebsiella pneumoniae
atgaggcggcagacgctatcaaaatatgttgccagccaccggaggttcaccttgattaagcaaagcagaagcgatatcccccgacgcgagagcggtcgtcacgtctggccggtgaaggaggatgatacccaaagcaacgatatcgatttttataaaacggcgttcagagaacagtccaggcgatgggggctttccgagatcattcttagtaatactggtgatggagaaatatcactctatcagtctgttaatcagggggcagatgttcctcacgtactgattgcggcagggtttcatggagaagagcccgcgggatgttgggggatgctggattttttgcgcgagggctcccctgaattgtttgataacgtagccgtgagttttttaccgcttgtaaacctctctggtctgcgcactggtagccgccttaatagtcttggacagaatccaaaccgaggctttaccaaaggtgcagaagtcgagccttctattgaaggaaaagtactgctcaactatgaaacgcttctgaaaaacgcagcaagtcatggtgtgctctgttgccatgaagatattcttcgtcataaggcgtatctctacactttcgaacatgctactcgcttgggtcatttcagcgtggcattacgtgatgaacttgaacgctttttcccggtcatggaaaaagagcgagttgatggttgtgaatgtgaggatggcattatttttaaccatttcgattcgtcatttgaatcatggttgttttcttcctgttccgacgtcgcagcgtgcactgaaacgccgggattgcaaccctttgcaaaacgagcagaagcaaaccgttatttaatcggcgcgtttatctcatcgatactggagcgcaacagcatcgggagcgggatgtcatga

SEQ ID NO: 226215 - DNA, 1347 bp, Klebsiella pneumoniae; identical to SEQ ID NO: 74975

SEQ ID NO: 226216 - DNA, 1023 bp, Klebsiella pneumoniae; identical to SEQ ID NO: 74974

SEQ ID NO: 226217 - DNA, 336 bp, Klebsiella pneumoniae; identical to SEQ ID NO: 74973

SEQ ID NO: 226218 - DNA, 1185 bp, Klebsiella pneumoniae; identical to SEQ ID NO: 74972

SEQ ID NO: 226219 - DNA, 1251 bp, Klebsiella pneumoniae; identical to SEQ ID NO: 91713

SEQ ID NO: 226220 - DNA, 951 bp, Klebsiella pneumoniae; identical to SEQ ID NO: 74969

SEQ ID NO: 226221 - DNA, 858 bp, Klebsiella pneumoniae; identical to SEQ ID NO: 74968

SEQ ID NO: 226222 - DNA, 738 bp, Klebsiella pneumoniae; identical to SEQ ID NO: 74967

SEQ ID NO: 226223 - DNA, 1974 bp, Klebsiella pneumoniae
atgagcagcccccttaaatcggtgtttaaaaaggagcacagcgatgagatcagtaaccacagcgtgaaccccgtcttttctgaggtagtcagcgcttttatgtcccgtcgccgctttctgcaaatgggaatggtggcgggcgctgccgtctcctttccttatctagtcaagccagaaaacgccttcgcggcgaaggcaaatccctcagcattatctaaagcggtgtcactgggcttcaccagcattcccgtttcgacagcagacactgtcaccgtgccggaaggctatatagcccgtccgttttatcgctggggcgatgctgtgggcataaagggtaatctgccggaatttaaattcgacgctagcaacaccaccgacgaacaggcggcgcaggccggtatgcaccatgacggcatggcctggtttagcctgccgcagggcaaagagaacccggcacacggtctgctggcgctcaaccatgagtacattgataacggcatgctgtttaaagacggtaccgccaactgggatcttgataaggcccgtaagggtcagaatgcgatgggtatatcagttatcgaggtgaaaaaagataacgtgggctggcaggtagtccgtccctccagctttgctcgtcgcattaccgttaatacaccaatgcaactgagcggtccggcgcgtcatcaggcgttgatgaaaaccgccgccgatccgcaaggcgaagtggtactgggcaccatgcaaaactgcgccaatggtaaaaccccgtgggggacgtacctgacctgtgaagagaactggtcggatatttttgttaaaaaagcgccgcgtaacgtgctggagaagcgctacggcattagcgatagcgatgaatcctaccactggaacgaggttgacgaacgtttcagcgtcgataaaacgcccaacgagccgaaccgctttggctgggtggtggagattgacccctacgatccgacctccacaccgcgcaaacataccgcattaggtcgctttaagcatgaaggtgccgccgtgacgctggcgggggataatcgcgttgtggtctatatgggcgacgatcagaaatttgaatacatctataaattcatctccgagaacaaatatgaccctggcgatcgcaaggcaaatatgcagttgctggagtcaggcacgctctatgtcgccagattcaatgacgacggttccggcgactggctgccgctaatcttcggtgaaaatggccttgatcaaagcaagggtttcgacaatcagggcgatctgctgatcaaaacgcgccttgctgccgatacggtgggcgcaacaaaaatggatcgcccggaatggatagccgttgatacccatgcgaaaggcagcgtgtattgcacgctcaccaacaattccgatcgcggtaaagagggcaaagccccggttgacgcagccaacccgcgcgccaacaaccagttcggccatatcatgcactggcgcgaagagagggcagaccccgcctcagcgaaatttacgtggaatattctggtgctcgccgggcgtactgacagtgacgatcctaaagcgaaaggctccatgcagggggcagaattcggcagccctgatgggctctccttcgatcaccgcggcgtgctgtggatccagactgatgtttcctccagtacgattaataaaaaggcgtatgaagggatggggaataaccagatgatagcgaccctgcccggcaccaatgagtatcgccgctttttgaccgggccacgcgggtgtgaaattaccggtatcgcctttacgccggacaaccgtacgctgtttattaatatccagcatcccggcgaaggcggcgacgacattaccgatccgagcaaccctcgggctatctccaactggccagattcaagatcagacggacgaccacgttcttcaacagtcgttatcactaaatcgaatggcgggataatcggtacctga

SEQ ID NO: 226224 - DNA, 267 bp, Klebsiella pneumoniae
atggatttgtgtaacggttccagatatctaatcattgctggtattgttctaatttatctggtgttgatattgcgtttggtcagtcattatgagacttatgctgtcatgaaccgtagacaggcagcaaccagagctggtgattataaagatgattacccagaattaactaaactgctcataagcaagagtactgtttcactgtggcttaacgttattacgttagtcttgatgacagttttgattgtaatgatgtatgtgtcagtctga

SEQ ID NO: 226225 - DNA, 981 bp, Klebsiella pneumoniae
atgactactgctacagctaatgctacaactgctactcgtgctaaaaaatctaccacagccaaaccatcacgcccggctgctggaaaaattgataaatcttcaattttgatggctcattccaaagcgttctatggtgaagaaattccaccatcgaatactggcagtgatatttgtaaaatagaaaaaggcaccgataacgataagagttacatctggtatatgacagaatctgtcagccgtgtaattgagttaaaggcgcttgaagaaagttctaaactgaagcatttagttggttgtgaacgttctgtaatttacagcgtgaattttggtgatgtcttcattaatgagatcaacctcgatgaggctgaacaacttcttgaagaatttcccgacatcccacgtgaaaaaacgctcgaagcttttttatcatctctagatgaaaagcttgttgagttgaatatcagctccatggttacttcagagtctcttcacttcggtaaagataaactgaccaagctgggtgctgttaaagtaagtcaatggcttgatctggttattgatgaggtgcatgttttttataaacgtcagcactttgttgagaccgttgaatctcgtcatgaggacctcaatgacctatatggtaaattgaagcctttgatgagtgaattcgggcttcaagacaaacactatgacttatcgtttaatgagatgatgattcacaaagtaaatggttttgattttgtagttgcagatttaatgccacgactgcttaaacttgaagcatcattgaaagatgatgaattgaaagccaaagcagctatggaaacaaatcaagctcaagaaattaaagctggagaaaataatacttttggacagaaatatgataatacggtatcaagagtactgaaaggtgctgcttgtgttgctattctctatttcggaatctccactattatgaattacattggttataaaagatga

SEQ ID NO: 226226 - DNA, 459 bp, Klebsiella pneumoniae
atgacacattcaaatgaacaatggttttcagtggacggtcaattaattgatgaaaagcttgttttcaatatcaatgaattaaatggctctgctaggtatgaaaaaaactttacttgctcttattgtaaaggttcaggtcgtcatcgtatcagttatgcaaattctttaggtaaatgtacctcgtgtaaaggtacaggtaaacaaggtagtttgatcaaagagtgtttcacgctgcaaatgcttttcaaaaagaactatttagctgctaaaaaggttgtttcttcaagctcctggcgtcagaatcacgctaataacttatctgcactggagaaacaaatcatttcttcaagcaacaaaaaccccttccttaaaagtcttacgcttaccattcaaagtggtcgtcatctttcaattaagcaaattgctgtagcagaacgtatcctttcccaactaaactga

SEQ ID NO: 226227 - DNA, 252 bp, Klebsiella pneumoniae
gtggagcgctttttcataatagccctcgatgccctgcttaccgatattgcggtcggcggcgtagttctcctcttcgccgtttttcgccagccgctgcagatcgctgtcgttgattttcgacacatagcccaccacgtgcgccagctctgcgccgtaggggtattcccgttgttggtagctctccaccgtcacgccggggaaacggaattcgttgaccgcgaagcgggccacctccacatcgctgaggtctga

SEQ ID NO: 226228 - DNA, 924 bp, Klebsiella pneumoniae; identical to SEQ ID NO: 221105

SEQ ID NO: 226229 - DNA, 246 bp, Klebsiella pneumoniae; identical to SEQ ID NO: 215022

SEQ ID NO: 226230 - DNA, 231 bp, Klebsiella pneumoniae; identical to SEQ ID NO: 224064

SEQ ID NO: 226231 - DNA, 861 bp, Klebsiella pneumoniae; identical to SEQ ID NO: 25304

SEQ ID NO: 226232 - DNA, 252 bp, Klebsiella pneumoniae; identical to SEQ ID NO: 30842

SEQ ID NO: 226233 - DNA, 252 bp, Klebsiella pneumoniae; identical to SEQ ID NO: 30842

SEQ ID NO: 226234 - DNA, 477 bp, Klebsiella pneumoniae; identical to SEQ ID NO: 215033

SEQ ID NO: 226235 - DNA, 765 bp, Klebsiella pneumoniae; identical to SEQ ID NO: 6031

SEQ ID NO: 226236 - DNA, 372 bp, Klebsiella pneumoniae
gtgcaccgtaatgccgcacacgtcctggccgttatagtcaggcagcggaacggttttgctgtgctgacggttctgagccttcattttcttaacccaggcaaggtacttttcatcattaccaaagccaggggaaccttctgtatcacccaccccggtttcccagtcaacgcgcaccgtcatacccggcgtccagcgggcgggtacgctgaagcagcagccgccaccgcccccctggaacggacctataatgtcgatgcccgactggccattgacactgaagtggttgatcgcccattttgtgtggttgatggcttttattgtgccgccaccgccgcctccggcctgtgcggctggctgtgcacagccggttaa

SEQ ID NO: 226237 - DNA, 294 bp, Klebsiella pneumoniae; identical to SEQ ID NO: 224077

SEQ ID NO: 226238 - DNA, 777 bp, Klebsiella pneumoniae; identical to SEQ ID NO: 121845

SEQ ID NO: 226239 - DNA, 195 bp, Klebsiella pneumoniae; identical to SEQ ID NO: 215000

SEQ ID NO: 226240 - DNA, 228 bp, Klebsiella pneumoniae; identical to SEQ ID NO: 215001

SEQ ID NO: 226241 - DNA, 246 bp, Klebsiella pneumoniae; identical to SEQ ID NO: 200688

SEQ ID NO: 226242 - DNA, 462 bp, Klebsiella pneumoniae
atggctgccggaatgagtcgcagggagcccctgtttgacccggaggcggtgttcacactcccggccacgccgtcttcccagcagatccccctgtttgcggatgcctgtgcggcgggttttccgagtcctgccggggattacgttgagcaggagctggacttaaacagcctgtgtatccgccatccggcagccacttactttctgcgcgccagcggggaaagtatgcgagacctgggtctgtatgacggcgacattctggtagtcgaccgtgcagagaaggccgtggacggcgatgtggtgattgcggaagtggacggcgggtttacggtgaagcggctgcgccttaccccccgccctgccctggagccgatgaatccggcttatccgacgctctggccggaagaactcacgctgttcggggtggtgatgcacttcattcatcgtacccgcgcccgcctgtaa

SEQ ID NO: 226243 - DNA, 267 bp, Klebsiella pneumoniae
atgcacaccgctttttcttccccgtcttcagcccctgccgcgccgctgatgccggtttctgatgccgctcaggagcgttttattcgcctgcccgaagtgatgcatctgtgcggcctgtcccgctccacgatttacgacctcatcagccgggaggctttcccgaaacaaatctccctcggcgggaaaaacgtggcgtgggcgcagtcggaaatcaccgggtggatggctgaccgtatcgctgaacgcaaccggggctatgacgcatga

SEQ ID NO: 226244 - DNA, 372 bp, Klebsiella pneumoniae; identical to SEQ ID NO: 212322

SEQ ID NO: 226245 - DNA, 312 bp, Klebsiella pneumoniae
atgtctcggctccctgctctgctggtacgccacccgccgttagccgagatcgcctccggctaccggcagcgtcacgccggtgatatagctggcctcatcgctggcgagaaacaggatcgcattcgcctgttccgccagcgtgccgtaccggtgcagcagactgctcgccaccgtctgatcgacgacctgctgataccacgccttttcctgctcgctcggctgctcttcgttacgcggcgtcaggcgcggcggcgcctcggtcccgccttggcttttaataatttgccgttattgctgaaggtccagccgtga

SEQ ID NO: 226246 - DNA, 1119 bp, Klebsiella pneumoniae
atgactgccaccgtagagcaaatcgagagctggattgtggatgtcccgaccatccggccgcataaattgtcgatgaccaccatgggctgccagtcgctggtgatcgtgcgccttacccgttccgacggcatctgcggcatcggcgaagccaccaccatcggcggcttgagctatggcgttgagagccccgaggccatctcgtcggcgatcacccattatctgacgccgctgttgaaagggcagccggccgataacctgaatgcgctgaccgcccgcatgaacggcgccattaaaggcaacacctttgcgaagtccgccatcgaaaccgcgctgctcgacgcccagggcaaagccttaggtctgccggtatcagccctgctcggcggcgcgttgcaaacggcgttgccggtgctgtggaccttagccagcggcgataccgcgaaagatatcgctgaaggagaaaaactgttggccgaaggccgccaccgggcgttcaaactgaagatcggcgcgcgtgaactcgccaccgacctgcgtcatacccgcgccatcgttgaagcgttaggcgaccgcgccagcatccgtgtcgacgtcaaccaggcctgggacgccgccaccggcgcgaaaggctgccgcgaactggcggcgatgggcgtcgatcttatcgaacagccggtcagcgcccacgataatgccgccctggtgcggttaagccagcaaattgaaaccgcgatcctcgcggatgaagcggtcgcgaccgcttacgatggttatcagctggcgcagcagggctttaccggcgcttacgcgctgaaaatcgccaaagccggggggccgaacagcgtgctggcgctggcccgcgtcgcgcaggcggcagggattggcctgtacggcggcaccatgctggaaggcaccgtagggaccgtggcttctctgcacgcctggtcgacgctgccgctgcagtggggtaccgagatgttcggcccgctgttgctgaaagacgatattgtcagcgtgccgctcacctttgccgacggtcaggtggccctgccgcaaacgccgggccttggcgtcgagctggatgaagacaaactgcatttttatacccgccagccgtag

SEQ ID NO: 226247 - DNA, 240 bp, Klebsiella pneumoniae
atgcatcgacagtcagacatcaatcaggcattccgcgagtcggtattgcgcaactccaaaggttttcagtacctgcacacaaaggattttgtgtcagcgcttcgccggcgcggcattcactttaccgaggttgaggcgaactcctggatatcgcgggaacaaacgtatttcgtcgataagacgccggaccatagcgaaaacaagctatggatgatggccaacatggggagggtcatctga

SEQ ID NO: 226248 - DNA, 213 bp, Klebsiella pneumoniae
atgggcagacaattacagaggcttttccttctcgctatcgttgcgctggcgggctgcagcgcgccgatcgccgcctccaccagcggcgtggcgtcagataccgcctcgttgccctcgaaggtcaacgtttatcatctgaccgaaaaagaactggccgcccaggcaacgatcaatggttataaatactggccggatgctgcgctggatccgtag

SEQ ID NO: 226249 - DNA, 1422 bp, Klebsiella pneumoniae
gtggaaacattcaaatttactaaatccaaacttgaaagcctgcctcccgctgatagtggtcaggttgagtatggtgataccgttgttaatggcctgcgggttcgcgtgggggttagcggtgttaagagcttttgtatctcccgtaaacgtaatggaaaattcatccgggccacgcttggccgctttcccgatctcacgattgataatgccagggcaaaggctctcgaactgctgggggacgttgcaaccaccggcaaaaatcccaacgtggaaagacgcatcaacgaaaaggcttcagttacgcttgccgacgcactgaatacctacatcgagagccgcgatgcaagattaagtgcggatacggcaaaacaatatcgctccatcctgcaaaattactcaggtgactggatgaaacagccaatcgcctctatcagccgtgaacgtgtggaaaccaggcataaagctgttaccgatggttccgtatggtttggtgcagacaagtcaacgcttcgcgccggagtcggaaccggcagtaaagcacaggccgatctctgggcgcgggttttacgtgctatatgccgtttcgcacatgatcattatcgcgacaatgacggcaaaaccttactccctgaccctcccacaatggttcttagcacaaagcgtaagtggcatggaaccgtcagaaagacagaacgcatacgcaccaatgagcttggcagatggtttagtgctttatctaccgtgcgtgatattgccgaacaagggcgagatgatattgctgccgctgtatgtgatgctgtggaaatggctattttcactggactgcgtaaatctgagattttagagcttagctgggatagggttaatctgggtggccgctacttctggattgacaccacaaagaacggcgatccgcttgagctgccagttactgaaacccttctgaagttatttcgccgccgggccaaaatgaaatctgccgatggtttattggtttttccgggcgacaagggagttattaaagagtacaggcatattatagaacgcataagcgctgctactgtaccagagccaaaccctgatttactcaagccgataccttttaaatggcatgatggccgccgcacgttcggcactgttgctgagctggtgggcgtcggaaactacatcctaaaacgattactgaaccatcggacgatgagaagcgccgatgttactcagggctatttgcatttcagtgctgatgaactgatggagccagcttcaagaatagaacgggcaatacttgaatatgctgggataattgaaagccataaagacatcaacacccaattaatgtctgctttggagaatcttagcgaagaagagaaaagaaaattaatcttcgcaatttcaaatgacaaaaggggttgccaggtatga

SEQ ID NO: 226250 - DNA, 726 bp, Klebsiella pneumoniae
atgaatcatggtgaaatggatattagagctacaattgtggctacgttcattaacgagctttttattgatggtactgattctgcggccatttcagtattgcgtgaaggctttaaggctgatgcctcttcaagcttggcgcgcaatatggttaataatataattcattatttcgaatgctctgatgatccaattgaagaatttttatatttcattgggatagaaaattctgaaactaaaagtaatgaacagtcgatcaatacattgttgtacatggatgaaaaacaaacgccatttttaaccgatataccattatcaggtgatggagtcacactgttaaatgctgcgcttgcgttacactttataggaatgaaaaataatgcaaataatcttgcaagaattggtattaagttgctaatggaaggagtttttagcgacgagatatctataagggagtttaacgaagttgcgcgaaaggcgatttcagatgctcagagagaaaaggcaaaaaagccccgaagtccatattattcagaggtgattgaagtcattaaactcacctgggaaaaatacccttgcggtgcaaaaacagcattacttgatgctttagccgctcattatcatggcaaggtaagccgtaacgcattagacaattggatctccctctctggcttgagacccccaaaaccagaaaagtatacacgacttgaattagtattcccccaatag

SEQ ID NO: 226251 - DNA, 840 bp, Klebsiella pneumoniae
atgccgggccgccaatgcaataacactaaacatattcaggataccaaggataacgctggtggtcaaagaatgagccagcgcaattctgcgcccgctgattttattcagcttttttgcaaagccttttcgcatccaggacgcaatacatctcgctccttgcttccgcagaggagctttgtcgtgaagcaggattttaagagaaaggcggcaacaattaaaacagccgccaacataataatttttttcattgctcatccttttggctcgatgccgcgtgattgtagctctttgcggattattcgctttatccaggcagccagcgactcatcaccatcttgctgctgggcctgttccattagctcacgtaactcagggtctagtctgaactggaatggtggattaccacgtctttcatttttgtgtgttgacacgtcaattacacccgatgtaatgtgtttatgtgtaatgacacattacatacatgtgttgcaaatagcaacgccccgaagtgcgggaacactaccgaggcgtctaaccaaaccgttaaaagaggtaacgattatggctgatcaccagcatacccaaactcgcccagaatttacatggctattccttgcaacacctaagcatcatccggatagcactcccatagtgatgcgcattgatgcagatagtgaaaccgctgcacgcgctgcactgcccggttggattttaatttttgcggcgaaaatcaggactgaaagcccttatacgtttacgtggacggatgcaaatcgagcaagtctctggtcaattatgggaggagaaatcagccttcctctggaggctcgaaatgactaa

SEQ ID NO: 226252 - DNA, 255 bp, Klebsiella pneumoniae
atgactaagtcacaactgcgctatgtagctgatctaaaaaaccttgaagagcatgaagaggaattgcgtcttgcatcgcttagcgctgcccaagcaaagatcgtggcgactatgctggtgtgttatcccaatgcaatggaggacggcgaaatcaccgcgcttggacagctgttggagtctttggcctctaatctggatagcttcttaaaagcagagtgcgagcgttttgaaagttgttcggaggttcagtcatga

SEQ ID NO: 226253 - DNA, 369 bp, Klebsiella pneumoniae
atgatcagcaacgtcaaattcaatgaactggaaaaacgctttgatctgctggtggagaaagtcaacgttcttgaagaaaaagtaagagcgctgactgatagccagggcggtgaaatccctcccggtatgactcctgttgctacgctggcggctgagtatggcatttctaccaaaaaagcggaggaactggcgaaaaatacgggcgttatgttggttaagctgaaatcaggtggctttattgtgcctgatgagaaattcagggaagcggcccgactggttctccgtagcgcaaaacgaaaatacggttcggcctactggtttcatccgctgataggcaaattccaaatgagcggagggatcccgaaatga

SEQ ID NO: 226254 - DNA, 1371 bp, Klebsiella pneumoniae
atgacagatgcagtaatgacagttgagacggtatccgacgctttgtttacctgttcatacctgtgggcgcatggccggaactacaaccgtacggatctggaaaaggcaatccaccagcataaagacccgacaacgcgctatggcaagctggcggtacgcttaaaacaaattgctgaaatgccatatgaggctctatgcgatgccggctatatcgataccgatcgtaaacagatgataatcgcccgtcgttctgtgctggtggatgaaatcggcgaagaggaaatgaatctctggctggccgacacccagctcatacagcgcgtattcccggatgccaccattgataaaaaacgctcaaagctaccacttacacgcggttcagagggctataacatccgtcaggactatgtgattaaacatatactcccggcacagtcactgtgcagcatttacggccccagcggttcgtataaaagctttttggctgtttcatgggcctgccatattgcagctggctcttcatggtctggtaagaaggttgaacgtggcgctgtgctttacgtggttggcgagggcggtgtaggcgttccacgtaggatcaaagcatgggaacaggtacatggccagcaggttgataacctctggcttgttaaccgtcccgtcttcccggtgcgagaatctgaggtgtccgaagtcattctggcagccaggcagattacagcggagtgtgatatgcctgtgcggttggtggttattgacactctggcgcgttgctttggcggtaatgacgaaaacgatgctcgcgatatgggggcatttattgaaggttgtgacgttatcaagcagaaaacaggcgccacggtgctggtggttcaccactccggcaaagatgaggctaagggagcgcgtggttccagttcgttccgggctgcgcttgacgctgagtttaatgtgaagcgagaaggagaagggcaggcccttatcctgtcatgcaccaagatgaaggatgccgaggaaccagaacgtaaagcctatgaccttcgcaccaccgaactgttcacagatgaagacggggaaatggtatgttcgctggtagttcgcgatgtgccgcgtgaggctaaagaggttgatcctgaactggctggggtggagaaactcaccgataaccatatggcgctgtggcaggcaataagaagccgaatagcacggggcgaaccctgtaacagggcggttattcgtgatgacctgaaagccactggcattaacaccaaacattttactcgctggcttcagaaactgattgatgatggtctggttattcaggacgccgatttgctgacagttaagtcgctgagagaagtgggcaactaa

SEQ ID NO: 226255 - DNA, 531 bp, Klebsiella pneumoniae
atggcttttaattatttggatttagacgaacagacacgtatgcatatggctgatgaaattcagtttgataaggatcacaacaacttttatctgagtaatttcctatcaccaaagggaaaggagcagtggccagcgttactcgaagagtctgtccagcacgatgatcagtggttagaaagagaaatagttaatcggcgattacttgcagaattttacccaaaaagaaaaccgaagagcacagagatgacacaagcaagagtcccttacacagcagcacaaacactagcggagggtgagtttaacaggctgtatgcaaggggcttatgtgcaagagttatcgccgaaggcggacatactgtagaggcataccgagcaagatattcagtaaacccccggccagaatcggaacttataattggtcgtaaatttatccctcaggatattattcaagatttacgatccaatcctggaattgatacggcgatcggtatacctccgggacccaattcgggaatttcaataaaaaaataa

SEQ ID NO: 226256 - DNA, 195 bp, Klebsiella pneumoniae
atggcagaacggaacaataagcagcacgataaaggcggtacggtgcatatcgatgctgaaaccatgaagaaaatcgagggctaccaggcgttcattcgcaaaaatcaccctgaaatgcctgtacccactaaaggtcagattgtgcgcagcagcgtcaactactggcatcaccagacgctggggggttgggtatga

SEQ ID NO: 226257 - DNA, 1914 bp, Klebsiella pneumoniae
atgaaatgctggtacaccatcaaagcagccagcgatgccaccagcgccaatatcagtatttacgaggagatcggcggctggggcatcactgctcagcagttctctgaggatctgaaagccctgggtgatatttcccatatcagccttcacatccactcacccggcggtgacgtattcgacggcatcgctatctacaacctcctgaataaacacccggcaaaaatcacggtgtatatcgatgggctggcagcttctatggcatccgttattgcaatggcgggtgatcgtatcgtcatgccggaaaatgccctcatgatgattcacaagccgtggggcatttccggtggaaatgccaatgacatgcgtgactatgccgagttgctggacaaggtggaaaacgtcctgatccccgcctacgcacgtaaaacaggtaagtctgctgaggtgctggcctctctgctggaggaggagacctggatggatggtagagaatgtgtgacgcagggatttgcggatgagttactgccggctgtcagtgcgatggctcgcatcgaatcaaaacgaattgaggattttgaacatatgcccgaaaacatcaaagggatgatcacccaacctaaaggctctactggttcagttgtgccggaacagaaccgtatcaacggtattaaagatttgtttgccatgtttggcggcaagcatgatgcgctgaaaatgcagtgcctggaagatgccgactgtacaccggataaagcaaaagacctgctgctggccgaaatagggcgaaatgccacaccatccaacaaaaactctttttcccatgtttatgtgggcaacggtaacatcgtgggtgacggtattcgacaggggttaaatgcccgtctgggtcatgaacgcgcggagcgtggaaacccatatgcaatgatgagcctgtttgaaatggctcaggcatcgctggtggagcgtggcatcagcatcagcggatttggcaaccgctcacagattgtgaatctggcctttacgcacagtaccagcgacttttcccatatccttgctggtggggctgaaaagtccgtactcacaggctggcagaacagcggtgagactttccagcggtggactaaaaaaggttccctgtctaacttccatgaagcaaaacgtgtgggcctgaatggcttttctgagctgaaaaaggttcctgagggagctgaatacaaatatgtcactaccagtgacagcggcgtacccatcgctcttgcgacgtatggcaatatcttttctattacccgccaggccattatcaatgatgacctgagtcagctgacaactatcccacaggctatggggcgtgctgctgcgcgtactgtaggaaatctggtctatctgaaactgacgacgaacagcaagtttacagacggtaagccgctgttccatgccgaccataaaaacctcattgctaaagggatggataccgaggggctcaatgaagcccgtaagtctatgcgcttgcagcaggatgcgaacggcgaccctatcaacgttattcctgcctacattcttgtgccggcggcgctggaagggctggcaaaccgcgctgtgctgtccacatcttctctgttccctgttgatcaggacggcacgctgaaccagaaccccggcatcatcaacgtggtgaaggatatggcgcaggtggtggttgagccgcgtctggacaaggccaacaacaaggaatggtatgtaaccgcagcacaaggcacagataccattgaggtggcttacctggacggtatggacgttccttatctggaacagcaggaaggcttcaccgttgatggtatcgcctggaaggtgcgcatcgatgcaggtgtggccgctctggattaccgcgggctggttaagtcgagtggggcataa

SEQ ID NO: 226258 - DNA, 597 bp, Klebsiella pneumoniae
atgcaaagtaaagaagtgatgacccgtattgagcttagtggtgtactggctaaaacattcggccgtgttcaccaccgagtaatcagaacgactcaggaagcaggcgtggcattagcggcgacaattcggggttttgagcgcttcatgattgatagcaaagacaaggggctgacctttgctgtattcaaggggaagacaaatattggcgccgatgatttgggttatccggtaacgggtgaggtcattcgcattgtcccgattattgctggcagcaaaaaagctggtttgttccagacaataatgggggccgtgctcgttgccgcaggggctattgcaacctttgtttttgatcagccatggggtgttaacctgatggttgctggtggttctatgatggctggcggtgttatccagatgctttcacctcagcaagcaggtttagcccgtaaagaatcttccgagaataaagccagctatgcctttggtggtgtcaccaatacggcctcgcagggttatccggttccccttctatacggaaaacggcgaattggtggagctattatctccgccgggatctacgtggaagatcggcagtaa

SEQ ID NO: 226259 - DNA, 699 bp, Klebsiella pneumoniae
atgagcacatccgaggttttagatttcctaaacaaaaattctggtgcactgaccgttctgttcacagctgttgtgaccatctcaacagttgtttactccattcttacaggaaagctagtttctgaaacaacaaaaatgaggcaagttcagacagaaccaaagatagaaataactatcaaaccttttgattttgcaataaacattgttcgacttcatgtcaggaacattggtcttgggcctgccataaatgtcacatttaatatgaaggtcatttctggtggggaaattgcccaggctctcattgatgagttctctaaagcaaatttcttacagatagggttgaagtatttcggtccggcgcaagaacgctactcacactacactcagttgacaaagcaatataatgaaaaaattgagtctattatagttatcgagatttcatatcagagcacaaccggtgttaagtatatagagcagtcaatcgtcgatatgtcagagcttaaaggcgcatatcagctaggaacaccaaacctctattcaatggcaaaaagtctcgaaaaaatccagaaagatatatctcacatcgtcagcggacacaagaagatcagtgctcaaatttacactgcagaagaccgtcaaaaagaggaagaagacctaaaagcgtttatcgaaaagaaccaaaataaacacaatacatga

SEQ ID NO: 226260 - DNA, 408 bp, Klebsiella pneumoniae
atgcctgatatcaccgaactggcgcagcggaaagaattgctgattgcaaacgggcaacagacagccgacctgctacgtcatctggcagataacgaaattgattctgactattttgccgttgtctctgaatgcgaaagctacggacaagaaactgacgctgagctatcaatcactgagtttgcgctacgtgccgctggctacgttgatgagctggtagaggcgctggagaaggcgcagcagcgcatcgccgagctggagtcccgcaccgtgaagattccgaagctcaaaatgctcgaagactatctagcagaggtagccattgaagagagaaaacagatcttggtcggcgtgaaactggagtttcatcgtgcactggccgccgctggcatcaatgtggaggttgagtga

SEQ ID NO: 226261 - DNA, 213 bp, Klebsiella pneumoniae
atgaccagcaaattaacagcactcatagcgctgtttatcattccgacggcgatggcggcagacaacccccactgcataacaggcaagaacggcttcggtgccacgactacgcaatgcgatgacggcacagttactgtcactaccggccagaaggtaattgtttgcgggaagtctcttaacggcagccataactgcgaggagattaagttatga

SEQ ID NO: 226262 - DNA, 468 bp, Klebsiella pneumoniae
atgaccaaatcaaccataaccagagaagaaagcattcaggccgtatttgatttaaaggttggctatcgtcttgggtttgccgacatagagattctcaagcgagtggcccgcttggcgctggccgcaatggacagcgagccggtggcgataattgaccaggctaaccttgactacctccgaagtggtgctgatgccgatgtatggcctcctgagcgcgaagagatgggagatatgcttctctatcgccacccgcatccagcgccgtcagtgccgggtaaatggattccggtaagcgagcagatgccggaagaccgcacgcaggtaatcctatgggatgctgaaattggagaagtaacaagcggtcactacagtcataaaacacatactttttatcattgcggcgatgccatcgaaaacgagataacccactggatgccgctgccggccgggccgcaggaggtgaggtga

SEQ ID NO: 226263 - DNA, 735 bp, Klebsiella pneumoniae
atggccgctcctaagcttaaaacaaacgatattatcagggacttgaagccatcccttgaggctgggcgtttgcttatgagcgacttcgagaagcaagccatgttacggcaggtaagaagcatcccttcgcgctatcaatctctggctttagagggaatgatccacttccttgatggcaagaatagactgggcactgaatctcttgagcgttctcttgaactctgtccaagtgatgatgttacgtggactaattacgcagccattcttaatcaaaaaggtctatacacccaagctgagggcctgtttcaacgggctattttacaatgcgtgcccagaatgtttgaacaagcattgttatttggggccttttggggggatatggagatgatgaccaaagccttaaccatgattgaaaagtatgattgcgagattacttttggtgaaagtgccttaaacacccataagaacatgaaaaaatttgatgaaaagcttaggcaagacatcaaaaatgctgcttccgtggtgcgtaatatcgctgaagagtttgggttggtatgtacaaggtcgcatgtcgaagacgatggatttggtgaattagcatttacttgcgagatttgcgtagatgatgttgatacgttaatgaatctaaattctagagtcattgatgacatggtatctaaaggctatgagtcctcgcgttgcgttgcttacttcgaatctgcgggggatctataa

SEQ ID NO: 226264 - DNA, 525 bp, Klebsiella pneumoniae
gtggaaaatttcattaaagcaattgaaatgtctatcgagggtaagaattggtactcggtactatttatttccctaaccctcccagacatctgcggaaagatagatacccctgcaagtaaaagctctaaagcaagaaccatcgagtggtgcgataaatatttaactccactatacacgtctcgcattggtagggaccagcaagagcatattttcctgtgtggatctgacttttacgctctccgttgcgcatatttacatgagggtagtgacgacataaccacacaaaaggcaagagagcgccttgataattttaaatttatccagctactaactggtgagatgtacattcataggaaccaaatcaataatacgctgcaacttcaggttgatgagttcggaaaggatgtaattaaagcagtgcgtaattggcttgatgacattaagaacgacccagtgaaacaagctgaggtaaactctctgctcagtattgaaatgattgatatctctaagggattttctttgtaa

SEQ ID NO: 226265 - DNA, 504 bp, Klebsiella pneumoniae
atgacgccatcaatgaggaataaactgattggcgtgatcgccggcggtggtggcgccatagccattgcctctgcgctcatcactggcccaaccggtaacgatggtcttgaaggtgtgcggtacgatccctatcaggatgtggtaggcgtctggactgtctgctatggccacacaggcaaagacatcatgctcggcaagaagtacaccgaggctgaatgccgcgcgcttctcaataaagacctgaacaccgtcgcccgccagattaacccttacatccagaagccgatccccgagacaatgcgcggggctctttactcgttcgcctataacgtcggcgctggcaatttccagacctccacgctgctgcgcaaaatcaaccagggcgaccagaaaggtgcatgtgatcagctgcgccgctggacctacgccaagggtaagcagtggaagggtctggtaactcgccgcgagattgagcgcgaagtttgtctttgggggcagaaatga

SEQ ID NO: 226266 - DNA, 552 bp, Klebsiella pneumoniae
atgaatgatatttctatcgaatatctgaaagaagcactggaatacacgccagagtctggtgttatccgctggaagcagcgacccaaaactcatttcaagaccgataattcctggcggacaaccaatgccaattttgccggaaaggtagcaggctcgcttgataatgatgggtatttgcggatcgggatagatggtcgtttatatagatctcatcgtgtcgcctgggctttacattatggttattggcctgagcatgagcttgatcacatttcaggtgataggggtgataactgcatagacaacttgcggtcagtaactccggcagccaataaaaagaatttgcgcctctactccacaaataaaaccggcgtacccggagtgggttggtataaagctcggggaaagtggagagcaaagataaacgtctctggaaaggttaagcatattggttacttcgatgatttccgtgaagcggtgaaggcgagaaaggctgccgagaggaaattgcaataccacgaaaatcacggaaccagagacaggctcactttctaa

SEQ ID NO: 226267 - DNA, 519 bp, Klebsiella pneumoniae
atgaataatccgtcagttattccggccttcgacttccgcgaaatggtcacgaccctcgacaacaagataatcaccacatcactcaaggtggcggattactttggcaagcgacacaaagacgttttgcgtgccatacgtaacctgaaatgctccgatgacttcacccagcgcaattttgcgcccattgatttcattgataaaaatggcgatgttcagcctatgtataacatcacccgcgacggatgcatgatgctagtgatgggattcactggcaaaacagctgccgcagtgaaggagtgttacatcaatgccttcaactggatggccgagcagctaaaccggcgcatggcgatgggtgaagaattgcagcatcgctatgccatcaaagaaacgcgctcaaagctgaaaggcacgatcggcagccggttgatgaacgagcggaagaaagagaagcgcgttctggagctcgagcatgagcacatcatgcaggtgacgcagccagaactgctgattggctga

SEQ ID NO: 226268 - DNA, 210 bp, Klebsiella pneumoniae
atgaaagatttaaagattgaataccgcgacggcaagcttacagagctgagcatcgacggtgttagcttccacaatctcactggaatatccttcagccacacggtgggcgagacgctgccaactgtcagcctgacctttccgatcggtatcggcgaacgactggtgcccgccagcctgtcccgtgaaaatctgcacatcattgagaaatga

SEQ ID NO: 226269 - DNA, 264 bp, Klebsiella pneumoniae
atgaacggcatcggcggccgcaccatcgcagaggctcaggagcggatgagtcgcagggaatttctggtttggctcaagtaccgtgagaagtacggaccgctcaatttgatgatgcgtaccgaatggggggcttcgctggtggcttctgtcctggctaacatcaataaggcaaagaacacgccgccgttcaaggtaagtgactttgcaccgcacatcaacgaagcgccattatctctggaagaggccatgaaatcctgggactaa

SEQ ID NO: 226270 - DNA, 2556 bp, Klebsiella pneumoniae
atggctggcaagtcactgggaactctgactatcgacttggttgcaaaagttggtggatttgtttcagggatggataaagctgagcgtgcatcagccaagtggagcaagcaggtacaagatgatgtggcaaaatccagtgctgcactagcaggtataggggcagcagctattgcagctgggctggctgttggtgcatccggatttcaattactgaaatccacatctaggcaaatagcagaaactgaccgctgggctaaatcattacaattatctacccaggaacttcttgcttggcagtttgcagctgaaaaggctggtgtctccggtgaccaaatggctgatatcttcaaggatattggtgataagattggtgacgcggtattaaataaatcaggtgaagctgttgatgcgctcaacgctcttggattatctgcggaaaaactatcaaaagtcagtccagataaacaattgctcgctatcggtgaatctttggagaaaattagtactaatgccgagaagaccaccattcttgaaagtttgggtaacgacctttcaaaattacttcctttgtttgataacaacaaccaaaaactcaaacagtttattgaccttgctaaagattatggtgttgctcctgatccatcctctattgatgatttagtaaaggttaatcaactttttgaagatatggaggctcaggttgcagggctcaaaattgagattgcagccggattggcaaaagttgatctaactcctttgcagggttcacttgataagcttcatgacgtactgactgaccccttggttcttcaaggaatttctgatcttgtatcggaagtcgctcaacttgctggatggcttgtaaaagcagctgcaggtgcgggccaactagcagccagcacaggaaaccgttttgcggcacttagtggcaagatcgacctaacaaatatagaccaagttaatgaacgtattgaatacctgcaaaaaatccttgaaggaaaaaaaggtttttactctcaaagtgagtctatgtttggttggattacaggggtagatgacagtgcgaaagcactaaatgatgaactgctatctcttatagaaacaagagataaattttctaaagctagtaaatcggtgctaccccttcaggtagccactgtgggaacggacaacccattttctttacctcctggtggtacgaacggaaaacctgttaaaacaccaacaagtaaaacagaaaatgcttttaacagtagattgcttgatctacaaaaacaagctgcccttattgaaactactggtaaaaaaacagctgaggttaccgagctcgaaaaaataaattttgatattaccagcggaaacctggaaaaattatcagaagggcagaaggaacaacttcgaactgcggctaaaatccttgattccaagaaggaagagttacggcttaaccaggaaaattataaattatctgaatttgtttctggtcttgatagacagaataaaataataaagcaaggatatgataatgaactttctggccgttcattgggggtaaaagatcgtaatagaatgcgtgaagtaaacagcattcaacaggactttgagtcaaggcaagaggatttattaaaacaatttcagtctggtgatattactaagtcgctttatgattctaaaactgatgcactaaaagctgcccttgaagaacgtctgaagattcaagaggattattatcgtgagtctgatgatttacgaaatgattgggaatctggtatatcaagcgcattatctgatttcgcggatagttcaactaattattatcagcaagcggctgatgcaatgacatcaatcttaggggctgctacggactcagtttcagaacatttatatgatgttgtaagcggaactgaatcgatgggggaggcaataaagggagtatttgcagaccttggccaggcagtgataaaagctctggttgatatggctgctcaatggattgtgtatcaaggtgttcagatgctggtaaacaaaacagcccaagcctctgcgattcctgcaatgattgctaacgcgcaagcaaccgcattgcaggctcaacttgccgcttttgcatcaacggctgcaatcccaattgtcggaccgggattagctccagccgcgatggctgctgcagcggctataacagaacctatggttgctgctatttctgcagcttccctttctggcatggcccacgatgggattgatgcagttcctgaaactggtacttggttgcttcaaaaaggagagcgggtgaccaccgcagcgaccagtgccaaactggatgccactctggatcgggtcagtaaagactctactggaggaaaattacccgatgtacatatcagtacaacagtaaatggcgatcctgaccagagaactctggctttgttgaaggagacacagaagcaagcggtacaagaggctctaaatgtgagcgctaatcagatagctacaggaactgggaaaatcggcaaggccataggctttggttggaatgccgggaggaagttaacctga

SEQ ID NO: 226271 - DNA, 483 bp, Klebsiella pneumoniae
atgacggtgcttaaccgactttatgccagtagcggatcggaagtaattattgaaacgctgcaaattaacattggcgatacggttcattatttctgcgcgggctacgacgatattacagcgacgaccgaaaatggcgcggttataaccttttcagccgcagctatcgatatcgccatcccggccagaaacagcgacggtacacaggatttgcagttcgctatcagcaacataaacggtgaggtgagcacggctattcgtgatgcgctggccagcctgacaaacgcctctctgacttacaggcaatatgtctctacagatctgaatgctccggcttccgtgccgtatacgctcgctatcaaatcgggctcctggacggcgctgcaggcacaaattactgcgggctatatgaacgttctcgataccgcatggccgagattccgttacacccttaatgaatatcccggcctccgttacatgagttga

SEQ ID NO: 226272 - DNA, 3036 bp, Klebsiella pneumoniae
atgacgatacgtatttatccctccagactacccggcgaaccactggaaacccatcagcacgcacgaacgactctgcatgagtggatgcagaggaacgtcgaaaattatgatcccggaatgccgcagccaatcagcgttgagattgatggcgtgcccgtcgaatcagagggatggccgcggtgcgaactggtaccagatactgacgtgaagatttaccccgtcccttacgcgacaggctttgccattgccgccctggttgtagcggtagcagctgcagcttattccatctacatgatgaataacctcgatacgggggcctacgattcatctacgggtaagtctctggacttaaacccggcaaaagcgaacacggcaaaacttggcgatcctatccgggaattgttcgggcgttcgcgggtttatccggattatgttgttcagccggtcagtcgttttaaccctgatgacccaaccagaatgacagttgagatgttgatctgcgtgagtcgtggaaatgtggcatttgctaacggcgatatcaggattggttcgacgcctatttccgccctgggtgattcattctcctggacgctgtatccgccgggggcggatgtttccggcgatcgccgcagtgaaaactggttcaactctaccgaggtgggcggaacgtccagcggtagcggccttgatatggcgcagacagcgcctgattcatccgatattaccgccgatagcatgaccgtttcaggatcgtcggtttcgttcaccgggctgagcgatgatgatggcgatgattatctgcctgagtcctgggtggaaggtgcgctggtgactatcatcgcgccgaccaactacctgatttcgtcttcatcgggttacagcgtcctgttcagtgacacgctgactgagattaacccctatgccggcatgcccgttacgctggaaattaacggggcagaatatgatctcttcatcgctacgttcacgccatcacaggatgctgttccgggcgtggggggagcggcagcttcattgcgcggcagtgcagccccaacaacctatgatttttcgaccagcagccagacatttaccctgacctggcaggcaaccacctataccgtttcgctgatcgctaactacggcaatatgtctggcctgctggcggcaatcaatgaagcgatcgccgggtctaacctggtcgcgcaggatgatggcgggatagtgcgtatcattgagaagtcaagcccgtggctgggcggcagtattaccgcatcatcacttcctgtttccgtattcggggatagtccggttttcactgatggtaccgcatccagtggcggcagtccggcgatcaccgccaatgtcactcttgcttatgggagtggaagcggcgcggcattttccggcattcctgaagggacacagcggctgtcgctggcgcaccggggaaatgaataccgtattgcctcagcagatggaacgaccgcgacggtacagcgcatgattaacggaggtattgatcctacctggccggggttctcacccaggacgatgattgattaccaggcgaccgggattaacgacaacaatagctggatggggccttttctcgcctgcccggataatgaggtggtaaatgcatttgaagtgaatttttcattcccttccggcatttgcggctttgacaacaaaggtaaaaagcgcgtcaggcactgtgaatgggaaatccagtatcgggtgtatggttccggtaccgggtggataagccggcagggtgtttacgaaatgaagaacataaatgccctggggttcactgagcgctttgaactggctacccctggtctggttgaggtgcggtgccgccggcgcaatgagcaggggagtaataacgcgcgtgactcgatgtactggcaggcgctgcgcggcaggttactgaaccggccagcatcatatgccggtgtatcgttaatggccgtgacggtggaatctggcggcaaactggcggcacagtcagatcggcgcgtaaacgttgtggccacgcgtatttatgatactggtgccccacgtaagatatcgagtgcgctgtttcatgttggtgattctctcgggctggcgatggacactgaagccattaacacccttgaggccacttactggaccccgaaaaatgagtatttcgacttcgcgacaggcgacagtgtctccgcactggaaatgctgcagaagatcaccacggcggggaaatcgtacttcctgctgagtgacgggctcgcatctgtaggcagggaagggattaagaactggtccggcattatcagcccgcatgaaatgaccgaagagttacagaccaccttctcggcgccgtccgccgatgattacgatggtgtggatgtcacttatatcaatggcacgacgtggtcagaagagaccgtacagtgccgcacgccggataaccccacgccgaggaaaattgagagttataccctcgatggggtgcttgacccgaaccgcgcctatcaaatcggcatgcgccgcctgatgaaatacctgtatcagcggctggggcataacacgacaacagaactggatgcgctggtctatcagtatggcgatcgcattctgctgacggatgacattccgggaaataaaacggtaagtagcctggttatggatatggccacatctggcggtcaaacggtatttaccgtctccgagccgctggactggtcctttgaaaacccgcgcgcaattctgcgttaccaggatggctctgcctccgggctgctggtggccacctttgtcggggattatcagttgtccgttccgtggcaggctgcttttgatgaaattctgctggacgatccgaacattgagccaccacggctggtgttctgcagctcaacgcgaagtgtctacgatgccatttttgaggagatagccccgcaggcggacggaacctgccaggtgacgacaagacaatacagcgacattttctaccagtacgacgacgccagttaccccggcagcgttccttaa

SEQ ID NO: 226273 - DNA, 1002 bp, Klebsiella pneumoniae
atgcaaagaaatttagtcgtagattcaatgcgtatcattggactttttttaataatactagctcatgtatctccgccagaaattctattccagttaagaacattcgatgttccgatgatggtttttatatcaggaatggcttattattgtgcagggaaaagtgatatctcattattttcatatataacatcacgattcaaaaggcttgtgtatccagtatgggcttttttaataattttcttttctgccgcattcatatttaaaatatcaatattccatgactttttaaatatcaaaactgttttatcttcttttttattatttaatggcattggttatgtgtggatcattagagtttttttgatcatagcagtactttctcctcttttcgttcgcattgtaaaaggtaaaagtgggttccatgcaaccttaatatcttttttaatattacttttctcctctgcattatcattattagatatcagcaataaaatggcatcccatttatttatagacttgataatacccacgcttagttacggggctatatttatacttggttacaaatgtctaagcatgaaaaaatcagagcaactatcaactttcatattattcacttttttatttatctcaatagcaacatatgcttactttaacaaaggagtgattcttggaccgcaagattttaaataccctccaactatctattttgtatcatattcaattgcaatgacatatgtgacactatgcatattcacattgattctaaaggataaggataaactcccgcacttcttcaactttatatcttccaatacgatttggatttatttatggcatatccctgttgtagagtacttcaagaaaacaagcggcaatgacaactttgcaataaaatatattatagctttaattatatcgattgccattgcttacttgcagatttcaataatcaaaaaaacaacaaaaaacaaattgataaggaatatatttacaggataa

SEQ ID NO: 226274 - DNA, 243 bp, Klebsiella pneumoniae
atggaaattgcgaatgtgattgtctctggggtacggatctacctccctccagataacgttttgcccaagccctcaacggatatgctgacttttgccgtagttaaggatccaggacttatctctgactacctgcttatggtgcacaggaatggacgctgggaactggccaccccaaatttttacaaagaaaccgaacaggccatcatggccgctgtgaaaatcggtgaaaaagtttggcagtag

SEQ ID NO: 226275 - DNA, 243 bp, Klebsiella pneumoniae
atgtttgtggaactgatttacgacaagagaaattttgaagggctggccggggcgagggaaactattacggccgaattaactaagcgtattcacaggatttttcccgatgccgacgtacgtgtaaagcagatgatgaccttgccggcgatcaataccgatgccagtaaacacgaaaaggaacaaatcagccgggctgttcaggagatgtttgaagaggcggatatgtggatgtcggaggagtga

SEQ ID NO: 226276 - DNA, 240 bp, Klebsiella pneumoniae
atgatcgagggcggcatcagcgagggagacctcctggtcgtcgatagctcgcgcaaggcagagtatggagatattgtgatcgcctctgtcgagggggatttcaccgtaaaaaaattgcagctgcgaccgacagtgcaacttaacccgatgaatagcgcgtattccccgatcgtcgtcggcagtgaagatacgctcgatatttttggcgtcgttacctacatcattaaagcggcgggctga

SEQ ID NO: 226277 - DNA, 1266 bp, Klebsiella pneumoniae
atgttcgcgctctgtgatgtgaactcattttatgcgagctgcgagacagtgttccggcctgacttgaaagggcgtccggtagtcgtcctgtcgaacaatgacggttgtgtgattgcgcgctcagctgaagcaaaaccattcgtcaaaatgggggagccgtactttaaacaaaaggagcagttccgccggcaaggcgtgatctgtttcagcagtaattacgagctctacgcggacatgtcgaaccgggttatgacaacgctggaagaactctcgccgcggtgcgaaatttacagcatcgatgaggctttttgcgatcttactggcgtgcgtaactgtcgagacttggctgattttggtcgtgagatccgcgagacggtactacgcaggacgcatctcaccgttggtgtaggcatcgcccaaaccaaaaccctggcgaagctggcaaataacacggcgaagaagtggcaacggcagaccggcgggatagtggacctgtcaaatatcgaaaaacagcgtaaattgatggctgcactgccggttgatgaggtctggggtgtagggcaccgcatcagtaaaaaactggaagcgatgggcatcaaaacggtgcttcagctggctgatactgatatccgttttatccggaagcattttaatgtggtgttggagcgaaccgtgcgggagctgcgaggcgaaacatgcctcgggctggaggagttcgcaccggtaaagcaggaaatcgtgtgcagccgttcattcggcggtcgtatcacggaataccatgagatgaggcaggctatatgcagctatgcgtcccgcgcagcggagaaactacgtggcgagcatcaatattgtcggttcatctcagcgttcgtcaaaaccagcccctttgcgcttaacgagccatactacggaaacagcgcatcagtaaagctgctaactccgacccaggacagtcgggacataattaccgcggcgacgaaatgcctcgatgtaatctggcgagacgggcatcgctatcagaaagcaggcgtgatgctgggggatttctacagtcagggcgtggcccagctcaacctcttcgacgacaacgcaccacggaagaatagcgagaaactgatggaagtcctcgaccatctcaatgcgaaaggcggaagaggaactctgtattttgcagggcaggggatccagactgcctggcagatgaaacgggaaatgctttcgccgaggtatacaactcgattttcagatattctttcagtacgataa

SEQ ID NO: 226278 - DNA, 1563 bp, Klebsiella pneumoniae; identical to SEQ ID NO: 181149

SEQ ID NO: 226279 - DNA, 432 bp, Klebsiella pneumoniae
atgaaaaagaaaaaagcgtcagaaccggtgttactgacaagcgacagcgactggcacaataatgcatgtttaaattacatgtcggatcacggcacagcgtacaccgaaggttaccggcgggctggtgacattgatgtgtctggacgggttcagaattttctggtttatccggtgttgtttctctacaggcatcacatcgaactccttatcaaacaaattgtcggactggctttggtactatcagaggtgccggatacagaccagtacaaaaaagataaccataacctgaataccttatggctgctggcaaagaaacttctccctgaagttaatgacagccatcgatcttctaattttcgactcatcaaggaagtcgttaaaaagcttcacaatgcgcacaggctagtaacggatttgcgttatgcccggtga

SEQ ID NO: 226280 - DNA, 258 bp, Klebsiella pneumoniae
atggataaaaaatatgatttttcgctcagctatgaagccttgacacgagtatgtgaaaatgcaatatgtgaacatattcgcagagcaggttctctggaagggttaggtttcgcacttgaatataccaaggcctatgccatcctggaagtatggtctctgctggcagctactggcgatacatttccagctctcattgagaaagacagaatatatctattgcagctaatttccgggaaaaataatatagagctacattag

SEQ ID NO: 226281 - DNA, 747 bp, Klebsiella pneumoniae
atgcttggtctgctaactgaagcaattcgcgaaaaccaatttgttgtttattatcaacctaaatatagttttattaattctgatgtatccggcgcagaagcattaatacgatggtatcatccaaattatggtttcataccaccagacaattttattccttttgctgagaaagtagatttaatacattctataactgcaatggttatcacaacggtcttcagtttctcacaacaggtgaatagcatttctttctcgattaatttatctggtaaggattttgaaaatagtacccttcttaatcatatagacaaaatggctaaactatatgaagtcaatccttgcagaataatttttgaaattactgagagcgtaatgataactaatccaactttagctttaaacaacctgattaaacttaaagaaaaaggatataaaattcacattgatgattttgggactggatattcctctctcaactatcttagagaatttccatttgatgcgattaagttagacagaactttcattagtggtattgcttacgatgcacgggacttatctattgtaagaagcatagtgtctcttggaaaagctttcagtttaggtatagtagcagaaggtgtggaaaataatgaacagtttgaattgcttaaaaatatgaattgcgatgaatttcaaggttattattattcgaagcctttgtcaggtgatcaactgattgattttttgaggggccaaaaaaaatag

SEQ ID NO: 226282 - DNA, 705 bp, Klebsiella pneumoniae; identical to SEQ ID NO: 8686

SEQ ID NO: 226283 - DNA, 2187 bp, Klebsiella pneumoniae
atgacgccgttacgcgtttttcgtaaaacaacacctttggttaacgccattcgcctgagcctgctgccgctggccggtctctcgttttccgcttttgctgcacaggttgatatcgcaccgggatcgctcgacaaagcgctcaatcagtatgccgcacacagcggaattaccctctcggttgacgccagcctgacgcgcggcaagcagagcaacggcctgcacggagattacgacgtcgagagcggcctgcaacagctgctggacggcagcggactgcaggtaaaaccgctgggaaataacagctggacgctggagcccgcgccaaaagaagatgccctgaccgtggtcggcgactggctgggcgatgcgcgtgaaaacgacgtatttgaacatgctggcgcgcgtgacgtgatccgccgtgaggatttcgccaaaaccggcgcaaccaccatgcgtgaggtgcttaaccgcatccctggcgtcagcgcgccggaaaacaacggcaccggcagccacgacctggcgatgaactttggcatccggggcctgaacccacgcctcgccagccgctcgaccgtcctgatggacggcatccccgtcccctttgccccttacggtcagccgcagctttcactggctcccgtttcgctcggcaacatggatgccattgacgtggtgcgcggtggtggtgcggtgcgttacggaccgcagagcgtgggcggcgtggtgaactttgttacccgcgccattccgcaggactttggtatcgaggcgggggtggaaggtcagctcagcccaacctcttcacaaaacaacccgaaagagacgcacaacctgatggtgggcggcacagcggacaacggttttggcaccgcgctgctctactccggcacgcgcggcagtgactggcgcgagcacagcgccacccgcatcgacgacctgatgctgaaaagcaaatatgcgccgaatgagatgcacaccttcaacagcctgctgcaatattacgatggtgaagccgacatgcccggcggcctgtcccgcgcggattacgacgccgatcgctggcaatccacccgcccgtatgaccgcttctggggccgtcgcaagctggcgagcctgggctaccagttccagccggacagccagcataaattcaacattcaggggttctacacccaaaccctgcgcagcggctacctggagcaaggcaaacgcatcaccctctcgccgcgtaactactgggtgcgcggtattgagccacgctacagccagagctttatgatcggcccttccgcgcacgaagtgggcgtgggctatcgctatgtgaatgaatcaacgcatgaaatgcgttactacaccgccaccagcagcgggcagttgccgtccggctcaagcccttacgaccgcgacacgcgttccggcaccgaggcgcatgcctggtatctggatgacaaaatcgacatcggcaactggaccatcacgccgggtatgcgtttcgaacatatcgagtcataccagaacaacgccattaaaggcacgcacgaagaggtgagctataacgcaccgcttccggcgttgaacgtgctctatcacctgactgacagctggaatctttatgcaaacactgaaggctcgttcggcaccgtacagtacagccagattggcaaggctgtgcaaagcggcaatgtggaaccggaaaaagcgcgaacctgggaactcggtacccgctacgacgacggcgcgctgacggcggaaatggggctgttcctgattaactttaacaatcagtacgactccaaccagaccaacgacaccgtcactgcacgtggcaaaacgcgtcataccgggctggaaacgcaggcacgttacgacctgggtacgctaacgccaacgcttgataacgtttccgtctacgccagctatgcgtatgtgaacgcggaaatccgcgagaaaggcgacacctatggcaatcaggtgccattctccccgaaacataaaggcacgctgggcgtggactacaagccgggcaactggacgttcaatctgaacagcgatttccagtccagccagtttgcggataacgccaatacggtgaaagagaggacggcagtaccggccgcattcccggcttcatgctctggggcgcacgcgtggcgtatgactttggcccgcagatggcagatctga

SEQ ID NO: 226284 - DNA, 990 bp, Klebsiella pneumoniae
atgaatccttcgttaaccgattcccgccgtcaggcgctgcgttcagcttcccactggtatgccgtgctaagcggcgagcgcgtcagcccacaacaggaagcgcgctggcaacagtggtatgaacaggatcaggataaccagtgggcctggcagcaggttgaaaacctgcgcaaccagcttggcggtgtgcctggcgacgttgccagccgggcgctgcacgatacccgcctcacccgccgtcacgtgatgaaaggattactgctgttgctcggcgctggcggaggctggcaactctggcagtcggaaaccggcgaaggtctgcgggcagattaccgcaccgccaaaggcgcagtcagccgtcagcaactggaagatggctccctgctcacgctgaatacccaaagcgcggcggatgtgcgttttgatgcgcatcagcgcaccgtccggctctggtacggtgaaatcgccattactaccgtccggctctggtacggtgaaatcgccattactaccgcgaaagatgcgcagcaacgccccttccgcgtcctgacccgtcagggccaactcaccgctttagggacagaatttaccgtccgccagcaggataatttcacgcagcttgacgtgcagcagcacgccgtggaagtgcttctcgccagtgcccccgcgcaaaaacgcatcgtgaacgctggtgaaagcctgcagttcagcgcctctgagtttggcgcagtgaaaccgctggatgacgagagtacaagctggacgaagggcatcctgagcttcagcgataaaacgctgggtgaggtgatagccacgctaagccgttaccgcaacggcgtgctgcgctgcgatcccgccgttgccgggctgcgcctgagcgggacgttcccgctgaaaaataccgatgcgatcctgaacgttatcgctcaaacgcttcccgttaaaattcagtctattacgcggtactggataaacatttcaccgctgtaa

SEQ ID NO: 226285 - DNA, 522 bp, Klebsiella pneumoniae
atgtctgaccgtgccactaccacagcttccttaacgttcgagtcgctttatggcacccatcacggctggttgaaaagttggctgacgcgcaaactccagtctgcctttgatgcagatgacattgcccaggacacttttttgcgggtaatgagcagcgaaacgctctcgacgatccgcgatcctcgctctttactgtgcactatcgccaaacgcgtgatggtggacctgtttcgccgaaacgcgctggaaaaagcgtatctggagatgctggcgcttatgccggagggggtagcgccttcacctgaggaacgcgaaagccagctcgagaccctacaactcgtcgacagcatgctggacgggctaaacggaaaaacacgtgaagcgtttctgctttcgcaactggatggcctgacatacagcgagattgcgcacaaactcggtgtttccgtcagctccgtgaaaaaatacgtggcgaaagccgtcgagcactgcctgctgtttcgtctggagcatgggttatga

SEQ ID NO: 226286 - DNA, 729 bp, Klebsiella pneumoniae; identical to SEQ ID NO: 180182

SEQ ID NO: 226287 - DNA, 1752 bp, Klebsiella pneumoniae
atgaaattcttaaagaatatcccgtcttacctgtttttcaccggtaagggaggtgtaggtaaaacttcgatttcctgcgcaacggctatacgtctggctgaactgggaaagcgtgttctgcttgtcagtaccgacccggcttctaacgtcggtcaggtattcgatcagactatcggtaacactatccagcccgtgactgctgtgcctggactttcggctctggagatcgacccgcaggacgccgcccagcaataccgcgccagaatcattaatcctattaaaggtcttttgcctgatgacgttgttaacagcatcagtgaacagctttcaggagcttgtacgacagagattgctgcgttcgacgagtttactggcttactgaccgatacttctctgctgacccgcttcgatcacatcatttttgatactgccccaaccggccacactattcgtcttcttcagcttcccggagcctggagcagcttcattgaaagtaaccctgatggtgcctcctgtcttgggccgatggcggggctggaaaagcaacgcgaacaatacgctcatgccgttgaagcattatccgatcctgaacgaactcgcctggtgctggtcacgcgattgcaaaaatcaacactacaggaagtcgggcgtactcatgacgaattatcagctattggccttaaaaatcagtatttagtcattaacggtgttctgccagctagcgaagcagaacgtgatgcactggccgccgtaatatggcaacgagagcaagaggcgctggcaaatcttcctaccgggttatctgatttgccgacagacaacttataccttcagccgctgaacatggttggtgtgcccgcattgaaaggcctgctcaacgaacacgctgagatagcattgcttcctgaacaaagcatacaaaacaaaccagagaatatgtcgttctctgtcctggtcgatgatatcgcccgcagtgaacacggtctgattatgctgatgggcaaaggcggtgtgggtaaaaccacaatggctgcggctatcgccatcagtctggcggataagggttttgatgtgcatctaaccacctcagatcctgctgcacatctcagtacaacgctgaatggcagcctcaaaaatctgcaggtcagccgaatcaaccctcaagatgaaaccgaacgctatcgtcagcatgttctggagacgaagggcagggatcttgatggagccggaaagcggctgctcgaagaggatttacgttctccttgcacagaagagattgcggtgttccaggcgttctcacgcgtaatccgtgaagcaggcaaacggtttgtggtcatggatacggcaccgaccgggcatacgctattactgcttgatgctaccggggcttatcaccgtgagattgctaagaagatggggaataaagttcattttaccactccgatgatgcagcttcaggacccggaacgcaccaaagtcctgctggttactctgcctgaaaccactccggtactggaagcggcaaacctgcagtccgatcttgagcgtgcggggattcatccctggggctggattatcaataacagcctctctattgcacagactcattcaccactgctgtgtctgcgtgctcaacaagaacttcctcagatcgaggctgtgaagaaccagcatgcaaggcgcatagcgttagtacccctaatggcatcagagcctaatggcatcgagaaactcagagagttggcagtttaa

SEQ ID NO: 226288 - DNA, 276 bp, Klebsiella pneumoniae; identical to SEQ ID NO: 180191

SEQ ID NO: 226289 - DNA, 483 bp, Klebsiella pneumoniae; identical to SEQ ID NO: 216767

SEQ ID NO: 226290 - DNA, 543 bp, Klebsiella pneumoniae
atgcccgaggttcagctgcgtcttgccgccgtactcggtgctgagcttgatatgctcctcgccgcgcttatcctccattcgcagcttattattggccggagtacgaatcacattgcgggtgctgtttttctccgtcacagggtcgacatgccgcgagtcgtgcagcgcatgcgcaatgtacggccggtcaggatcgccttcgtggaaagcaatcgccacctccgtgccctggaccagcgggaagtgaaagccgtacacgtcgccgccgtagggtttggcgagacgcaccggcatgctttcctgaccctgccctttctcctctctgtcagcgtcaaatttcacccggtacaggccggacgcatcttgccaggcatagatatcattcgctttcgcgctggtcacccgcgccgtcatggtgccagtcaccttcgggcgcggcagcagcggcggacgccagcacaatgtttcgctgtagggcaccgccagcagggacacccgcagcgcctcccggcggctggcggtaaaaccggtgccggtgattaa

SEQ ID NO: 226291 - DNA, 846 bp, Klebsiella pneumoniae
atggtcgaggcgggcatagaagttggcggtctccgtctgcgggtcgattttatcgccacgctcccggtggcgaagcttatagtggtatacctcaccgtaagtgatgccttcaccatttccccgggtcatatccgctgttgccgactggagaacgctctgcgcatcgcgggggttataatcccgggtagtaacgttcgcctctacgacgttgtgggtgatgctcagaccccatatcgattccgcaccgctgtcgctcatccccgacgggctgtttacagggagtgtcttatcaaacgtcagcgcccgctgcgcgtcggcgaagtggaccacttcgctctgcgcctcttcctgcagggtgaagaaataaaatatccctacctctgccagcaggcgctggataaacgccaggtcgctctcctgatactgattaatttgctcgcgccgtggatagtgttgcttgagataaaactcatactcccagtcatgcaggtgatgttcctgcaatacctgctccaccacctccggtaccgatttgttgacgaaaaaacgatggctgcgaaactgtttatccagcagggagagaaacggctggagggttatctgataggtcgactgatcttcagaacgattgacgcgccggaaggtggtaatcacaccatggacgcgtttgcagtccgccagctgctgcagtgcgccgccgcccatcgtcagcatggcgggtttgctcaggagctgtgcggcatcaatatttttctctgcgctggtaaacgtaatagtgtaataataaagttcactcagtttttctgccccactgaattcttccacatccagcgatgcggtacatga

SEQ ID NO: 226292 - DNA, 249 bp, Klebsiella pneumoniae
atgactaaaagaacccaactgcagaaggtgcgggatgttcggaggattattgattttgtcaaagaacatgggcgcatcaccaccgaacaggtagctgaaatgactgggctttccataaaaacggctcggttggatatgcaggttgcgcagagaacgggggagttaatccgggatggtcgtcagggattattccgcgataatcgtgcaactatcgattttaaccaagaaaatttaacgaccatcgattag

SEQ ID NO: 226293 - DNA, 1149 bp, Klebsiella pneumoniae
atgagtgatcaagaattcttcaatgatcttttcgaagatatgcaagaaactcctgcaggtcgtcttgttaaaaataattttctgccttggcatcatccacgtaaacatttagtaagattggaccaatgggtttattatataaatatgctccttgataaaccatttcatggcaaggatacaataaaatactttagtttaccaggcgatgatcttctcgacattagaactatccatgaggaaatatgtcttagaagaaatattaaacttcacttcctcgggtttaacgatcatgaaagtgagcaattacgagagcaaaacgctaatatatccttaaatgaggtaagggctttaccttttatagaccgcaactccgagtatcataacaatgatattttaaagattgtgtcgaaggattctctagcctatcaaagatttaaaagtttcggtgactttgatgtaataaatttagatttttgtggaagtgtcactattcaaagaccagcaaatagaagccctaatcattacaatttactcacgaaaataatccagttacaaaataatagagataaaccatggttgctatatttaaccacgcgcataggctctgaccatattcaccacgaagttctcaatcaatttaaagaacactattcgtctaacttaaacgacgaaaactttagagttaaatcacatgaaatcttcaatgtgtttgatcgagattctcttactcagtctctggggaactgtgagaacttcagaaaaatcgtttcaacttctctttgcaaatggttattatctttctctcttagtcttacacctaaaacaactgttaagatacttgatgcaatggagtataaagtattaccagagtctgaataccctgacatgctttctttagctcttctatttacacctcaccctgatcaagtccaagatccattaggtttagcaatacctaatgcaagggtggagagatttcaagagccaaccattgcgtcgtattatattgaccgggttaataaatgcactgattgcgatagttacttgctcactagccctaacgttaaacaagctatggttgagaaaagcgcaaatctgctgaaatcagcccgatttgatactcaagaatacttaaggatatatggttag

SEQ ID NO: 226294 - DNA, 1956 bp, Klebsiella pneumoniae
atgcataaaaatgaacaacaaatagccgaaagtattcgtaataatagggaagtggtcgagacagcctttcttaccactgaccaaaaggtaatcgctagagttactgatggcatttatagacaaccgggatctgctttgagagagttgatatcaaacgcgtacgatgccgatgcaacagaagttcgaatcagaactgatgaaccgcgctttaactccatgacgatcgaagataatggtaatggtatgagtcctgaaactctgactcgcgttatgaaccatattggaggaagctcaaaaagaaataatattggagcagaatacggtatcactgacgcagagaatttcgacctcagtcctggcggacgtcatctcattggaaaaattgggattggtttgttttcagtatctcaactaacacaatcattccaaattataacaaaacgtaaaggcgatgcctttcgtagcattgcaaatgttacacttaaacaattttctgatcaaattttaaaagatcaaggtgacagtagtgaatatgaatccggaacatataaaatatggacggagaatgcaactgacttagaatcacacggcaccacaattatattgcataaaattagaactcaaaccaaagaaactctatcaagttctaatatttgggctggtgttgctgcaagtaaagaatcatctgataatgatgacaatgaaataataactccccctaaatatcatatcggttctataaaagatgaagagtatttaaagcttctagatgatgatgaaaaagtacgttctgtgccttgggatattaatgatgcacccgatgtggcttttaaaaaattagtaaaatgtgtttgggatgaatctaaacctagcaatcctacccccaagctttcattactctttgatttttatttgaaaatggtatgggatttagcattaagcataccaacaagttatgttgaaaatgatattttcgagataccgtataataatcagttttatgcttataaaatatctaatttattaaaaggtggtcaagcaacaccactgaatatccatcagggagaaaaactagatgattatctaacatttacacatgaaaaaaatacaacagattttaatgtgttcattgataatcttaagttatccagaccaataacttttgaaaatctaccatctacttcccatgcgatctcaaagccaatgatttttattggggaatattgggaggaatttaaaaacctccctcaaacgatgacaggtggtcccttaaagtttaaagcataccttctctggaattcaaaaatatgtccaacagagcatttaggtgtatgcatacgtgtacatgatgccagcgggacgctttttgacgatacttttatgaaataccaagttcaagaaaacactcgtaaacgccaagtcacgattgaaatttttgttgaacaaggattagatagtgcattaaacatagacagagagtcttataattattctcaccctcatgttgttatattaacaagatgggtccatagtgcttttagacagttatctaatgctaataaacaacttgcaaaaaaattaagagataacaaccgtggtttaaaacaagataaacttctttcaaagatagatagtatcgtcgaaaaggcatggaataatgcgggtaacgatctatatcaaacacctcctaaagtagcgattatagcttccagaaagcaagatccaacatcaaccaatgaaattgattatgttgttgattttaataatataactgattcgtcttcagaaaaagaaatagaaaaaatacaacacttatctccacttagtgaagaaaaaataaaggctattactgcgatacttgcgagttatggactattagaaagtttatctttttcacagcgcaattccatgataaaggcgatttatgaagtcattattgcagaaggagaggcataa

SEQ ID NO: 226295 - DNA, 990 bp, Klebsiella pneumoniae
gtgcaattattaagcttgttttgcggggccggcggccttgatttgggatttaagcaatcaggatatgatcttaaactggccatagactggtctgaggctgctattaaaactcacaagcataatttccccgaatctactgcgttaagacgagacctactcgaacttggcgtagcagggttgttacagctttgtaatgaatacatttcgaaagaagaatgccttggtataatcggtggaccaccttgccaaggtttttccagagggaatcgtaattctttagcatctgacccaagaaataaattggctattttgtatgtcgattttattgctgaagtaaaaaaacacttcgatgttaaattcgtagtgtttgaaaatgttttaggcataaaagacaaaaaacacttacaaacatataaaaaaataacatcacaattagaaaccattggttacaacgtttacgaaaacgaattaaacgctgtgaattttggtgttgcgcaagaaagaaaaagagtaattataattgccataaataaaaattcaaaacatgaagcaaaattcgtgagcgctatacaaacttcagcgaatagaaaaacggttagagatgtaatttccgacctgccagaacctacgtttttccaaaggaatttagttacctccgatattaaataccatccaaaccattggactatgtttcctaaatctatgagatttaaaaaccctgaattattagacaataaaacaagaagttttaggacgatcagttgggataaaccaagcccaacaattgcttatggcaaccgggaaatatatgttcatccagaaaagaaacgtagattgtctatttttgaatcgatgttattacaaggtttcccaaaggaatttgtgctcaaagggactctctctcaacaagtaacacaaatctcaaatgccgtgcctcccccaatggctaagcaaatcgcggcatcaataaaaaattccattagaggatga

SEQ ID NO: 226296 - DNA, 318 bp, Klebsiella pneumoniae
gtgctggacctgccacagcaagaaaacagcaacagagagaacccgatgaagagtttcaaaattgaatacgttgatggcgttttgaccgttctggagactgatggtcagtcacgaatgaatgaagccgtgcatggcatccattttgagcatgtccagggcggccgcccactgctgaaactgacgattgcgcatgatattgcaccggcaccggctgctgagtcggctcaggaacctttagtgggtgagttggtacaggatcaacaatctccgtttccccgcggtcgtcgttcccgccatcgtaggggaggtaagcaatga

SEQ ID NO: 226297 - DNA, 348 bp, Klebsiella pneumoniae
atggcaattgaaacattcgcctggcgtattcaggcagccagtcaacctacgttaaaaagcaaagataatatccggagggttcaatttggtgatggctatgcacaggtatccgggaacggcataaataatgaaacactgagttatgagttctctttttctggcgacccggatactgctctggaaatttataaatttttgcgtcgtcacaaaaccaaggcgttttcttttaaaccgccaggtggtgaattagcgttgtggcgggttcaggccgacagcctgcaaaaagttattcagggaaagaaagtcatcaccattactgcaacgtttgaacaggcattcgtaccatga

SEQ ID NO: 226298 - DNA, 756 bp, Klebsiella pneumoniae
atgagtcttcacgctgattatcagaaactggagccgggagatgaaatccggctattcgaaattgacggaagtgcttttaatatgggtgatattttatattttcacggatataacataccccataccgaagcggaaattgtggctgctggtggcgatgaatcgaagctaccggccaaaagcatctggtggcagggcatcgaatataaagcatggccttgtgaattagaggggattgaatcctcgacttcaggaagcgacgcgcagccgacactgagggtaggcaacattgatggttcgatttccgcgctctgtcttcattacgacgatctggctctggcgcgggttgtcatccacgatacgcaaaaacagtatctcgatgcgaagaactttccggacgggaatgcttcagctgatccgacacaggagaaacggcgccttttcttcatcgacgtaaagcattatgaagacgatgagaaggtggaatttactctctccagcccgtttgccctgcaggggatgatgatccccactcgccagctgcatgcgatttgcagctggtgtattcgcaatcagtaccgcagtggtaacgggtgcgattatgccggcacccggtattttgacaggaacaatcagccagttgatgacccgtcgcaggatgtctgccccggcacgctcacggcctgcaaattacgtcatggtgagaatagtgagctgccgtttggcgggttccctggcacctcattaatcaggagctga

SEQ ID NO: 226299 - DNA, 1272 bp, Klebsiella pneumoniae
atgcaacgtagaacgttattaaaagcttttgcactctccgcctctgttatggctatgggtctctccttccaggcctatgccgccgacaccatcaaagtcgggatcatgcattcgctctccgggacgatggcgatttccgaaacgccgctgaaagacgtcgcgctgatggccatcgacgacatcaacgccaaaggcggggtgctgggcaagaaactggagccggtggtggtcgacccggcctccaactggccgctgtttgccgagaaggcgcgccagctgctggcccaggataaagtggcggtggtgtttggctgctggacgtcggtctcgcgtaaatcggtcctgccggtgtttgaggaactgaacggcctgctgttttacccggtgcagtacgaaggggaagagatgtcccccaacgtcttctataccggcgcggcgcctaaccagcaggctatcccggcggtggaatacctgctgagcgaggacggcggcggcgctaaacgtttcttcctgctggggacggactacgtctatccgcgcaccaccaacaagatcctccgcgccttcctgcatgccaaagggatccaggacaaagatatcgaggaggtctacaccccgttcggctacagcgattaccagaccatcgtcgccaatatcaaaaaattcgccgccggtggcaaaacggcagtggtctccaccatcaatggcgattccaacgtaccgttctacaaagagctggctaaccagggtctgaaagcgaccgatgtgccggtggtggccttctcggtgggggaagaggagctgcgcggcatcgataccaaaccgctggtcggcaacctcgcggcatggaactactttgagtccgtcgataatccgaccaacaaagccttcgtcgccgattatcgcgcgtatgccaaagcgcacaagctgccgaatgccgatacggtggtgaccaacgatccgatggaagcgacctgggtgggcctgcatatgtgggcgcaggcggtgaccaaagcgggcaccaccgatgttgacaaagtacgcgaggcgatggccgggcagaccttcaacgcgccgtccggatttaccctgaccatggatgccactaaccatcatctgcataagccggtgatgatcggtgaaattgaaggcaacggccagttcaacgtggtctggcagaccgataaacccgttcgcgcgcagccgtggagtccgtggatccccggtaatgataagaaacctgaccatccggtgaaaaccgtcagccagtaa

SEQ ID NO: 226300 - DNA, 246 bp, Klebsiella pneumoniae
atgtcagaaattacacctgcagaacaaatccgcctgaccatcattaagaaagttaactacgacaccgccgcggcgaagctggccattgactgggttggcgatagcaatctgaaagctgagctttttgctgactctttcgatcgtgtcttcactgaaagtgagattgtctcgaagacccgcaaggccatccaggaagcgaccgaagcgctggcgctatttgataccgcggctgagcaggccagttaa

SEQ ID NO: 226301 - DNA, 222 bp, Klebsiella pneumoniae
atggaaactcgcgattactgcccgctttgtcaggcgctgcacgtaaacggtgatgttatccgtgaagacccgcaccgcaaagggaaggctattcgtgaaccggcgctgcttgaggagcaagcaaatattatccgtaaggcccactggaatagttatctgaacaagcaccgccgggaactaaatatcattcagggaggtggacagcaatgcctgccattctga

SEQ ID NO: 226302 - DNA, 435 bp, Klebsiella pneumoniae
atgagtgatatcaccgaactggcgcagcgtatgtccattgaacgaatcaagcagatcgcgctcggcggcacaccaactatgggagaaagagaaagcctggcaatcactgccctgcattttgctgaggaactcaaaatcgccaccgatgcatttcaggcggcagggctcgcacaacttgccgctgaagaggcgctggagaaggcgcagacaaaagcgattgagcgtggacgtactgcctgtgagttgttcgacgaggttactgctctgcgccagcgcatcgccgagctggagtcccgcaccgtgaagctgccgaagcctattagcgttttgcatcgccgagagttcactgcggcgcactgcgcaatatacgcataccccgaggctgaagttaacgcggctttggatggcgctggcatcaagtgggaggctgagtga

SEQ ID NO: 226303 - DNA, 201 bp, Klebsiella pneumoniae
atgataaccgggactactaactatgacgatgtggcagaagtccgctgcaatttgtgcggcggttattacaaagccgacgagccagaaagccatgactgcgatgaagaagcccataacgaaatcgagtgtgatatctgcggcttcaaaagcacagacccggaaggcgctcactactgctgcgaggataactccgatgagtga

SEQ ID NO: 226304 - DNA, 204 bp, Klebsiella pneumoniae
atgacaatcgtaaaaacccataccggcaccgttatcaccaaagacggtccgaaggtaaaaaaactgcaccagacagagcggatgtgggtcgtcggcaaaaacgagttttaccacaaagaaaccgggcgccgtcactttgcagaaagtacgcgccgccggttgctgttggaaacgattgaggcgataggtggttcacatgactga

SEQ ID NO: 226305 - DNA, 840 bp, Klebsiella pneumoniae
atggcgcaagagcaacaaagcaccgattcactttatgattttctttatgttgacaatcagcgcgcatcttcgcttctcgctcaaatgcatgggccaggcgtcgtaacttccattaagcatgtcactgcagaaattgataagtctatgtccgatgcagggtttgacttaaaaattgtgaagtccaaaattggtgttgaagagactatcaatcagacacaagaaaaaagttttgatgcctcctggacgctgccaataaatctgctcgataagcttgatgagaacaatttgataagaaccgagctcaatggagagcggctggggagcactgttctatgcaaagggaggatgcgaatttttgatatctcagttttccaaaaaagcgttccatttatagcaaagatgatggaaattggacagccaaaactcccgcctaaggcaaaaaaatcaaactttaatgttgaagagcaactgattgcccctggagtgacatttggcatgatgaaagaagtattaaacatcgtcccaaacacattacaagttgatttcataaacgaatcagctcaaaccatatggatgactataaatcgagattaccttacaattaatccagatgatatggtactgaagtatggttcaagcctcccaggtgagtggtatgtaattggtttcattgatgctcttccagaaaccgaagaagacatgacggatacttttaatttcgagcctaactcaatgaaagacggtatcaccggtatgctgtctggaataagggatttagctgggcgaagcagtaattcatacggaatgacacctctggttattttcagaaaaattcagtga

SEQ ID NO: 226306 - DNA, 192 bp, Klebsiella pneumoniae
atgagcacgatgtttgccctggttctcaccgtcagcatgctgacgggcggtaatcaggatgtcctgctcggcgtttacgacactgagaatgactgcaaggcagctgcagaagagcaacacgtgaaagctgaatgttatccgctgaaaggtgtactggacgagcatccggccgggttcacggtgcaaatgtag

SEQ ID NO: 226307 - DNA, 3051 bp, Klebsiella pneumoniae
atggaatatttttatctgataaaagcgactcaaaaatcgcgtaaagctgatgccgtaatctggcgcactaataaatcagaagctcgcgcccttctgcagctggacgtcgatctggaagacgctgggatcgaaacaggccgcggcaaagactatcaaaaaccaattcgcaccgattttccggtattcaatgacctgccggcggaaggtgttctcgattactcatggtgcgaacgctaccagctcggcgacgatggtcgcacctgggctctgaagccaggtcaggtgcctgcggatcatcacatcgatgatgcaggagtaacctctgagaccgtggaaactttcggtagtgatgaataccaggacgattccagcgcgctttttaacgtggccgaactcccctttcgcgcgcagctgctggcgcagtacatggccgaagaacgtcacgtttatcatatcagcatgcctcaccggcaggagctgtcagttcttgaaatggacactgataacgcagccgtccaggatctgattctggccgccgagaatgtcccagaaatcaaaaaatacgatatgccggcgctctggaaattcaccagcgccaataaaaaagtcttcccggaagggaaacggcatgagctcggcaaacgtatccagtttgcaaagctgtggttcgccacgaacgcgatcgaccgcggcattctcaccagggaatgggctgccggtaactgcatttcttcggttttgaaaaccgatgcaggtacgaatgctggcggcggtaataaaaccgatcgcaaccctgactacacccatacccttgatacgctcgatgtagaaatagcccttgccacaatgccaatggatttcgatatctacaatttcccggcatcaattcaccgccgggccaaagagatcgtccagaagaaagaaagtccgttcaaggaatggtctgcagcgctgcgcaaggtcgcaggcatcctggattattcccgcgcagcgatttttgcccttattcgtggcgccaccagtgatattcatcatttcccggtaagtctgcagacctatatcaatgcaaacctggccgagcataagcatgacgccccttctgctgagacgcttgaaaaagctggtcatgtttcatctgccgccgtcactctggacgctgtgaaaaaggctatcgatggagttgaaggtgtgccggacctggaaactctcccaactgactttcaggtaattggcaccgaactggtgaaagatgcgcaaaagaaacgtcctgacgctaatcaggttctggccgccgaacgtggcgaatatgtcgaaggtatcagtgaccccacggatccgaagtggataaccgaagacctgaccaagcccaaacagcctgaagtttcaaacatgggcaatggtgttttttcgattgatggtctgatggatagccagacatcaccagcaccagcaccagcactttctatcgtggaccagacgcgccagcgcgctgcagaagaaaaattacatccagctaattccggggaaaccaccagcaatgtgcagatggaaacggctcagccgctcgaagacgaaaatgataatgcggtatcagcaggcgaaggcgctgatgagtctcctgcgcaaacaactgccgtgaacatgagcaaaatactggctgaacgctgcccggatcttaccgccgaagtgctgaaaagccaggtttctgagagtgctcatagcgatgaagaggaagaggctgaacaagcagcgccagcatggccggagtatttcgagcctggtcgatatgaaggcgtgccaaatgagatctaccacgccgctaacggtatcagctccacgatggttaaagatgcacgggtatcgctgatgtatttcgaggcgcgccacgtatctaaaaccatccagaaggtacgctcccctgttctggatatgggaaatctggtgcatgcactggcgctgcagcctgagcagttggaaacagagttcagcatcgagccggaaatcccggaaggcgccttcaccacgactgcgacgatccgcgcgtttatcgacgagtacaacgcggggcttccgccgctgttgagtgctgacgacatcaaggcactgctggaggctcacaacgccacactgcccgctcagattgcgttaggggcatcagttgaagaaaccgggcagagctatatgtcattgcctgctgagttccagcgcatcgaagacggtcagaagcaaaccgcgaccgcaatgaaggcatgcatcaaagaatataacgccactctgcccgcccaggtgaaaaccagcggtagccgtgatgccctgttagaacagctggcgattatcaatcctgacatggtcgctcaggaggcccagaaggcgcagccgctgaaagtatcaggcaccaaagtggatctgattcaggccgtgaaatcggttaaaccggatgccgtgtttgccgacgaactgctggatgcatggcgcgaaaacccggaaggaaaaatactggttacccgccagcagatgagcactgcgctggacattcagaaagcactattgaaccaccccaccgccggcaagttgctccagcatccgagccgcgccgttgaggtgagctatttcggtattgatgaggaaaccgggctggaagttcgcgtgcgccctgaccttgaaatagacatgggcggcctgcgcattggtgcggacctgaagaccatcagcatgtggaacatcaagcaggaaggcctgcgcgccaaattgcaccgggaaatcatcgagcgcgattaccacctgagcgcggctatgtactgcgaaaccgcagcccttgaccagttcttctggatattcgtcaacaaagacgagaactaccactggatcgccatcatcgaggcatccgaagaactgctggaactcggcatgctggaatatcgcaaagcaatgcgtgccatcgcgaacggtttcgacactggcgaatggccggcgccgattaccgaagactacaccgaagaacttaacgattttgatatgcgccgtctcgaagcgctgcgcgtacaggcataa

SEQ ID NO: 226308 - DNA, 582 bp, Klebsiella pneumoniae
atgatttttaacgctgagatggtgcgggcgctgctcgacggccggaagacgcagacacgccggattataaaggactgcacggtcggaagagacccaatttcaaaattcattaagatcgggaagaagtttatcggctgttacccggaagatgttcctgaactaatcagggaatgctgcccatacggagtaccaggcgatcgcatctgggtgcgcgagacgtgggcggaagctggcgccagcgcgccggacctaaagctttatcgtgctaattaccctgagcatgttccttcgatttatgaaaacgtgccgccggctgaagaaattcgctggacgccatccattcacatgccacgcaccgccagccgcattctactggaaatcaccgacgttcgcgttgagcgcctacgcagcatgagccaggacgatgcacgcgccgagggtgttattgccgcatctggccctatggaagccggtttagcattccgcgagctgtgggactcaatctacggcgaggagagctggaaagccaacccctgggtttgggttatcgagttcaagcgcgttgaaggtggtgcagcatga

SEQ ID NO: 226309 - DNA, 165 bp, Klebsiella pneumoniae
atggtcagggcgatcagcagcgcgccgccgacggacaacagcgtggagacgagcgtggcggccagcgcctggctcagctgcgggtcggcgaacagcgcccgccagtgggccggggagcgcgcagcgcccaccagttccccggcggcggggagcagcggcagatag

SEQ ID NO: 226310 - DNA, 591 bp, Klebsiella pneumoniae
atggatcgcataattacatcatcgcgtgaccgttcctcgctgctcagcacgcacaaggttctgcgtaacacctacttcctgctcagcctgacgctggcgttttccgctatcaccgccaccgccagcacagtgctgatgctcccttcgccgggtctcattttgaccctcgtggggatgtacggtctgatgttcctgacctacaaaacggcgaataaacccaccgggattatttccgccttcgccttcaccgggttcctcggctatatccttgggccgatgctgaacgcgtatctttctgccggcatgggcgatttaatcggcctggcgctgggcggcacggcgctggtcttcttctgctgctcggcctatgtgctgacgacgcgtaaagacatgtcattccttggcgggatgctgatggccggcgtggtggtcgtcctgattggtatggtcgctaacctgttcctgcagctgccggcgctgcacctggcgattagcgcggtgttcatcctgatctcttcgggcgccatcctgttcgagaccagcaacattatccgcggcggggctttgttgaataaatcgaacttttgctga

SEQ ID NO: 226311 - DNA, 1683 bp, Klebsiella pneumoniae
atggcaaagcaatttatgttgatggaaccaaaaaatgagaattttaatgaattaatcggtgggcctaacaaatatatagtgcctagattccagcgagactatgcatgggatgtaggacaatgggaggatttatggggagatataaattctcttgatgatgaaggttttcattatatgggctatattgtcctacaacaaaaagaacagtatcagcatgaaattatagatgggcaacaacgcttagttacgttatcgattatagttctggctgcaatgaaagcgatcaaaactttaattgataacggggaggatgttcagggcaatactgagcgactcgatggtataactcagaattttgtaggaagtaagaacttcgttacgcttaaagtaattaataaattagaactaaatagaaataataaaagttattttcaaagaatgtcatctcatttagaggctcaaaactctcgcggtataacatcaactaataaattgatacgcaagtgttttgactttttctgtaagaaagattacggcaaaacaggtgcggagattgctcagtttattgcagatttttcttcaagtatgatttttacaaagataattgtacaagacgatcttaatgcctataaagtttttgaaactttgaatgcgagaggggtccaattgtctactccggacctactaaaaaactatttgttttcaattgtgacgaaagatgatcaaatcggagaagaagagctcaacgatttggacgagcaatggtcagaaatgattgttcaacttggagagagcaatgtttctgattacattagatatcactataattcacagagaagaatggttactaagaacaaccttttttcctcaatgagaaaaatattaacgaaaccggaagaagcgtatcagtatttgaagtcattaattgactactcacctatctatgcatcattgatcaatcccaatgatgcatggtggggggatcaagatgtgaaatacagaaatgtattgcactatcttaatggtattagattatttaatatcaagcaaccactaacaatattcctcgctgcctttggtaatttttctccagaagagtttgttaagctcgtaaaatatatatatatattatctattcggtataatattatctgccatttatcacctagtgaacaagagaatatttataatcaaatcgcgaacaaagtttataatcgagagttcttaagagctagtcatgtgaaaaatagcgaagaatttaaacgtttgtatcctgatgataatgctttctttaatgcttttgaatttcatagaatgccaagtagacaaacagcgaaaaaaatacgttttttactttctgaaattgaaggctatttaggtaatccatgtgattatgaaaaaacgacattagagcatatttgcccttatcatccagagaaagattggaacgaatcttttggtgaaggaattaatgatgtaaaagatagacttggaaacatgatcttaatggataaagataatttaaaacgctcatcctttgaagagaagaaaaaagaatatacaaaatccggatataagttggccttaaaagtaacagaatatgcagagtggaatttagaatctgtcaatgattttcaaaagtggatgtcacaacaagcagttaacgtttggaaggttgattag

SEQ ID NO: 226312 - DNA, 1416 bp, Klebsiella pneumoniae
gtggattacttgcccctttttgccgaactgaaacaaaggcccgtgctggtgatcggcggcggcgagattgctgaacgtaagatcaagttcctgctgcgcgcccaggcgcaggtgcaggtggtcgctgaaacgctgtcaccggcgctggccgatctggctgcgcgccaggcactcagctggcgggcgacggaattcagcgactcgctggtggatgatgtctttctggtgattgcggccaccgaggatgaggcgcttaaccagcgggtatttgcggcagctaacgcgcgctaccggttggtcaacgtggtggataaccaggcgctgtgctcgtttgttttcccttctatcgtcgaccgttcgccgctgctggtggcgatctcctccagcggtaaagcgccggtgctgtcgcgcattctgcgtgaaaaaatcgaagcgctgctgccgacgaatctcggtcggctggcggaatcagcaagctactggcgcaaccatctgaaaacccgcctgacgactaccgaagcgcgtcgccgcttctgggagcgcgtctttaccggccgcttcgccagcctgatggtggcgggcaactctgcggaggcggaaaaagcgctgcaggatgagctcgacaaacccgaacgcgagacgggagaaattattctggtcggcgccgggccgggcgatgccgggctgctgacccttcgcggtctgcaggcgatccagcaggcggacgtggttttccacgatcatctggtgactcagccggttctcgaactggtgcgccgcgatgccgagctgatctgcgttggcaaacgcgccggcgagcattcggtgccgcagcatgaaaccaatcagctgctggtggaggcggcgaaggcggggaaaaccgtcgtgcgcctgaagggcggcgatccgtttatttttggccgcggcgcagaagagctgcaggctgccgccgaggcggggatcccgttccaggtggtgccgggcgtcaccgcagccgccggagcgacggcctacgccggtattccgctgacccatcgcgattatgcgcaaagcgccgtctttgtcaccggccactataagccggacagcgcccccttcgactggtcgctgctggcgaagagccaacagacgctggcgatctacatgggcaccatgaaggcagcggaaatcagcgcccagctgatcgcccacggtcgcgacagcgacacgccggtggcggtgatttcccgtggcacccgtgacgatcagcagacgataaccggcacattgcaacaactcgaacacctggcgaaagacgccccgatgcccgccctgctggtggtaggcgaagtggtgcagttgcatcagcagctcgcctggtttcaacatacatcatccgccgaggggtttaacgcttcggtggtcaatctggcttaa

SEQ ID NO: 226313 - DNA, 894 bp, Klebsiella pneumoniae
atgaagaatctgagcgccatcgcctatttcgaatatggcggagatactcaggcagcagaagataattttcattttgacaacagacaatcttatggggggctgagttacaaaggtattggtgaactagattttggtagagtgaaatcccccttcgattatgttcatcagtctgattatagctatgaatatggcagcagcggggcactttattttggcggagggaaaatagctcgtgttggtggcggagataataattttatcaagcgagaatccaatactatacgttttatgtctgaacgctggcatggtctaaaagtggcaacatcctataccatgcagactggaacaaatatcaatgatatcgataacgcttgggcgatggcgctactttacgactcaccttgggatctgacattaaatgccggtatcgcccaacagactaccaatggttcaaccgatgccaacgtcaaaagcgggtacacagacgtgaaagcggacaaagaaaatatatggggtatagggatgaagtacaacatcccacaaattaatctctcactggctctggactatggtggttatcaaatcaagaacggtaataaaggtagcggcaaaggttataccgcttatcaggacaccatcaatgtcgatcttttcggagctggcgctaagtggacctgggataaatggggtatctacggagtctatggactgcgcgatggcgatgcggcggctgacaattatcaggaaacccgcactatttttggcaccgattataccttcaacaaacaattcatcctgtggctggagtactgcaacatgaccgtcgattccgatgatgcggacgatcggtacagtgacgacaaaattgctcttggcgcacggtattatttctga

SEQ ID NO: 226314 - DNA, 1296 bp, Klebsiella pneumoniae; identical to SEQ ID NO: 219703

SEQ ID NO: 226315 - DNA, 207 bp, Klebsiella pneumoniae
atgccctccagcacgaccctgcaacacgcgatcgagaacatcactatctggcgcaaagtcgaacagcgtgcgccgcataagccactgttgctgctgtacgtcctctcacagtaccagcgcggccatgcgcggatgttcgactacgcctcggagatacgcgatgagctgcatagcctgctggaacgctttggcccgcagcgccgctag

SEQ ID NO: 226316 - DNA, 651 bp, Klebsiella pneumoniae
atgcccttctggcgcctgaaaggcgacggcttctgggagctgcacaacagcgaccagtgttcaacccagggcagccgacagccgcccggcaaagagctggagctctgtcacgtcgccggcggcttcgatgagccgcattttgcgttactcaacaaaaataagaggctgatcaataccctcgcccatcagatcctcgaggcgcatttcccggagagtattcaggaagaactggctgaagagatgggatttgatctgcagcagatccgtaaagagcgcgacccgcattttcgcaagcaggtgctgcgcgcctataactatgagtgcgcgatctgcggcttcaatatgcgccatgataatacctccgtcgccctggaagcggcccatatcaaatggaagcagcacggcggcccatgtgaaatccctaacggcctggcgctctgcgcgattcaccataaggcctttgataaaggatccattggtctggatgaggatatgcgcatccaggtttcgccggcggtgaacggcgggggcatcgttggcaggctattctgggattttgatggtaagccgattaccttaccgcagggaaaagaatgctatccgcaggaagggtttgtggcgtggcaccggcgggaggtgttcagggggtga

SEQ ID NO: 226317 - DNA, 2172 bp, Klebsiella pneumoniae
atgtgtgcagactggctgaaaaattattacgctaaagataaatatctggattatgacaaggcgatggtggggggatacggcatcccacaaataaacacgctgattcaacaggccgcagcgttacgtatgccctgcatcgttccttcaacgcgaaagagaaaaacggtgttttatgccctggcagagaatgcaaaaagccttgaagaattacgacgtattctaacggcggcgctgggttccgctgacactactcccgacattaaatcgatctttcaatctgacgatgacggggaacagttactgctggagaaatccccggacggaatactggccttcgatttcttaccggtgccggacggctcacctcagcaggtaaaagagtggcaggtagcgcgaatgaagcgggtatacaccatgctgcaactggtgatggatctttatcatcagcgacccattttacattcgctcgtcagtcggcaaaccggacggattctcagggatttctacacggcatgccacgcgcgcgatggcaagattgccgaacagtatctggaggagttacgcggtaatcaggcactgtcttctcttaatctcctgtttcttgaactacaggggatggcggcttcggcaaaatggggcgagattctcaaccatcctcggctggaagtattgttgcgcggtcgtgtgccggagcgtatccagcgcctgttgttgcgatcctctggccatttaatgcttaacgccatccgcgatgcgcacttcccactggacaggcgtgaagacgccaggcgactggtactgggcttattgccgctgtacaagcataagccccgctttgctcatcaggcgagtttcctgcctgactggcaactgtggaccatgggggccgcgctgctggggatcgacgaatggcaaacggcgacgcctctgttagaaactgactggatacagcaggtcgaggggtgggcgtcaggtgcaagttcactgccagcgccggtagaagcggaagaacaggtgctgattcaggcgcctgttatcatgctgataagccttgaaaatgctaccgatttgttactcgaagccctactggcggacgctgagcgtgaaagtgagatatactcgcaactggcggcgatgcctgaagaaacacgacaggcattggaaaaaatacccaaactatgggaggcgtggcaggcgctgaaaaatcgctgtgaaccgcaggactatggctggagtcgttggcttgaagatttacaacaggctacggaatctgaacggtttgaatcactgcgccagcaggcgactgttcactacatggactggacaccgtctaccttcagcgaaacgcagtggcaggcgttgcttgagcagcagtccaacgcccagttgagtaaagttttacgagacgtactgccaacccttctgaactggctggaagaatatgacgttcaggtatctgcctccttgtggccggattggcttatgctgctggctgttgaggatattcggtcagaggaggatgtgcgtctcggtgggatgattctggataaattcctttctggtaccttcacccgcgaggaatatgcgtccgcaattgaatcggtagcaatgctgtgctctgaaaacctgtcggtaagaaccttaggctactcgcttgatattgctgaacttctttatgataaaatctccgctgacgacgccgccagattaggtttctgggtcacgttgcaggagttgctcaagcagcgctgggagcgtctggatgtcagtatgcaactttccgcgcgcatggtggaaagactctatctcggcgaacatgccggacacgttttcccggaagaggacagtacgccgggcgtagcgtcttcgcttcatcgcgatctcaacggtaaaacgttggcaatttacagcctgatggaaggtgcggcgagacgcggaaaagaggctctacttaagttatatcctgggttgaatgtggaactcaatcacgatcacgtagctactccggcgctgataaatctggcggaaaaagctgactactttatcttcgccagcgctagttcaaagcatcaggcgttctataccgtgactgattatcgcaaagagataatctatccctcaggtaaaggggcgtcgagtatgatcgcagccttcgtcagtgcgctggattga

SEQ ID NO: 226318 - DNA, 546 bp, Klebsiella pneumoniae
atgatcggacgtgcaaaacagcgccagatttttttacacggtgccgcagggcaacggcaattgcgggaagtactcagcgcccaacttatcgcactgattatgcagccagagccaatctggctggtgtcgccgtgggtgagtaacttctcactgttggacaatcgttcaggcaactgggacagcattgatcccgcgtggggaggcagggagttagatttcattgagctgttggcctgtgcggtgaataacggcgcgccgctttcgctggtgacccgcgacgaaccgatgaaccgtatttttgtaaaagcgctggaaaaacgtctgagcaactttgcaaactttcgtctggaatggcgtaatcaactgcatataaaaggttttctgacgcaaaatgtgttcctcaaaggctcaatgaattttacccgcagcggcgttaatcgaaatgaagagtttgtcgaactgaactgcgatccgcatatgatcggtgaagcgataaccgaatttgaacgtcagtatctttttattggatcacaggaagcgttctga

SEQ ID NO: 226319 - DNA, 4518 bp, Klebsiella pneumoniae
atgaagggaatcgagctttcgcttttgcaacgcgtgctggatgcgctggaagaacaagaaaatgcgctcctggtatggggcgacacgggcggtttttttaatctggatgagctgttaagcactatcggacgggtgttacctgaagaagatgctgaaaaggttctggatgagatgctagacgccgccatgttgattcaggtgccgcacatcagtggcacgcctgtctggcgaacccgaatgggggaaacggtccatctcatgcgcaacctacgccagtggatgcatgagcaaaagctggaacagagcaaaacgctggtatcggactatcgctttattcgtcgaccgcgcagctatcccgatcgcgtttacgaaccggcaacgctgattaccgactggaaaaaacagctgaacttaagcgatcgcgtctgtgacattatgcgccaagccttggtgtcagataagcccttcttgctggcgggttttcaggttcgcgcgaccgaacgcattatgcagtgctggctggatcatcaggtgaaaagcaatacggccagcgggacaatcgtctgtgctggcaccggtagcggtaaaacgttgtcgttttacctgcctgcgctaacccgtcttgccgaagagatttgtaacaaccctgagcgcaaggtgcgcattctcgctatctatccgcgaaaagaactgctcaaggatcagtttgccgaaacgttttcacagtgccgcaagcttgacgaatttatgctgacggccgccggacgcaagattcgtatcggtgccttttttggcgatacaccggtgaaggcggaatggtcgaagaaagacgttaaggggaagattggtctaccgttcggcctgatgaaatgccagcagccccacccgcagtatcctaagcagacttgcggaggggcgctcatttggcgtcgtgaagacatctttgacgagcgtgaggtgcttacctgtacgcaatgccagcatcagctggatcagagtgaaatcatgatcacccgtaatgcgcagcaacatcgcggcgacgccccggacattctgtttactacgacggaaatgctgaacctccagatgaactccacctggagtaatcatctgtttggtgtcggtgaaggctatgggccaacgctggttctgctcgacgaggtccatacctacagcggaaccaccggcgcacaaaccgcgctgctgctgcggcgttggatgcagcgcaccgattgtttgccgcattttgttggactatcggcaacgcttgctgacgcgcagcacttctttgccaggctggtgggtgctcctgaagaggaggtagccctgatccagccctacgcggaagagatgatcgaagagggggctgagtacctgctggcactgcgaggcgatcctgtctctgaaacggcattactctccaccaccatccaggccagtatgctaatggcgcgcatgctggatagcaaagcgaacaagtcacaaggtacctgggggaagaaaactttcatcttcactgataccctcgacggtaacaaccgattgtaccacgacctcagcgatgccgaaggctgggagacggggccaggaaagccgcgcattgatcattcaccgttggccgtgttacgtagtccttttgataaaagggtatctgagcggtcgaaaactgaactggggcagaactggaaggcagctatggatattggccacgacctcgcggaaaacaaagtcatttcccgaacgtcgagtcaggatgccggtgttgatgcatcagcagatgtcgtggtcgccacttcttctctcgaggtgggatataacgatccgttggttggtgccgttcttcagcataaggcgccgaacgatgtcgcctcctatttgcagcgtaaaggacgtgccggtcgtccaagaggcatgcgcccctggatgctggtggtgctctccgagtttggccgcgatcgtgtcgagttccagcgttatgaagggctgatgagcccggagatcaaacgtcaggacctgccgttgggtaaccagcacgtgcagaaaatgcaggccgcaatggcggccctcgactggatcagcaaagttggtaaattcaaagatctgtggggcatgctgaaaaaagctgagcataatcagctgaaatatgatcgaatgtatgccccgcttatccgactgattgaagaggtactgagcggtggaagacggctaaacgagttgacgcgctaccttcaggacgctctgcaattatctgacggtgcggtgcaaaatatcctttggagcccgccgcgctcaattatgtttgagtttctcccctccctactgcgtaacctcagaacgcgctggtcggttaacggcgtggagtgggccggtctgcgaccgagtcaaccgcatgacgagagcgaacaacatcggagcaattcacccgctccggaatacatcccgcaaaacctgttcagcgagttgaatttgccggaactggacattcgcctgaagcgtggacgtgatgacgaagaacaatgggaaaccctctcgttctggcaggggatgcgtgagtttgctccagggcgtctgtctaaacgctacgccattaaatcgaacaaaagtacggattggctggtcccacaaacctacgagccggtggcaggagaagggcggcaatatgttgatttccagataagcgatgcgttcggcgatagttggcaaaaagagtgtgaagtcgagtatcagggaaaaacgatcaaggttgttaaaccgtcaaaggttatgaccacccgggctgatattcgtcgtataaatgataaaagtaatgcgcaactgcagtggatactccacgtcattaaccctgcggttgcgacgcccgacgaggtgccaaagggaccctggaagcaaactctgcgcgatatcacgttttacaaccaccagcatatgacgtcgctggaactggttcgcttttctaccggatcgaaggcgtcgatccggttcagaaataaggaacgagctcacgttgatttcacctgggtgaatggagaggaacaggttggcgtaggaagtcgtcaatgggtggatgcaatgcgcttgcgttttaacctctcgtgtgatgacgttatgggcctgctgcatcaggcagaaatccagcgaggcatgcgccccgtttattttcaacatcttgtaagacagtcatctgaatttgaatttgatagctttaacgcggactgggctattgaatgttttatggctcagcttgcggagacgttggcaagcggcgctcacacctcggttgagtcggcgctgcgagaaatggcttccgaaaaagggatgaaaaggctggctgatatcccggccagcctgttccagccggataccgaaaatgaggctggcactgaccaagcgctacagatcggcctccataaactccttgaacgaccggatatacagcaactgctgttgaactgcgcacaggcactctggaaacccttggctgagatcggcggctttgtcgaatgggcgcggcaggtattagcggacactttggctgcgggtgtgcagcaaacgctaagtacattacttccggatgttgatgagcgggcggtcgtgacagactcctgctggatgcgcgatctccgcacgggagcagaatggctggaaatctggctctgcgagatggagtcaggcggaagcgggattttgatccgtttacagaaaaagtgggctgaagaccctgtatccttcctcaatgtgcttgtgcgaaatctttcagccagcgactacgagcagatcgattacgatctgcgcaccgtgttgcagatgctgcaaacggatcacgcgcttcgtatggcgatctctgccgttcgtgaagccagtaacatggatgcccggcaggaggctaacaagaatcttcatttgcagctttcacagcgcggtttgcgcctttctcacagctttacaacggtgctgtactcgcggatcctgcgggcgggtagcggcgatgacacagacgcccagctttatcagctactgtcggactggtcgtctcttgaaacaagaacgggtattgagttcagtatgaataccatggcgcacgcactggcggtgaatgcgcttggcgtcaaaactgatgcatccttagtgtttaacgcgcagtgccggaaccaaaacctgctctggccgcgtggttacacggtccggcaggcagagctcggtttttacaatatgttttgctcgcgtaaagttacgactgagcgcctgcttgccggcgcgctatttagtgagcagatcgaaaagatttcccttgatgaggctgactggcttgggcaactgcatatggcgttgtgtaaagccggtcgagttgagttacaactcacgcgcgcgcagcgaaatcaattacatcaggtcattaacaccgtgcaaattgaacccgtcgatcatttaggactgctgctatatccacgtcttggtgaagttcgtcgtgagcaggacttgctcattttacgtattgaactggcggaggcgatgcaatga

SEQ ID NO: 226320 - DNA, 735 bp, Klebsiella pneumoniae
atgacaacgcttaagacccaatttacgcaactgcgggagcagtatcagataaaacagcaggttcagtcgctggaagaggtttacgatcggtaccgtaccatacgtgacggcttgctggatgttgccgaaccgctgcaaaaagcccaaaagaaatttgaggtgatcggcatgctaccggaaccacattccactatcgatttttcgcaagaggcggcgctttttggcggtgccaaaacgcagttggatgctttgacggcacgcttcaaagaaagtggcgataaaaccgagcagagcgggttttgggaaacggtgcgggttctgaagagtgtacaggaaagtattgatgataaggtggatgcaacttggaaagcgtttgttgccgatcttgaagcacgcgcaatgctggattccgtctttctggaacaacagcgcacgctagggaacgtgttggtgtatgacgattatcgcaaagcgcgcgataactttaatcggcagaagttaagcggaccagacagcctgtcggtggtaaaaaacctgcagaagtatagtgatgagatggtcgcgcttaaacgttcaatggacccggatgcgccagacgatgttctgcgcttttttgaggcgttggacagacataatcatgcctcgcttacgctgctgacgccgggcgtgattgcctggctggaagaaaaaggtatgctgccagcgtttaacgtgacacgtaagagaatgatttaa

SEQ ID NO: 226321 - DNA, 3153 bp, Klebsiella pneumoniae
atgagaatgatcgattactggccttccctgcaaaacatcaatgaatgtattcgcaccgaggcggaagagctggcggagtacaccttactggcagtgcatcagccagtgaatttgctgcgtctcgataaagacggcaataacctcggacatgcgaaagaagaagatttgctcaaccactttctgcaaacgccgcgtccaattccgattgtgggcaaagccggagtgggtaaatcacacatcatccgctggctggatgcgaaactgcggctgcgtaaggagtacaaagacaaaaagtggcatattgtccgtattccaaaaagtgccagcttgcgtgaggttctcacctctatgctggcgggcctggagggcgagatctttaacgaagcgcgggaagacatcaataaggtgtcggaaaaacgtacgcctcgcgagatcgctgaatggctgctgatgctgatggggcaagagctgcgcaacctgcatgaacgtaacaagcaggatatggaagcgctgaaaaaacagatggcgggtagtacgcctgagcagttaatagctttcaaaccacaggcgatccggctacagaaaatccacgtccacgctgaagataatgcattgccaacgctgattaacgatgcctacttcaagcagtttttactgaaagaagagcattgtctctatcgccttgccaaccgtctgaccaacggtgcaaccagcagcgatctcgacgagggggaacagcaactccaggccaaagatcttgattttagctttaatattaacgatctcagtctgcctgcgcgtcagtatattcagaaaagccgcctgaatactcatgaggacgggcgcaaagatgcttcggagattctcaacctggtgctggttaaagcgacgcaggcgctgtttaaccagctcttcaacttccgtggccgcagtttttctgacctgtttacccagatccgtcaggcgctacatgaaaagcagatgacgctgatggtgctggtagaggatatgtcactcatcaccgcgatcgaggatgtactgatcgacagcctagaaagggaaggaattcgcgacgggaaagaagtgctatgcccggtgtgttcagctattgctgttactgacggttatcaggggtatgcccgccgtcgtcaggggatgctagatcgcgcgaagggtgaatgggtgatcgaagaggtagggaccgggcgcgaagagacgcgactgcgtattgtagatttttgtggtcgatacatcaacgcggcccgctttgggggtgaagccttacgccagcgttgggagcaatctgctgataaatcacactggccacctgactgggaagccagcgcaaacggcgacgaaatggctgaagagtttggtcgcagcgagcaaggcttttcgctgtttcccttcaacaccaatgctatccatgcattggcagagacattctgccgcgacgatcgcaacgaattaaaattcaacccacgtcagatcatcaaccagattctgttgcgtgtactgcagcactgtcgccgtgatgccgacgagggacgttttccgccgccgcatcttggcgatgttgcggcgccagcagggcttcgaagctggctgttccgtcagggcttcgccgacaccgagcgtgctgaatccgtggtcgcgctgtggggttatcccgccgattccgatggcactctggcaagcactctgccgcctgaagttgcccgcagtttcggtttagacgatctggctcaggtgttggaaaacacaaaaagtgctccggttcatattcagccggtggtgccaacacgggtgaccaaagttgagccgcaggttaaaaaaactgttaagtcagaacccacaacagttaaaccgaaagtgatagaagataaagataccctggctatccgagcgctggatgcggcggtgggtgattggatgctgaaaggtgcgacgcttgagatcgatcccgcgcgttatatcaaaagttccctggccttcttctttgataagcgcgtcgtggcggaatgggcgggcagtacctatcggccaacactttggttaggtaaatccaattttgtcgccgttgagttacctaacgcacagggcaaccgtggcgtgcatgtggttaaatttattcctcaggccgaatacgataagcgctcggtgcaactaacggatgccgcgatggcgttagcacggtttggctactacagagaaaactccttatctaaaaccgaggactggagctacgcagatggcaaaacggattacctgattattcagagcttctgcgatcgctgggttaactatgcgctgaccgaactcgttaagcataagcgcaacgatctgccgctgctgctcagcgagcagattgcgctggccgacgcgctgggtgccattaaaacggcggatggttcgaaagaggtgcttgcacgactgctgcaaaacagcaaaacgctttctgtgcagtttcgttccggtatcacgaaggcaatcactgaactgcgggcagaggcattagcgaagtgggatgatgcccaggacgcatggctcagccttgtggcgctaaacgatcatgcgctggaaggcgatctcctgctaagtgcgatacaaaaggcattgaagaaacgctcaaaaaatacacatgccgccgtggtgaaaaagtcgctcagtgaaatccgccccatactggataccgctgctctgtttgccgactgtgaaaatgcggatgatttttccgaactcgtcaccggtttggctacgttagttaaatctcttggagacagcggcgattatcctgcggatatctccccggacagcagcacgctgacggattcactgagtgcgctaacggagggggggatctggatgacgatcctcaaattgcgaggcattaatcaatctgaagatccgctgcgtcaatggcaactactttgcgaactggacggtgttttaattaaccggctcatgatgacaatgcaaagctggcagcaggtacacaaacgtgtactggcgaatattaccgcctacaaccattcacacggtgggcatcagatcagcgaatttcgcacgcagattgaaagctcgttgcaggaacttcatcaggtcctcgacgccatgcagtccgttgcaggggaacagtatgacaacgcttaa

SEQ ID NO: 226322 - DNA, 900 bp, Klebsiella pneumoniae
gtggcaattaccaataacgctgctccagggagccagatccgtctgctctgcatgatcgatcgggtgctaaatcggcgactcggacaggccatcccgatggcagatttgattgaattactgcgtccggagatgctgcccgtcagcgacggggcgagaaaacgcctgcctgcggaagtctctttctgggcaaaagaagggttatggaaaaatgagagcgctggcctcagtcaacagtcgccactttccagcgaacgtaatctgcccgcacgggttttgcgtacgttaattgacagtgagaaaacgacgtcgctgctgaccggaacgcgcggtcagcccttgctgatgtgcgttacctccatgttggcacaggacaaatatacgatccgcggaaacacgccgctgacaaaagaggcggtgccgatggccgttggcccgatgattaacaataaattagccggtgaggggcgacgtaacctcaacttctctaacgaagcagaacccttcctgagttacgcgtatttccttggctttacagagccttatcttaacggatgggtgatggaccccacccgcgccattgaaggggttttggataacctgtcgcttaccgccgcgatgccaattcagacattcctcagccaattggtagagcttctgccaatgctggatggaggagcctaccgccagcaggttgaaccgatgatctccgctgacaactggcaaccgctggagaaacatatgatcagcgccgcgttgagccaggcgctgctccggcttgaactgacaatgcaattggttttcacaactcgttccgatgaccttgacgccatggtcctgcaagctccggatggcagcctacgccgtatcagtaccgtgagcccagggggggccagaaaatga

SEQ ID NO: 226323 - DNA, 2451 bp, Klebsiella pneumoniae
atggaaaatcaatggcaacaacttcgcgcggttctgaacggagaacatagcgaacgcgacgggctgagtggtcagttttttaaccgcctgctttactgtctggatgatgtacaggcgggagaatgcgaccgcctgcacgcattttatgatgcgctgcaatgcgcacgggcatttgggctgatgccgttaaggcttccgtaccgacaccttatcgaaggcgcaatgctccagcattttggtttgagacgggatcgtgactacccaggtgaactgtttctgacgcacgaagcggaagagattgacccctctctcttacccgtctggaaaggcgagcagcgccgttttctggaaaccccaccgctggatgtccttttgccctctgtactcaacgatccgcgttatacgcactacacatctgcagggcaacagcaggcggtacgcacggtgttgaccagcgacagagataaaacgctgctggtgaatctgcccaccggagccggcaaaacctttgtgattcactcccagatgctgacttcaccgcgcaggctcctgacgctggtgattgtgccaaccgtagcgctggcagttgaacaggccctgcgggcgcaagaggtgatgcaacaggccgggcaggatcacggtggcagctacgtctggcatagcggccagtcgattgaagaacggaatatgatgaagttgcggctggcgtccggcgagcagcgagcgttattttgctctccggaagcagcgacaggcgggctcttgttacagcttttctcgcttgcggagcgcggactactgggcgccgtaatagtggatgaagctcaccttatcgatcaatggggggcggagttccgtcccgagtttcagctactggcacccctggtgcgatcgttgaaggctacctcgtcagacggtgtcaaagtcgttctgctttctgccacgtttagtcaaagcaccctgaatacgctcaaagcgctctttggcggtaaacgacaggcatcagtgattgaagtgaacggcagttttctgcgtccggaacccgtgtggtatgtcagcgaagctgtcagccacgaggattaccttacgcaggtggaaaacgctattgctcgcttgccggcgccaatgatcctctacaccaccgaagtggaacaggccaaattctggtaccagtatctacgtgagcgtggttatcggcgatgtggattattccatggtgcaacgccaatgcaggaacgcgaaggtcttatccacgcttggcgtaacgatgggctggatatcatggtggcgacgtcggcatttggcgtggggatggataaaaataatgtccgttccgttctgcatgtcgcagtgcctgaaaattttgatcgtctctaccaagagagcggtcgtggcggtcgtgatggtaaagcatcggtcgctcacattattttccatcacaaacaactacagatcgcacgcaacattaaccgaaccaaactgatcggggccagcaaaggttatttgcgctgggccaagatgcaccagttgcgcgagcagcatcaacctggtcagttcaccgtcccgctacgcgcgaagcatgccgacattcgcatggattcgcagagcaatgtggactggaatctgcgtaccttactgttaatgcagcgcgccggttttatcgatatcacctatccaccgccggatcttagcgctatcgccccggacgagtgtgatgagtccagggtccatgcgtggtttgaccattatttcaaccatattcagatttctgttctccgtgacggccatatggatgaagcgcagtggcagaaggagattcaggcccaccgttcgcatgaactggcgatgcgaaaacagggatttagcgcattagaagggtggctcaatgaccccacaatatcgttgtgccagacgttagcgcaattttataccctcgatggctttgtgccggaaatagcctgtggcgggtgtccggcctgtcgaagtaaagggtatcctccctttactccgacgctcggtcgtatagcacacgtgacgggcgagacggtgcggaacgtcatgggaaatacgcaacgcgtttattattctacggcgctgacgaaccgactactgctgcgtcagtggagtgactggattgcccgactgctgaccaatcgccagattcaggctatccgcgccagccagagtgtgctcgcccgggttggtgaggtcctgcccgcaggtttgcctttttggtgttcacttgccgttgatgaagaaaacatctgctgggatgaactggtgctggtgttgcccggcgaaacgatgcctgaactggacattttcgccagcatcaatcgcattattgttgcaccggaacgtttacaagaaccgggctaccgcgggcgtaactggtgggatgttgataccggtgccgtggcattagaacaatttaagaggaatatcagctag

SEQ ID NO: 226324 - DNA, 3057 bp, Klebsiella pneumoniae
atgactacacatactgtcgcgtttgctgaaggtgacctggtaatatcgccattatttgacggtattgctaaaattgtgagtattctctcaactgagcgtgctgagattgcctggttctactctcctttagaggaggagattaaccgtcaggaggtggatatccgcgcactgacggcagcgacgctctatgaggaaagcaccgtttattttcgctctcctgatagtggcatctggtgccgaggccgctatggcgggccccgtccagacaataagcatttgctgattatccgttcgggcgaccacgcggtcgttgatttggcggaaatgtactaccccaactatgggcaagggcaggcaatgaaccccgctcattttctggcggcacgctcaaatgatgccccctatttctaccccctgcgggaaaaatttgtcagtgcgtggatcaaacagcgcgctgcctgtcggtcaatgtcgtcgttaatcagcagtcgtgtagagattgaacctcatcaaatagcggttgttcgccgcattcttcaggaccagaaccctaaatatctgctggcagacgaagtcggattgggcaaaaccatcgaagcgggattggtcatccgcgagcatattctggaatgtaaacgtgaagctcgcgtactagtggtggtgccgcaggtattgcaaggacaatggacgcaggaactggtcgatcgctttgctctacaggaagtaatgagcggagggcgaaacaaccagatccgtctgtgctctccggaagaactttgccagccagaactgatcggctggaagcccacaatgatggtaatcgacgaggcccatcaattagcccggcaggcatgggtcaatgatgaagacgaacaggcacagtatgccgaaatgactgcgttgtgccatcaggcccgcattgtgttgctcctatctggcacgccgatgcacggtaacgaacgtcacttcctggcaatgctgcactgcataaatccacaggcgtggcaacttaatgctgtgggaatcgaaaaatttatgcgccgcgtggcagagcgcgagcgtctgggtggaatttacagttctttgacccctgaaacgccaaatggggtactggaagaggttatcgaagagttacgtcagctttttgttgatgatgagcaactgcaggcgcggattgatgtgctgagtcctctggtcgacttttttgctcctgatgaaagcgaagagcgaacagcggccattctggtattacgccagtggatcggcgagcgctaccgtctttttcatcgcttgctacgtaaccggcgtgaagatcccgcgttggaatatctctttcctgggctggccggcctggaaaaatgtgtctggcccgtcgcctcgaccgagctcacgctggatgaaacttttgatgcctggcgtgccgcagccttacgcaatcccgtgcaacaccaacatctagatgccacgacgcttgataaatggatagatgcgctatttctcaacccgctggtgatgtcccgcctggctaaaaatgcactggcaaacgggactgccagcgaagaagagtccaattttcttgagcagattattgaaacgtcccagcaagagcagaaagccaaagatgcggcgctaatgaaggcgctgaccggttggtttgaaaaatgtcctgatggcaaagcggtcatcttttgcggtgaaagctctgaagccgccttcctatctaccaaactgcaaattcaggccccctgggcggtggttcgtcattcgccgggcctgcgtaagcagagcgaacttccggatgacagttggcaggtactgatctgtgacaggcgcggtgaagacggactgaatctgcacggaaaaaatcgtcttgcggtccattatagtctgagccgcgactttaaccgttttgaacagcggttggggcgctttaaccgctattctggaaatctacgcggcgttaagcctgtgaaaagcctgattttactgccggagcgtgatgggctacgtgctgaatgggtgaaactactggacgaaggcacgggattgtttcatcgaagcgtcgccagcctgcaatttgttctgtctgaacaattagagatggtatggcgtgattacgtcgggcaggggcttgccgtcttccatgaggcgcaacagcgcctttcgggagaaaacggcttcatcgcccaggaacgtaagcgcgttctggctcaggaaaacttgttatccatggagcaggaggtcattgctgcacgcgagttttctgagcaactggccgaatctgaagatgaggctgaagcgcaggcaaaagatatgctgacctggatgcgcaaggcattagggtttaagcgagagcaatatcctgaaggaggatttcgtctgcgcttcgagcgtggcgaatatcaacggcaaacgctggtggacgtaggaacgtttattgataactgcctgcttggtctggatttttcagaaggatatcccccttccacagcgttgatgagcttatctcgaacggaagccggtaaccacaaacacgtttaccccttgcgctatggacagccttttgccgaaaccgtatggcaactgatgcagagcgatccgcgtggagcaagtatggcgctgcttcgggttctctccccagcggttgcgctgaagcaaccgcgcacctggttccattttcagtggctgagtgaagcgcaggttgaaggtgaaaaccagctagccgcgcagcgtcgtggtgatgagtgcttcagcccggaggttcacaatttctggctggatgacggtggaaaagaggcggatccgcaggtcgttgtttccctgctggataaaccttacgatgaagatggcaatagcttgttccaggatattaatcttcgggaagaggtctggatgcgaatgccggattggtttgagccgcataactggaaggagaccgtacttgctgccgcggagcaggcccggagaaacgtggatgctcactatggcgatcgccccgtccgccatcaattgcttgcaatgaaggcgattattctgtgtacccgcgacatgctgtaa

SEQ ID NO: 226325 - DNA, 918 bp, Klebsiella pneumoniae
atgaataatctttgtattgatgtaaaaaatctcaataaacattttggcgagcatcacgtcgtaaaggatttctctttacaggtggcaaaaggcgagatctatggttttctcggtccgaacggtagcggaaaaacgacatcgattcgaatgatgtgtggtttgattacgccggattccggtgaaggtacttgtctgggtatggatatctttacgcagcgggaaaaaataaaaaaaaagataggctacatgacccagtatttctcaatgtggggaaatttaactattcgggaaaacttactttttattgcgcggttatatagcctcgatcggcgtagagagcgggttgaacgtgcgctttctgagttaggcctcactgcccgacagcaccagctggctaaggagctttctgggggctggaagcaaagaatggccctcgccgcctgtatgttgcatgaacctgttttgctatttctggatgagccgactgctggcgtggatcccaaggcgcggcgagagttctggcaaatgctgcaccagctttctgaccgggggatctcgatactggtgagcacgcattatatggatgaggctgagcgctgccataaggttgcctatctctcatatggtcggctgctggcgaatggcactattgcgtcgattatcgcctcccagaatttgatcaccatgcgaaccagcggcgccggtctgacgctgcttgaaagccagctacagcgcttgccggatattgagcaaacggtcatttttggcaatcagctttatattacatccagagatgaagcgaagttaaaatccgcgctttttgcctttacgcaacagggttatgagttctgtaaggtggataccaatctggaagatgcatttacctacttgatgaaaaataattgtgaaaaaaattaa

SEQ ID NO: 226326 - DNA, 765 bp, Klebsiella pneumoniae
gtggttattaaggaaattcacgagctacgccgtgataaagtcagcatcagtatggtgctcctgacacctctttttcagctgatcattcttggctatgccatcaatatggatccgcataatcttccgaccgccttactaaattatgataccgaacgcatgagtcaaatctttgtgacggaagcgcaaaataccgggtatttttcgatgattcctgtcgattcagaagaggcggcgcagaaagcctttgtgcggggggatgtcacttttatcgtgacgatccctgaagggtttacgcgcaagttactgcgtggagaaaagccacaactattaattcagggggatgccatcgatccgatcaccacggggaatgcgctcagcgcccttgtgcaggtggcgaagtcgatgtttcagcacgatttgccgggcgacatgcgtgtggtgcaaaaagaggatgatttcgagcttatcattcatcgcatgtttaaccctgaggggataacccagtttaatactattcccggtattatggggtcgatactcagtacaacgttaatcctgatgaccgccctgtcaattacccgcgagcgagaaaacggggcgttagaaaatttactggtctctccgttgtccgggcttgaggtcattattgggaaaataacgccttttgttatcattggtctgtttcaggcgacgttaatcctgattgccgccgttttgttgttcgatatcccccttcacggtagcgtcttcctacggctttgttga

SEQ ID NO: 226327 - DNA, 819 bp, Klebsiella pneumoniae
atgttttcagtattgatgtctctctatataaaagaaaatcctaactatctaaagtgctgcttagatagtttagtaattcagtcactaaaacctagtgaggttgttattgtctatgatggtgatgttggggaaaaattaagtcttgtagttgattcatttcaagataagttaccattaaaaataattaaattaaaagataatgtaggtcttggcatagcattaaaaattggattgagccattgttcttataatattgtagcaagaatggatacagatgatatctgcaaacctgaaagatttgaaaagcagttaggaataatgaataaggagccttcattagttatgcttggttcaggtattattgaatttgatgaacaaaataaccagcgtgaaaaagtattaccatgtgaaaaaaataaaatactagagttttcaaaactaaaaaatccttttaatcatatgacagttgtttttagaaagaatgaaattctggccgtcggaggttatcaagatcatctatttatggaggattataatctctggctaaggctactggcagcaggttatgaattacgtaatataaaagatatactcgtcgatgccagagttggaaccgatatggtaaaaaagaggaaaggacttcgctatattaagagtgagtataaattaatgaaaataaagaatgaattgaacataactggttttttcgaaggtgttgggatatttatctttaggtcattaaccagattattgcctacatccttattagagaagttatataataaagataggacaagcattaacggcatatataaataa

SEQ ID NO: 226328 - DNA, 924 bp, Klebsiella pneumoniae
gtggcaaagcaaaagttcaaaatcaccaactggcccacctacaataaagccctcatcaaccgtggctccataactttctggctggatgatgaagctattcaggcctggtatgagtcagcaacaccttcttcacgaggcagacctcagcgctattctgaccttgccatcacgactgtgctggtcattaaacgcgtattcaggctgaccctgcgcgctgcgcagggctttattgattccattttttctctgatgaacgttccgctacgctgcccggattacagctgtgtcagcaggcgggcaaagtcggttaatgtcagtttcaaaacgcccacccggggtgaaatcgcacatctggtgattgattccaccgggctgaaggtcttcggtgaaggcgagtggaaagtcaaaaagcatggccaggaacgccgccgtatctggcgtaagctgcatctcgccgttgacagtaaaacacatgaaatcatctgtgcagacctgtcgctgaacaatgtgacggactcagaagccttcccgggtcttatccggcagactcacagaaaaatcagggcagcatcggcagacggcgcttacgacacccggctctgtcacgatgaactgcggcgtaagaaaatcagcgcgcttatccctccccgaaaaggtgcgggttactggcccggtgaatatgcagaccgtaaccgtgcagtggctaatcagcggctgaccgggagtaatgcgtggtggaaatggacaacagattacaaccgtcgctcgatagcggaaacggcgatgtaccgggtaaaacagctgttcgggggttcactgacgctgcgtgactacgatggtcaggttgcggaggctatggccctggtacgagcgctgaacaaaatgacgaaagcaggtatgcctgaaagcgtgcgtattgcctga

SEQ ID NO: 226329 - DNA, 390 bp, Klebsiella pneumoniae
atgaaaaagacccgctataccgaagaacagatagcatttgcgctgaaacaggccgaaaccggcactcgggtggaggaagtctgcagaaagatgggcatttctgaagccacattttacaactggaagaaaaagtttggcggcatgggcgtgacaaaactgcgccgcctgtgccagcttgaggaagagaatcagcgtctgaaacgtctggtggctgatttaagtctggacaaggtgatgctgcaggaagttatcaaaaaaagttctgaggccggctcagaagcgtcaggcggtgcattttctgcgggaggcttaccgtatcagtgtccgacggggatgcggactgctgatgcagagcagaaccgtttaccactggcagagccggcgggatga

SEQ ID NO: 226330 - DNA, 2142 bp, Klebsiella pneumoniae
atggatgttgaaatcagtcactgtaacaatattgattacgcccgtatcatactttcagaaaataagctaaacattaaatttgcaccaaatggtactggcaagagtaccgtttctcgcgcgatactacatagcgttgttggcgatatacaaagtcttaatgcccttcttccctttaagcttcgtgcatcaaatccgtcaaatttcataccaagcgtgcgcggtgcagaaattattcgcgaagtgatgtgttttgatgaaaagtatgtttcacagttcaccttccagcctaacgagttaattagcaacagctttgacatttttatcaaaactgaagcttacagtcagaccgagagcgagatagaagctatggtcatggcaattcggcaagagtttaccaataacaatgaactggaattattcattacccatcttcaagaacttagtggtgcttttaagctaactagcaggggtctttcgagagcctctacaggtatgagaggactgtctggcggtaataagcttcaacacatccctccagggcttgaagggtatcaaccatttatacaaagcgcacgtaacgtagagtggattgaatggcaaactaaaggatatgaaaacttctcagaactttcagacgattgctgccctttttgtacaggcaattcacacgataaaattgaacaaatacgtaaagttagtgatgaatacgacaaagctgttattaaaaacctcgttgttattatcaatgccattgaaaaacttggtgagtattttcatgacgatgctcgggctcgcctcaaggaaataacaactttacagggcggacttgaacagcgacatgaagactatcttctaacaattaagcgacagacagacagcctcctgactttactaaactctttgaaaattcttaatagtttttcattcgaagatggaagcaatgtgcgagcttctttagcagcctatcgactggacctgcagtttttttctgaacttcagtccgacagaactaagcaaatagttgatcgtctcaatgcttctctagatacacttatggctcaagctggtcagcttcagggaaaaatcaacatacagcgtgccggtatgaacaggttgatattgaagcacatgaccgatatcaatacattcctttcatatgcaggatataggtatcaagtagacatatctggtgacggttctgagtgtagactaaaactgcgacacgttgatcatgagcatcaccttagtggcgggagccaacacctcagttatggcgaacgcaatgcctttgcgatcgttctgtttatgtatgagtgtctagcacgtaaacccgatcttataatattagatgatcccatatcatcgttcgataagaataaaaaatttgccatccttgagatgctttttcgtcggaatacaggggaatgcttaaaaaacctcacagtattaatgttgacacatgatgtagaacccattattgatacgctgaaatcagtccgacagatgtttaataatcaggttatggcatcatacttacgttatagcgcaggaattattacagaattgccaatccgcgagagcgatataatgacttttgcgcaaatctgcaagactgtaactgaatcaaactgtgacgacctgataaaactgatttaccttcgccgacattatgagatcattgacgagcgtggcgacgcatatcaggtactctcaaatctttttcaccgtcgagctgaacccatcgattcacgtgaggaggtagaggacggtgctggttatcctaaaatggattcagttaagtttcaaataggctgcgataccatcgctgaacgtatttctggttttgactacgcaaaaatacttgagatggtgacaactcctgactatataagagccctttatcaaaactgtaggaccgggtatgaaaaactacaagttttcaggctattagaaccagaaattgataaccgagtgattcgtaagtttatcaatgagacttatcacatcgaaaacgaattcatttgccagctcgacccagtaaggtttgatctgatccctgagtacgtaattttagaatgtgacaaactccttaccacaccgttctcatccgcaaatgatgagatagagcaggagatagcttag

SEQ ID NO: 226331 - DNA, 825 bp, Klebsiella pneumoniae
atgagctacattacatcaacactaatgcttctagaagatgcaggattaatgcttaatcgaccaggagtaaccaaagtcacactatgtgagaatggccaaagacaagaggaagttttttttaaaatgatgtcagggaggagggtaagcatagaaaataatcctattgcaaaattcctgctaatcttttcaatgtttgacttttacattgattccaaccatcccaaactggcaggaaaaagttattattataaatacaaaaaaagccccaaaaaaaatgactttgatataatcctttgggagctctttagaattgcaaaaataataaggaacactctcattcatgagcccgataagtttgaaataaaagaaattatagatatcgaatatttatttaaagatacaaaattctcattaaaaactccgttaaccactctgtctgatctgtgtacattaattgtgatgtttattgaaaggaaaaacaacaacactgaatatttcttaggcattgccagatatatttataataatattattataagtagcatccagaattttcgcgatgagtttggcgagacattaaaaaaaccgaaaggttcatttatgctaataccctaccatcgttatcttgcttataaagcaaaaagcaaattagaagaagaatgtttaactataactgaaagtcatttaattctagattatataaataaatctcagagttatgacttttgtgtgactgtagatgatgttgaatacaaaatccctttagaagccttagatgaatcgttctctattcacataaaagaattatctaagtggcgaatatag

SEQ ID NO: 226332 - DNA, 1782 bp, Klebsiella pneumoniae
  misc_feature (1027)..(1036): n is a, c, g, or t
atgtgtaattctatcacagcagggaatgaaaatatggttgctccaactactattgagcggttaaggcttatcaccacccggcaagaattagctgctttattaaatttaaaacctcatttcttaaccaacatcctttatagaaatggagtcaacacacaatacagccagtttcgaataccaaaaaaagatggaagctttaggctaatatcatctccttcatctaaactcaaagatattcaaaagcgtttagcagaacttctttacgaatgtcaggcgaatatacattttgaaaggaaaataaaccctgtattatcacatggttttgaaaaaaataaaaccattgttacaaatgcaaccagacatcgaaataaaaggatattgttgaatattgatttggaaaattttttcgagtcaataaactttggccgagttcgtggtttttttattgcgaacaatgattttaaattatcaccattaattgccacaactttagcgcaaattgcatgttttaataacagccttccacaaggaagtccttgttctccaataatcagcaatttgatatgcactattcttgatataagattaagcaagttagctcagaaaaatggatgtcaatattctcgatatgctgatgatattaccttttccacaaacaaaaaagagtttccccaagaactggtaattgataatgatgttgtgaatgtcggggctgtgttacttaaagaaatcgaacgtgcaggttttagaataaatcatagaaaaacaagattgctttattcaacttcccggcaagaagttactgggctaactgttaataaaaaagttaatgtcgacaatagatattacaaaaaagtaagagctatggctcatactttatacaaggatcaatcattttctattataaaggaaaatgcaaaaccgcaaaaagggacgttaaaccaattagaaggcatgatgtccttcatcgatagcatagataagtataacaataaattaaaactagctaacaaacaacctcaaaagnnnnnnnnnnatcaatcttttaattatggtttgaactatgaaggaaaacttaatcgtagagaaaaaacactgagtaagtttttatattataaatattttcatggattacacttaccgaccatacttgtcgaaggtaaaacagatagagtctatctcaaatgtgctttaagatcactttttttaacttatcctacattagtgaaaaaaaacaatgctacaggcaatataaattattcgcttaatttttttagggaaagtacaagaacaagttactttctcgatatatcagggggggcggctgaatttgagaaatttatcactcgttatccagaacaatataagcgatttaatcatacccctctgtatccagtcattatgattttggataacgacagtggcactagaaccatcgttcgaaaaatatctaaaaccttaggtgtaactgaggactctattaaaaaaaatagctttacccatattttacataatttatatattgtactgacgccgctccttccaggagatagggactcatgtatggaggatctttttgatagttctgtattaagtgccgttattgatggtcggtcatttgataagtctaataattataataaaaacacgcactatggaaaaaatgacttctcattgaaggttattaaagttaatgaaaaaaatattaattttttaggtttcttaccagtactaaatgctgtacgagattgtttagtgcattataataacatccctaaatga

SEQ ID NO: 226333 - DNA, 1017 bp, Klebsiella pneumoniae
atgtctctaatcaaatacccaaaaatcttgtttcaaaaggacacatacagcgttttatctgtttctgggggaaaagatagccttgcaacatggttacttgctgttgaagcaggaattaaccatagcgttgtatttgctgatactggacacgaacatcctcagaccatggagtatctcgattatctcgaaacgaaactagggccggttgttcgcgttaaagccgatttctctgatcgtatcatgaaaaaaagggagtttattagaacagcttggccgatttcactggtaaatgagtgcggacttacagaggagcaagcggattatacagtagagcgagcgcttaaaattttgtggcccactggaattccttttctggatctctgtatgtggaaagggcgtttcccttcgactcgggtgcgtttttgtacttttgagttgaagcatgcccctatcaagaaccaggttattgatccgctacttgataagtatgacaacgtaattagttggcaaggggtacgagcacaagagtctccagcaagggctgatttacctgaatgggaagaagatgcagatgatagacccggcttatgtatttatcgtccgatccataagtggctgcatgatgatgtttttgctattgcacgccgccatggcatcaagccgaaccccttatatttacaaggatgcgggagagttggatgcatgccatgtatccatgtcactaagggggagttagcagaaattttcgctcgctggcccggagaaatctcgcgagtagctgaatgggagaaacttgtcgctgctgtaagccgtcgcggtaactcaacattttttccgtctacaaacgatccccacaaatcggaacgtcgaattgaatttatcactctagagaagtacgggattgagtcatatcgcgactgggccatgacgacaagaggggggcgtcaattcgatttattggctggcatgaataatggcgtcagctgttcaagcatctatgcgggcgtatgtgaatga

SEQ ID NO: 226334 - DNA, 225 bp, Klebsiella pneumoniae
atggaagaagaaattaaatataacatcgaggtggattgctcaactctggagtctgcagcaaaagaaataagagctctcaaaggtcttctggcaactatgtttgtttgccttgatcaggatatgaagagtgtcgtaatacatcaactttcgcagattgatgatgaatacaaccagaaaaacttggagatgctaaagcaaatccaacatatccataaccgaccttaa

SEQ ID NO: 226335 - DNA, 438 bp, Klebsiella pneumoniae; identical to SEQ ID NO: 106612

SEQ ID NO: 226336 - DNA, 795 bp, Klebsiella pneumoniae
atggagcaattacttgctgattataaaaaaggaaatgttatcctttttgttggtgctggtgtgtcaatgaacttaggtttgccatcatggagtcaattggttgatcacattgcaactgagttaggttatgacccagatatatatcgtacattcggtagtgcactagagttagctgagtattacaagttgaaaaaaggcaagataggacctcttagaagctggatggatagaatgtggcactctagcgatatagatatcaaaaagtctaaagttcacgagtacatagctaaagctaatttccctattatatatactacaaattacgaccgatggattgaaactgccttatcaaactatggtaaagagtatacaaaaatatcatcagtttctgacattgcaaaaatagataataataagacgcaaataatcaagtttcatggggactttgatgacgatagttcaattgtattagatgaaacaagttactttcaacggttagagtttgagactccattggatataaagtttagatctgatgttctcgggaaatcagttctttttattggatatagtctgtcagatattaatatcagactactattttataaattgtccaagctttggaaacagcaaaagttagaagaagcacagccaaagtcttatattttcttaccacgaccaaacccaattcaagaggaaatattggaacagtggagaataggcatgatttcatcagaaaacgataatccaggcgagtctttggaagagtttttgaagaatttcgtattagtatag

SEQ ID NO: 226337 - DNA, 555 bp, Klebsiella pneumoniae
atgaacattcgattcataaccagaaatagacataaaattaaagaaataaatgaaattttatcaggtacaggagtagttgtattagcatctgaacactctatagatgaaattcaaactgaaaatgtccatgcgttaattaaagataaattattaaaagcatttaaattagttgggagaccggtctttgtcgaacatactggactatatatagaaagcctcaatggtttcccggggggcttaacgcaaattttttgggataagcttcaggctgataaattttcacaattattaggaacaagtgaaaaccctcgtttagttgctaaaaccataatcggctattgtgattcgatgaaaatctatattttcgaaggtgaaactcaaggtacgatatctcctgtgccaaaaggccctcgagattttcaatgggattgcatatttattcctgatggcgaaagtgagacttttgctgagatgggggacaggaaaaataaaatatctatgaggaaaaaagctttcgataaatttaaagaatatctattagagggaggaaaataa

SEQ ID NO: 226338 - DNA, 981 bp, Klebsiella pneumoniae
atggatctttacgaagctcgaattatggataaaggagaattacatgttcatttgaatggattggtaagcactcaagtaattaggggggtcctagaaaaaaatattattgaaatgcctgaacactttaatatagatactgacttgaatgtaatacacccagcaagatcactagtggattatttaaagccatggcagtttttaaggctcattcctgcgagtcgctttgatttatctattatgattgagagtgcattttcaaatctaattgctgagaacattaagtttgttgaattaagaaatagcgttatatacatagcactccttaataacatttctgtttccgaagcattgaagtgggttttagatgatattgactttttttctagaaaattcaacattcaagccgggcttattctaactattacgcgtggtgaatatgctcccgaacatcttcgttctcttcttggtgcttacaaaagtctaggatgtccagcaggggtgattggtttggacttggctggtaatgaagatataacaccaccacctgagactgcaagtttatttagaagtgctaaagacaaatatgggctaggcataacaattcatgcgggtgagactggaaatgctgataatataaggaatgccataattagttatggagctgatcgtatcggacatggtactgctgttataagatctccggagataatggatttgattagagaacgggacatttgcattgaggtttgtcctattagtaatcgtttgacaggtgcggtctctgatatcgatcctcatccagttggcgaaatgattaatcataatattccgtttgtgatttgctcagataatccagctattcacagatcaagtttgagcgaagattatgtcgcatttatgcaagagaccaagaattttatagtcatggataatatgtatgaaactcaaaagcgatatagctttcttaaaggtgtgaaatga

SEQ ID NO: 226339 - DNA, 144 bp, Klebsiella pneumoniae
atgtccgctgagtgccaaaagtggacctttacgtattttatctcatccaaatctttgtttgtgcaggaacgcatggtgtccctgatattcgtatcgttagctaacgatgcgctgaccgccagcactactgctctctcggtatga

SEQ ID NO: 226340 - DNA, 969 bp, Klebsiella pneumoniae
atgttcagggaaagcgataaaacaatgaaaatcaatttttcctcagtattggatgcatttttttcacgtccgttacttgttctgtttttttgcattgcatgttctttactgtgggttgttgtaggtttcaattctccgcttgtttttcttactgaaaatcaaaatctttatatttattcgacgcaagcacaagtattggctgggatctacggattaatgcttgcagggtatatttttttgaggaatgagcaaacaaggcgacttgaaaaagatgaaaccttggatggtgtaattaaaagtgtacaaaaaaaagaatttggtatgttaattgtaataactattacaacaatggtaactatcatccttgatttattagtcctttcattatatttaagtgcatttaaagaagttaatattttaataaaaaacactgcagcctctttgttcgtacttagtttgattatgatttcattttttatatttcaggcattaaaagagacaaagtatgaacaagcagtgcaggatataattagagaagaggaggggaatatacaacatataaatgagatgaatgtatctgcatctagtgttaatgcaaataaaaatagagatttaatatatgggacatttatgaactcatttagaatgttagagagaatgttggggatgttatattccaatatttacaataatagagtcgttaacaaacttgcaaatgaacagcaaataaatagcaagaaaattaaagtacatgtgcctatttctcggatgttaagagacttggtttcatctggaattatcgacccatattttggtgaggagatctcttctataattagatatcgaaatgcgttagtacacactacagaaactgatccgtctcagaaaatggttgataggatcagtatagttattgaaaaaataaatgggatatttcgtgagcaatttcctgattttataaataaatag

SEQ ID NO: 226341 - DNA, 1608 bp, Klebsiella pneumoniae
atgaagagaattgccatcgtcggcgtggggccgacggggatttacaccttttatgaactggtgaagcgcggtgagccgctggccatcactctgtttgaaaaagaggcgcaggccggggtgggtatgccctacagtgacgataataccgcggcgcaaatgctggccaatattgccagcattgagatcccccccatcgacctgacctacctgcaatggctgcagcagcaaagcgatgactggctggcggcgcgcgggcttgaacggcacgccctgcatgagcgccagtttctgccgcgggttatcctcggcgaatactatcgcgaccgttttctttacctcgttgagcgggcccgggacgtcggctttgtgattagcgtttgtgaatcctgtgaagtcacggatattgcggttcagtccaccgggatcgccatccacaccgatagtgcagcagacccggtaatcgtcgacctggtggcgattgccaccggccatctgtggcctgaagaagagcgcgccagccgacagtacttccccagcccgtggaccggcctgatggaggcccgcattgccccctgccgggtggggatccttgggacttcattaagcgcgattgatgccgccgtggcggtagtggcccgccacggcgttttccataccgaggacgacaaaacgacccatttttccctccatccaggcagcgaagcgctggagatcaccctgatgtcacgccacggcgtgctgccggaggccgatttttactgcccgatcccgtgggagccgctggagattgccactcccgccgccctcgaagcggccattgcggagggtagcgacgctctgttagatcggatttttgagctgatcgttaaagagctggaatatgccgcccccgactggagcgaggcgatcgggcttcgtcagctgacgcctgacagtatcgccgacgcctggtttgtcgaccgcctcacccatgacccctttcagtgggcgcagcgcaatctgcaggaggtggagcgcaataagcgcgaacaccacacggtgccctggcgctatgccattctgcgcctgcatgaggcgattgaaaccgtggtgccgcagttcaacgacgcggacagccgtcgcttccgccagggcctcgctcgggtatttatcgataactacgccgccattccgccggagtccatacgtcggctgctggccttgcaccgggctggcattctgcggatcctgacgctgggcgaagattatgagctgcagcgggagcctgaccggacgctgattgttcatcatcgtcagcgctgcgaattcgatgtctttatcgatgcccgcggacaaaaagcgctgaaaacccgggatctgcccttcccttcactgcgccagcagctgctggcctgcggcgacgacattccggacgtcggtgatgactacacgctgcaggcgccggagacagtgcgcggccgggtcgccttcggcgcccttccctggctgatgcacgatcgcccctttgtgcaggggctgacggccagcgccgagattggcagcgctatggcccgcgccgtgtcgcagcaggccgccggccgacggcgccgtctctggtatatcgaatag

SEQ ID NO: 226342 - DNA, 138 bp, Klebsiella pneumoniae
atgggcggtctgcgcgggatgcggctgggcatgctggaggggaatactgatgaggggtatatctcggtgggcgcggggatcggcaacatccatgccatcacctctgtcgccgaggtagtcaaccagctggcggtgtga

SEQ ID NO: 226343 - DNA, 1218 bp, Klebsiella pneumoniae
atgaaatgtaaggcaagtagatgtaccggccaaaggatccaaactgcgtcagtccctgacacgatgctgaccacagggataacggcgttgttttcactaacctgcgcgctggcagtagccaatgtttattcagcacagcctttactcgactcgatggcggtcagcctgaaggtgtcgccaggcatgattggcagcgtcatcaccgctacgcaggcgggctatgccattggcttgctgttcctggttccgctcggggactggttgaaccgtaaatacgtggtgatgagtcaactgttgctttcagtagcggcgttagtcgcggcagggttatcccccaatatagcaacgctgcttggcgccatgctgatcgtcggcctgatggccgtggtggtgcaggtgctggtggcctgggtggcagtactggcgacgccgcagaaacgaggccaggcggtgggtaccctgaccagcggcattgtttcaggtatcctgttatctcggtttatctcaggcgcgatagccgatatcgccggctggcgagccgtgtatctcacggctgcctgtctgatgttggtgattgcaggggtcgtctggaaaatcatgccttcgcccccgcagcagccgcagccgcaaaagccgacttacctttccttattgaagtccgtgtttcagctgtacctcaccgagccgcaactgagaaagcgcgggatcctggcgctatttatcttcgccgctttcagcatgctatggacgaccatggtcatgccgctcaccgccctttccctctcgcacacccagacggggatgtttggcttagccggcttcgctggcatgctggccgccgccagagcgggcaagtgggctgaccagggatgggctcagcgcactaccggcctggcgctggcgctgctgaccatctcatggcttcctatcggctatgccgaaacctctctgctttggctgatagctggcgtcattgcgctggactttgcggtacaggccgttcatgtctccagccagagcctgatcattgccgccaggcctgcagcggcaagccgcctggttggggcttacatgtgtttttattcgctgggcagcgcgacaggggctatcgttgccacacagctttattcccactggggatggcaggcggtctgccttgcgggcgccgcggtcagcgcgtgtgcatttctgatctggtcaggatcgcgtcaatcatga

SEQ ID NO: 226344 - DNA, 1002 bp, Klebsiella pneumoniae
atgattgattcctcattgccattaaccgacattcatcgtcatcttgacggtaacatccgggcccaaaccatcctcgatcttggccgcgaatttaatatcgctcttcccgcaaccaccctcgacacgctgcgtcctcatgtccaggtcaccagccttgagcccgatctggttagtttcctcgccaagctcgactggggggtaaaggtcctggcctcgctggaagcctgtcgccgcgtggcgtatgagaacgtcgaagacgcggcgcgaaatggcctgcactacgttgagctgcgcttctctccccgctatatggcgatgacccaccggctgccggtcgacggcgtggtagaggcggtaattgccggggttcaagagggatgccgcgatttccaggtcgacgcccggctgatcggtattctgagccgcaccttcggcgaagccgcctgtcaggaagaactggcggcgctgctcgcccaccgcgagggcatcactgccctcgacctcgccggcgatgagctcggcttcccgggtacgctgttccgcaaccattttaaccaggctcgcgacgccgggtggcatatcaccgtccacgcgggcgaagcggccggcccggaaagtatctggcaggccattcgtgagctgggcgcggagcgcatcggccatggggttaaagcggtagaggatccagccctgatggactacctggccgagcaccgcatcgggattgaatcctgcctgacctcgaacgtgcaaaccagcaccgtggcctccctggcccagcatccgctgaagcagttccttgagcacggcgtgctggcgagcctcaacactgacgatccggcggtccagggtgtggacatcattcacgagtataccgtggcggcgccggcggcagggctgagccgggagcagatccgtcaggcgcagatcaacggcctgaccctggcgttcctcggcgaacaggaaaaagccgccctcattcagcgggttgccaaaggctga

SEQ ID NO: 226345 - DNA, 1041 bp, Klebsiella pneumoniae
atgagcgatgcgatccgggtggggctggtggggttcggttacgccagcaaaacgtttcatgcgccgttgatcggcggcacgccgggtatggcgctgaaggcggtcgccagcagcgacgccgataaggtccatgccgattggcctggcgtgaaggtaatgagtgcgccgggggatctgctggacgacccggatatcgatctggtggtcatcgccaccccgaacgacacccactttccgctggcgaaagcggcgctggaggcgggaaagcatgttgtggtggataagccctttaccgtgacactgtcacaagctcgcgagctggaaagcctggcgaagcactgcggtcggatactttcggtgtttcataaccggcgctgggacagcgatttcttaacggtcagcgcgttaatcaacgaaggtcagctgggggaggtgtgttacttcgagtcgcatttcgatcgcttccgaccacaggtgcgccagcgctggcgtgagcaggcgggtcctggcagcggcatatggtatgacctcgcgccgcatctgctcgaccaggtcgtggtgctgtttggcctgccggtaagcatcacggtggacctcgcgcagcttcggcccggcgcgcaatccaccgactattttcacgccgtgctggcctatccgcagcggcgggtagtactgcatggtacgttactcgccgccgcggagagcgcgcgctttatcgtccacggctcgcgggccagctatattaagtacggtcttgacccgcaggaggagcggctaaaaaacggtgaacggctgccgcaggaggactggggatatgatatgcgcgacggtaccctgacccgcgccgaaggggatgaacgtagtcaggagaaatggctgacgctaccgggtaattatcccgcctactatgccgctatccgcgacgcccttaacggcgtaggggaaaacccggtcccggccagcgaggcgattcagataatgaccctgattgagttgggtatcgagtcggccagacatcgcgccacgctcagcctggtctga

SEQ ID NO: 226346 - DNA, 1371 bp, Klebsiella pneumoniae
atggccgcttttccgcacaatttcttatggggtgccgctaccgcagcgtatcaggttgagggaggacacgacgccgacggtaaaggaccgtcaatctgggatatctactctcatctgccgggtaccacctttgaaggcaccaccggcgatattgccgtcgaccactatcaccgttttcgcgaagacgtggcgttaatggccgaaatgggcctgcaaagctatcgattctccatctcctggccccgcctgctgcccgccgggcgcggtaaggtgaatgaagcgggagtccagttttacagcgatctgatcgacgaactgctggcgcacaatattgagccgatgatcaccctctatcactgggatctgccgcaggccctgcaggatgagggcggctgggaagcgcgcactaccgccgaggccttcgccgagtacgcccgcctgtgctatgcgcgctttggttcacgggtgaagctgtgggctaccttcaacgaaaccattgtcttcattgggcacggctacattaacggcctccatcccccggcggtccgcgatccggcgcgtgccattcaggcctgccaccacgtgtttgtcgcccatgcgctggcggtgaaggcctttcgcgagatggctgtggccggcgagattggcttcgtcaacgtactgcaaccgcataccccgctcaccgacagcgaggcggacattaaggccaccgaactggctgacgccatccatactcactggctgtacgatccggtgctgaaaggcacctatcctgccgacctgctggcgcagacccaggcgctgtggggggtacctcgctttgctccaggcgacgacgcgctgctccgtgacaaccgctgcgactttatcggtctgaattactatcgccgggaaacggtatctgcccagccgcctgagatcgctaccggcggcgagcctggcgtggagggattattctatttcgtgcgtaatccccagagtacatataccgaatggggctgggaaatctggccgcaggggctaactgacggcattatgatgattaaggcgcgctatggcgatattccgatatatatcaccgagaatggcctcggcgcgaaggacccgattattgacggggaagtggtcgacgacccgcggattgattatctcagcagccatattggcgccctcgaaaaagcgctggcgctgggggcagatgtgcgcggctattacccctggtcatttatcgatctgctgagctggctcaacggctatcaaaagcaatatggttttgtctatgtcgatcaccagcaaaatctggcgcggaaacgaaagaagagtttttattggtacaaatctgttattgccagtcacggcgaacagcgttaa

SEQ ID NO: 226347 - DNA, 216 bp, Klebsiella pneumoniae; identical to SEQ ID NO: 210883

SEQ ID NO: 226348 - DNA, 441 bp, Klebsiella pneumoniae; identical to SEQ ID NO: 135261

SEQ ID NO: 226349 - DNA, 582 bp, Klebsiella pneumoniae
atggctgattatttactgctctttattggtacagtcctggtcaataacttcgttctggtgaagtttcttggtctgtgcccgtttatgggggtttccaaaaagctggaaaccgcaatggggatggggctcgctaccaccttcgtgatgaccctggcctctatttgcgcctggctgattgatacctggatccttatcccgctaaatttggtttatttgcgtaccctggcctttattctggttatcgccgtggtggttcagtttactgagatggtggtgcgtaaaaccagcccggcgctctatcgcctgctggggatctttctaccgctgatcaccaccaactgtgccgtactcggggtagccctgctgaatattaatctgggccacaatttcctgcagtcggcgctgtacggctttgccgccgccgtcggcttctcgctggtaatggtgctgttcgcggcgatccgtgaacggctggtggtggccgatgtccccgcgccgtttcgcggtaatgccatcgcgctgattaccgccggtttaatgtctctggccttcatgggctttagtggtttggtgaagttgtaa

SEQ ID NO: 226350 - DNA, 579 bp, Klebsiella pneumoniae
atgagcgcagtctggatagccgtgatcgccatcagcctgttagggctgattttcggcttaatactgggatacgcctcgcgtcgtttcgcggtgcaggacgacccggtggtggaaaaaattgatgagctattgccgcagagccagtgtgggcagtgcgggtaccctgggtgtcgcccctatgcggaagcagtcggcgtacagggtgagaaaataaaccgctgcgcgccgggtggcgaagcggtgatgttaaaaatcgccgccttgctgaacgtcgacccgcagcctgtcgacggcgacgcacaggaagcggagccggcccgcatgctcgcggtaattgacgagccgaactgcattggctgtaccaagtgtatccaggcctgtccggtggatgccatcgttggggcgacccgcgccatgcataccgtgatgagcgacctgtgcaccggctgcaatttgtgcgtcgccccctgcccgacccagtgcatttcactcgttccggtggccaccaccccggagacctggaaatgggatctgcatacgatcccggtgcgaaatattcctgtggaacaacatgtttaa

SEQ ID NO: 226351 - DNA, 195 bp, Klebsiella pneumoniae
atgactgtccacgacgctataccaaaagaatgcggcttatcggtcagtttcacctttttatgtcaaaaccccgctacggcggggtttttgctatctgaacccgtgacgcggatgaatgactatccacgacgctataccaaaagaacgcggcttatcggtcagctaccgttatttaaccaccttgggattctgtag

SEQ ID NO: 226352 - DNA, 1146 bp, Klebsiella pneumoniae
atgaaaatcgtcattgccccagactcttacaaagaaagcctttctgccagcgaggtagctcaggcgatagaaaaaggatttcgggaaattttccctgatgcacagtatgtttccctgcccgtcgccgacggcggcgaggggacggtggaagtcatgattgccgccacccagggaaaggaacatttcgcatgggtaacgggtccgctgggtgagagagtgaaggcctgctggggcatgtccggcgacggcgtcaccgcgtttattgagatggcggcagccagcggtctggggctcgttccgcccgacaaacgtaacccgctcatcaccacttcacggggtaccggggagctaatattacaggcgctggagcatggtgcggaacggatcattatcggcatcggcggtagtgcgaccaacgacggtggggcgggtatgatgcaggcgctaggcgcccgcctctgtgacgccgagggacaagagatcggccatggcgggggcagtttgagccgtctgagccggatcgatctttccgccatcgatccgcgcttacgtgacaggatgatccacgtggcctgcgatgttaccaatccgctggtaggcgagcgtggggcgtcgcggatctttggcccacagaaaggggcgaccgaggcgatgatcgtcgagctggatcgtaatctggcgcattatgccgacgtcattaagacgtcgctgcaggtggacgtgaagtcgatccccggcgcgggagcggccggcggcatgggtgcggcgctgatggcctttctcaatgcggagctgcgcagcgggattgagatcgttaccgaggcgctgaagctggaagaacaaatccatgactgctcactggtggtcaccggggaagggcggctcgatagccagtctgttcacggtaaggtgccggtgggggtggcccgggtggcgaagaaataccgtaagccggtgatcggtattgctggcagcctggctcacgatgtcggcgtggttcaccagcacggtatcgatgccgtattcagcgtgttaacttccgtttcgacgctggaagaggcatttcgcggggcgtttgataatatttaccgcgcgtcgcgtaatattgctgccaccctgcaggttgggatgaccactgagggatga

SEQ ID NO: 226353 - DNA, 1332 bp, Klebsiella pneumoniae
atgattttggattctacattagatgaaaaaaaaggaataccgacccgctatttaattctgttgatgatatttgtggtgacggcagtgaactatggcgaccgcgcgaccttgtctatcgccggtactgaagtcgcgaaagagctggggctcagcgcggtgtcgatgggatacattttttccgccttcggctgggcttatttgctgatgcagatccctggcggctggctgctggataaatttggctcgaaaaaggtttattcatacagtctgtttttctggtcactgtttaccttcctgcaaggctttattgatgtgttcccgctcgcctgggccggggtctccatgttctttatgcgttttatgctgggcttttccgaagcgccctcgtttcccgccaacgcccgcattgtggcggcctggtttccggccaaagagcggggtacggcttcagctatctttaatgccgctcagtacttctcgctggctctgttctcgccgctgctcggctggctgaccttcgcgctgggctgggaacatgtctttaccgtgatggggataatagggtttgtgctcaccatcatctgggtgaagtttgtgcataaccccaccgatcatccgcgaatgtccgccgcggagctgaaatatatctcagaaggcggcgcagtggtcgatatggaccataaaaaagaggccaccccggcggccgggccgaagatggactatatccgccagttgctgactaaccgaatgatgttaggcgtatttttcggtcagtatttcctgaataccattacatggttcttcctgacgtggtttccgatctacctcgtgcaggacaagggaatgtcggttctgaaagtggggtttgtggcttcgattccggcgctgtttggctttgctggcggcgtactgggcgggctgttttcggattatctgattggccgcggctgcacgctgacttttgcgcgtaagctgcccattgtgctgggaatgctgctggcgtcgtccatcatcctgtgtaactacacggccagcacgccgctggtcattacgctgatggcgctggcgttctttggcaaaggctttggcgcgctgggctggccggtcatctcggatgtcgcgccgaaggagattgttggcctgtgcggcggggtattcaacgtctttggcaatgtggcctcgatcgccacgccgctggttattggctacatcgtgagcgaactgcactcatttaatggcgcactgatttttgttggcggctccgcgctgatgatgatggtctgctacctgtttgtggttggcgatatcaaacgtatggaattgcagaagtaa

SEQ ID NO: 226354 - DNA, 270 bp, Klebsiella pneumoniae
atgaattataatgaaatagccgagaaaattattcatgaggttggtggtgccaaaaatattgataacgtatataactgcatgacccgtctgcggtttgaacttaaaaatgaaagtctggctaatgatgaaaaaataaaatcaatatcaggtgtgacagggattgtccgtcagggggggcagtatcaattaatcattggtaaagaggttgtcaattttttaacgccattcaaaaaattattgggcctgtttcagaacattcgtcaggcgtaa

SEQ ID NO: 226355 - DNA, 1731 bp, Klebsiella pneumoniae
atggccgctgatctcccgaccgccagccgcctgtacgtgctcggcgcagtggcgtttgctgaacgcgatagccgggcgcgcgactattttcgccagcttttggccttgcctatggaacaacagggcgagtgggggcttaaggcgcgttattcgctggcacgcgatttgatgcgtgattatccgcttactgacagtcgttcttctcacggtagtgagcaggaattgcgcgaagccttcgatctctaccagcagatcattgacgccgttcgtgaaggtcagcaggatccggagctgctctcgctggcaagtcttggccagcagggacgtatcaaacactggcaaagcgaccccattgccgcggctcatctttatgcccggcaggcggcgcagggttcccccagtggcagcctctctttacgctacactgtcgacgtcctcaaccacccggaaaacgaacagttcctgcaacctggcctggacgatccggttattcagcaactgctgattgcgagtttttttactcgttcgtccaatttgttgtacgagccggaaccgcggccctttgatccgacagaggtcaaaaattaccataatgagctgatagcgaagctggcgcagaaagtcgatcgcgatatggccggtagcgaccgcctgatcgccctcgcctatcgtaacggccaatatccgctggtgacgctgatgttgaaaaacgccaaagaaaatgggctcaccgcctgggtaagggccaaaatggcgctgcgggccggtgatgtcaacgcggcagcggcatggtacgccaaagccgcggcgtcatttccgccaaatgaaacctggggtttccagtcctatagtgatgacattgtcggcgaggagtttgttacgccggtctgccgtattcatgccgagcaggcgatactcgcgctcaaccgcgacgactatctgcaggcaatgcggctgatgtatcaggcgaaagaaaattactggccggatgtcgcgcacattgccgaacgagtgctcacggtcaatgaactccttgctttcgtggataaatatgtcccggcaccttctccttcagcccctactacgccgaaaaatgccgggcgcgatagcgctgacgccaggctacgcaacctgctcgcccgacgcctgatgcgcgcgggccagtatcaaaaagcgctggcctattttgcgctggccgaagatcgagacgccgcccgggcgtttatcgatgtctttccgaaaaagggacacaaaacagctcaggcgcagggctggtggcaagcggcgctaatcctgcgtcatcaagggatggaattgacaggctatgagatggcgcccgattttgcgctgtatggaggcgggtattcatggccctattacaaccagggaccggaagataattcggccgtgacatcgtggataagtgatggcgaacggcaacgcgttcagcgatccctgccaaaacaggacagtcatttcttacactatcgctggcaggcggtgacgctggcggaaaaagcggccgacctgttgccatataaatcacaggcctatgctgccgtgctgtgtaatgcaacaggatgggtatgggggcgggatgctcaattaaccaaacgcctgtatcagcgctatgttaagtacggcgccccgttcccatgggccgaaaattttggtcgggattgcccggagccggattttagcgcgatccaggagacggtaaaaaaacagtga

SEQ ID NO: 226356 - DNA, 642 bp, Klebsiella pneumoniae
atgtctattcgtgaactactcgatcccactaattccgcgcttatctttattgaccatcagccgcaaatgtcctttggcgtggcgaatatcgatcgccagaccctgaaaaataacaccgtggcgctggcgaaagcgggcaaaatttttaatgtaccggtgatttatacctccgtagagaccaaaagctttagcggctatatctggccggaattattggccgtgcatcctgacgtcaagccgattgaacgtacctccatgaactcctgggaagacgatgcgtttgtggcagcggtgaaagcgaccggccgtaaaaagctggtgatctccgctctgtggaccgaagtctgcctgactttcccggcgttgatggcgctggaggcgggctacgaggtctatgtggtgacggatacctccggcggcacctctgtcgacgcccatgagcggtctattgaccggatggtgcaggcgggggcggtgccggtgacctggcagcaggtgctgctggagtaccagcgcgactggtcgcgcaaagcgacctacgatgcggtaatggacctggtgcgcgaacacagcggcgcctacgggatgggcgtggattacgcttataccatggtgcatggcgcgccggagcgtaaagcgtaa

SEQ ID NO: 226357 - DNA, 276 bp, Klebsiella pneumoniae
atgatcaacagagaatccaacgcatcgagcattccagaactgactggctttaacgtcagccattcggctttaacccgtcaggtgttcctcaatgctacttttacggacaacatggcgtcagtacctcactggccactgaaagagtttcctgacctgttttgttgcatctccagggatagggcggaagccttgctccatcaactccagcgagcgatcgattatctggatgccgggatggattcgccctcgctatttcttatcgacgatgacctctga

SEQ ID NO: 226358 - DNA, 864 bp, Klebsiella pneumoniae
atgaaaagagggattgttacacctccgggtgtttttgagagaaaagcaggcggttttactctaaaaagaataatttctcgattggagataaattacttttgtctttattgggataagttggttattcctgagaatggtcaaatgaggtttataccacacattacagatgagcttgaatcttgtggtatgctaagtcgttttatatttagccctcgtgtgttttccagtgatacatatatttctgaactcgtaaatgcgcaattctacgcacttgatctcctccggagcaaagaaagtgatacagattggcgaatacatcagataggtaatgatgttatttatcgagaaaatgagtatatagaattggttcagagagaacttattaggattgagttgttgggcgtgctacctgtaccggacggtagcgttcatttgcatgatattctggaatttaaactcagaagaaacgctgagttagtcgcccttcattattattgtgatgaattgtacctggaaattttaaactcggcagatcccaatttacttcgcgcaaggaatttttccaaacttaaaaaggcagttgaggacttagataaaataaataatgaagtctggcaaagtcctgtaaggtttaacttagatatatcatctgaatttgatgtgtctaatataagagcaggatttgctgcgttacttggggcgtctcagtctccaatgccactaacgacggctattattggtggggtgttatctgtagcagaagggtttgttaaactaaaggttgagttaagaggtgtaaggaaaagcaatagtgtaaatcatatagtttatttgtctaacgctaggaaagaaggaattatttaa

SEQ ID NO: 226359 - DNA, 3078 bp, Klebsiella pneumoniae
atggtcgagaacgacacttcatcggttgagtatcagctatcaaccagcactggcccttttagcatccctttctacttcattgaaaacgggcatattgtcgcggaactgtatacacagaacggtgacgactttaacaaaactacgctgacaattgacgttgattattatctgaacggcgccggcgataagaatggcggtcagctgactttgctctccgcacacagtggcgctacgctactgatttatcgtgatcccgatgctacccagttaaccagttatctggcgaccggtaagtttcctgcgacaagccatgaacgcgcgcttgataagctgactatgcttatccaaaaattcggttggtggtgggactctttggctctgaaaaagccaaatattttcgctaactattatgacgcgctcaataaccgtattcgtaacctgcgtgatccttcactggcgcaggatgccgcaacaaaaagctacgtcgatagtagtgatatcgatctgcagcagcagataaccagcaattttaatcgttcgctgcgtgtccctgactcctatataagccagctaccatcggcccaagaccgcgcctggaaggggttgggttttgacggtgctggtcagcctaaattgcaggaccctgcaggaacggggctatggggatacgttccggccataggttcgtttgagcagggatcgctactcactcaacgctttgaggttcttctgtgggaatccacggatgaatactggcgctgggatggggcaatgccgaagattgtcttaccaggcagcacgccggatacggctggcggacggggtaaaggaaaatggctagatgtcaccgatgcgactcttcgctcaaacctgggttcaagcgacggcgctaaactgataggcggcctgaactatgtcacgccggagatgtccggttttgtgacgggtgcgggtaatgatgacgatgataccgctgctatccagtgggcgctggaccagaacgcggcacaggttgtcctcgactcgacgaaaacctacaacattcagccgggagttattcagtataccgggaaggtaaatgttgacgccgggacggctaaaattgtctgcgacggtgtagctgttgatattattgacggtgccgggtcggtatggcgaggcggtaacttactcagcaaaacaataccgtgggcggttgtttataatgacgactggacgataaaagagcaggggcgtctgggttatggtcggatgccatttcaggacgccaccggcattgcccctgaatatatttatcaggacgtctgctgtgcgattgtattccgttcatcggatgaaacggcacaggatggcttaactgtcaccggcgtcagggggagttatgcctcggtcattgccgcagggtttattaataccctgtttgatgactgcgtaattcgcggcgggtgcaatatgggtgttatcagcatcctcaaccatacccgcgataaagtcatgtttgggtatgttcatgaaaccagcgcaacgaatctgaatgatttcaagtgggcgcgcgggaaaaaccataccattaccaactgcacgctgttcgaaggccgtgcgatgggcctcaacattacgggtgcggacggaatttacgtcagcggctgtaattttattgataacgcagaatcgggcgttaaattcgggcagtacattgtacgtgactggactgataccgatatctgctcaaccaatatcaacgtcaccgactgcctgggcgcaggccagtggtatgacggctttgatgtgcagaatgcgtatggttcaggctcaacaacgtacctcgaccagcatctgaccgcgaccaactgccgatccattggtaatcgccgtaccgggatggttggccagggcggctataaccggtttatcagttgccatactgagggtaatggctctcacggactcattgcaaaagaaggtcggcagcagctggttgataagtgcgtgagcgtcgggaatgggctggtgacaggtggcgttgacctgaccgttattggcattggatcaataatgcagaactgccaggcgggtaatgccgtcagcgatgcgcatcagacagtgatgataaaccatcaggtcggggagcaggctggcgaactgtatgtgggtaactacggtaagaatattaacaacctggtctataactccggaaaggttaactttgatacccagattgatgtaacccgcacactgaaagcgacgtcttcagaccaggtgtcagaactgcgtggacagaagcgtggaactctgtctctgcgccctgttgcgcgttatgtccgtggcgggcgtgttgattctgaagccggggcgatggctgcatgggagcatccgtattcgggcgcgtacctgcgtttctacaccgacgacatgtcacagttgtcatcttcgcctttcgtggtgtcttacaatcacggtaaaaatgcggccaaccctaacgggtacgcagataactctggtatcggtgggctgaaggtcagttattacccgacatcgttccgtattgatgtgtatgccgccggtgcgccaaccgtctctacaggcggggcgtctattggcgcggggggtatttcacctaccgttgataaccagtcggcgctgggggcgacatcgctgcgctggacgcaactatatgcggcaaacagtacaataaatacgtcagacgctaatcacaagacgatacctgttaacccgtctgaagctgaaatatcggcattttacgagataacgtctcttccgtgggcatggcagtggctggagaaataccagatagagggcgatgaagccaggttgcattcgggcccaacggtacaggcagccattgaagtgatgggtaaacacggtctgaactggacggattattcggcattctgctacgactcatggcaggaggaaaccgacagcgaaggaaatatcatcccggctggcggcgtttattctttcaggaaagaagagctgcttctgtggatgctgcgagcaaccgtagagaagcagaaatctattgaggctcgattgtctgcgctggagagcaaatga

SEQ ID NO: 226360 - DNA, 153 bp, Klebsiella pneumoniae
atgacgaacgtgcaaatgggcttactttacttcagcgtagtggtatcggctctatatctggtagcgggcggttacaagtcaatccgggcctacttccagaaaaaatttgatgatgctgttgcagccaaagcatcggaaaccaccgagaaataa

SEQ ID NO: 226361 - DNA, 531 bp, Klebsiella pneumoniae
gtgaaaccagaatccatcgccgcggcagttatcatgcttcttcttatcatcgggctcacaatcgccgcagggctgggctatcgatatagctcggcatccagcagagctgaaacggctgaaagtcaggtgacgctgcaggcaagggttatccaaatacaggcggataatatcgctgcttttcaaactataagcggcgatgtccaggaaaaaaacagggcagtagatgccggtacagaggaaaaaaccattgaatatcgaacgattctcaagcgcgaaaaaacgtgtgatatgcctgttcctgctgacgtttctggtgggttgctcgaatacacgaacagtttacgttccagcgcagtgcacgcctataccgacggatctgacaagcccagtactggcaccattaccgccggcgaactgacatattgccaggctgttttatggataaccccattacttgctgccattgaaaaagcaaataaccagctggctggtattcgccagattgaacagaaaagacaggagacaaaatga

SEQ ID NO: 226362 - DNA, 540 bp, Klebsiella pneumoniae
atggcttcgaccaaagcaaagctcagtgcagccatgctggcgctaattgccgccggtgcatccgcgccaacgctcatggatcagttcctgaacgagaaagagggcaacagtctaactgcataccttgacgggtctggtgtctggacgatttgtcggggggcaacccgcattgacggcaagccagtaacgaaggggatgaagttgacgcaggccaaatgcgaccaggtgaacgctattgaacgtaacaaggccctggcatgggttgaccagaacatcagagtcccgctgacggcaccacagaaagttggtatcgccagcttctgcccgtacaacatcgggccggggaaatgtttccccagcacgttctaccgcaagctgaatgcgggcgaccgtaaaggggcgtgctctgaaattcgtcgttggatctttgatggtggccgtgactgccgcctcaccaaaggccagaagaaaggttgctacggtcaggttgagcgacgtgaccaggaaagcgccttgacatgttgggggatcgataagtga

SEQ ID NO: 226363 - DNA, 216 bp, Klebsiella pneumoniae
atgaaaatgacacacagagtttccgaggtcatcacctacggcacgtcaacagttagcgctacgtattggttttcgcagctgcttgattcatacacccccggccagtgggcagctattggcgtcattggcagcttggtgttcaccgctttgacctttctcgtaaatatctacttcaaatggctcgcgtatcgccgcggcaagttctcggaagaataa

SEQ ID NO: 226364 - DNA, 132 bp, Klebsiella pneumoniae
atgaaaaaaataatcgctctgttactgattgcagtgtttggtgtgatgtcggtgtcggcgatggcttgcccgaaaggcacccacccacatggcggcactggttctcatcataaaggcggtacctgttcctga

SEQ ID NO: 226365 - DNA, 2925 bp, Klebsiella pneumoniae
atggcacagggtgaatttctgacagcctgcgagcaggcagtaaacacggcggccgggcgccagctcggtgaggatgagatgctggatctggttacccgtatggaatctactgtcgcgcgtatacgggcagaaaatcaggggttatccctggaggaagccgctctccgtgctgctgatgaagtggcgcgtgatgatgcgctggcgaagcacatcgaagcgcgaaaccgggttatcaatctgcgcctcatgcatgagaaccttcagcgtattgatgccttcggtgaacgccctgatctcgccttgtccgctatcatggtggggcgcaatgaggctgtggccggttcccgcgacagtgcgtttaataacatgcgacagctgcgcgatcactacatttccggtcttgccaatgatctggaagcgcagggcgttttacctgtttttgctaatggctcactggatcagaatattgctgatgctatgtggcggttgggtaacaaccttgatgtggggcatatcccggaagacgcaatcaaaattgcccgcgtgctggagaagtggcaggaaaaagcccgcatcgatgcaaaccgtgctggcgcgtcgattggcaaattgcccggctatattgcccgccagtctcacgatatccataaaattcgaaccgcaggctttgaggcctggcgtgatgccatccttccggagcttgaccttcggactttcgaaggtctcgacgttaatggtcaaaacggtgtgaccgttcgaaaagcggcggtgatgacggaagaccagatttacggacgtgcccgcccggccaaaccactgaaacctgaaaatgtgggagcgctggcgcagcgtgctgatggacgtttttatatcaaaggtattgtcagcgaaaatgtcgatctcatgcgcggtaacgggcaggtggtgcgggcgaatttccgcaatggtgatttgctggctaacgggcaggatatcgatctcggtgatatcgttggtttccggaatgacggcggcgagtgggtgagcgccgccgggcggatcccgcgttttgatccggcggcgccgggcggactgtcgccatcacaggcggtcatcgacgattttttgcataacgtttacgtggggctgtcttccggcgtccatttacgtactgaccgcccggactggatgacgggttttaaaggcggtagcaccaacgttgcgcgccgggcgagccaggaacgcgtattgcatttcaaagatgggctgtcgtggtaccgctacaacgataaatttggcgtgggtaacttgcgtgaagccgtggggagcggtcttattcattcagctgaaactaccggactgatgcggcgtatggggaccaatccggaaaacatgtttaatgagcttgccgaccggatcgaacagcgctacaaagccacgaaagatgataatgcgttgaataaattccgccagaaacgaaacacatctttgaccaatcagttaaaggaaatcaccgggcaaaccaacattcccggtaatgccgcgctcgccagggtcgcagcaacaacccgcgcgatagaaaccatgatgaagctcggcggttcaatgatttcatcattcaatgatatcgctacccaggctatggagatgcgctatcagggacgaaatatgttgggctctgtttgggaagctacggccaataaagtccagttaacgcgttggaaaaatgcggagcgtcagcaggttcttaaatcgatcgggttacatgctgatgcgatgaaagatgagctaatttatcgcttcagtgctgacaattcgatgcctggtagagttaacagggctatgcgaaattatttccggctgaacctgcagagttggtggactaacagcagtcgctacagcactggcatgatggtttctgagtggctgggtacacacgccggaaaatcatttggtgatgtgccggaagaactgcgccgggttctctcgatgcatggcattgaagaaaacgagtgggcagcactcagtaaaatgaaactgcatgcagcggacggtaacgcctacatgactcctgacggagtagcagatatacctcgaacagatattgagaactacctcaccaaccgcgggataaaaatcaatgatcgttcagtggaatatgctcgtgagcttctctccgataaggtgcgcggttatatactcgatcgcgttggtgtagctctgaacgaaccggatgcgcgcacaatgtcgatcatgaagcagggtatgcagcgaggcactgcctatggcgaaatgctgcgatttgcatggcagtttaaatcttttacagccagctttatgcagaacgcgatcggtcgagagctctacgggcgtggttatgattttggttcactaagccagaataatacttttcgcaataacgctctgatccgggcgatgcgtaatggaaacggtgagctgatgggcattgctcagcttttcctgtgggcgacggcgttcggttatctctccatgcagacgaagctgatgcttaggggccagaccccgcgccctgccgacaatgtcagtacatggacagcagccatggcgcagggcggtgggctgggtattctgggggatttcctctttggggagtacaaccggttcggaaataccccggcgacgtcgctggctggtccgtttgcatcagatgcagcacaactggttaatctttttggactgacgaaacagggggatgcaaaagccgctgattacttcaactttgcgataaaccacacaccgtacatgaacctgcatgtggtgcgcccggtgatggacttcctgatcctgaaccagatgcgagaatggatgtcacccggttctctgcagcggtatcagcaacgtgtgaaggaggaacagggaaatgactttattattccaccttctcaatttatgcttggcagataa

SEQ ID NO: 226366 - DNA, 1707 bp, Klebsiella pneumoniae
atgccaatattcgttgatgatggtgacgcaggttcaggcctgcagcagccaggtagtaactttgaaagcggattgggtcaggctttgggtgctgctttttctgaaggaatgcgctcaggaccagccaacgctggaagtcggttttttgaatccgaggcttatgctaatgatccaacatctcctttagtagatcagcagacggctcagcaaaagtttgactctctgggcatcaaaaatatcaaagtacccgaacagggtgtaacacaggcgtatctggaccatgtaaccgagacaagccgggcgacgcaggagcggagagcaatattgcagtccgcgccttccggtgtggcaacacctcttgtttttacagccgggctcgctggagcaatgacagatcctggcaaccttgcgctggggtttattcccgggctaggagaggtgaaagccgccagcgtcgccggtaggtttgctcagagatttgtacagggtgccagcgccggcgccgtccagtctctggttgctgaacctattaatgccctggcgtcagcgtctgaaggtgatgattacaccctcggccaggcggtggaaaatttcttcatgaacacgatagccggcggtggactgcatgcctttggcggtgccattcgtgattcaatagccgcaaggcgtcagcagcgtttacagcaggataacccgcaggcggtttctgacgctgcgccagaagggcaggcggatatcgttaatgccgctgggctcaccccggacaacccccctgtattgcgtgacagttttgccgacgcacagactgacctggcccgaaccattaacactggccttgatgattatgcctggcagcgtgcatggaacgaaactattcagccctatcgtgattctctctccgggcagcttgacgggcagtcgccccgcattgccgacatcaaccggcagattgccgaaaatgaagtctcgttgcagcagtcagatcagaaattccgtgacctggcaaaacagtatcagggccagcgcatgagccgcaaacaggcggaagcacgtgcacgaaaagatattgagcaaatccgccagaacactgaggaatcgacagcacggttacgcgaagaaatttctgccaaccgggacgcggaaatctcgcgcggcaaattacgccagcttgagcgtggggaaattccggatgatctggcaagtctgattgaagccagggccaagcagatcaaacaagggttgcaggtttctccgctggctggcggtgtaagaactgcgtctgagcgtttcagcgatgcgaatatctttgttcgccagaatgcactgaggtctgcgattcgccaggcagtagacggttacaatcctgatattgaggattttttccgtcttgcagatccggcggaacgtagcgctgcactgaatcgcctgaagatgcaggctgataaccagcggcattctgatgcggccgcacgtgcagccagcacagatgcagaacaaactatccagcagcgcggagatgacgaactgcgggcagcgcaggaagacctgcagtctgaaatggaactagcccaggcgcattttaatggactggaaaatcaggcagaaataaacgcccaccttgccgaaattcaggctggggccggggatatgagttttgctcaggctgcacgcgcatttgctgcctgtatgttgaggagagccatctaa

SEQ ID NO: 226367 - DNA, 2715 bp, Klebsiella pneumoniae
atgccacaacttcctttttacaaccgtcaggtaacgacacagggcctcggtgcgggtcctgttaacctccccaactctactactgatcagcaatttttagacgaagggtccgacgcagcgtcgagagctgcggtgtcaatccagtcccatctggatgatacttctgtacaggataatctcctgaagcttgcgtatagccgttacaaccttgcagaagaacaacaaaagaaattggggattaatgccgatggatcatctgatcaagcactttcccagtttgacgattacgccgccaccctcaggcaaaatatccctcagtcccgtatggaggagtgggacagacaggctgccatcactcgccttcaactccagagcacaaccgacacacatgagcttgaccagcaccaggcattcaagcgcgggcagtatgaaggtaaccgggaaatggctatcgcagatgcccagacgttccgtgctgatacgccaaactatcaattaaccctagccagaatgaaagacaacatcacttcttatgggcaatctaacggttggtcgccggagctcatagatggtgaaattcgtaaaactgagcagcagatgtctcagaacgccacacaggcatacattgctgactggcggaccaaacaactgacatcaccaacaactttcaccccgggtgacctttcgtctgacaaagttttctcagcgatgattccagcggaatctggcggccggcagtttaatggcaatggtcagacgcttacctcgccggctggcgccatggggatagcgcaggtcctcccagccacagctgaagaaacggccaaaaaacatggcatgcagtgggacccacaacgctttatgtctgacgccagttacaacatgcagataggtcagctatatcaccaggatcttaccaaaaaatacgggggtaaccaggcactcgcggtagctgcatataacgccgggccgggtgcggtagatgactggattaacggtacgaataaagccggaaaaaatccggcactccttcgtttaggggatcccaataaaggggatatttccagcgatcagtttattgccgggataccttttagcgaaacccgtaattacaccatgaatgttttaagccgtgctcagtctttgccgccggaagctgagatatcgcagatccagaaaatgccctggtttcagaatgcgagtccggagcagaagagccagtttttaggtcaggtatccgctgaagtaaaccggcagcgcgcatacggcatgcagaacctgcaggacaccatgcaaaataatatggctcagatgcaaaacgggatcatgcccacacgtgacgtcactcgccaggaatatctctcatatctgccgcagggagcaacagcgccgcagcttgaacaattcaaccgcctgtatgatgagtatgaagcgacaaaagcgctagtgccgacatataacacgataatgacccaacccgtcgcgatggcgcagcagagcgttcaggctctttacccgcaacctaacgaccctgactttgatcgcaagttgtctttataccagaaagctaccgcccagttgcagcaggtaactcaacagcgcaaaagtgatcccggcgcgtggtttatgaaaaactcgccacttgtgcagcaggcatataactcatggcaacaaaaccccgccgatcctgctatggcacagtcatttattgcttcggtgcagtcagagaaaagccgattcggtattagcagtcagaaggtgctgcctgactcgatagcgcaggctatggctgaagggtttaacaacaacaaagaaacaacggttgaatccatcaggcagcagctgaacgcgtttgggccatattcgcaggcggttggccgacagattatggggcaaagtaaaaatggtcctctggttggtgcattatcagctggaaatccgcgggcaagtgtaccgttgtggcaggaaagaaacacaccaacatcagccctgaaggagtcagtcgttgcaaaaaatggaaagggagcagacacctccgttgtgcaagaatgggccgatgcgtctgcagatttccgtcagacgatgcttgtgcagcccggcggtgcaggaagctggtcaacgcttgacgaacaggggcagcggctgacgatgatcaacgtattacgtggaatggatgcaggcgctgcggcaaagcaggctgctgccgatatgttcaccagtcaatacactgtcaacgatacatatcgcgttccaacttatcttggctatcaaccagattacatcgcccgcggtgccagcctgtttaaagataagctgaccgcagatcagcttcagcctcttaatttcgggagtaacacgcccgacgaattcaccaaatcacaaacgctttatgaggtaaaaaataacgcccactgggtaaataactcggatgataccggtctggtgctgtatctgggcaataacgtacagaatgacgccagtggaaatccgattaccgttagctttgcggatctcgacaaaatggcgaaagctgacccatcctggtggcagagcgttaaaaaattcgcatcccgggagacgacgtatactccagggactgaaagagatgcgcgagcgcagaatcttcagggattacgtgaaacgtacggcggccaatcgcaaagcggcccatccttttctgaaggaatgagggacaccaatgccaatattcgttga

SEQ ID NO: 226368 - DNA, 342 bp, Klebsiella pneumoniae
atgacccaaccaacgaaaagacccatcatcttaagccaggtccagatggcggcgctggagaaaattcagaatgatgagcgcgagaaatcaccgtatggcgccgccccctcaatccctgatatagccagggggctgattgatatagcactggcatatctggcggcctatgagaccgaaaagcctcggaatgcatcccaaaatgcgctgattagacatcaaacaaagttaaaccagatagaatgttctcccttagccctggagcaatgtaacgactcaattatacgtacattaaatacagtgcagccggattccgaaaccgatggtaaagcggggaaaaagtaa

SEQ ID NO: 226369 - DNA, 609 bp, Klebsiella pneumoniae
atgttatttaaaattcagcctgttttagaagatagccttacgcaatggatgaacaccccggggacgtcagcgcccattacagcagcgcagggaacctctacagctaatacgccgatcactacgccggcaacagctacaaacgcagataaatggcaaaacgccaatattatcgcccaaacttcaagctctgcgctgaatgcattttcgtcgttgaccagcgcacgtcagcaatccagtaatctgaacgccaacgcgcagttgcttgaccagcaggcaaaccaggccattttaaatgccggacagcagtcggcgcttatccgccgccgcggtgctcagtttcagggagatcaggatgcgcgcattgccgcgagcggtaccggctttggtggcacgaatgcgctgctgcgccggcagaccgcgcttaacatccaggaggatgcgaacgcgatagctaacgaaggcattctccagtctgatgcactgaagaatcaggccagtgccatgcgtcagcagtctaaagctgcacgaccgggcttactgggctatttggggacaggtacatcagtggcgtcaacgtttctcggggcgaagtacggcaagaagacataa

SEQ ID NO: 226370 - DNA, 432 bp, Klebsiella pneumoniae
atgatcgttccgtttgagccctggcacctggtagccattacgccgcaaccacatcagatcggcagtatcaggactgaacagcacgccgggaacattgccagcgtcggcgcgtttacctgtctgcacaatggccagcctgtggctataggcggcatcgtacccgcggaaaagtacggactggtatttgactccggcatagggtacgcctggatgatgatttcggccgggattactcacctctggccggagatattcagggcaacgcgccgggaattacaccgggcgctggcgaactatcaccgcatcgaggccagcaccacattcccggaaggcgaaagaatgctggcgatgctgggtatgcgatgtgaggggcatctgaagaaatttaaccacaggggagaggattcttccctgtgggcgataacgaggtga

SEQ ID NO: 226371 - DNA, 402 bp, Klebsiella pneumoniae
atgactgagcctgtaatcgtccatcttgaggagttccaccttaatgaaatattcccggactcattaccgccggaggctgttgcgtcgctggtatctttcccatcgtttgcgatggaatacggggaaaaaacacttgccgctggtggcgccattcagttagccccgggccgggtcagactctggttacataccgtaccagatgcagaacagttccctgttcatattttccgtgctgcactgcggtttaccgaaatagcgttatccgaaaattatcgagtggaatgtatctgcgccgataacctgtctgcccgcgttgcaaaaatgctcagttaccagcaggacgctattatccgcaattatcagcctggctgtgacgccagattattttcaatcgtgaggtga

SEQ ID NO: 226372 - DNA, 2277 bp, Klebsiella pneumoniae
atggcaaaaatccgccctataaagcgcagctttaatgctggaatactttcgcctgtgatgtatgggcaagtagattttgataagtgggccagcgccgtcaagtacatgaaaaatttcataccgctaccgcaggggcccgcgcgtcgacgcggcgggacgcaatacgccggttcagtaaaaaacagcagcgaccgagtctggttagcatcatttcagtttagtacgacggaggcttttatcctggagtttggccctggatacatccggttctggtacaaccatgcgcaactgctggatggcgataacaacattcttgaaattgatacgccgtggggagctggtgatctgacccgtaacgggaaatttggcctgtctctgcagcagtcagcagacgtgatttacataacctgcacaaatggaaattaccctgtttataagctgacgcgcaacactaataccaactggagcctggcagaggccagtttttccggtggcccatttgctgatattaattctgacaaatccagcgtcgtttacaccgaccagttcaggatctggtctgaggatggaaacgatttgcctgatggcaccccaaccactacaagtctctgcaacatcactgccaacacagatatttttcaggcttcgcatgtagggtgtcttttttacatcgaagccagcactgatgcagtggatgatgataccggtcatagcggttacatacccgcctgggctgctggcacatcagaaactttctccgccggtgttttctgccgttcagatgggaaatattacgaagacatggacggcaccaagaccggtaatacgcagcctacatggacagctggcgcccacagggatggaagtggtggtgatgcgtcgctctggcgatattcaggcggtggctgggggatcattgagataacagcggtcaatagtgccacatccgcaaccggtaagatcgtcactgaactaccacccagcgtcagaaacacagttgggaaaacgtataaatacgctttcggtgactggtctgatgttctccgctacccccagtttgcggcatttttccggggacgcctggtcttcgcaggccgacaaaaaatatggtccagcgtcgctggtgatctgcagaacttcagcccaatgacaaatggctatgaggcagaaagcgatgattcgattaatgatcgcattgatgatactcaggacaccatgcaatggctggtcgcctccgcagggaaaatatttatcggcactgccgggtatgaattctcctatggcgagcaaagcctgacttccgtttttggcgcgggtaatacaaaggttgagctgaacagtacgatcggcagcaacgaagtgcaggcagagcgcctttttgatcgagttgcgtttgtgcagcgtgctgggcgcaaggtgatgattgccgcctatgattcgggcagtgactcgttttcagcaaccaattcctgcattctggccccccatctttttacgtctgaaataattgctctggcgtatcagcaggagcccaaccggatcctttgggtgttgctggaagaaggcaaactgctgggactgacctatgacgcagagcaaaacatcaccggctggcatgagcatgctaccggcggtgcggtggaaagtattaaggtcattccggatatcgatggcggacgcgatgagctgtggatggttgttagacgaaccataaacggcgcaacggtgcgctatctggaatatatgctgcaggaatatgacagcgcgtttatcacccaggaatgggcgcgagtgctggattgtatggcgacatacaacggtgttgcgacaacggtcatttccgggctggggtttctggaagggcagacggtggcagtcgtgaccgacggcgccacgcacgcatcgcgaacggtaagcggaggcagcatcacgctggactggccatcatctgttgttcacgtcggaatcaataatgcggctgaaattatcaccttgcctctggaagggggtattaaacgctttgccaaagcacgactgcgttttatcgatacgctaggcggtaagttcggcgatgagggcggaaaatatctggataagcttcgcgcgcgagactactcagacaatatggatgaggcgccgcctctgtttaatggcgtagttaccgttccgtggcctggcgagtttaatgagaatggaagcatccgtatcgtgcaggacctgccgcagccaatgaccattgtcagcatcgatccagtaggagaaatggaagatgactga

SEQ ID NO: 226373 - DNA, 606 bp, Klebsiella pneumoniae
atgaccggtcagacagatatcatgaatctggcgctggtttccttcctgggatccgaccatctcatggatcgtgatgagcaggataaaaacacgcgcgtgatgaatctgatttacaaccctctcctcgaaaaactacagcgcgaatatgcctggaatttttgcgcccgcagcgcccagcttaccccgttaaacaaaacgcctgtcatcgactatcaatacgcttaccagctgcccgttgatttaatggtactggtatcggtgggggacagatattacgggcgtgatttctctgaatacgatccccgcctggtcacggctgaatatcgcatcgaggggcgggaattgctgacggatctacagccaccgcttagcttgcgctatcgggccagagtaaccgatgcatcacaattcgactccacctttgttgatgcgctggcttgtatgctggcagttcgctcctgtaaagcggtgaccggcaaggatacgctggttgaatcgctgttgcagcagttccagatgatcatcgcaggagccattcgcgtaaacgcaatagaaaagcccagtgagaaattcccaccttcaacctggatggaggctcgtttgtaa

SEQ ID NO: 226374 - DNA, 474 bp, Klebsiella pneumoniae
atgtttgttgatgcccagcttgaattttctgactctcaggcgatcactgcctcagcggccagcacgaacatcatcgattttaacccagcattcgattacaacactgtgatcgatgctggcgctggcgagccgacttttctggttgtgactccgtcggtgacattcgcggccgcaggggcggctacgcttgcgattgagttacgcgcttatgccaacgaggacaaaagcgatacaccaaccgttattttttctactccagcgaaagcgctgggcagtctcgtcgcaggtaaaccggttgtcgtggtggcgctgccttcggccaattataaacgctttttaagcctgcaatatacggtcgctacaggcccgttcaccgctggcgcattagatgccttcataacgaaagatgcacagacgtggcgctcttacgctaataacgttgagttcgccgcgcttaatctcagcattgcttaa

SEQ ID NO: 226375 - DNA, 996 bp, Klebsiella pneumoniae
atgccaacacttaccggcttaccgactctctgggacgcagcgaaattgcttgatcctgatggcacttctgcgaatgtcgcggaggttctggatcaggacaacgaaatgctctgggattgcccgttttatgaaggcaacctgccgaccggaacgcgcatcacaacccgtactggtttacctgctgtgtactggcgcaagctgaacaaaggtattccggaaagcaaggcaactaccgcgcaggtagatgagactaccggtcttcttgaagcccgctctcaggttgatgttcgggttgctgcgctgaatggtaatacggcaggttttcgcttcaaccagtctaaaccgttcatggaagcgatgaaccagaaggctcaattccagatgcttaacggtacgcttgttgggcaaccggaggcattcctgggcattgctccacgcttcagcgatttgtctgcgcctaatgccgacaacatcatcgacgccggcggtactggtgctaatctcacctcgatttatctcatcggatgggcgcctgacaaggtctacggaattttcccgaaaggttcaaaagccggtctgactcatcgtgatttgggcgagggcgacgcctttgatgatgatggcaaccgcttccgggcgctgatggacctatatacctgggatctcggtattgcgctgcacgactggcgctacgtcgtacgcatcgccaacattgatgttaccgctctgcgtactaacgctaatgcgggtgcaaacctcatcaaactgatggctatcgcggaagagcgtatccagtcactggttggtgtaagcccggcttattacatgaaccgcacactgcgcgcgatgctgcgtctgcagctggttgatgccgtgaaaaactcaaccctgacaatggaaatggctggcggacgtcgtgtgatgttctttggcgaagttccggtgcgccgggttgaccagttaaaaatcggggaagctcaggtcgtcgcctcttaa

SEQ ID NO: 226376 - DNA, 759 bp, Klebsiella pneumoniae
atgaatctgtttgaacgcttaatcctgcgccgtctgatgaatgcaaccattgaaggcggggaaggtggtggcgctgccgctgccgcaggtgttgattctgccgcccagcagcagaacagcgatgcggcccagcaacaaaaccttttaaatccaggcgctcagcaacagcaggggggagagggacagcagcaacagcagcaagccgcccaacagcagtcgcagactaccgcgccgttcctcgaaaaacttccagaagatagcgacgaaaaaggctggcaggaactttacgagaagttggggcgcccggaaaaagttgaagactacggtattaagccaccggaaggcagcgatgggacatttttaaatacggctttgagctggatgcatgaaagcgggctcaacaaaaagcaggctgaaaccgtaattaataaattcaacgaatatgcagccgaacaacaaaaaagtgcccaggaaaatattgctaatcaaaatgctgctaaccgggaaaaggttatcaagtcctggggaagtgaagttgaggcaaatacagcgatcctccagaacgccgtgcagcgatttttccccgatgctgtgattgaaaaattcaacactgcgggattactcaatgacccagaccttgtgaatgcagtcctggcgatcggtaaagcgctaggtgaagacaaaacagttacagccgcagcgacgggtaatgcagcagaaaaagacattgcccaccgcatgtggccgaacatgcaataa

SEQ ID NO: 226377 - DNA, 327 bp, Klebsiella pneumoniae
atgatgaaccgtataaaaagtctgtggctcacgctgaatcgtgcgcgggctttccagtcagtcttcggcaccccggggaacatgacgccggaacagaaagttgtcatccgactattggcaaaactctgtcacgtcaattcttccagtgtcgctatttccccaacgacccagcaaaccgacccatacgccgtatttgtttcggagggccgccgggaagttttcctgcacataaaccactatctcggcctgtcgcaatctgatattgccgcaatgatcgccgaagagatgaacgaacttaacgaggacgacaacaatgaatctgtttga

SEQ ID NO: 226378 - DNA, 1665 bp, Klebsiella pneumoniae
atgtcagaccaaaaaacacaagaaaatgaatcagagcgtatcggccggatactgcgtgagcaaaaaagcatggaaaccgatcgttccgtgttcgagcagcactggcaggaaatagcagagcgcattctaccgcgcagtgccgagttcaaagggaccaggcagaagggcggtaaacgtaccgagaaagcgatagatgctaccggcgcgctggcgttgcaaaaattcggagcggccatcgaatcagttatcaccccgagaacacagaaatggcacactctcagcaatgagcgattcgctaatgatgaagaggtacagcgttatttccaggaggttcgcgatattctcttccgcctccgttatgcaccgtgggctaatttcgcctcgcaatctcatgagcattatatttcctcgggtgcatttgggaccggctgcacgttcgttgataacgtgatcggaaaaggcccgcgttattgcacttatcacctgcgagaaatttatttcactgagaatttccaggggatgatcgatgttgtccaccgtaaatattgcatgaccgcccgtcaggctattcagcaatttggcgaagaaaatctccctcaacaggtaagaacgaccgcgaagagtgacccttcaaagcaatttaacttcctgcaccgcgtcgaacctaatgataaacgtgacatgtcacggcaagataaagagggcatgccattccggtctgtgcatatttgcatggagggaagcaagattgtgcaggagggcggctactggtcacagccctatgcaattagccgatattacaccgcgccgggtgaggtatatggacgctcacctgcaatggttgttctaccggatattaagctgctgaacgaaatcaaccgcgccattatcgagggtgcgcaaatggccgtgcgcccgccgatgctgttaccggaagacggcattctgcaaccgttcaaaatgatgcctggcgcgctgaacttcggcggaatgaaccgggacggtaaacctcttgccttacctctgaatactgctactgattttagcgtggcgatgacgctggcagagcagaaacgacagacaatcaacgacggtttttttatcacgctcttccagatcctcgttgataacccgcaaatgactgcaacagaagcgatgctgcgtgcgcaggaaaaaggtcagttgctggcgccgaccgccgggcgtattcaggccgagttcctggggactctgatcctgcgggaaattgacattgcttatcagaacggtctgctgcccgaaccgcccgaacaactgaaagaaattggtggcgaatacgatatcgaatacaccagcccgctggtgcgcctgcagatgagcgaagaagcgagcgggattatgaacgtcattaatgctgcgggcactatcggacagtttgatcagagtatcgccagcaccctgaatggcgatgccgcattgcgctttattgctaaagccagtggtgcgccgctacaggtggttaaaaccgaagatgaaatggctgcgcaggatgctgcagatcagcagcagctgcaactacagcagctgcttgccgcagcgccggtggctgcaaccgcagctaaagatttcgcccaggccaatcagattgcgcagacacccgcgccgtcgccagcgttacagggataa

SEQ ID NO: 226379 - DNA, 1395 bp, Klebsiella pneumoniae
atggcagaaattatcctccccgcgaacaactggacaccacgcccacatcagcgaagggcatgggctgaaattcagggtggaaaaaaaagagcggcgctgtgctggcctcgccgttacgggaaagacgatttcagcctgcacatgaccgcgtgtaaggcgttcgaacgcgttggaaactatgcccatagcctgccgcaagctaaccaggtaagaaaggctatctggaaggctattaacccgcgaaccgggcgtttgcgtatcgatgaggcttttcctcatgagctgagacgaaaaacgctcgataacgagatgatgatcgagttcataaacggttccacatggcaggcattcggcagcgacaactacggtgctctcattggttccggtcatgtcgggattgttttctcagaatgggcactaagtaacccctctgcgtgggcatatttacgaccgatactggctgataacggcggctgggctttttttgtctccacgccccgcggtaaaaaccatttctacaaaatgttccagggaggattaaaggatcctgaaaactggttttgtgatcaccttagtgccgatattactgggcacattccgcctgaaacgcttgcgcaggagcttcgcgagatgcaggcggaacgtggagaggaggaagggctggcactcttcaaccaggagtacatgtgcgactggaatgcagcggtacccggcgcttattactcatcgatcttggttggactggagaaggccgggcaaatagggaatgtgccgtgggatcctcagtatgaggtttacacgtcatgggacctgggcattggcgacgcaacagccatctggttttatcagtttatcggcaaagaagtacgcatcattgattattacgaatcgtccggcgttggcctggagcactacgtaaaaatattgcgcgagaaaccgtatacctatgctgagcgtcatttcttcccgcacgatgtacgcgcccgagaactgagcaccggagcatcacgcgaagagacgctgggcaagctggggatacgctgcaaggtactgccggccacatcagttgatgatggtatcagcgaggtgcgtatgatgctgcgatcctgttggttcgacaaaaccaaatgcgaaaaaggcctggaggctctgggacagtatcaaaaagagtgggacgacactcgaaaaatgtataagccaacccctctgcataactggacgtctcacggcgcagactcattccgttatggtgcagtaggcagtaagtctttgcgtagcggcaaccgccacacaacccagcaatttgcccagtccaattacgatccttataaccctcctggacatagccagcagttttacgctgattccgactgggatctgtatggggacaactga

SEQ ID NO: 226380 - DNA, 453 bp, Klebsiella pneumoniae
atggcagcgccaaagggcaataaattctggctggcacgcagcaagcacgggagaaacccaaagttctctgatcctgaaaagctgtgggatgcctgctgtgaatatttcgactgggtggaaaaacatcctctgtgggaaaccaaagcattcagttttcaggggcaaatcactaaagccagactcccgaaaatgcgtgctatgacgcttagcggcttgtttctgttcctcgatatcgaccggaagacgtgggaagcatacgcgaagaaaaaagatttactcccgatcactacgcgagtggaaagcctcatctatgagcagaaattttccggcgctgccgctgatctgcttaacgccaacatcattgcccgcgagcttgggctggtggagaaaaaatctgttgagggtgatctggaaatgaccgtcaaggttaagcactttaacgagaaagaatag

SEQ ID NO: 226381 - DNA, 261 bp, Klebsiella pneumoniae
gtgaaaaaactgcatgagttagacaccagcattcaggtggagatcgtcaaaagtgctggcgctgttctggctaaaaattttggctggcccggcggttcggacggaacgcaggcagctaaagacattgtcacatctgtcgtggatgcattcctgtcgctttacccggaagaaaaaccacacgatgaaaaaattgaagagccaaaaagcgataccgaagaaattcagcagaaacggaaatacacccgtcgtaacacggagtaa

SEQ ID NO: 226382 - DNA, 234 bp, Klebsiella pneumoniae
atgatcacccttaatgacgaagaagccgaaaaactcctggagctgatgaaagcccgctttcttaaagcgcacctgaatacagccatgtatggcgcagctgcttacgcgaacggcaattctgaccgtgtgattttacgcgcagtaaaaaacagtgacgcaccagaactgaaaatcctgatgaccgctatgggcctcatccctgaagaggaagacaacagtgaaaaaactgcatga

SEQ ID NO: 226383 - DNA, 357 bp, Klebsiella pneumoniae
atgtcgggtttaaccagaaaaaaaattgcggtgcttgagcttattcgcacctgttcggaaggggtaacgtctgccgaagtgatgtattcgctcggtatgtcacgcagcactgtattttttattttggacagtctgcttaaagacaatcttatattccgcgcccacaacgaaacaggacgaaattcacgtcgcatttatttcccaacggcagagctggcggagaagttttccggaaacaaaatccctatgagcaaacgtgaaagctttttcgactcctgccggcgccacagcaaaaactacatgatcactctgctgctgcggagtgcacgacaaccaccgaaagaggaaaaccaatga

SEQ ID NO: 226384 - DNA, 303 bp, Klebsiella pneumoniae
atgactaaagacgataaagactggctgtcagacgtagccgaattgggttgcattgtctgtcgcaatctcggtttcggttccactccggcagaaattcaccacatccgaaccggtcagggcgccggccagcgcgcaaatcacaaaagaaccttgcctctttgccctgcacatcaccgcactggcggttttggcgtggcaattcatgccggacaaaagacatgggagggcaaatacggtaccgaactggagttgctcgatcaggtgacgactgaagtgaaggtattgcgcctatgtcgggtttaa

SEQ ID NO: 226385 - DNA, 591 bp, Klebsiella pneumoniae
atgaacgaaaaatacaccttgatttacgcagatcctccctggacctaccgcgacaaagccaaagatggagaacgtggcgccgggcataaataccagacaatgactgtgctcgatatctgccgtctcccggtctgggagctggccgctgaaaactgcctgctggctatgtggtgggtaccaactcagccgctggaggcgttgcgagtagtcgaggcatggggattccgtctaatgaccatgaaaggctttacgtggaacaaatgctacagccggcagaccaacaaactggccctgggaatgggccatttaaccagggcgaacagcgaggattgtcttttcgctgtgcaggggaaattacccgcccggttggatgcagggatcgttcagtcatttacagccccgcgtctggagcattcgcgcaaaccagatatcgtgcgcgaaaagctggtgcagctgctgggcgatgtaccgcgtattgagttattcgcccgccagtcatcgcatggtttcgatgtgtggggcaatcagtgtgaatcgccagcggtggcgctgctgccgggcattgccgaatatatcggagaggttgcttag

SEQ ID NO: 226386 - DNA, 135 bp, Klebsiella pneumoniae
atgaacgttgaacctgaaagttacagccagcatgccctgctcgggtttgcagctgtgatcgacattgcaggttgtgtcgctgttttcatcgtgacctgggggatctgcaatctgattgagtggtggacggcatga

SEQ ID NO: 226387 - DNA, 786 bp, Klebsiella pneumoniae
atggctaaagactcaaagcttgtatacggcgccagtggcaaaacgaacgttttagcgtttgaacctgaaaaactgcaccttgttaccgacaaaacgcacccgctttacgatgagcgtatccacttgcctatcagcgaggcaatgatactgaacatcatggaccagggcgttcttgagccgataatcgtctggaaagacccggagacaggactctcttgtgtggttgatggtcgccagcgtgtgcgccatacactggaagccaataagcgtctgtcaaaattgggcaaagaaccgttactggttcctggagtccctaaacgtggctctgccattcgcatggcgcaggcgatggtaagtgctaacgaaatacgccaggcagatacaccgctgggccgagcaaagaaaatggctgatgcgctggagcgtggccacgacgaggacgatttagcgctgatgtttggcgtgagtgtccagaccgtacgcgcaacgctgtcactgctggatgccacccaggctgttcgcgatgcagtggagtccggaacggtcaccgttacccaggcgcgtcagctggcgtctcttaaacccgaagagcaacgggagaaggtcaagcagatcgagacagcgaccgccggcaccacgggccatgaaaaagcccggcggcagcgccaggttcttggtgaagcaaagccgcgtatcagatcacgcaaggaaattacaaaagccctcgaaggtgccagcggtgaatacgcggcggctctgcgctgggtgctcggggaggcgcaatga

SEQ ID NO: 226388 - DNA, 234 bp, Klebsiella pneumoniae
atggccgggcaatcagattatctgccgcccggcttaccgctaaatcgcgccaaatggccgcaggagtgccagctcaaagagcactacgacatgcgggcagcggcactcatacgtcagctgttcgagaagaaagttactcgtcagttcatcgttgagtcgattgcagcgacgccggaaagctaccgggagttttttaaagagagattaaatttttggcgggagaagagagcatga

SEQ ID NO: 226389 - DNA, 651 bp, Klebsiella pneumoniae
atgaccacgaatttaaattacccaaaaccagttaatccagacgatggctgtaactggatccccgtaattctgtggcgcatgaacgccggcgcccgtgcgcgtagccgttctgtgttcgtcgctgccccgcggccagtaccagttccggggctcaccccgaaaaaaccggtaaaacgtgaaactgctgcgcccgctgtatctagccgccgtcgtaaaacacatgtcggcaccgtgatttattacaagggtgaaaaaactgtacggctcagcgagggtgctaccgtctggtctgctggacctaatgagcattttgataaaaaaactggccagcgtgtcggcagcattggccggcatcgcctgctgctggagagtattaaacccctgaatagcaccattgatgaagtttccgcccagcagttggttgcgctgatgaagggtaaaacactgtcgtatcagaacattctttcagccatcaaaaaacatcatcctgatgctgagatcaccttacgtgatctgcaaaaacgtatctcgacgatgctcgcatcgaatcacgtcggaattattcggcatgacgacatgccagtgccgcatttcacactgaccagcgtggatccccgctattacgccaactcagaaaaaacgagggcatga

SEQ ID NO: 226390 - DNA, 1389 bp, Klebsiella pneumoniae
atgactccgcaggaactggaagcttgtgtgctggccggactgctgaacggcggcgcaagcccggacgctttcgacgtgatcgcctcgacgcctgaagaatctttcagcatcggatttcaccgtcgcgcgttctccgaaattaaaaaacaggcgctggcgaacggcctgatcgacatgctgtttgtcagtgaagcgctgggcggtagtagcctggctgatttatcagaaattacacgtatgcctgccacggtaccgaacctgaagggttacgccggcaaaatggttaaggcgtggcgcagccgccgtatggccgaattactgcagcagggcgctgatggcatccggcaggcaaacaaccaggaacagcgcgatcaggttgttgaaactgccgtggcgcagctgctggacatgaccggcgacactggcgacgtgcagccggtacacatgagcgaattactgcctgtgtacatggaaaccatgcagaaacgcatggacggtgaagagggcacccgaaatttaaagaccgggatcgacgaactggacgatgccactggcggtattaacctgcaggatttgattgttgtcgctggccgtcctggcatgggtaaaacggaatttgcgctgaagattgtcgatggcgttaccgctgccggcggtggagcgctgatattcagtatggaaatggctgctgcgcaaatcgtagaacgctctctggcgggctctggcaacatgtcggtttcacgcctgcgtaatcccctcgatatgcaagatgaggactgggcgcgctttacagcggccatggagaccatgaacgggcgcgatatctggatcgtcgatgctaccgatctgacgattgagcaaatccgggctgttgcagagacgcataagcgccgctatccacatctggcgatgatcgttgttgattaccttggcctgattaaaaaaccgaaggcagaacgtaacgacctggcgatcgcccacatttcccgaaaccttaaaactatggctatgcgcctgcatacgccgacgttcgcgcttagccagctttcacgcgccgtggattcccgtccggcgggccagcgtcgcccggttatgtcagacctccgcgactccggttctatcgagcaggacgccgacagcatcatgttcctgtaccgcgatgaagtctacaaccctgaaagtccggcggcggggatcgccgaaatcatcctggggaaaagtcgatttagtgctgctggtgccgttatctatcaggagtttaaaaacggtcacttcctgcacgttgatcagcatgtcggcaaagagaaaacacgcattcagttggaggcagcaaaaccacgaaaacaaccgcgtagatattcagagaagtacaacaccgatacattttaa

SEQ ID NO: 226391 - DNA, 969 bp, Klebsiella pneumoniae
atggccaaagcaatggccatcaaaaccggtaacccgatacgaaaactagtgctgatcaaactggcggataacgccaatgattccggcgaatgctggccgtcttataagcatattgccgatcactgcgaatgcagcaaaagcgcagttcgtgatcatatcgatgcattaatttctatgggtctgctggtcaaagaaaaccgcccgggggtaaaaaacggaaagggaaacgcatcgaatctgtattgtatgaatctcgataaccctatgccgccaaaaagcatagcccctatgccgccagaaagcacaggtatgccgccaaaaagcatagcccctatgccgtgtggcggcaccagaaccagtcactcttttgaaccagtcatagaacctactgatccccctaacccccaaacgggggaaggcgaggaaagaattaattctaatgctaaaaaagcgctggaattttacaacgagaaaacgggcacccgctgccgtgacctgaaaccgtttgtgatgatgctgactcctaccaccactcgggaagggtacaccttggacgaactgcagttggttatccgctgggtgctggccacatggcgccgccgtggcgatagcctgccgaagcctgcgaacatttgccggattaaccgctttgatggctatcttgctgacgctgaggcgtgggctgttttggaggcgaagatcgacccggaagccgtcatgaacggctacaacgaaattttcgctgacattctgcctgctgctgaactggatgccgaccgccgccggacgatcacccgccttgctgctcacatgaaaaataaaactaccggtgcattcctggggtacttcgaaaaatttcgcgctgatgctcctgatttttatttcggtacagatggcggatggcgagccagctttgactacctgatgaaacctgaaacgttacgtaaaacccgggaaggttcgctatga

SEQ ID NO: 226392 - DNA, 222 bp, Klebsiella pneumoniae
atgagaacacaagaccgcatcacctggcggaacgggtttcgccggaacggggtgcaagtcccgatggaagatatcgaatcgattttcgaggaacgtcgcgctgctgcgctgacgatctgggaacgctacgagctgcgcaaggcagaactgcaggaattaggtctgacccagaaagaatatgaaatagcctgccgccagttggccgatacgctggggatctga

SEQ ID NO: 226393 - DNA, 447 bp, Klebsiella pneumoniae
gtggaaaacatcgaggaactgaagcgagagatattcagctgggcggcagaaagtgggcaggagctggttgccatcgagataagccgtatgtggtttcgtctcggtggtaacaccggcgtgctgaaactgcaccagattgaagacgcagatggaaaagcagactggcgagccatcaacaataaccgccagcagatttttcgctggctgcgtggagaaactaaagcggccagaaccaaaacccaagcgctggccaaggcgatggaagcggcactgccggcggaacgttacgcacgcctggacatgtctacccagtatttgatctgcgtcgccatacgcgaatttgcggcggccattatcgcgttattgctcgaggccagagacggcccgcagcaagttgcgaaggcattgcaagcgatgagagaaacacagcgcctgaccagcgtttaa

SEQ ID NO: 226394 - DNA, 246 bp, Klebsiella pneumoniae
atgacaaataacccattcatcgaaaaaataatcgatgctggcttatcagcatttgagcacgaaaataatagcgattttggttcagggactatgcatatcaccattatcggcggtgttcgtcgtgtcgagttctaccctaccaccggcaccgtttacgctaatgctgaaaagggaaaattcctgacattccgacagaaaaaagccgggattaaagttgctatccgtctagctaaatctggcgcctga

SEQ ID NO: 226395 - DNA, 2142 bp, Klebsiella pneumoniae
atgaccatctacaacggcttatttgagccaaaaaaatcggctattaaggactgcggcgccgtgcagctggcgatcgccgtcgaagcaccgaacaagaaagtcgctgaaagtattatgaccggaaaactctgggagtcttacccggcgaacggagacaactatttcaaacctaagctgtgggaacacattgaaggccagccactgccggcagtcggccagttcgatgaacatttcgcccaggaaaacacctttgacggtgaaaaatgggtggctaacagccaggatgacggcgccaccgagttgccggcaggcgatgaagttatcgatctgatgacggtatcccccagggagcgttttgccgctgtattactcttcagcaaattagagataaccggccagctctattcgcaggttgtagattatcttgatgatctggataatcacgatgaaaccatggaagaggatgaccgctttaacttcaatgtactttgcgccctgcacaacaacgagccggttaaacatatgcatgttgaaggcctgaataatcttattcatggcattttctcccattttgaaaaccagacgccgggcaaagcggctatttctcaatttgtaaaacgctggctggaaaatctcggtaaacgtgaagacatggtaccagttgaaatcacatcaacagactccgccaacactgaaacaagcgttaaagtcactccaaagcgaggttataaacatacctatgcaacactggatcaggagatcgctgtcgccctactccctatttctcccgacgcgccagtattatcaggcaaccttcgcgatgctgagaaaatcattgcagacgagcgcgaagattttaaacgttggtcaatggcgcttcgcaccacggagcacatcctcaaatatgaccgagacagtatttttggcgtagtgcagaacgcaccggcaaaagatacctaccatttccctgacagcctacgccgccacattgattcatggctggaggcaaacggccgctttgaagaaaccgagacaggatccgttaaacaaccagaggcaacgcaaaataccgcctcaaacgaggtcgaaaaagcggaagcactacagccggtggtaaccgatacccaggccaaacaggcgcgtgagacgctcaacgatatgggctatggcgtttatgcgtcagacaattacagcgccagcgagccagaggaaaaactgagcgtcaaagcgcaaagaattgctgatgatgtggagcagttggtagagcacataaaccagaaagaaactatgcctcgcgctgaagaagtcgtgcgattagtcgataatcctggcaccgaacaagacaacctggcgctgtggaaacgcgtcttcaaaaccgatgagcgctttaccaaagcattcacgcaaaacggcggcggcacctcaatcaacggcacgtatcttacgatgctggccacacgagagtttgggccaaaaggtcagggctggggcgttgatattctggaagaacgttttgatacaggcgcgccaattacccgcactatcaagggtgccgatggcaataacacgtgggaactgatccctgatggtatgggtggcatcctcatggagaagcaccacgttattaaaatcaggctttggtatctgaagaacgatgtacgcggcgaagaatacacctatggctgcactccctacatttacggaagtaaatacggccctatctgcgacggcgaagctactaaaaaatcactaactgacgccaccaaaaaggcgttatccggcctcggattcagcggcgatatctttatgggcctctatgacaatccagaatatcgccagaaaaacaaagcagagtttgacctcaagaatgccagcgaaaccgccgaagatgcagcgcggttgcgtcaggagttcgacgacaaactaacccgcgtcgccaatacactggcacatggcgtaacagtgaacgaaataaacggcgtgttctcccctatcgcacgtgaaatcgatgttcacattaaggccgcacaggccaacggcgacaagcaacatgaacgctatctttctggccgcctgcgccgcctgattgccattaaagatggtcgtctcaaagaactgaataaagccgaggagaaagcataa

SEQ ID NO: 226396 - DNA, 225 bp, Klebsiella pneumoniae
atgaccagagaaaacgatctccttaccgacgatgagctggtagagctgaccggctaccgctttccatcaaagcagtgttcagctttggcgaaatccggaatttcatttgttaaacgccgcgatggccggcctcgtgtgacatggacacatgtaaatgcagcactattcggcgaccgcaaaatagttgctgacgaagaagaaaaaccaaactttgatgctatttaa

SEQ ID NO: 226397 - DNA, 849 bp, Klebsiella pneumoniae
atgacattcagtaaattatgggggttatttcttaagagtgcctattatcttgaattgaaaccaaggacgcagaaagattatctgcaacatcagaaaaagctacttgctgtatttgggaagattacggcagataaaattaaaactgaagatatcaggatgtttatggataggcgaggcttgcaaagtaaaacacaggcaaatcatgaaatgagtagcatgtctcgtgttttcagatggggttttgagcggggtatggttaaagggaatccttgccagggcgtcagtaaatttaaagctgtcgcccgcgggaggtacattaccgatgcggaatatgaggccatctataaggaggctgatgatgtcgttcgtacagcaatggaaattgcctatctttgcgctgcccgtctggctgatgtcctcggcatgcagtggcgacaggtaacaccagaaggcatcttcattcagcagggtaaaaataatgttagccagatcaagcagtggacagaccggcttcaacaggctttcgaactcgcaaaaacattctctaattccggcaatccaggatccttcgtcctgatgggctcacatggtagcgggttcagtaaaagaggattcagccaccgatgggaggaggcaaggcataaagcttcggtaaaattagggtacgttctcgactgtacgttccacgatttgaaggcaaaaggtatttctgattacgaagggagcagccgggataaacaactgttcagcggacataaaacagaaagccaggtactgatttatgatcgtaaaacgaaggtgtcacccaccctcgacaagccgccaattgagaccagaaattctaagtga

SEQ ID NO: 226398 - DNA, 1092 bp, Klebsiella pneumoniae
atgggcctttacgttaagaaaagcattcgcgttggaccaataagattcaacctatctaaatctggagttggtgcatctattggtttaaaaggactgaggttcggtactggcccaagaggaaactacgtacacataggtgctggtggggtctattaccgagcgtcaatatcaccacgtatgtcttcacagagcgggaagaatgtccaacgcataccagttgataacccagcagaacatgacaatactcatgcgcctcttgaagaaatcgagtcctctcatatctcggaaatcgttgattcaagttccggagaattgcttaaagagttgaacaataaacgtaagaagttacaaatatggcccttggtcatgtgcctttcaattgcgctgttactttacggtttttcacaggcatggcctgagtggtgcctcgctataggatttattgtaggggtagcaatatctgtttttgcttacatgtacgatcagctaagaaagactactgttcttttttatgattttgatgatcaaatgatggcatgttaccagcaacttcatgatagtggagccaagctcgcaagctgctcaaaagtttggcatatagaagcttctggagccgtttatgatcccaaatatcatgccggggctggtaacttactacgcagaaaagtaacctctgtcagcaaatcaaagcctccctttgttaaaacaaatattgagacgattgctatcaatgtcggtcgccaaacattacatttttttccagatagagttctcgtttatgaccgtgaaggtgtaggcgctgttggttataaccagctattcgttaatgttgccgacagtcgattcattgaaagcgaaggtgtacctggagatgccatagtcattggaaggacatggaagtatgtgaacaagtctggaggcccagacagaagatttaaagacaattcagaacttcctatatgcctttatgaaaatctttcgtttacaagtcattctggactaaatgagttattacaactgtctaaaactggctatggagaaagcttttcacattcaattgaaacacttagcaaaaaagtcatttctgcttag

SEQ ID NO: 226399 - DNA, 1326 bp, Klebsiella pneumoniae
atgcaacatttccaagctcactctaccgatgacttgcgtcatttaatcgctgaatatgggcaaaatgcgctatttcgtggacaaacaacccattacggccagccaggtcacccctctgttgtcgcatctgccgatcgtcaaatatgtcatcctagtacaatgttaaaatggtgtacctactctcgaaacgtacttgagactttccttggcaggcataaaaacgagccgcattttgtccaagctcttctccagcattatggatggcggtcgttttacgttgattgttccgcaaatcccgcagtcagcacatggttcgcaagccatatataccgcgaagataaacatattgagatgagtgaagactgtaatgaagagccagtcttacttctcaaacgcctagcatcatatgattttgaggacggtgatggtcatctctacattatcgacaaagaagaggccctaagaatcggattagtcgatctttcttctgtgacgcttcctggttgtcgccctcgtacaatcgctcaggaagcttggttactaggaccattattaggaaaccctgtcccaaaaaaatgttttcgtgctcagatcacagccccgcgttcagtcttacgggactatgcattttcctctggctttgcttgcatagatgatctatttccatccatagtagaagatccaatcctcaatgctttactaagtttaccttggagggaaatcaaagaagtatgggagcctgatttccctattccttggttcaaacgaaccctgagccttcctgaatatcaggatagttttgtaaaaattgcatggcctcataccgcatttttccggggaacacgtctgtctgaacggtttagttcggtcgatggaaatgcttctggcggaattattattccagttccggacgtcgttttttttggaaccgcacctgaaactatccctcttcgttttcctgaacttgaagccttattgcttaagtttggttcagtcattcttgaactggatgaacttatccagcatacaaatatgcaaaacctcacctcctaccaaaaaggtgtcggtgtcgtaatgattgaagccgaccttattcaggtatcagaactcatggttgaacatcccggacaagaaatgacagctgcgggattagtctatggctggtattaccgaaaaagtgaaagcgggttatggtcaagagtagcgcatcctgatgaatgtccctgtaatgatgcgtttatacacaatcgacatttatcagcactgaaaattgctgaggattttctccgtagctccccatttgtggaggaaactgatacaccgtga

SEQ ID NO: 226400 - DNA, 615 bp, Klebsiella pneumoniae
atgaaggtccgtatctattgccgcgcatcaacagaaggccaacatgccgatcgtgcactgattagcctgcgcgaatttgcgcaaaacaagaactggcagattgccgaacaatacattgagaatgccagcggtgcgaagctggatcgcatagaactaatgcgcctccttgaggaagctcaaccgggtgatctgcttctcatcgaagcgattgaccgtctcagtcgtcttaaacatgaagaatgggcagaactcaaagctacactgaatagtaaagggctggttattgtatcaatggatttgccaaccagttggcagatggttgaaatgtccattaatgaccttaccagtggtattctgcgtgcagtcaatgccatgctgatcgatatcctcgcgacaatggcacgacaagattatgagacccggcgtaaacgccaggcacagggaattgcaaaagcaaaacaggcaggtttatacacggggaaagaaaaagatctggaagcccgagagacagtacacgaaatgctggcgcagaacgttaaaccagcccacataatgaaagcagcgggtatcagccgcgccacgttttaccgaatcaagaaggagttagtaagttaa

SEQ ID NO: 226401 - DNA, 2697 bp, Klebsiella pneumoniae
atggttgtcggttcaaggtggtacaaatttgatttccacaatcacactcctgcttcagaagattacgctgacaaaacattgagtgatagagagtggttattgtcatatatgcgtcgacaggttgatgcggtcattattagcgatcacaataccggtgctaaaattgactcgctgaaagccgagttgcagcgaatgaaagttgatgctggtgaaggcgggttggaaggatttcgaccactgacccttttctctggagttgaacttactgccacgggaaatgttcacattcttgctgtattaaacccagagtgtactggtggagacatcgagcgactaatcggacaatgtaatggttcagcccccatcccgcgacaaattccaaatcatcagttggcattacataatggtcctgccggaattgttggtataatcaggcaaaatccagatgcattatgcatcttggctcacattgatgctccgaaaggtgtgcttaccagccaacgtaatttagctgagttggaggcgacctttgctgccggtcctcacgctgtagaaattcgttctgaccctgcagagatacagaatggtacacacaagaggttaataaaggatctcccttggattagaggctcagatgctcatgagcctggtagcgctggtttacgtacatgctggttaaaaatgtctgagccaaattttgatggtcttcgcaacgctcttctcgaccatgaaaattgtgtactcttcgacaaacaacctccagcagaaccagcccagcatattcgtagtctcagaatacgaactcggctatgcaaggctgaaaacggagcacctgcatcagtaaatcttagccccttttataacgctgtcataggttcccgaggtagcggtaagtccactctggttgaaagtatccgcttagttatgagaaaagttgatggcttgtctcagaaccactcagaattacttcagttattcaaacaaaacggacggggaatggatgataattcagaaatagaatgcgtctaccgtaaagacggtacggatttcaaactttcatggcgtcccggcgatattcatacacttcagacatggcagaatggacattgggaggacgatcatcactggtctcctgaccgttttgctatttctgtattcagtcagaaaatgctttttgagctggcgtcagataatgatgctttcctgcaggtatgtgacagcagtccaatcgtagataaacgaacttggactgagcactgggaacaactcattcgtgattttaagaatgaacgtattacttaccgtggcctactttctcggcagaatactgcctctgcgcttaccggtgagcttggagatattagaagatccattgcccaactgagtgagagcgactattttccgattcgcaaccgcctagccagtgcagaaaaagaactaactgaaagcaatgactgcctgaatacataccgacagttattagattcactatctaatttgctgcctgagagtgcttcatctgatggtgaagaaaaaaccgaggtatcagcagcatatatatcattgatggcgaaaattcaaactgttcagacttctttatatgcaagcatttctggcattgttactgaacatcttagccatctggaacaattgaaagctgatgtggattatctgactctggctgagtcagttggtactgaaaaagagaatgtactaaaagaggctgaccagttacgtgcgcagggactaaaccctgatatgcttaatgatctagtggaacgtaaggaaaaggttagtgcatcactccgtgaatatgcagatcttgatggattggtagctgcttcagcaacacgtattgaagacctaatgagacagttgcaagcacatagaaaggagcttaccgcacgtcggcgggaatttatcgcgactctcaaccttaatgatctagacgttaaaattttacctctttctgcgccaccagaagcggttattactgactatcaaagtactacgggtattaataatttcaccgatcgtatatacgatacagaacaacgtagtggacttcttgcggaattaattaaccattaccccatagatccacgacctgctgttactgaacagaaatatgcgctcctacaaactctcaaaaatctgcatagggatataaaggaaggtgtagaaggaactgggcaggacatacatggtgctttttccagacgactgggtcaactgactgatgataacttagataatttaatgtgctggttccctgatgacggtattaacattcgctatcgtgcccacagcggaaatatggaagatatctcgttagcctcacctggacagaaaggtgctagcatgctgcaatttttactttcttatgggacagatcctctaatattggatcaacctgaagatgatcttgattgcatgatgttaagcaagagtgtgattccggctattgtttcgaacaagcaacgccgtcaattgataattgtttcacattctgcacctatagttgttaacggtgatgcggaatatgtaatcagtatggcacatgaccgtcacggattaaggcctgcattgtgtggtgcgctgcaagaaacgaaaatgaagcaattaatatgtagtcagatggagggaggagaaaaagcattcagatcccgatttaatcgaattctaaatatcagctaa

SEQ ID NO: 226402 - DNA, 351 bp, Klebsiella pneumoniae
atgaaaaatgacgctctaacttttgttttaaaaaaggattggatggcgttacctccagatcacacctataaaggggaaaacatgattggagaatttcacttaactgatatattcataatagaattcatgaaacttatacatagaatcgaaatacctgatgcatgggtccacagtagcttcacggacatatcaggtattaatacccgtaaggttatgtacatgaaaggcagtgatatcttatcgcaagatataatgaatgagatccgtaagttagtaaagtccccatctcctgacgtgaaaatatactgcagtggaaatcatttaacaaaaatagaactcatgcaagaatga

SEQ ID NO: 226403 - DNA, 555 bp, Klebsiella pneumoniae
atgggtactgtagatgacctcctggcgctcccagcaagtgagctttgcctgaatggtggccctgcgtcagatgacatagaactcatattgctaaatgttcctctcgtacgtccaatgtatcaaaatgatcctgctgcagctcgtatgatcattaatgaacagtctgaaagaattaaagccagaataaaagaaaagtgttcgaatccagataagcccgcgcgtaagttaacaaaagaattgtttaaaaatgaagacgccatgtgcaaacgtggagcaccgacgatagaagaaattaagttattcattaaagaatctgatgcacctgaactgaatattgatcaacaattgaaggcaatcccttatgagaatcgcttgatattggaagaaggtgcaaaattaaaaggatatacccttcgtgaaatgatggttgaagacatagctacaaaggtctcaaaaaattgggaaagagcgtgtgctgataaatcatattttcagaataaagtaaaaaatctaaaatatgatcaggataagctaacattaccagcccccccctga

SEQ ID NO: 226404 - DNA, 1917 bp, Klebsiella pneumoniae
atgaagccaaagctgtattcgtacgtgcgtttttcatctgtgaaacaacgtgaaggtaactccttggagcgtcagcaagataccgctctaaaaattgcggcccgttataatctcgaacttgatacaacggctttccacgatctcggtatgtccgcgttcaaaggaaaaaatgctcatgaagggaagctatcggagttcatcaagcagattgggactaaagttcccgttggctcttggctagtagtcgaaaatcttgaccgcattagccgtgatgatgcctggaccgctttggatatattcaagaacatacttagcaagggaatagtcgttgttactggcatggatgaaaaggtctataagtacgcggacgtaaagaataatccaactgatttaatcatttcattgttgatgttcacacgcgcccacgacgaatcgttgacaaaaaagaatcgagttgaagcccaggcccggtcgttgatacggcacaacctgacaagagaaacgggaacgccagcaaaagcaatagaatctgtcggtcagaatgtttggtgggtagataccaaatcaggatacgttactccacatcctatttattttaccgccgcccaaaagattatcgaacttaaacaaaacggtgaaactcttcttggaatccaacgatatcttaatgaacattaccctgcccctaaaaagcgggtttataaagaccggaaaggtcaatcgcttacacccaaaactgaacaatggggtaaacatttgatcaggacctttttgaaccccactgttcacggacaaaaaaccttcacgctggataaacgcgatgaatcaggtgccattatatacgattccgaatcagatgagccgttgaaagaaacattcattattcgtgattactatcccgcacttatgtcggaggcggactacttgacgctttcgaaattagatcgacaccgcgccattactcgtaattcatcaaaatatccaacaggtaaccctgaaccagaaattccactactctcaggtatcggtattctcttttgtggcaactgtggttttttcatgttcaaatcaggttcaagtgaaaacaagtaccgttatatatgcggttccaaaatcgttcagggtaaaccttacggtaaaaaaggttttacgtcataccagcttgagcacactgttttgcaactaatcgctgatcacgtctggaacaaccaccaagaagataaaacggcctggtatgaatctgagattgaaaaggcatcagaggctgttaaaaaactgctaaagttggcaactttgacagatgagctcgaagaattggcagaacagattaatgtcaatagtcagaaaaaaatagcgcttgagagagaatttcaacattacaaaattagccgctcagaaattcaaactacgggctgggatcaatttcgaaatttcgatgttcatgacactaagaaccctgaccgtaagcgaattaggctgaaggttaagcaagcgatcaaacgtattgattgctatgacatagataggcggcatggtcattttgaagtaaccttcgccgacgagacgaaacaaaggatagtgattaagttcaatcgaaaccggtcaccaggtgtttcgtatgtagaagcacagactgtaaacgatcatgacttactaaaaatgcaaggatttgtgatgcattccttcattgatgaactgatttcgcctgaaaaatttgcgcagaatattaaggaaaaacaagaagtaagtcttctgaacccgacatatatcaccgagttggagaatggcacaagccaagacgaaggtaatggaatggctatcatagtggatggctctacaagcaaaacttatgcaactgtgaacggcactaaatacgagattaactcgctggaagacttagaaaaactctcacactga

SEQ ID NO: 226405 - DNA, 924 bp, Klebsiella pneumoniae
atgtcgatcgaatttgacccttatagtttagttgtttctataaacaatcttaatgctaccttaaaagaggttgattattttaaagattatattttgcctatagttagcctgattgtaagtggaatatttggatacataatcgccattcgcgggtataaatggcaggaatgtgttcagaatgaacgaattaaggttgatacaattaataaaacgataatgatgtttcaggatatgcaaaataatcttgttgcaatcaaagctacatattctgacggtctgagtcatcacccgcttcaaagggcaggttatatgccttttatcatatgtgatgaaacaattatgtattgtgaatcagaacggttggtgcaggttggattaagtgataacactggtagcaaagcctggaagttgttacataaaaagaataagtgtaatattaaagcaacgccgtggcttcaggctcctacaatttttacagttgtttctaattacaatcatctgattgtactgttaaaaactagaaatcaattagatcttgatgttaagtcaatgctatcggaaaagtatggtagtgaatatggtatgggaatgactgaagataaattatatgaggcattaggtaggtctttatttgtgaaatatttcgatgcaacagaattattgatattgcaagtggataatatgattattagtattaatgatttccttactcattatcctaatgaagtgtctttaaaagttaataaaaaatatctatccaactataaagtaattgtaaactacataaacgaaactactccctatatatctatgcttaaaagaacgccagcgctagatataaaagttatgtcttccttagtaaggatggatactgttgaagcaatgcgaaaatatagggattatacaactatacaaacaaattaa

SEQ ID NO: 226406 - DNA, 984 bp, Klebsiella pneumoniae
atgcacacatttgcacaagccctctcttccttaccacaagaggaaaaaccatcattactgatgggaaatggtttttcacaagcgtggtctccacaaatatttaattatagaagtattctcgataatgccaactttggcgatcatgacgatttaataagaaaactgtttcaagagcttaatacatttgattttgagtcagtaatggataaactttcatcagcaaatagaatcattaaacactatgatcctcattgtgaaatgataaacctaattaatgaacatcaagaagccctgaaaacggcactaataaatgcaatttctaattctcatccgacatatcctcatcaaatatcagatagacaattttctttcgcaaggtctttcttatctaattttgaaagattgttcacacttaactatgatttattaatgtattgggctagaaataaaaaaaaccttgatcctttaacctttgatacagatgatggctttaggagtgggagaacatggcaacgctataacactgatcaaaatgtatttttcttgcatggtgctctacatttgtatgagcaaggctcgtcaataaagaaacatgcaaatggcgataatggtaatactattatcgaacaggttcagatgaatttagacgaaggcgctttccctctttttgtttccgagccaacaagtgaaaagaaaaaagaaagaattctccacaatccatatttaaatttctgctacagtgccctacgtaagttgaaaggaacattatttatatatggacattcaatggatgagaacgataggcatatatttgatcaaattcgagaaagtaaagtaactaaagtatttgtcagtatttatggcaatgaaaatgatgaaaacaacaaaaaagccaaagcaaatgctcagcgatttttgtcaaaagaaggatgtagtgttgatttttttatagcagaaactacccctatttggggagaaatataa

SEQ ID NO: 226407 - DNA, 570 bp, Klebsiella pneumoniae
atgaatttggagaaaggcggacgaggcgctatagagcgcatggtagaagcttatggattcaagactcgacaggcgttgtgcgatcatttaggaatctctaaaagtacactcgccacacgctacatgcgtgactcattcccagcagaatgggtaatccagtgcgcccttgaaacaggcacctcgcttaattggctcacaaccgggcatggttcaaagcaaacttcaggtaatacaaatactatggaagttgctaaatatgtattatctgatggggccttgtgtgaagacggtttttatattttcgatagagaatttctaccgtcggcattcaagaatctttttgtaatcacagataataattctgaatttatttgtgataaggaatttgatgatatacgtgatggtaaatgggtaataagtattgatggcaaaataacgatccgtgacattactcgtttacccggtggaagaatcttcgtcgagggtggaaacagagccttcgaatgcaagatagaagacattgaaataattggtaaaattataagtttaacagtcaagtatgttaaatag

SEQ ID NO: 226408 - DNA, 777 bp, Klebsiella pneumoniae
atgttagctggtacgcgaagtgcgacgaacggaaaggtttttgctaaagactgcgaaaaagaagaagggccatttttttgcattggatgcaaaaaagaattggttttaaagaaggggcgaattaaagttcatcacttcgcccataagcccccgttttcttgcaacagaggtcatggggagactgaaaaacaccgagaatgcaaagaatctatgtataacttgttgctttcaatgccgaatgttagagatgttgacatagagcatgatcttggtagtgctgtagctgatgtgtatgctgtgataaacaatgttccagtcgctattgaagtacaacgcagcattctttccgtaaatgaaataacaagacgcaccaaagaatatcatcgtttaggtgtacatgtgctttggctttcactgttcagcacgcgacttgtagaagatcgctttagcccatcagcgtgggaaaagtggtgtcatgctacctattatggcagggtatattattggctttctggattggatgtgatcccatatcatttttctgactataaattatatgttgaagaaagtacatggtacgagtcgggtggaaatgagagaagcgcaggtggatactataaattttcaaaacgttataaaacgccactcgctgggcaaagagtaaatatagcggaagacttttcgcctaaaagaaaagcagcatggaatagtaagactatttatataccagaatgtagtatttatttggatggacagtcagcgtggtggagtaaataa

SEQ ID NO: 226409 - DNA, 531 bp, Klebsiella pneumoniae
atgagccatccaattgattattacgctatagaagaacacgcaagaataattgagcaattatgctgttcatctgaattttatttacagcgtatatattccacacagaaagtatatgatggttctatagtaactgaatttgaaatagaggagttatcgtacaacggatggttggaatataccattagcaacaatcttattagcctttgtacaaaactacgaattctccaagacactagtgaacatgagtggaacccagattactcacctgagaaagaagcatttgaagaacatgaaaatatactttttgttatagatggtcatgttaaaggttctatacgcgaatgctgcaacaaaattattcacgcattaagttttgagttaacaaaaaagaccggcaaaaatggaataaaatattgggatggttctattattgcttctggggttcaaaacaaaaaaaactggaaaattaaaatagaccttttccctttttgccaaagcataaaaagttatttaagtttattaagtgcgtaa

SEQ ID NO: 226410 - DNA, 585 bp, Klebsiella pneumoniae
atgaaacctgtttttgacgaaaaaggcattgcatccgaacctggtgaaatccgctgtttttactatgacgcagttacttcagaatatgccggatggtctgatgaatatatcaacgccggtgtttcaatgcctgcgaattcaactgacctcgatcccggagattataccgcgggtaaagtttcgatattcactggcgcagaatggacgttacttgaagaccatcgtggcgaaaccgtgtattcaactgatgacggcagttcatcaacagtagactatatcggggagattaaagcagggtttaccactattgcaccagcaacaccatatgacaggtggggcggcaaggagtgggtcatcgatagtgaagccaaacacgcggatgaggtcgccgctacagaacagaaaaaaacgaatctgatggctgcagctcaggtagctatttaccccctgcaggacgcggttgatttgggcattgctaccgacgaagaatcggcgatgttactggcatggaaaaaatatcgggtactgttaatgcgtgtagatacttcaaaagcacccgatatcgaatggccgccacaaccatga

SEQ ID NO: 226411 - DNA, 567 bp, Klebsiella pneumoniae
atgcttattggctatgtacgcgtgtcaacaaatgaccagaacaccgatttgcaacgtaatgcactgaactgcgcgggatgtgagcagatttttgaggacaaaatcagtggcactaagtccgacagaccggggctgaaaaaactactcaggacactatcggcaggagacacgctggttgtctggaagctggacaggttggggcgcagtatgcggcatcttgttacgctgatagaagagttgcgccagcgtggtgtgaatttcagaagcctgactgacagtattgataccagtaccccaatgggccgtttcttttttcatgtcatgggtgccctggctgaaatggaacgcgaactgatagttgaacgtaccagggcagggctggctgcagctcgtgccaaaggcagagtaggtggacgccgtcctaagttgaccaccgaacagtgggcacagattgggcgtttactcgaggccggagaatcaagacagcgtattgcactgatttttgatgtaggcgtttctaccatttatagaaaatttccggcaaataagatcaatgaatccccctga

SEQ ID NO: 226412 - DNA, 483 bp, Klebsiella pneumoniae
atgtctgtgttaacgcagggtacccagctgtacgcgctaatccgcggtgttattcatgagatcgaatgcataactaactttaatcccggtgcgaacccggcagatcaaattgaagatacatgccttagcgagcgtaatagccggacgtataaaaaagggcttcgcactcccggtcaggcttcggtaacaattaatgccgatccagtgaatgactcgcattatctgatgtggcaactggcggagctggatgaataccaggatgaactgatccactgggctattggttggtctgatggtgaatcggtgcctacagtctctgctggtgagatggttctgccaactgaccgtacctggtataccttccgcgcgtatgttagcgattttccgttcgacttccagggaaataccgtggtgtctaccgcagccgcaatgcagcgtagcggcccaggcctctgggtacgtaaagtccagccaggcagttaa

SEQ ID NO: 226413 - DNA, 363 bp, Klebsiella pneumoniae
atgatcgcaccaatatttgctgtttgcgcggccagccaggctgtcagggatttgttaggctctcccgtgcgactttatccgttcggtctgcaggatgacaatatcgtttatccctacgcgctgtggcagaacatcagcggagtaccggaaaactatctggacaggcgccccgatgtcgatagctataccctacaggtggacgtttattcggacactgtaacatcagctcaggaggttgcaaaagcgttgcgtgatgctatcgaaccaaatgcctatatcacccgctggggggcccaaagccgcgaccctgaaacaaaacgcttccgctattcattcgacgttgactggatagttaaacgctaa

SEQ ID NO: 226414 - DNA, 486 bp, Klebsiella pneumoniae
atggctgacggggttgagtttaagctgaccggggttgatgagttactgggtaagcttgagtcaatcaccgatgatatgaagcgtaagggcgggcgagcagcgttaagaaaagcggcaaacataattgctaacagggcaaaggctaatgcaagccggctcgatgatcctgcaacaggccgaagcatagcagataacattgcagtgcgctggaatggccgcgagtttaagcgtaacgggaaccttgcattcagaattggggttttgcatggagcagtgctgaaaaagcatcccgataaagctaaaaatgcccctacacctcactggcgcctgctggaatttggaacggaaaagatgcgagctgaacctttcattcggccggcagctgaatccagcgcagaagacgcaacgagaactttcgttgaagaatatggaaaggctatcgatcgagcgataaccagagcggctaagaaggggagaagtggatga

SEQ ID NO: 226415 - DNA, 351 bp, Klebsiella pneumoniae
atgcaggccggcaaactccgacatcgtgttattccccagaaatccgtctcggtgcaggatccattgaccggagaggtagtgaaaaattgggttaaccttgttcagtcaactgcagataatgggatttgggctgaagtatatcccctttccgccagggaatttacatcggcacaggcaacccagaacgagattactaccaggatcacaatacgtcagcgaaacgatattactcctaaatgccgtattttatatcgagggaagattttcaacattgagggggtacttcccgatcctgatagcggtctggagtatttaacgttgccctgctcggagggggtaaacgatggctga

SEQ ID NO: 226416 - DNA, 327 bp, Klebsiella pneumoniae
atgattgagcttgtaactttaccccaagcaaaagagcatttgcgcattgacgatgatgcaggtgatggcgatctgctcctgaaaatccagtcaggcagtgcagctttgctttcctacatccaggggagccgcgaactggttgtaagcagcgatgggaatctgattgagggggagccgcttaaacgtgtgcagggtgcgcttctaattcttctcggttacctcgatcgcaaccgcaacggagaagaggaagaaaaacttcagcagggtgagcttcccttctcagtaacgatgctgatttacgatctgcgtcggccaaccattttctaa

SEQ ID NO: 226417 - DNA, 1047 bp, Klebsiella pneumoniae
atgaatgaacgtgaactctcccttatcagggctcttggagaggagttctccaaggcgctaagcgaactacgtgaatctttcagaaaaagtctgggcgaccacgtaaaggaaacagaagaaaagttggcagcgctcaccaaggaagtttcgaccctgaaggataccacggcacctgactttacagcacaactggctgatgcagtggcatccctcccggctccgaaaattcctgaattaccggatatcggcgctatggtcagcgaggcggtcgccgcgttgccgccggcgcaggatggcaagagtgtgacgccggaggacgtgcgaccgttgttgcaggaattagtcaccgcggcggttggtgaaattccggtcccgcgtgacggcaaagactatgatccggcggtgctgaaacaggcggtggacgatgcggtcgccgcgttgccaccggcgcaggatggcaagagcgtgacgccggaggacgtgcggccgttgcttcaggagttagtcaccgcggcggttggtgaaattccggttccgcgtgacggcaaagactacgatccagcagtgctgaagcaggcggttgacgatgcggtcgccgcgttgccaccggcgcaggacggacgggatgccttacaactggaaatacagcctttcattgatgaaggaaagagctattcgcgcggctcttatgccacccacaacggaggcctctggcgtgcttacgagaaaacccatggtatgcgtggctgggaatgcatcgtcgatggcgtatcagatgttgatataagcatgaatggtcaacgcaattttattgtcaccgtcaaccgtgccagcggtgccagtgagaaaaaatcttttgatataccgactatggtgtaccgcggcgtattcaaatcgggcgatgagtacctgcctggcgatacggttacatggggtggttcactctggcactgtgacgaacagacgcaggataagccgggtgaaactggctctaaaggctggactctggccgccaagcgcgggcgggatgggaggggtaaagcatga

SEQ ID NO: 226418 - DNA, 1359 bp, Klebsiella pneumoniae
atgtggaatcctttccggagaaaacagggaaatgaaaaagccctgcagcagcctgccagtcgcggaggctggaacccgttatacagctctatacatgagccgtttgctggggcatggcagcgtaaccttgagatcagtcaggataccgttctttcttattatgctgtctttgcctgcatatcgctgattgcgagtgatattgccaaaatgccgccgcggctgatgcggcgcgactcaaagggagtcatgcaggaggtaaaatcaggggacattccggcgttgtacaaaaggccgaatacctttcagaaccgaatccagttcttcgagaactggctgaactccaaactgtgtcacggaaatacggtggcgttaaaaatccgcaataacgccggaaaaattactgaactcaggctgcttgactggcgcaaggttacgccgctggtggcggatgatggctctgtcttctatcagataaaccctgataacatgaccggtattgaatcgtcagttactgtcccggcgcgggaggtgattcacgatcgcttcaactgcctctttcatcctcttatcggtttgtctcccatttacgcagctgggttggcagcaatgcagggccaccacattcaggaaaactccgccttttttttccgtaacggtggaaagcccagcggcgttattgaggtgcctggttccctcactgaagaaaacgccagaacaataaaggaaaactgggactcaggatattctggcaagaatgccggcaagacagccattctaagtaacggggctaagtacaatcccacaacagtatctgctgctgatgcacagactgtcgaacaactgagtatgacggctcagatcatatgttctgtgtttcacgtcccggcctataaagtgggtgttggtgaactccccactcacgacaatatcgaagcgcaggatcagcaatattattcgcagtgccttcagtcgctcattgagtcgatagaattgctgctggatgaagcctttgatcttgatggcgaaatgggcacggagtttgatgtcaatgctctgctgcgtatggatagtgagcgccgtatcaagtctcttggcgaaggtgtaaaaaataccatcctgacaccaaatgaggcgcgcaggagtgaaaatcttcctcctttacccggcggtgatgcgctgtatcttcagcaacaaaactacagccttgaagcgctggcacggcgtgatgcttctgatgatccatttgccaaatctggtgccagcagcgtcacggcgccagaggaatcgggcggtaaagccatgtctgaatctgaactgacggcggcaaaagcgatgctgcgaggattgttagctaaatga

SEQ ID NO: 226419 - DNA, 1935 bp, Klebsiella pneumoniae
atgacgcttaagcgtgcctgtaccctcatgacggtgaagtcggtaaacgaggatgatcggattattaccggcatcgcctccacaccgtcaccagatcgtgacggtgacatcatggagcccgagggggcgaaattccgtagtgacacgccattcctatggcagcacgaccgatcgcaacctatcggcacatgcacaccaaaaatggtgaaggaaggattgcagatcaccgcaaagctggtgaaaccaacttctgatatgccgtcgcagttggttgctcgtcttgatgaagcctgggcatcaataaaggcgggtttggtccgggggctgtctattggctttcgaccgatcgagtactccttcctggatgaaggcggtatccgctttttgtcctgggacctgcttgaagtatcggcggtgactattcctgcaaacgcagaatgttccattcagaccgttaagtctttcgatcgccagcttcttgccgcgtctggcattgagaagccggtagtgaaaacctctaaaaccgctggcgctacagcaaccaataccaaaaaaggaatcaattcgatgaatatttcagaacagattaagagcttcgaagcgaagcgttcagcgctggcagcctcactcagcgacatcatgagtaaagcagctgatgaaggacgtacgcttgacgcagaagaaaccgaaagctacgacaacacgtctaccgaaattaaggcagttgatgagcatctgaaacgtcttcgcgacatggaaagcaatatggcatcgaccgctaaaccggtatcaaaagccgctaatggcgaagtcactacggttaagactggtgcgcccggcattatccgtgtcgagcaaaaactggaaaaaggcatcgcctttgcccgcttcgcgaaagcgctggccgcggctaacggcagccgctccgaagcgctggagattgcccgtaaacagtatcctgatgatgcgaagcttcaccatgtactgaaggccgctgtaggtgctggtacaacgactgatcctcagtgggctggcgcgctggtggagtatcaggaatatgcaaatgattttgttgaattcctccgcccgcaaaccattatcggccgtttcggtcagggtggtattcctgccctgcgccaggtcccgttcaatatccgtattccggcacagacttccggcggttcggcaaactgggttggacagggcaaggccaagccactgaccaaattcgactttgagtcgatcacgttcagctttgctaaggttgccgctatcgcggtgctgaccgatgagctgatccgtttctccaatccggcagccgatgcactggtgcgtaacgccctggcagaagctgtcatcgcccgtctggatacggactttatcaacccggctaaagctgaagttgctaacgtctctccggcctcggttaccaacggtatcgtggctgtaccatccaccggcgacccggatgctgatgcggaagcagccttcgctcagtttgtcgcgaataacctgcagccgactggcggcgtatggatcatgtccagcaccaacgcgctggcgctgtccatgaagaaaaatgccctgggacagaaaatgtacccggaaatgaccctgcttggcggcacctttcagggccttccggctattgtttcccagtacgctggcaccaacctgacgctgcttaacgccccggatatttatctggctgatgatggtggcgtggcggtggatatgtcgcgtgaagcctctctggaaatggaaagcgatccgaccggcgacagcgtcactccgacaggaactgaactggtttccatgttccagaccaacagcgtggccattcgtgctgagcgctggatcaactggaagcgccgccgtacagcagcggtagcggttatctctggtgtgaactacagctcaagccagggtagctaa

SEQ ID NO: 226420 - DNA, 1659 bp, Klebsiella pneumoniae
atggcgcagtggtccacggcctgcaccgactgggaaaaacgcctcatcgacggcgagtccattattccgccgccaatatttgctgaccaggctgaacaggcgctgagtatattccgagaacttcgtgtgtcagacctgcctggcaagcccactttcggtgagtgttcagaggcgtgggtattcgactttgtaaaagttatcttcggcgggtacgacgccgagaccggaaatcagctgatccgtgaatacggcctgctgatatcgaagaagaacaccaagtcgacgattgccgctggcatcatgctgactgcgctcattctatgctggcgtgaggatgaggagcatctcattcttgcaccgacgaaagaggtggctgacaacagcttcaaacctgctgccggcatgatacgcgcggatgaagaactgacggatatgttccagattcaggatcatatccgcactatcacccaccgggtgacgcgaaataccctgaaagtggtggccgctgataccgacacggtctccgggaagaaatcaggccggatcctcgtcgacgaactctggcttttcggcaagcgtgccaacgcagaggcgatgtttatggaggctcttggcggccaggtatcgcgtaatgagggatgggttatttaccttaccacgcagagcgatgatccgccggcgggcgtgtttaaggagcgtctcgattactggcgcgatgtgcgcgacggcaaaatcagcgatcctaaaacgctgggcatcctctacgaattcccggacagtatgatccagagcaaggcctatctgcagcctgagaacttctatatcaccaacccgaacatcgggctttccgtcagtccggagtggattgccgataacctgcgaaagaaccaggcgaaaactgacggcacgctgcagcagtttctggcaaagcatctcaacatcgaaattggccttaacctgcgcagcgaccgctgggcgggcgtcgatttctgggaacagcaggcgcagcgagtcagttttgaagatttattgcgacgttcagaggtgatcaccgtcggtatagacggcggcggccttgatgacctgctgggagcctctgcggttgggcgtgatgccaaaacaagagagtggctctgctggtgtcatgcgtgggcgcatgagatagcgatccgccggcgtaaaagtgaagagtcccgatttaatgacttcgtgaaagccggcgatctgaccattgtgaagcgcgtcggacaggatacggaagaggtggctgaatacgtcagccgtatctacgctgccgagttgctggacaagattggtattgacccgtctggtgtcggacaaatactcgatgcgctgattgaggtaggtattcccgccgatgcggtagttggggtcagccagggctggcgccttggtggagcaattaaaaccacagagagaaaacttgctgaaggcatattgatacatggtggtcaaccgatgatggcttggtgtgttggaaacgccagagttgagccgaaaggcaacgccattctgatcaccaaacaggccagtggtaagggcaagattgatccactgatggcattgtttaacgccgtttctctcatggcccttaaccctgaacctgctaaaaaagattaccaggtatttttcgtataa

SEQ ID NO: 226421 - DNA, 513 bp, Klebsiella pneumoniae
atgttaacagcgcaaaagcgaaaattcgcggtcgcgctgatgtccggcatgtctcaaaaagatgcggcaataaaggcggggtattcggagaaatccgcacggtccaaagggtcgcagcttgcaaaggacccggaagtcatcgcgtttattagtcgtaaaaaaaaggaagtcatcgagactgacgacgttcccacctacggtaaaaaggtttacaccccagcagtaaactcaccgcaaaaaaaagaaggagcggcggtaccggccgagggcctcgcagttgtcggccagtttgatgatcctcttcagtttctgatggcagtgatgaacgactcaactgaagacatcgacacccgaaaggatgcggccaaagccatgctgccttacgttcaccccaaaaaaggggagacgggcaaaaaagaagcgcgcaacgctgcggcaaaagtagctgcaggcgtgagcaagttcgggtccatggcaccgccaaagctggtggtaaacaacaaaaaggggtaa

SEQ ID NO: 226422 - DNA, 597 bp, Klebsiella pneumoniae
gtggaaacacaaataaagtttgtggtagttgggcatcattcaagagagcaacaggcgagagcgctggcgtaccaaatcgggccatctgcccacgtgatgatcgacccagaagatcatggggcagcatggaatcaccggcgtgctcttgagtgggctgccgagcaagattgtcgggtggtgatcattgaggatgacgcaataccagcgacgggttttgaggctcaggttgttaaatggctaggccgcttccctgacaccttatgttctttctatctcggtacaggccgccctccgcattatcagctggagatagccactaagctaattgccgctgatcgcatccgggccgatcacatttccctgctacgtcttgtacatgctgtgtgttatagcgtcccggtgaatcttatccagaaggtgctgacgcggtgggattcaaataaacctgctgattatgctgttggtgacgcttgcggcggcccggtgatatacccgtgttattcgctggtggatcatgctgatggcaaacctgtcgagaagcaccctgatggtcagcatcgcaatgaacggcgacgggcatggaggttatatggctaa

SEQ ID NO: 226423 - DNA, 1458 bp, Klebsiella pneumoniae
atgcgtgtcattattgacggcattgaatatttgcccgcggcaaatggaaacttaaggatcggaattgcaatcaccacgcatcagcgtccagaggtattgaaaagagccattgatcagcacatgaagcatctacctgctggtgcgctggtggtcgtagtagatgatggttcaagccccgccgctgtcgtcccttctggtgtacaactgctgaggcatgataaatccctcggtattgtggcctcgaagaacgccagtctgtctgtgcttatggacgccggctgtgagcatcttttcctgtgggacgatgacgcctggccaatagccgacgactggcaccaaccttacatcgagtcacaggagccacatctggcttatcagttcctcgatcttgctggccgcaataagctgaatgatctggccgtactctacagggatgaaaggcatgttgcctataccgggcagcgtggtgtcatgctgtattaccatcgtagtgcgatagagaaagtaggcggtttcgattctgtctacggtcgcggtatgtacgaacacagcgaccttgccctgcgcattcataacgccgggttgacgacgtgggcttatgccgatgtaactggctccgaaaaactgattcattctctcgatgagcatgaggcggtagagcggtcagtaccaaagcctgaccgtgtggcgctggtagagcgaaatgtgaaaatccacaacgagcggcgtgataccggctttaccggttatgttgagtaccggcagcagagtgacgttgtaatcacaacgttgcttaccagccagcctgacccgcagcgcggatcgaaaatgacggcatcgcctgacttgctgaacaagtgggcttcctcgcttcgacagtgtgtcggtatcgcgctggtggatgaactgcaaacgggcccggctggcatagagttgtaccgcgtccccgacgtcaagatgaacgtctacttccggcgctggctgcacatctggcagcaccttcgtgagcatcctgaatatcggttcgtctggtgtacggatggtaccgatgtcgaaatgctccgcgcgccgtgggaagaaatgcttcccggtaaggtctatgttggttcagagcctaagacctatgccgacatctgggcaaagcagaatcatccagagcgtatctatcaggagttcatcgacgcgcaccgcaacgatgtaatgcttaatgctggccttttgggtggttcacgcgctgatgtaatgtcgttcgctcacggcattatccgtctttattaccggatcgagagttatcgcttctggaagaaagagcaggctggcgcagcggttggtgacatgatcgcatttggccttgtggcgcagtcattcgctgacaggattatcaccggccccttggttcactccgtgttcaaaaccgatggactcggtaaggaggttgcctggtggaaacacaaataa

SEQ ID NO: 226424 - DNA, 294 bp, Klebsiella pneumoniae
atgaaattccaggtcgcaaaggtctatcgctatggtcggtttatgggttacggaattgcagtagacggtaatcttcttgatgggcaggtatcaacgacagttgataccgatgcgaaaggcattccattaataactgcagtttttaatatgaataacgagcatgccgaaaaccaaatcaccatccgcttagacgacgaaggagattcacaaaaggttgatttgataaaaaaggctgtagctgaagctgccgctcgcaactaccgaacggtggttaactctgtttccaaggagtga

SEQ ID NO: 226425 - DNA, 438 bp, Klebsiella pneumoniae
atgaaccttgaccaatttatatctttgatttctgcaatagctactgtattaaccgctgtaattgcttgtatagctgcttggataggctataagacgttaaattcgtggaaagataaagagaagtttatgcagctggttaggttgaaacgctcaattttcacctacaggcaacgaatagaacacatacctgtctttaatcacgataatcataaaataaatgagtatcttcttaatgtgttgcaaccagcacttacagatgtttatcacgaaatgcgtcttgcgggttttgacgaaggtgagtctaaggaatataagttattcgagagcttatttgcagcgcagcaagaatatatgtcgtctcatttggactatggttcgctaattaatagtgctattgaattgcaaaaagcaatagatattgattataagaaactctaa

SEQ ID NO: 226426 - DNA, 246 bp, Klebsiella pneumoniae
atgtcagagatcaccgcatccgagcaaatccgcctggatatcatcaagaaagttaactacgacaccgcagcggccaagctggccattgactgggtaggcgacagctatctgaaatctgagcttttcgcagactcctttgatcgtgttttcacggaaagcgagattgtctcgaagacccgtaaagcgattcaggaagcgaccgaagcgctggcgctttttgataccggcgtagagcaggcgagctaa

SEQ ID NO: 226427 - DNA, 426 bp, Klebsiella pneumoniae
atgggaagctacttagtaccggcgtatggtgacgacatcccctcaaataaaaaaggtcttgaacatgcattgtctctcgcgaaacagcatgcagtcgagttggtgatcttcgcgcctagcattgccaatgcaaaggactcaaacattctgtcagcactgttaacttctagcgtgttgtcaaagatggccgcccagcgagaaccctgtttaattcaaggtgttaatgtccgaattgaggctttatcaaccttcagaggtgcccgactgaacgctttcagtggagtgatcttggggttgtggttatctgctgcagatgccgcgaccttatcgcaaggagccaactgcgcaaaagaagtcatccttgtacaatggggtaaagacgagctagctaactgggctcaagtcaacaatgctactctgttgtaa

SEQ ID NO: 226428 - DNA, 225 bp, Klebsiella pneumoniae
atgtctgtacgtgcaatgtttcaatgtaacagcatccagaaatctccggataagaccagcgccatcgttaacttgagtgcgataatgactggcagcgctgataacgagacctggtctaagtacactccctgcggccagttgcagatggttatctctaacccagcagcgtttgaacagttcgagcaggggaaagagtatttcattgatattatgcttgctgattag

SEQ ID NO: 226429 - DNA, 309 bp, Klebsiella pneumoniae
atgagtgaagctaaaccgcaggacggcagcacagtgaagggctaccgcacattaaccgctggcgacattgagcggatgaaccgccttaaaggcgtcagccgccacttctgtagtttgcttgataccgagcgaggtgaattgttggctgtccgtaatggcccagcaatgttaagcgctgagctggctcgcgagattgatgaagctatgcgcagcctggcaatcgcgcgcaccaaaatgcaggaagctgtatgtgggcatgccgtgcagttgcccggccagatgctgactgttaaccccactaagggttaa

SEQ ID NO: 226430 - DNA, 174 bp, Klebsiella pneumoniae
atgaaacaggttgacgattcaaaacggtttcctcttttgagtgggaagagtcccgaggagatcgtaaaactattcaacagctacaactttgtcgacgatcatggtcatcgactggatgtgtgccaggacttcaaagatttggttgaactggctagccatgcccgacagcgttaa

SEQ ID NO: 226431 - DNA, 231 bp, Klebsiella pneumoniae
atgaagatcacctatagcgacgaaggggcttattcccgcatctggctgactggcccattttggcagctggctatgggcaggcgcattgctgatgctggcctggacgcttctccggtcaatacctgggagtctcgcggaattaccttccagataaccctgttcgaaaagagcgcgtatgtgctcagggcatataaggcgatggccagggctatggcgaggactggcaaatga

SEQ ID NO: 226432 - DNA, 123 bp, Klebsiella pneumoniae
atgaccggcgccaagtggggacacatggcgcacaaaaccttacagcaatccctgtcaccgatggcgaaagtcaccggcgattttctgcattcagcgtttgacctctgcggaggtgaagcgtga

SEQ ID NO: 226433 - DNA, 309 bp, Klebsiella pneumoniae
atggctaccaaagcgcaattacaagaccaatgcacgcgactggaaaatgaaaacctggaactcaaccgccttttggcaagagcagagcgcgagcttaacaacagactgcttgatgaagagctgccgcctgaggaaatcccgtaccgggttacctgcttgatgaagtatcacagtatgccgtgggaagtgttctggtgttctgatcacaagcgatggatggatgaaatggacagctgtttcccctattcaatgaccgataactcttgcccggtatgtcgaggcgaggagggccaattaccagtaaattaa

SEQ ID NO: 226434 - DNA, 405 bp, Klebsiella pneumoniae
atgaaagttaaaacctattccgttaacaccttcgatgcatggctccagactgagggcgatgatacctccggctcatacgttaaatatgaagactacgctgtactggctgctgaatgcgcagcgttaaagtctgctattgagttcgccgaaccatggcttccaacgtgcgacgaggagctgcagcatcgcattgagatggcgaagcagatcccagccaccgatcgcatagtagccgaagccgaggcgcgcggagttgagaaattcgcggctgaacagagaggcgcagctgagcgtttgaaaaaacgcggcggagacgcagtaactagcagcattaaattctgtttaaacagtgcggaagaggctgaggattacgccaagcagctgcgcgagggggccgacaaatga

SEQ ID NO: 226435 - DNA, 918 bp, Klebsiella pneumoniae
atgaaaaatgagctaatgccccaccaagaagaaatggcattatttccggtaaaagaagtggaggttaatggtgttcaaatgggtgttcttaacgatgggacaccattcctaagtcttcgtggattagcccgtctctgcggtgtagaccacactaccctgcttccgttaactaccaattggcttacagaaagaaataagccaaggggaagaagaatctctgagcttctcatagagaatggatttgagggcaatgagctttattcagttgttaatggtggtgcattcggtgacagtcatgcttatccagatgcagtgtgtatgtctattctggaatattatgcctttgacgccgcccaagttgacagctcaacggcaagaaagaattaccgcctcctggcaaggcaaactctcaaagaatacatttaccgcagtgtaggcattgacccacggaatccgataactggcgcctggaagtgtttccaagaacggatactgctgaacgataaaataccagccggattttttagcgtgtttcgtgaaatggtagatatcacagtacctctaatcaatgctgggttcgagttgggcccaaaaactgtgccagacattagcgttgggactcggtgggcaaatcactggaagcgtaacaacttaagcgataaatatggggatatacaaaaacaccctcacgtttatccagactggttcccgcagagcaaggcaggaaaccttcctgccaatatttatccggaagaggccttgggtgagtttcgcagatggcttagggaagattatgtaccaaaaggatttaaagaatatcttgctgacaaggttcaacaaaaggtcatagaaaacaagaaagcaattgaggtcttagaaaacctacagagacctgagctttcaaataaaaaacactga

SEQ ID NO: 226436 - DNA, 243 bp, Klebsiella pneumoniae
atgcagacaataatccagatcgagccaaacgaatgggtttcagaggacttgctgatggcggtcacaggcttgaagcgcggtaccattacgcgtgctcgtaaattatcctggcttctggggcgagagtacaagcatatttcttctgacggggatccaaagccccattgcgaatttatgtacaacagaaaagcggtagatgcctggatttatgccatgaaacagccaagggtagtgatcgattag

SEQ ID NO: 226437 - DNA, 1296 bp, Klebsiella pneumoniae
atgcattcaacaacctcacagatgagtacccgtgaccggatcggcgccattctgcgcgtcacgtccggtaactttctcgaacagttcgacttttttctgttcgggttttatgccacctacatcgcccataccttttttccggcgagcagtgaattcgcctcgctgatgatgaccttcgcagtctttggcgccggctttttgatgcgccccatcggcgctatcgtacttggcgcctatatcgacaaggtggggcggcgcaaggggctgatcgtcaccctgtcgatcatggccaccggcaccttcctgatcgtgctgatcccctcttatcagaccattggcctgtgggcgccgctgctggtgctgatcggccgtctgctgcagggcttttccgcaggtgccgagctgggcggggtgtcggtctatctggccgagatcgccacctcgggccgcaaaggcttttacaccagctggcagtcgggcagtcagcaggttgccatcatggtggcagccgcgatgggctttgccctcaacgcggtactggagccgagcgctatcagcgactggggctggcgtattccgttccttttcggctgcctgattgttccgttcatttttatcctgcgccgtaagctggaggagacccaggagtttactgcccgccgccatcatctggcgatgcgccaggtattcgccaccctgctggcgaactggcaggtggttatcgccgggatgatgatggtggcgatgaccaccaccgcgttctacctgatcaccgtctatgccccgacctttggtaaaaaggtgctgatgctcagtgcctctgacagcctgctggtcacgctgctggtggcgatttccaacttcttctggctgccggtgggcggggcgctgtccgaccgctttggccgccggtcggtgctgatcgccatgaccctgctggcgctggctaccgcctggcctgcgctgaccatgctggcgaacgccccgagctttttgatgatgctgagcgtgctgctgtggctgtcgtttatctacggcatgtacaacggggcgatgatcccggcgctgaccgaaattatgcccgccgaagtgcgcgtggcaggtttctcgctggcctacagcctggcgaccgcggtgtttggcggcttcacgccggtgatttccacggcgctgattgagtataccggtgataaagcgtctcccggctactggatgagctttgccgccatctgcggtctgctggccacttgctacctctatcgccgtagcgccgttgcgctgcagacggcacgttaa

SEQ ID NO: 226438 - DNA, 387 bp, Klebsiella pneumoniae
atgacccatgaataccagcggcaaagcctggaacaactaattactcagcaaacagcagcgcccagaagcgctgccgctgtatttaacgagaaccaaactctctggcaaacccttggctttagccagtctcaagtttcgctatggcttgcctcattgcctcaaagcaatcatctaaaagagtccacaacggcaacctaccaggttacacctgatgttgcggcacatttgatatcattgttacaacaagctggtgggcgcatgcccctggcacaagtactgaaaaagctccctgctggtattacaaccagtgaacagcagatacgcaaactggcgctgaagcatgcgcagttagagactaaaggtcccttgctggtattgataaattag

SEQ ID NO: 226439 - DNA, 792 bp, Klebsiella pneumoniae
atgataaaaaagaaaaaaacaaaaaagagtggggtttgtcagctaacaggagattttggcccttttcagcgatcgcatatattaccaaaagccgtaacgaaattaagtgacaatggtgagcgatacagagaaacatctctcaatacaaggcctgtttggcgttctaatagttggtatgattataatttagtaactgctaaaggtgaaaaaatactcagtgaaatagacgatttggctatcagtgaacttagaaaacataaactaatatggagtggttttggtcctaaatggaaaaattctccgacaagttatcgtttggatgaaccagtaagaactgtaagtggtttgaatactaaattagtaaggctcttttttattagtttgttgtggcgagctgctgcttctcagagagaagaaatgtctgatatatatcttcctcagcaagagctggatgttcttaaactaatgatagtaagaaaggaatcaggtgaacctggttttcttccaatgtatatcaatcaaatatctaacataggagttcatcataatcggaccccaatttatgaaaagcaagtaataggtgatattgaagtagatacattcagattctactttgaagggttgatttgtcatattattcattcatatgatggtgatattataaaagggttggaacctgtatttatagaagcctcttcggagttgcttgttataactcataaattcgaagattccagagcattttctgatttgaaagaagtgatctctagttcgtttgatgaatgttcctaa

SEQ ID NO: 226440 - DNA, 516 bp, Klebsiella pneumoniae
atggctctgcatggtaaatttgtcattaacgacatgtattattctccattatcattccccggcgttggtaccttcctggcgttttccgggaatggtgcttaccgtaaccgtggtgcctgcgcaatgatacctaaagaggggccggtaccagcgggaaaatactggattgttgaccgtccggaaggggggctcagatcgcaggtcaatgcaggggtgcgagatatctataacagtgtagttaagggcgcttcattcaggcatagcgaatggtttgccctgtggcgggatgactggggaatcgacgattacacatggattgagggggttaagcgaggcaactttcgacttcatcctggcactttatcagaggggtgcatcactcttccgcatgattcagatttcgccatgttacgtaatgctcttctcaggacgcagcaaatagatgttccctgcataaggaaactgaaggcatacggctctattgaggtgattgccaatggccagccatgtttttaa

SEQ ID NO: 226441 - DNA, 519 bp, Klebsiella pneumoniae
atggccagccatgtttttaatttacttattaagatagcgttgctcgctgtggtgatgatgattgttgcgagagttgttccgtatgatggattagttgactctattacgggtagttttacttatcagagcgctgacaaggttactcatttcattttgggggagcctgatttagaggtttggcaatctctgagcacatatattagtatactgattaatacatttatcagcatacctgcgatgagtgccataatcacgatatatagtgctgtgatacataaatttaggtttactgatatcctcaaaacgttgggccattccacgttgcggcgatttgctaaagtattcggctttaccttcttattctgggtgctgtttcgcttgctaccttatcagtccgtaatccctcagcaaaaatattcaaattttacgatagtagcgattgtgagctttcagttgcttttaacaattgtttgctattggtttatcacgaagaaaatcataactacaaggagtttgtaa

SEQ ID NO: 226442 - DNA, 486 bp, Klebsiella pneumoniae
atgcccattccggcatacatgtggcttaaagacgatggcggcgcagaaattaaagggtcggtagatgttcaggatcgtgagggaagcatagagattgttggttttagccacggcctgaatattccggtagatagcgccaatgggaagataacgggtaagcgctctcattcaccgatgatgattgaaaaggagtttgatagctccagcccgtatctctataaagctgtcgcgacggggcaaacgcttaaaagcgcggagatccgctggtatcgtatcaaccacgcagggcaggaagaatgctacttcatcatgctgatcgagggagtgaaagtaacaggcattaacccgggaatgccgaacgctaaaatgacagggaactcgcaaatcaaccacatggaatcagtttcccttatgtatgacaaaattacctggcgctatgttgatggcaatgtccagtattcggacgactggaacgtgagagcgtga

SEQ ID NO: 226443 - DNA, 387 bp, Klebsiella pneumoniae
atgcttcacaacagcgtgcacaggtgcattgaccagttcgccgtacatgccgtattcattaaacataaacgaagggattacgctgaccagatcgccagtggtaaacgcctcaacattctcacctacggcctgcacaacgccagccgcttcataaccaagacgtgccggaaattccggctcaataacatattggccgttgcggtacatgatttctgcacgattaagaccgatagcctgcacgcgaatctgaacttcacccgctgctggtgcgggcacctccatatcgacaatttccaaaacttccggaccaccggtgcggttaaaggtaacaactttagacatattcagctctcgtcagttatcagcacatctttcgaatattgttga

SEQ ID NO: 226444 - DNA, 831 bp, Klebsiella pneumoniae
atgacttataaagcaatgaagccaaaagttattgcttctattgtattatttaatcattcctatgatgatattaaagatacgcttctctcgttatgccatgaagagagcgttgaaaaaattatcttcgttgataatggtggttgtcagtgggctgcatcattgaatgaaccaaaagtgagttatattaagtctcctcgtaactgtggttttggtgccggacataatctcgccatcaaagcaagttcagattttgatggctattttttaatatgtaatcctgatatcagttttgataagcagtctctagataaattagtatcgtttgcatggataaatgaatataattttgtatccccgcagatcatctataagaatggtgagcgtcaatatagttgccgcctgttgccaacgcccagtaatctcttcttaagacgctttcttcctaccactgctattaagtatgatgctacatacgagttaaaggatgccgagtatgataaggtattttcacctccttcggtatctggctgttttatgcttttgacgaatgttctattacaaaagttgaatggctttgatgaacgctattttatgtacctggaagatgtagatctatgtcgtcgtgctttacaacttacgaagatctattattgccccgaaacaacaattgttcatgttttcaataagggatcttataaaagtaaattgttgctttggtatcatattcgttcggccattacctattttaataagtggggatggttttttgataaaaaacgatatgcttacaacgaatcagcattgcgtaatatcccaagaaagctaagttaa

SEQ ID NO: 226445 - DNA, 834 bp, Klebsiella pneumoniae
atgaaaaatccacatcagaaaccgtcattatctccattagacatagttaagagtatatatactcaccgtagtattattttgcaaatgactaagcgagatgttatcggcagatataaaggttcagtaatgggagttttatggtcatttttgaatcctttattcatgttgactgtgtatacctttgttttttcggtggtatttaaagccagatggtcgactggaggagatgaaagcagaacacaatttgcaataatattatttgtcggtatgatcgtccatggtttttttggtgaggtaatcaatagggcaccacagataatattaaataatacaaactatgtaaaaaaagtaatattccctttagagacgttatctgtcatatccttggttgctgcgttattccatactgctattagtctactggttttactaaccgcttttgttatatttaatggttttatacactggacaataatatttattcctttagtttttctgcctcttgttattttcagtctcggcttatcatggattttggcttctttaggcgtatttttgagagacgttagccaaactacagtcatcataacgacggttttgatgtttttatcgccagtatttttccctatcagcgcgctacctgaaaaatatcatatttggatcatgctaaatcctttgacatttataattgagcaggctcggactgtgttgatttgggggggagtacctaattttatgggtattttgctctatactgttggagcatccattgtcgcctggcttggctttgtgtttttccagaaaacaagaaaaggatttgctgatgtcctctaa

SEQ ID NO: 226446 - DNA, 1332 bp, Klebsiella pneumoniae
atgtcctctaatcaaatcgcgataaaggtaactaatttaagcaaatgctatcaaatatattcccagccatgggacagattgaagcaattctttgccccaaaaataaaaagtgtaattcgccgtgaaagtcgcagctattttaaagagttttgggcgctacgagatgtttcattttcgataaatcgtggcgaaaccgttggtatcattgggcgaaacggtgctgggaagtcgacattattacaaatgatttgcggtacgcttactccaactgtcggtgacattgaagttaacggccgagtggctgcgttacttgagttgggagctggttttaacccagagttttcgggccgcgataatgtatatctaaatggtagcgtattaggtttaagtaagtcggaaattgataagaaatttcaagagatattagattttgctgacattggtgattttattgatcaaccggtaaagacctattccagtggtatgtatgtacgtctggcatttgctgttcaggcatgtattgatcccgaaatactgattgttgatgaagcattggctgtaggtgatattggttttcaatataagtgctttaagcgcatggaaatgcttaaacaaaaaggaacaaccatcattatggtcacgcattccacaggtagcatattagaatatgcagatcgctgccttgtaatgagtgatggcatgttagtcggtaatacgactgatgtattggctgccgttcttgcctatgagaaaggtatgctgatgacagagcgcactgatacagcagagaaaaaagaagctgtttcccagacgggggaaattgcatctgctgatgaattatccgcaatacaaaatacgcaaaccaatgccgaagttgatgaaaaacggtttggtagtggtcgagctataattgaagatttctcaattatgaaagcagatggcactcctctctctgaaaagccacttgtaaaaccaaatgaagaaatttatttttctttcaagctaaactcatcagaaaatataaatgatgtagtcttaggcgtttcactatctcggacccaaggcggggatatctggggggataataatatttttgccgggcataagattgacttggctccggggcttcggaagcttaaatataaagttaagctacctatcaatactggtgattatctcgttcattgcggtttagcttgttttaataatggtgagcgtgaggagcttgatcagcgacgtccaattgcaaaagtaaaattttggtcatccagagaacttggtggtgttattcattctcctgtaaatgttatagaaggggatgaactatcatga

SEQ ID NO: 226447 - DNA, 3567 bp, Klebsiella pneumoniae
atgattggcatttatttacccgcatttccgttccggggtgtaaaagctccttatttgtggtttttatataaagccatgacggctattaaagagccgttggcattgattacgacacaagattatttgttaccctgtacaaagtggcaggaagaggggcgctgggaggttactgatgacggacagaaacgtttaggctacgaacttcctaatttttcagttcgccaaaaagacaacgtctatattgttaatgaagaatcattatctgaagcattaactgagtgtggcgataacagtaatctcctttttaagaaatttctgacggaaatcattcctgattttaaaaatgctctaatcgctgcattacaaaaacaaaacgacattgaatgtattctgaccatatgcaattgtccatcactgaatgctgcagcagaaaaatataatattccagttataaatcttgaattaggtccgctgcgttctccgacgtatctttttactggttatttcgatttttctggtgtcaatggcaacactgaagcggagaagagatactttgctgctaaacaacaaggtgttgtctttaataaaaaaaatcgcatttcagcgttacgtgatttttttattaacagtcgaaacgatgatgactacattgaaccagaatatgatgttggtatagttttgcaagttgagaacgattccaatatccttgcatttagtaatagtttcgataatcaagccttattggactatgctgaaggttcatttattggaaaaaaaatagtacgaccgcacccaggaagccattttagattaaatgagaatcttggatatgaaattgataataacaatctgtcaatcatcgattttcttaagaaatgtcgaaaaattctaactattaattccagtgtcggtctggaagcaatgctaatgaatattcctgtgaagattttgggggattgttcttatgcattttgtaatgttgatgatgttgatgagcgagttgaacgtctaaccttctatttattttcttatctagttccatttgatttattatttaacgctgaatatatccgctttcgattgacctttccatccgaacatgaaattttaagtaagcatatcctatattatctatcgtcacgagaaaaacagagcattattgatatgaaaacatctactacagatgtcgtagaaaatggaatgtatgagcgaggtctcttgaaagagctcgaagagttgaagataaaaaatattgagttgaatgatattgtgagccgactagagttagagttacagcaagagaaattgttacaagctgagaatgataataatgacatactggttgatgttatcgtacccgtttatggtggtttacaggaaactcaggaatgtatagagtcagcaatatcaaccctcccctcatgggctgaattaattgttattaatgatgcttcacctgaacctgaattgacagattggctacgcaaacgtgcacaagacaatagtttcaagttactcgagaacgaaaataatttaggtttcgttgcaaccgtcaaccgtggcatgaaactgcattcgaaacgggatgttcttctcttaaatagcgatgttgaagtcgctaataaatggctggaacgtatctatgatgcagcttatagtcgtgagcgtgtggggagcgtaactccattttcaaataatgcgacgatttgtagtttcccaaatttctgtgaagataatgaattattttccggaatggatgtccaggctctcgatgatgaatttgaaacttatggcaaagaaaataatcttgtcgagataccaacaggtgttggtttttgtatgtacattcgtcgtgactgcttaaaccaggttggatattttgacgaagagacttttggtcgtggttatggtgaggaaaatgactggtgtcaacgtgctgcaaaagccggttggcctaactttcatcaattgaatgtctttgtttatcacaaaggcggagttagtttcgctggcgagcaaagcccgcgcaaaatacgcgcgatggaactccttaatgaattacatccaaactatacccgtgatgtaatggagtttatttcaagagatcctgctaagcaagctcgccagcgaatgctactgcgcattctggcgaaagcaaatcttcagaaaatactgctggtttctcatcatatggggggcgggacaacctatcatctcgaagagttgtctaatttttacaaaggaagagcatgcttctttattttaaagcctaatgcagacaacagtagcgtagtaatctctttgagtgcagacggacgcacatgcaaagaaagtatctctgttgatattgaaaatggctatgatgatctgctgagattattacgctttttgggtatatcgcatatccatttccatcatttgatgggaatccctgagaagatcaaaaaactgcatttagatttaaaatgctcctatgacgtcacaattcatgactactttgcaataaatggaaacccatcgctaaccgacaaaaatggtctttttatcggcgataatacaacaaacatggacgaattatgcgcggaaacatatccgttacctgttggaatgtcagctgccacatggcgttcaaatatgaatgcgtggttatttggggctgagcgagttattttcccgtcggcagatactaaatttcggtttacaagatattttcccgatatttctgagaaggctgtcatcgcatggcatcctgattacgaaaaaaatgctccatatcctgatgtcaggaaaacttacacgggtgatcggaaactgaaagtccttgtccttggcgctatcagtcgtgaaaagggcgctttcatgctggatgaggtggcgcatgcacttaaaagagaaaacattgagttccatcttcttggctacgcttgtagtacgctaaatgatgcggttatttgccatggtgcgtattctaatcaggatttagagaaaaaactcaatgatattgctccggatgtaatgtggttccctgcacaatggcctgagacatatagttatacgttgagtgcagcacttcaatatgggttaccggttgttgtaccaaatattggtgcctttggcgaacgactcatcggacgaaaatttagccggattattaattgggatatatctttccaaagaatgagtgagttatggcgacaagctattgcagatttcgatggctttttccagcaacagaatgttgatcctatgccggatgtttcgtcagaaacacgtgttgatcatttctatcaagattattatattcgtgattcatggtggcgtgaaagcgagcttggcagaattgattttaaaactttgatagatagtttctattcttcagagaacatcataatagctgaagaaaaaatatctcaacctcatggaaggaaggaaaaattattggctgtattatggatgttgcggcaaaatcctgcattatcttgggcaaccaaacttatcccctaccgtttgcaacgatatgtgaaacgacaactatcgcgtcgtgcattacatgaaattgttcgataa

SEQ ID NO: 226448 - DNA, 1689 bp, Klebsiella pneumoniae
atgcctgcaatcaaaaatggaattatcaatacatatgaagcagcaaaatactgccagtcaataaatgaaacctcgtcctcacttatcgaaagaaaactatctgaatttggccctaaaaaaagtaaggatggtaaatttcagataggctatatgctaagtttcccattattatcttatgttaagatgcataatgatggctcgtatgagatcgacaaaggaataatacgctatcgtttaaaattactcccagacacaaaaagacaagctgttatttatcttttctcgaaccacttctccgtttccgagggtgcaaaaactgaagaattaatttctaaaatagatggcaaacacatgatgcaattaagcaatggcatagttcctgtcgacaactatttttccagcaaaacatatccatgggcaattaatgcaagcaactcattaagtgataagatacgcaaagacgcaattaatgaggttttatcgcaagtctgcgctttagatatagtagaccaacaaaaaattagagcagtgaccgtccctggtgaagttcattataccttccccgactttttcaatggaatgggttactgtggtgaaatgcaactcacagattactcagaaaagtcgattaaaagattcagaaattacttatttgataaatataaaaatataaaatcactcaatgatacacttggttcagaatatagatcatttaatgaaatcaacccatcatcaaaaaatataaacactgtgcatctgaataacttttttgagcaccttgattatgcttcatcgggaaggttagcaatatatggttgggcagcaggaaacggtcaaggtccagcaaaagtcaggatttttatagatggaaaagatgtggggtatgcagaaagcgggctcagtcgaatggatgtatatcagggcatcccaacattgggcacttcagctgtagggtatcgatattatcttgattttcgaaagatgagtaaaggaattcatgttgtagatgtcgtccatgacgataatgggaaattgacattgatgaaaagcatagatgtgccggtaatggatcgacaacaaacaaaacctgttcgtgtcggagaaggcataaagttgctcgaagagaaaagcatgaagttctggaatgattatcctgagacattacaaccagtgtattacaatccattgtccgaggaattttataactttagaaaaaaagaggtagcaagagagatacaaaaatatgcagatattgtaagctcatcatgcattgggagggatagaaccttttctcaccaaatagcgccaatgtttaatgcagactggaatgaggaaaaaattgcagttgaagactcacttaaaaagaataatcattataacattggattaaatgcctgtggttcagcattttatggtgactatatatttaactggttaaaaacgtctggaattgaaagttatggaatcccagaagtgcaccctatggttgaaaacgaagaaatcatctatgatgcattggaacatcatcataacaatggtgcaatattcattagcccttactatttagaaatcaaaccagaaagttttggcgtcgataaagaacacaaaaaattcagtatcaatgaaaataacacaaattattattcatcaagtttctatcatgccctaagcagaatcatgaaagaatag

SEQ ID NO: 226449 - DNA, 786 bp, Klebsiella pneumoniae
atggctaaagactcaaaggttgtatacggcgccagcggcaaaacgaacgttttaacgttcgaacctgaaagcctgcatctggttaccgacaaaacacacccgctttacgatgaacgggtccaccttcctatcgacgaagggatggtactgaacattgcggagctgggtgtactggagccgattatcgtctggaaagaccccgaattggggctcacctgcgtagttgttggccgtcagcgcgttaaacataccctggaggcaaataaactccgtctgaaagaaggcaaagacccactgcttgttcctggggtcgttaagcgcgggtcagcaaatcagatggctaaatacatggtcagcgaaaacgaaattcgccgacctgatacaccgcttggccgggctaaaaaaatgtcagacgcgctcgaccgcgggctcgatgaggacgacattgcggtgttgtttggctgcagcgctcagaccgttcgtgcaacgctctcccttctcgatgccactcaggccgtcagggaagcggtggaggctggcacagttaccgttacccaagcgcgtcagctggcatcgcttaaacccgaagagcaacgggagaaggtcaagcagatcgagacagcgaccgccggcatcactggccatgaaaaagcccggcggcagcgccaggttcttggtgaagcaaagccgcgtatcaaatcacgcaaggaaattacaaaagccctcgaagatgccagcggcgaatatgccgaggctctgcgctgggtgcttggggaggcgcaatga

SEQ ID NO: 226450 - DNA, 276 bp, Klebsiella pneumoniae
atgaacttcgaaattattgctgggctggtggtcgtcatcctgggcgctatcgctggcgcgtttggcatcggtcatgctcgcggaacaagtaaggcggaagccaaagccgaacagcagcgtactgaagagaatgccgcggccagtattgctgtggcagaacggaaagcggaagcaacccaggaggccagcgatgtacagcagactgttagccatatgcctgatgacgacgttgatcgggagctgcgcgaaaagtttacccggcccggtagtcgttga

SEQ ID NO: 226451 - DNA, 435 bp, Klebsiella pneumoniae
atggatagcaaagttgaaatgcaaacagttattgcaagaaaactgcgtgacagagacattggtcattacgttgacagggcaaatgtggctgacgcaggcgcttatatcactatttttactaaatgcggagtaattacagggaaaataatttcaggtaaaaaatattacgaaagcattgaaaaaagctacagcacctatcagcagggtacaaacggtgctattacttatcaatattttcaggatgccaagaaaaactacacggaggaggccgattgggttgatgatgaaggcgcatcatatcctctcaattttatgcacctcgaagatgtatcgataatggttggtacaggtgcatggcgtgggtttagcaatggtttgcttaggattaaaatagaagaaatagacggccacatgttaggcaaagcccaaggctga

SEQ ID NO: 226452 - DNA, 192 bp, Klebsiella pneumoniae
atgttaaaaaaagaaaccttagagtctgccattatcagtgcagcgaaattgcaggggaatgagctcaacgggcaagacaaactggcgatccgtaccagcgttgcggcttgtctggccgcgaagaaacggcaccgccagcggatgaatactggcgtttttgagtggaaaaagcctagcgcaccacgtcgataa

SEQ ID NO: 226453 - DNA, 210 bp, Klebsiella pneumoniae
atgacagaacttgaaagtttattttacgagatgatgccgggccatattgctcatgcgatgaaaattgaaggggcaaaaattctggcagaaagtacgcagaaagaggccgaacgccagtcaacgctaaccggtctgtctcctgagcttatcattcagactgcgattcaggcgatctctatgcagatgaaaaactggcaagtagtccactga

SEQ ID NO: 226454 - DNA, 2298 bp, Klebsiella pneumoniae
atggcaggtaaatcattaggcactctcaccattgacctgatcgccagaaccggcggttttgtccagggtatggataaagccgaacgttcatcacaaaaatggcgggataacgttaaaaaagatgccgcagccgtgggttcagcccttgctgctgttggcacagccgcagcagcggcggctatcggtgttagtgccgctggtattgcactggtaaaaaatacctcagagcagatcactgaaactgatcgctgggctaaatcgctaaaaatgtctactcaggatttgctttcatggcagtttgctgcggagaaagcagggttgaccggggataatattgctgacatcttcaaggatattaacgataaagtcggcgatgctgtcctgaacaagtcaggtgaggctgctcaggctctggatactctcgggctttcagctgagaaactggcccagcaatcccctgataagcagttactggctatcagctcggcattgcaaaaaatcccctctcaggccgggaaaactaatatcctcgaaagcctggggaatgacctgtcaaaaatgctgccgttgttcgacaacaataacgagaagctgaagcagtttatccagctgtcaaaagattttggtgtcgctccgccccaggaggatattgataacctggttaaggttaatcagtttttccaggatattgagagcagtgcacaggggttaaagatcgagattgccagtggcctggctaaagtagacctctcaccgattcaggatggacttgatgatatccgggatgtgtttaccgatcctgctgttctgtcaggtctggcaaagctggtcggagggatggcggaacttgttggttggatgggtaagctaagttctgaatctgctaattttctcagccatatatttgaagtgcctgacaggtttaaggcgggtggctggtacgagtttgaaaaaaatcagagattaggagcaatagcagatacgcttcaatcagatttaggggtaataactaaaccatcttcaaactctgagttgccaataaataataacctgctccccgggcagagcaatcagaaacaaactcaaaagcctgatgctgaggcaaaaaaacttgaaagtgcctataaagccgtagaacagtcatatttaaagcaaattgcgctggtggatcagctaaccgggaaaaccaaagacgccactgaagtagaaaaactacatttcgatttagtatctggtcgtctggttgggataaataaagaacagcaaatcaggcttgagggcttggcctcagaagttgataaatataacgcgttgtcaaaatttcgagatttgcaggatgagttattaactccagaagaaaaattacttaaaacgacgaaagagcgttttgaagtattaaaaaatattcaaggtattacgggtatcagccctgaagaatataaaaaagccgccaaggccatatcgaaagcgtcattttccgacgcgcctaaatttagtggtcttgatccgatgtttggcggtgagtctggagagttgaaaaaagttgatgacgcacagaaagagcaggaaaaatggtatcagaaccagctcgatttgctggaacagaaccgccaggcacgttctgatcttaatgaggagtgggacgccagagagctggagctgaagaaaaaacaccaggatgaaatgaataatcttgatgctgcacgtaatcagctaatgctgagtagtgtcgtcgatggtctggggtcgatggttgatttgacccgtacagcttttggtgagcaatcaggagtatacaaagcggcgtttgctgtacagaaagcagcggctattgctcagtcagttatcgcaatccagcaggggatcgcgatggccgctgcaaaccctttcccgtacaaccttgcagcgatggccagcgtagccgcttctacagccggtattgtgtcgaacattgcggccgtgggtatggctcacgatggtattgatgctgttccagaaaccggaacatggcttctccagaagggcgaacgcgtagtcacggcgaataccagcgcgaaactggatgcgacccttaaccgtgtcgcccagcaatccacttctggtaatcagatttcccaggaatttaattttaacgttaatggcgatccttctgatgctcagatagccatgatgaagaaagcggccgctgacggtgccaagatggggtatcaaaaggcggtcaattcagtaattactggtcagggtgatttgcacaaggctctgatgacgaaaactaattcaggcagaaaaatagggtga

SEQ ID NO: 226455 - DNA, 1662 bp, Klebsiella pneumoniae
ttgaccgcatggaatgattacgccatcgccataaaatcgggcgaaattccggcttgtaagcgggtaaaacaggccgtcgaaaggtacttttcagacctgaatgacccccgttacgtgttcgatacagcgactgtagagcggtttattgcgttctcccggctctgtcctcacgtcaaagggccgttgcgcggtcagcctatcatgctggagccgtggcagcagttcgcctttgctaacctgctgggctttaaggtcagtgctacggggcgcaggaaatacagcagcgcctttatcgaggtgccgcgtaagaatgctaaatccaccgtagccgcgatgctggctaactggtttctggtgatggagcagggccagcaggatatctatacggcggcggtgagccgggatcaggcccgtattgtgttcgacgatgcccgccagatgtgcctgctatcaaagccgctgaaaaagcgtgtgaatattcaggctcataaaatgattttcccgaagaataacagcctgttaaagcctctggcggcgaaagcggccaccatcgaggggactaatcccagcctggctattgtcgatgagtaccaccttcacccggataacggcgtttactccgcgtttgagctgggtatgggggcacgtcctgaagcggttttattcgccatcaccaccgccgggagtaacgttgtttccgcctgcaagcagcattacgactactgctgtcagattctggccggggaagagagcaacgattcgctgtttgttctgatttacgagctggacgatgaaagtgaggttgatcagcctgaaatgtggatcaaggctaacccgaatctggatatctccgttgatgcggcaaaactggaggccactatccagaaagcgcggggtatcccgtcgcaatgggtggagatgctgaccaaacgtttcaatatctggtgtcagggttccacaccgtggatgggcgcgggggcctgggacgcctgcaaactcgactatgaagaaagcgagctggccggaatggaatgttatgcaggtctggacttgtcctcaaccagcgatatcaccagtgtaaattacgcttttccgttcgacagggagattaggttacttacaaggcattatctgccggaagcgacacttaataatgtttccaacaaaaaccgcgccatttaccgccagtgggtgaaagcaggctggattcgtaccactcccggcgactgcatcgattatgaccgcatccgcgacgatattctgcgcgatgccgaaacattcaatatccgtctggtgggcttcgatacgtggaacgccacgcatctgcgtacccaactacagggggcgggccttgacgtagagccgttccagcaaacctatcttaaattcagcccggtagcgaaatcgtttgaagtgttcgttaaccgcaaggtggtgcgccatcgcggcgatccggtactggcctgggcgattggtaacgtggtgatggagtccgacgccaacgccaatatcaagcccaacaagaagaaatcctccaacaagattgatccggcagtggctgcgttaatggcgttcggcacattccaggctgagcatgaggattttgcatttgatatgagcgaaagccacaaagatcgcctcagtcattttgacggggtgtaa

SEQ ID NO: 226456 - DNA, 294 bp, Klebsiella pneumoniae
gtggctgaaaccatagaacttgctgaagcaaaacttcactgccgtattgatggcgatgatgaagatttgctcattcaggcttacatcgatgcggctctggaggtttgccagaaacatatcggcaggcggtttgatagtgggctggagcttaccccggctatcaaaatcggttgtctgatgtacgtctctcagttgtacgagtaccgcacgatgattagcgatgtggaggcgaaagaggttcctcttgctgtctccgcgctgtggtctgtctatcgtgatgtgggggtgtactga

SEQ ID NO: 226457 - DNA, 342 bp, Klebsiella pneumoniae
atgagagccggaaagatgaaacgccgcgtcacgattcagcagttcgtcagtcaccaggacccgaacacgggttcagtcactaaagaatggcgcgatgttgccaccgtttggggggagatagacagcgtaagcgggcgggagcttgtagccgcccaggttgagcagtcagagatgacggtcagaatctggatacgctatcgcaaaggcgttaccaccaaaaacagactgacctgcacagaaaaaggaatgcctgtaaccatctacgacatcaaagccgttctgcctgatgcagatcgtacccgccttgaaattatgtgcaccggagggctgaccagtggctga

SEQ ID NO: 226458 - DNA, 786 bp, Klebsiella pneumoniae
atgactacagcttttgggaaaacatgtagcttttgggcggttgactctcgttggtcatacaagctggataacacaccagatgacactcatcccacgcaaaaatttgttgttgcagactctgagataacaatttttgctggtgatgaaaacccgattctggtagaacaggcagtgatccttgagctcattacccatgagcaatactttcagctgatagccaatctgaccggtgaatcgctagaatccattactctttctgaggctgatggttcgatcatagatttcagtggcagccatttttatggtgaagagaagcaacagccgcaaaagcaaacgcatttacattacattgggagtggaggatcacatgcttgtgattatttctactactcttgtaagaagaaaaaatttttgagctctctaggttgtaacgtacttggcgcgatgagttacgcttcgtacaaagatagagctactggtggtgcaaccaaagttaagatttggactccatcgaataactacgggaacgtcgagcggtacgatcaaatcgctaccggcgacatacccgcatatcattcatacgtttctgaaaaggtacatagcatgcttactcagctcaatcatcagaatgatttgcagttgagcgctgacagctccattccaagtgctcgctgctcttcaagcacgcaagaaaacgggaatcttcgtaaagtttctttcgcatctgctgttcgtcgacagcaaaaccgcgatgagcgtaagcgagcgcgtgctgaagaacgttga

SEQ ID NO: 226459 - DNA, 237 bp, Klebsiella pneumoniae
atgcctattacgattcgtgaaataaaggaacattacgattattatgggcttcatgatatgagctctatgtcaacggcagagtaccaacagatactagctaatggtgccctgttctggatagaccatcatggttttttgaggagtacgttttctgatgagatcttagcgactaatcgtgtacagtttgatgttcttctcaaccatctgcaagagttgaggggcaaggttgactcctaa

SEQ ID NO: 226460 - DNA, 1365 bp, Klebsiella pneumoniae
atgacggtacaactgacagctgtagaaactgtatctgatgccttgttcacctgttcgtatttgtgggcgcatggcaagcagtacagtcgcagcgatttggataaagccctccaccagcataaggaccccactacccgttacggaaagttggtggctcgcctcaaccagatagcagcaatgccgtatgaggagctttgtgatgccgggtatctcgacacggaccgcaaacaaatgattaccgcgcggcgttctgtgctggtggaagagataggcgaaggggaaatgaatgccatgctgtctgacgtgcagcgcattcaccgcgtcttccctgatgctggagcaaagttcaggacaaagctgcctctctctcgcggttctgagggctttgatatccgtcaggactatatccttaaacactttcttccagctcagtctctgtgcagcatttacggcccaagcggttcgtataagagttttctcgccgtatcgtgggcctgtcatatcgctgctggtctgccatgggcggggaagaaggtcactcccggcgcggtgctgtatgtggttggcgagggtggtgtaggtgttccccggcgtatacgggcatgggaacaggtgcatggcatacaggcagaaaacctctggctggtcaatcgtccggtgttcccggtgcgtgagtcagaggtcacagaagttcttctggctgccaggcagattgaaatcgaatgtggtgtgccggttcgcatggtggtgatcgatacgctggcccgttgttttgggggtaatgacgagaacgatgctcgtgatatgggggcgtttattgaggggtgtgacgttatcaaacagaaaacgggtgcaacggtgctggtagttcaccactccggcaaggatgaagggaaaggcgctcgcggttccagtgctttccgtgctgcgcttgatactgaatttaacgttaagcgtgaaggggatggaaaggcgcttattctgacctgtaccaagatgaaagatgctgaagagccagaacgtaaggcgtatgaccttagaacggtagagctttacaccgatgaagatggcgagcttgtttgctctctggttgtgcacgatcagccgagagaggctaaagaggttgagcctgaactggccaatgtatcccgtcttagcgataaccaccatgcactatggcaggcagtacgcagccgcacagctaagggggaaccatgcactatctcggtcattaaagacgatctgcgtgcaacgctgggtgcagacaaagtgagaaagtcattcccgcgctggctagacaagctggagagtgagcaaattattcgcattgagggtgagaacctttacccggtaacagtcgagtaa

SEQ ID NO: 226461 - DNA, 198 bp, Klebsiella pneumoniae
atgtatgacattgaaactcttggcagagaaaaagccacgtcccgcgcttgtcagttggcaacgttgcttctggtgatttcagactgtgaaatttcaggtcacgagagggataacctcatcgatctggcccgtgatatttctggcgatattgccacctttatgctggagcaggataaaaagggggcgctcaatggataa

SEQ ID NO: 226462 - DNA, 213 bp, Klebsiella pneumoniae
atggctgacaatcagtctacccaaactcgccctgaatttacatggcgttttctctccgcctctgagcgctaccctaccgccaaaccgctagtgattcacgtcaacgcatccagtgaacgggaagcccgcgacaccatgcccggcgtaactcttattttcgctgcccgcctgccgttccacgcatttcagatgctggaggtgcgccatgtatga

SEQ ID NO: 226463 - DNA, 186 bp, Klebsiella pneumoniae; identical to SEQ ID NO: 28742

SEQ ID NO: 226464 - DNA, 213 bp, Klebsiella pneumoniae
atgaacaagccatttcaatctaacgtaatctcgacagatcgcattatccgtgaagctgagtgcaggcaactaaccggcatttgtcgtactacccgttacatgatggagaaggaggggcagttccccgcccggcgcaagttgggaggccgtgcggtgggctggcttttgtcagagcttactgcctggcagcaaagccgctgcaaagcagcttaa

SEQ ID NO: 226465 - DNA, 729 bp, Klebsiella pneumoniae
atgaacctcccgaaaagaaagtattataatataaacgacgctgctaatttattatcttgcagtgtaaatgatattatccattttggtgcgactgaacggttagacatttatgcatatataaatcataaaaatagtacggacgactttcattttcagattaatttgcctaattatgcattagacaaaatagattgctttgcaggtcttttttttgaagattggtcagcaaccgacgtacaattcaaagaaaggaatgccagtttgcctgttagtggattctatgcaaaacaggtaaagggccttttttttatcgacccgtatgtacttacagacttggaattttcagaagaaaaaaaagcaaatataaattttttctcagatgtgaatcgattaaataatgagttcccagtagagtttaacgtgttggactttgaaattatcgttaatgctgatgcgttatgcataaagagcggtgatttagaaaagctaaaagatttatgccatacgcaaaatattgagtcagataaaacattagccaagaaagaaaatttaataaagagtttgcttacccttattcctgaactttcaggcgttgatattgatacgtttccggtcaaaaaactgaaagaaataattgaagctactgcagcgaatcgcggagttgacttcccaaaaacagatcttggcacatggtcaaaatacttagagcgaggacgtcataaaaagtga

SEQ ID NO: 226466 - DNA, 1224 bp, Klebsiella pneumoniae
atggctggtggaacgaataaattaagtgatgcctcactgcgtaaaatgctaggcagagaaagccccggcgaaaacttttacgctgatggtgacgggctgagcgtaaaggtatcaaaggccgggatcatgacctggtactttaccttccgtgtaggcggccgttcggcagcgccccagcgcatcaagctgggtaactatcctgatctctccctcaaatctgccagggataagcgggagcagtgccgcgcctggctggccgaagggaagaacccaaagcatcagctgagcatttcaacccaggcaaccctgaagccggtgaccgttaaagatgcgctggaatactggatcgctgaatacgccacccataagcgcgccaacgtgcataagcacaccgagcagttgcagaagcatatctacccttacattggtgattacccgctctctatgtgcgaaacgcgtcactggctggagtgtttcagccgggtaaggaaagatgcgccggttgctgccggctaccttctgcagatgtgtaagcaggccctgaaattttgccgtgtccatcgatacgcggtgagcaatgctcttgacgatctggcgatcgatgatgtgggtaaaaagcaggagaagcgcgacagggagcataccagtcaggagctggctgatatctggcgggaaagtagcgggcttaaattcaaaccctactatgccgctatgctgcgtctgctggtggtgtttggttgccgaacgaaggaactgaggctctcccggcccggcgagtgggacttaaacgaatgggtgtggacggtaccgcgtgagcacagcaaagggggcgtgaaaatcgttcgccctgtgccagctgctatccggccatatgtgaaggcgcttgtcaccagaaatcgtgataccggcttgctgctgggcgaaatgaagaagtcagaggcggtgagccagtggggaagaggtatctataagcgcctggggcattctgagccgtggacacttcatgatctccgccggacgttctctaccacgctgaacaacatggggatcgcgccgcatgttgtagagcagctgctggggcatacactcggtggagtgatggccgtatataaccgtagccagtacctaccggaaaaactggacgcgctgaataaatggatggaacggttagaggtaatttcctctgattatcccaacgttgctattctggagatcgcaaaatga

SEQ ID NO: 226467 - DNA, 552 bp, Klebsiella pneumoniae
atgaacatcgaaacagtaaacgagctcatcgcttccctggagagcgcaggcgagctgtcgatcaaagagacaaaggttatggcgctggcgaaagcgtttaagcagctggctgcggagaatgtggcgctgaaggcaggagcttcatatttctcttacggctctgagcacaatttcgaatggcacaaaactgctgaggaagctgtcgaagcggctgaggctgcaattgacgactatcgtggagaagcttgcgacgggtggagtgaagaagtcgatagcatttgctggggcatcatcatgcaatcatcaacgaaggttggcgaacgcccacgcaatgaagatgactgttgcgatcccgcaatcgatacagtttgcgattatgcgctgttgccgaatatcgaaacccccgccaccgaacgcatcgtagccgaagccgaggcgcgcggggtcgagaaggctatcgctcacctggagaagaagttcagcaatatcggcgtgcagatcatgaatttgcagtggctggcagactcgctgcgtgagggagcatcagaatga

SEQ ID NO: 226468 - DNA, 207 bp, Klebsiella pneumoniae
atgagcaaccgtatccctaacttcggctggaaccgcctgaaactggcaacgctcacctatgagcaactggctcaactggaagagcaggttaaggctgaacatgcctgcaaaaacggcattcacctattcgataaagccggtcagcgcaaactcgatgcccttagctgggccgtatacaacaagcagaaggcggagcgtgccgcatga

SEQ ID NO: 226469 - DNA, 759 bp, Klebsiella pneumoniae
atgacaactgatatcaccgaactggcgcagcgtatgaagactgctgctgagaaacttgacgcagaccaatggcagacacgcaagggttttagcggtattgaggtaatcgtcaaaggtagccttgaaaagggacatggctgtgtgtctttccagcctgttgctgccgacatggctgacacaaaaacagcaagagcgattgcgttgtttagtcctgccaacgtcctcgcgctggtagaggcgctggagaattcagaatcacggcttcatgaggtcgccgtagcgtgcgcaaccgcagagcaggcgctggagaaggcgcagcagcgcaacgcagaacttgaagcgcaaaacgaatatatccgtaagcgctatcagcagctcgatctgctgatcgggaaaaatatcctggttatgcaggctgcaatcatcgaatggcaggccactggcgatgctaaaaacgggctggcgtggatttataacacgctcttcggaccaggcgaattgcctgatgaagcggagaaagacgcacaggcctatttcgaccgcaaatatgctccgctcgatgaagagcttatggcgcttcacaagtggttttgggataaaagcgaagctgaaaaccttgctgaccctgctgacggaaagctaaaggagcacagtaaggcctcagaactatctcttaaaaaagaagaccgatgtgatgtttgtactgaaggggctcgcggcgggtgtgggacatgtatttttaacggttattttgaatga

SEQ ID NO: 226470 - DNA, 1068 bp, Klebsiella pneumoniae
atggagtcggagagtcattttatatcaaggcagttaaagttctttacagctactctgtatgctcagataaaacttaacacaagagatggcttaacagatttacccaaaagccaagagatttcgttacttcaattgattaacttggcctttgatacagattttgaggatttgaatcgcaaaaaacaaaactacccaggagttgattatggtagcatttcgatgaaaacaggtcttcaaatgaccgcaactgtaaaaaagaaaaaatttagtgatacacttgatatttatgatagaaatacactactcaagcaaagttttcccaatgtttggttttttttattaactgttgaacctatcccagaatctgtcaagctaaccgtacctaatatcaagtacattacattatttgatatgcaacgtagagttcttgatcaagatattacctttcaggttgaatttattaatcaactaaagagagaatatggtcgctattttgaaagcagtaaatcaaaagtaaacacttttttactaccagaaacagttgatattccaacagatatgttattgtttaatgaatttattgctaccgagcaatggtttccagaggatccaggaacgggataccttaaaatttatgatttaatttctgcttttgctaacgatattaggaagtgcactatcaaagctagggagattctcgtttctatgattcagcttgcacctcctccacaagaaataaatgataaaattgttgtttatgctgaccatgtttatggtagccttaacatcaatgaaaataatatcgcctcctatgattacaataagcatttacttgaaataaatgatttgattgaagaaattgatgattttataggttttcgttatgagggtgatgatgtatattttgaggtaaggaaacaatacgttttaaattatagaatatttgagccagagttgaaccttttttcagcgatgtatatttttttctcaaaaaatcacaaccttaatgagtttaagaatgctattcttaattgtgacttctcattgctatcagatagtgttttttag

SEQ ID NO: 226471 - DNA, 270 bp, Klebsiella pneumoniae
atgacaaaaatgagcaccatttacagcagactttcatacggcaccgggaccgcactgacgggctgcggtgtctcagcaaaggcgtatgccggggcagttaaggcagaggtatggattttggccgacaaaatagcggggatgaccctgagtgactgggcaattattgtcggtatcgcctgcaccattaccaccagtggggtgaactggtactaccggcggaaagaacgcgaggatcggctcaatggctatgacaccaaaactgaggaatag

SEQ ID NO: 226472 - DNA, 285 bp, Klebsiella pneumoniae
atgttaacagtaaaagtaatgtcacccggcggcggcgaagaaatccattgtggtctgagcgttggtttcaacccaaaccagcagagcatcgccgtatccggcatggaccagagtatcttcctgaaagaaggtgatattgcatatgtgatgaactcaaacggcaagaccatttcctgttacaagcactcaattgcgacagttcttttgaagaaagcaggagttagatacaccggtagcggtgaggtgaattggatggttcctcccgaactaggtagaccagcgtga

SEQ ID NO: 226473 - DNA, 879 bp, Klebsiella pneumoniae
atgcaaaatgttcacgctttgtcgcttgtaacagcgctggttaccttaaaatctggtaacaaggcagtatcaaccggaacgggctttttctacaaaagctcagacaatttcttatttctggcgacaaattatcatgttgtcactggcatcagcccgaatgaaaggggagctaagcctttccttggtgatagtctggttgtgcaacttagagataaaaatgggaaggcctatacagaaacaatcccattgatattaggtgagtatctcaactggcttgagcatccatcagatgccgaggctgatcttgttttaatacctttaccgatggatatgatgaatgaggtagatttcaaatatattgactctacattggtaatgaaaaacattctcttatccccctcatctccagtagttatgattggttatccaagaggtcttagtgattcagtaaataatcttccaatttggaaaacaggcagtttagcaagtgaacctgaatatgatttcaatggaaaaaaaataatagtggtagacatatctgcatttcctggaatgtctggttctcctgccttgtttgtatcatctagcgggtacatgacgaaaagtgggggtatggtaatgatgaatgtgatggctatacattttttaggtatctttgcgagtatgcaagttttcaactcaactatgtatattgagcaattacaaagcaaacctagttttattgcgtcacaaagtgaatctttgcaacttggtcacgtctggaaggctagtttgattgaagaaacagcaaaaaccttcgaaccgaataattaccctaatctaaagctctcgaaagctaacaaaccggttgcgaagaatagctttatttgcaagttttaa

SEQ ID NO: 226474 - DNA, 237 bp, Klebsiella pneumoniae
atgtcagagatcaccgcatccgagcaaatccgcctggatatcatcaagaaagttaactacgacaccgcagcggccaagctggccattgactgggttggtgatagcaatctgaaagctgagctattcgctgactcttttgatcgtgtcttcactgaaagtgagattgtctcgaagacccgcaaggccatccaggaagcgactgaggcgctggcgctgtttgataccgtggctgagtag

SEQ ID NO: 226475 - DNA, 222 bp, Klebsiella pneumoniae
atgcgagagatacctgattgcccagtctgtggttcatctgcggagttctattttcgggattaccagattggcgcctgttccggggccctgagatgcccttacggacatctccgtgtacaggatagttactgggctggtggcaagagcaaatcgaaaatccggctgattgaaaaatggtctcagcaggtagaacagaaaaaaggtgaagtgaaaaatggctaa

SEQ ID NO: 226476 - DNA, 396 bp, Klebsiella pneumoniae
atggaaaaaattactgacgtgctgaaagagctggagaagatcacctgtcgtgagctggctgtctatttcgacctgacagcacctgaaatgctggcccgcctgctggtgcttgagcgcgaaggcaaagcgcaaaacctgaatggctactggatgccgggtggaagcaccgagcctgtagcggtaaccagcaaactcacagagctggatatcaagttgctccagtcggtgccggttggcgtctggtttgagtggcagtccctggcaggtttcgttgatcgccctcgctaccgctgcgagcgtctggtgaccgcggggtttatgaattcgaaggtgactaatcctgacaatccgcaccatggcactaaattccagaaaatccgcgaggtggcccggtga

SEQ ID NO: 226477 - DNA, 1095 bp, Klebsiella pneumoniae
atgagcaatcaggtctttgaaattgttcaggccatgtcagggcaggggaactgcataacgattcccggcccgtatctggatttctttgcaggagacaggcagcagcatttgctggcagcgattctcaatcagctggtgttctggtcgggtaagtcgagtctggatgatggctggttttacaaggaacatgcggcgcttgcgaaagaggttcgcgctaaagatggcgatgttgtccgaaaagcgatgttcaaaattacggatcagtacctgtctggcgttatcgaagaagagcttcgccaggtgggtggaacacccaaaaagcattaccgaattgaccaggacgcgcttatttcccggatattcccgcaaatactggattcggctcaagagccgaatgggaataagtcactgaaagtaatggaaacggcttataagccgaatggaaacgacgcaaaagccgaatcgaagcaagttgctgaaagtaatggaatcggctctcaagccgaatgcattcgtcccaagagccgaatggaaacggctcatgagccgaatcctggaatcggctctcaagccgaatcctatctctatacagatcttaaaaacagatcattacatacagatcataaaaaccacgcgggagagatttctcctgtggataacttttctgaatcgactcagaaaactgtcatcccggaagtagttattcctgacgctaccgaagccaacaacctggctaccgatgacgatttcgacctcgctgcgtggttctggtcgaccatcatcgagctgtacgaacgcgcagcagagttcgacggcactctggcaaaaccgagagagccaaacttcgcagcatgggcgcaagaaattttcatgctgcgccaggagcacggctgcagccatgaccaaatccgcaccatgattgagcgcattcagcgcgatcagttctggtgctcccgagttcaatccgtgaaaaccctacgcagcaaatggcaggagctggctctgaagttatgcccggcaaacctggcaaccggcagctcgttcggtgtgagcagcaaactggataccgacatcccgaaaggtttccggggctaa

SEQ ID NO: 226478 - DNA, 321 bp, Klebsiella pneumoniae
atggagaacgcaatagcccgaaagttagagccgccgatcctcaacccaattgagatagagggcattttgttaaaccgccttttgtccataagccagaagacttttgcagaaatgcgaggggtaagcgaatcaacgattagtcgccgtaagagtgaagggtactacgccgagatggcgaaagagatagcagcgttgggcctgcaggttgttccgccagaggcggttgtagtttcccgtcactacctgcaatcagtagagacgctggcagatatcggtttacgtgcggagcggtgccgtcctggtccgcttgggtgggactga

SEQ ID NO: 226479 - DNA, 222 bp, Klebsiella pneumoniae
atggaaacaatttctcaacgcctcaagaaaaaacgcgaagagttgaatctgtcacaagaccaactggcaaagctcgctggtatgaggcagcaatctattcaagccattgaggccggttctactaagcgtccgcgctacttggttgagttggcgcgcgcgcttaaatgcaaacctgaatggcttctttttggcgacgaccaaaacaaatcacccgccgcctaa

SEQ ID NO: 226480 - DNA, 633 bp, Klebsiella pneumoniae
atgagccttgcagatcgcgtaaaacaaaaaagaatggagcttgggctcacgcaaacggaagccgctgaaagagcgggtattcgccaacagtcctggcagagcattgaagatggcaagacactaaaaccaagaaatattgtaggtattgcaaaagcgttaaattgcgatccgtcgtggttaatgaatggtggcgcattcatgccgataggagagatgaattcgcggcgcgtacctctcatcagctacgtgcaggctggcgcccttgcggagaaaaaatctatagaagcgtttgatggtgattttgaatacatactcacagatttagacctttcagtgcatagctttgctttacgcattgagggcgattcaatggagccagattttaaagctggtgatgtgattatcgttgatcctgaactagagccctctccaggtgagtttgttgttgcaaaaaatggcgggcaagaagccacgttcaaaaaatacaggccaacctatacagatatgcaaggggttcagcatttcgagctggtgccattaaacgatgactatccagttataaactgcgatacccagccagtagaaatcatcggtgttatgatcgagcacagaatctaccgcaggaaacgctaa

SEQ ID NO: 226481 - DNA, 225 bp, Klebsiella pneumoniae
atgaaaatagaatttaacgataaaggtgtaattgctaccgccacgattaccagcacagtttttgaatttcgccttcacaaccgcgttgttgatacggcgctatttcttgctccttcggttcgcgctaagcgtagcggtttctttgttttaaaaacggttattaccggcaaaacctctcacgtattgcgtgcgtataaagcgattaaagcggaggcatcacgatga

SEQ ID NO: 226482 - DNA, 483 bp, Klebsiella pneumoniae
atgactgagcaaaccattctcgacatgtgctgtggctcccgcatgttctggttcgataaacaggatgagcgcgctgtattcagtgatatccgtgctgagcagcacaaactttgcgacggacgcagcctggttatcagtccggacattatcgccgacttccgcgcgctgccgtttgctgacgcatctttccccattgtcgtgtttgacccgccgcatcttgaacgagtgggcgaaaacgcctggatgggtaagaaatacggtcgcctgaacaaagacacctggcgcgatgacctgcatgccgggtttaaagaggcatttcgcgtactacggccacacggcgttcttatcttcaaatggaacgaaacccagataccggtgagccagattctggcgctgaccgacgagaagccagccatctggcaacgaacagggaaggcggacaaaacgcactgggtaattttcgtgaagggggccggcaaatga

SEQ ID NO: 226483 - DNA, 201 bp, Klebsiella pneumoniae
atgataaccgggactactaactatgacgatgtggcagaagtccgctgcaatttgtgcggcggttattacaaagccgacgatccggaaagtcacgaatgcgatgaagaagcccatgacgaaattgagtgtgatatctgcggtttcaaaagtactgacccggacggcgctcactactgctgcgaggataactccgatgactga

SEQ ID NO: 226484 - DNA, 1014 bp, Klebsiella pneumoniae
atgactgatatcaccaaactggcgagagagcgcctggaaaaaattaaatcatggcgtgaaacctacggcgccggaagcaacgtaatgctgccagctgaggaggccgaggagctggctcgtatagcgctggcagcaatggacagcgagccggtggcgtggacttggcactatcgtgagcaatggcatgttacaagcgataaaggccgcgcagcatttgtcgcaatagatggtgatgtggctgtactgccgctctatcgccacgcgcagccaacggtagatagagagccagttgggtacttccgcagatatgaccctgattttgatgcccttataactcagtgcgataaaggcgctcaggattcatttccgctctatctgcacgctcagtcagagccgatcgaagcaaatattgcgcgagatgctcagcgttaccgcttcctgcgtgacaaagacgcttttggcgatgacggtgagcctggcctggcgagctgggatgagctgattgatcttgatatgaatgagtttgacgcagcgatagatgctcgcatggcacatcccagcgttgatttcctcacgctggataatgctcttcagaaacaagagcgacgtcgctgcaaagacagaaactgtaacaagcagattttcgggtattcggtcgatggcctgtgtgaggactgctatacagcggtatctcagcagccagcgccggtagtcagcgcagacctgcttcataccgcagcctcagcgatagaggacctgttggagcataccgaccctaacactagttattattctggcgtgtgggctgatgtacctggtaagttgcgtgcagccatgctccaggcaaagtcgctagccagcatcaatcccgcgccagctctgtgttcgttgtcaaaaactggcgaagtgctgcacaccaactctccggtaatcacggatgaggggggggctaccatcatagatgttaagtatccctttctgagagcttgctcttcaatatgtttggtattatag

SEQ ID NO: 226485 - DNA, 165 bp, Klebsiella pneumoniae
atgaacatgccggttgtcgccgaagtggtggcgcgggaacagccagaacatctgcgcgagtatttcatggaacgcgtccgctactaccgcgagcagagcacccagctcccgcgcgccagcgacccgcgctatctggaaatggctgagcagaacgccaagaaatag

SEQ ID NO: 226486 - DNA, 306 bp, Klebsiella pneumoniae
atgagcaaatccaaaaccaaggctgaaaagctccatctgagccgcgtagctgcattgggctgcatcgcttgccggaacctcaattacggcgaatcgcctgctgaaatccatcactgcagctctggtactggcttgtctgtccgcgctgataacttccatgtcattccgctatgccatgcccatcaccgtactggtggctacggcgttgctattcatgctggccgtaagttatgggaagaaaagttcggtactgaggctgagttactgagtcaggtactccaggagttgggggaggcctgcgcatga

SEQ ID NO: 226487 - DNA, 1167 bp, Klebsiella pneumoniae
atgaaaattactatttccggtacaggttatgttggtttatcgaacggtgtcctgatcgcgcaaaaccacgaagtggtggcactggatatcgtacaggccaaagtggatatgcttaaccagaagatctctccgattgtggataaagagattcaggaatatctggcagaaaaaccgttaaatttccgtgccaccacggacaagcacgacgcataccgtaatgccgactacgtgatcattgccacgccgaccgactacgatcccaaaaccaactacttcaacacctctacggtggaagcggttattcgcgatgtcacagagatcaacccgaacgcggtaatgatcattaaatcgaccatcccggtggggttcacccgcgacatcaaagaacgtttagggattgataatgttattttctctccggagttcctgcgtgaaggacgtgcgctgtacgacaacctgcacccgtcgcgtattgtcatcggtgagcgctctgcgcgtgccgaacgttttgctgatctgctgaaagaaggcgcgatcaagcaggatatcccaaccctgtttaccgactccaccgaagcggaagcgatcaaactgttcgctaacacctatctggcgctgcgcgttgcctatttcaacgagctcgacagctatgctgaaagccaggggctgaacagcaaacagattatcgaaggggtatgcttggatccgcgtatcggcaaccactacaacaacccgtcctttggctatggcggctactgcctgccgaaagataccaagcagctgttggcgaactacgaatcggtcccgaacaatatcatcgcggctatcgtcgatgctaaccgtacccgtaaagactttatcgcggattctattctcgctcgtaagccgaaagtggtgggtgtgtatcgcctgatcatgaagagtggttcggacaacttccgcgcctcttctattcagggcatcatgaagcgcatcaaggcgaaaggtattccggttattatctatgaaccggtgatgcaggaagatgagttcttcaactcccgcgtcgtgcgcgacctgaatgccttcaaacaagaggcggatgtgatcatctctaaccgtatggcggaagagctaacggatgtggcggacaaggtttacacccgcgatctgtttggtaacgattaa

SEQ ID NO: 226488 - DNA, 1065 bp, Klebsiella pneumoniae
atgaagattcttgtcaccggcggtgcaggctttatcggctctgccgtggttcgtcatatcattgaaaatacccgggatgaagtccgcgtgatggactgcctgacctacgccggcaacctcgaatccctggcgccggtggccgggagcgaacgctactcgttttcccagactgatatcaccgatgctgctgccgtggcggcccagttcagcgagttccgcccggatatcgtgatgcacctggcggcagaaagccatgtggaccgttccattgatggtccggcagccttcatccagaccaacgtgatcggcacttttactatgctggaggcggcccgtcactactggtccggacttggggacgtgcagaagcaggccttccgcttccaccacatctccaccgatgaggtgtacggcgacctgcacggcaccgatgacctgttcaccgaagaaaccccgtacgctccgagcagcccgtactctgcctccaaagcgggcagcgaccatctggttcgcgcctggaaccgcacctacggcctgccggtggtggtgaccaactgctccaacaactatggtccgtatcacttcccggagaaactgatcccgctgaccattctcaacgccctggcgggtaaaccgctgccggtatatggcaacggggagcagatccgtgactggctgtatgttgaggaccatgcccgtgcgctgtacaaagtggcgaccgaaggcaagagcggcgagacctacaatatcggcggtcataacgagcgtaaaaatatcgatgtggtgcgcaccatctgcgccattctcgacaaagtggtggcgcagaagccgggcaacatcacccactttgctgacctgatcacttttgtcaccgaccgtccgggacacgacctgcgttatgccattgatgccgcgaaaattcagcgcgatctgggctgggtgccgcaggagacgttcgagagcgggattgagaaaaccgtgcactggtacctgaacaatcagacctggtggcagcgcgtgctggacggctcctatgccggtgagcgccttggtctgaataactaa

SEQ ID NO: 226489 - DNA, 222 bp, Klebsiella pneumoniae
atggatagcgcacgcgcccttgttgccaaaggacggggaatagccctggtcagccgcaccatgggcgtgtcgcgtgcgcagctgtcactgcggattaaccgttctgccgactggcaggacaagcgctgtaaccggcgtaatgacgaagcagacgaagaaatactgtcggctatcctcgacatcatgggctccgtttgggaaacggcaaatattgtacgttaa

SEQ ID NO: 226490 - DNA, 381 bp, Klebsiella pneumoniae
atgttcaaccctgataaataccgttcagtcatctggctgaagggcggtcgctcttttccaaaacttgactgcttcggcattgtgaacgagatacgccgcgatctgaatttacccgtctggcccgattttgcaggggtcaccaaagacgacggcggactcgaccgggaagcgcgccggatgatgcttacccttgagcgctgcgaaccctgcgaaggggctggagtggcctgctattccgggtcgaccgtcacccatgtggggatcgtggtcagtatcgatggtttgctgcacgtggcggaatgcaatccgggaacgaacgtcacctttctgccgttgccgcgatttaagcggcgctttgttcgcgtggagttctggcaatga

SEQ ID NO: 226491 - DNA, 483 bp, Klebsiella pneumoniae
atgactcagattaaacgcctttacgccagcagcggcccggagctgatcattgaaacgctgcagatcaccattggttctgacgtccattatctgtgccagggttacgagaacatcacagcaacgacggagaacggcgataccgtaacgtttaccgcctgtgcgagagacattgcgctgccggcgcgcaatgcggacggtacgcaggacctcaaatttgccttgtgcaatatcgatggtgttgtgtccacggcgatccgcaatgcgctggctaaccgtctgtctgcatttctgacgtaccggcgttatatctccacggatttagcggcccctgcggaagtgccgtatacgctgaaaatcaagtcgggctcctggacggcgacagaggtgcagatcactgcgggctacatgaatatcctcgatacagcctggccacgttaccgctacacgctacctgtattccccggactgcgttatatcagctaa

SEQ ID NO: 226492 - DNA, 1065 bp, Klebsiella pneumoniae
atgaagatccttgtcactggcggcgcgggttttattggttctgcagttgtacgtcatattattgaaaatacccaggacgaagtacgcgtgatggattgcctgacttatgcggggaatcttgaatctctggcgacggttgccgatagcgaacgttactcctttactcagacggatatcaccgatgctaaatccgtctcggagcagttcagcgatttccgtccggatatcgtgatgcacctggcggcagaaagccatgtcgaccgctcaattgatggtccggcagcctttattcagactaacctgatcggcacatttaccctgctggaggcggcacgtcactattactctaccctggatgccgcgcagaagcaggcgttccgtttccaccatatctctactgatgaagtttatggtgacctgcacggcactgatgacctgtttacggaagaaacgccgtatgcgccaagcagcccgtactctgcctccaaggccggtagcgatcacctggttcgtgcctggaaccgtacctacggtctgccggtcgtggtgaccaactgctccaataactatggcccgtatcacttcccggaaaaactgatcccgctgaccattctcaatgcgctggcgggtaaaccgctgccggtgtatggcaacggcgaacagattcgtgactggctctatgtggaagatcacgcgcgtgcactttataaagtcgccaccgagggcgagagcggtgaaacttacaacattggcggccataacgaacgtaagaatattgatgtagtacgtactatctgcgccattctcgataaagtcgtagagcagaagccgggcaacatcagccagtttgccgatctcatcacctttgtgaaagatcgtccgggccatgatctgcgctatgcgatcgatgcggcaaaaattcagcgcgatctgggctgggtaccacaggagacgttcgagagcgggattgaaaaaaccgtccactggtacctgaacaaccagacctggtggcagcgcgtgctggacggctcctatgccggcgagcgtcttggcctgaataactaa

SEQ ID NO: 226493 - DNA, 1407 bp, Klebsiella pneumoniae
atgtccaagcaacagatcggggttgtcggtatggcagtgatggggcgcaaccttgcgctcaacatcgaaagccgtggttataccgtctctgttttcaaccgctcccgtgaaaagaccgaagaagtgattgccgaaaatccaggcaagaaactggtcccgtactataccgtgcaagagtttgttgaatccctcgaaactccacgccgcatcctgttaatggtgaaagcgggcgcaggtaccgacagcgcgatcgattcccttaagccgtatctggataaaggcgacatcatcatcgatggtggcaacaccttcttccaggacaccatccgtcgtaaccgtgagctgtctgccgaaggtttcaactttatcggtaccggtgtttctggtggggaagagggcgcactgaaaggtccttctatcatgcccggtgggcagaaggaagcttatgagctggtagcgccaattctcgagaaaatttctgctcgtgctgaagatggtgaaccatgtgttgcctatatcggtgctgacggtgcgggtcactatgtcaaaatggtccacaacggtatcgaatatggcgacatgcagctgattgctgaagcctatgctttactgaaaggtggtctggctctttctaacgaagaactggcggcaacctttaccgaatggaatgcaggtgagctcagcagctatctgatcgatatcaccaaagacatcttcactaaaaaagatgaagaaggtaaatacctggttgacgtgattcttgatgaagcagccaacaaaggtaccggtaaatggaccagccagagttcactggatctgggcgaaccgctgtctctgattaccgagtccgttttcgctcgttatatctcttcgctgaaagatcagcgtgttgctgcttctaaagtattgactggtccgcaagctcaactggctggtgacaaggctgagtttgtagagaaagttcgccgcgctttatatctgggcaagatcgtttcttatgctcaaggcttctcccaattgcgtgctgcatctgacgaatacaactgggatctgaactacggtgagattgccaaaatcttccgtgccggttgcatcattcgtgcgcagttcctgcagaagatcactgatgcttacgagcagaatgcaagcattgctaacctgctgctggcgccgtacttcaaacagattgctgatgagtaccagcaggcgctgcgtgatgtcgtggcttatgctgttcagaacggtatcccggttccgacattctctgctgccattgcctactacgacagctatcgctctgcagtcctgccagctaacctgatccaggctcagcgcgactatttcggtgctcatacctataaacgcactgataaagaaggtgtattccataccgagtggatggagtaa

SEQ ID NO: 226494 - DNA, 1446 bp, Klebsiella pneumoniae
atgagtttagcttctaatgctaagtggaatatgtcatcccagttttttaaaatgatagctcagttggttaatattatatatttagccaaattaattcctccttcagagtatggcataatggctatggcattagttgtagttaacctaggcattcttttgagagatttgggaacatcagcagccataatacagcgaaaagatttatctcatgatttagttaacacagttttttggttgaatattactatgggatttggattggcattttttatactattaatgtcaccatttatttccatggtatataatcaacctaaattaatgtatgttcttatccttttaagtattacttttccattatcttgtagtgcatctgcacatttggctcttcttgagcgagagtctgcgtttaaaaaaatctcgatggttgaagtttcttcttctgctatttccgtcattattgcattaatattagcttattctggttttggtgtttatagtcttgttggacaggctatagctctaaatttgatttctgcgctgcagttttggtatatttcaaagtggagaccatcgtttaacaagtttattgagttaaaacaagttaggatgatctttggttttagcgcaaacctttccctttttaattttattaactatttttcaagaaatgcggatagtttcattattggcaagtttatgtcttcggctgtgctcgggagttataatcttgcatataggataatgcttttcccattgcaaagtcttacgttcgttacaacacgatccttatacccaatattgagtaaaacacaagatgataatgaaactattctaaatacgtatctaaattgcgcattcattgtattgcttattacatctcctttaatgacaggtcttgcattttatagtcagccgtttgtagaaattatattcggacctcaatggcatcttacatccgatgtgttaaagtggctagggccaaccgcaattttacaagcagttctaagcattagtggtgctgtttttatggctaaagggcgaacggataccctaatgcggttaggtattttaggtacatttttgcaggttggttcattccttattggcgttaattacgatattggtaagtttgcaatgtgctacatgattgctaatatatgcaatttctttcctgttatgtattttttaatgaagacaattggtggtaatatttattgtttttttaataagatggcttctattattttttccacattaataatgttggtttttttagttttgctggattatttttatagttcaagtcaaattgattctatcttttctttaattctttttgctttttcaggagctatagtatatttcttatctcttatgcttacatcttcacttgttagaggatttgttctagggaaaattcgtaaaaagagtcgttgtctttga

SEQ ID NO: 226495 - DNA, 2637 bp, Klebsiella pneumoniae
atggccgaacttaacccgcctttgggaacgacgacgcctgaaatattcctggataacgtcaagcgcgctgacgagctggttaacggtccggccggaacggttaacgaccgcggtggtgaaccgctggatacgtggcgccagatgatggcgaaaaacgatgaggtcaggcagaacctgatcccgctcagtaagcaataccagacgctggcggcggcgcaggcggatattgcgaacatcccagagggctctaccacgtattaccgcagctctgatgatagcgcgctggctattgaggttattaaccacggtggaacgcttgagcctaccgggcggaaaatgccgtctcaggccgcggttgacgatgcactcgcgggcgtcgcggcactgaatctgctcattgctgacagctatctacctcagggatactctggcgctattactgaccaggagggaaacgcggcagcgctgattaacgacgaagggggatttgaaatacctgagttaatcgtcggtgattcttcatctgcaggtgaggatatgcccgggtatgtagaggctcacaccgacgaggagggcaatctggtgctgggtattcgcgattctggtgtggttgagactccggatttgctggccggcagtatcaatatctcgaaagatgatctccctgactggagcgtggcattcaccgacgatagaaataacgtcgcgttgggtgtcagaacgggaggtgaggtagaagcgccggaattgctgactgccgaggtcaacttaaaaaaaacagagacaccgggctgggagattgcctggacagatgaaaacggcaatatagcgatgggtatcagggatgatggctccgtttatccagaacctgagaataatggcattgtagagtttaccgctgccgacacagatgttattgccatcctcggtgacagctatacagatagcctgtttacgctgaaggacaagagctatatcagcaaactgtcctcattgctggattaccggttcaagaattttggtgtttcaggaaataccgccccggccataaaccagcgtctggtcaatcattctgtttattttgatggtaagacattcgcgcaaatgaatgctaaatacgccatcatcatgacctatgcaaatgatgccgcaaaatatatcgcccagagtatggaatactatgcatataacatgagccgtttaatcgactccgttatggcgtatggcgcgatacccatagtcgtcgctgagtggaatatcacaaatcaggctgcggcacagcttaaagctatctgtgaaagccggggaataaaatacatattcaacggcagtctgatgaaagaagtggggaatctggttgtcagtccgttccatcaggggcacccctgcacccggacaaatggtgttatatgggtgtcgatgcatgaggaactaaagcgccttctcccggctaaccgttcaataaaaatctaccgccagaggccgacattctcaccctcatccgacgcagatatgcttttctctgaccgtatcgacttgctgaaaaaatggaaggaaatcggggttcctcaccgctcattaccagacaatattgcacagtactttgaagagatgaacggtcggggtgatgttcgtgaatggacgttcagacctgacgaatatgaccagttgggtgccgcaggcgttgcatttactgaccgtcttctggttaatgtcacgtatccgaacggggcggcaggattaagccaggcaggattcattcttgagtgttctggcgctgtcgatatttatatccgaaatatgctcgatgtagcctctgatatcggtgacgcggtaaatgctgactatctggcgaaatacaaaaatccaccaggcgcatggaaaaaagtgggttctggttccggggaatatattttctctgatgcgctggagatgatcatgtcaggccgccagatacaggtcatgctgaaatccacagcgggtagtctgatgaatatcagggccagatatgcagaaaaatatcaatccgcagcgtggcccgcgcttcccggctacacccctgtgtcagttctgcatggcgaaacctttgagagcatggcgacatggaacgtgagcggagtgaccagtattattccgctggaccaggttaacaccccacgaaacctggcatacaacggacctctggcaacggtagcctcgttgatgacgggctcggtgatgaagaagacgattggcatcacgtcgcctgcagaccgggacataacacaacccctcactctacaggttgagttgtgggggcgctatttcccgaaagcctatctggataacagtatttacaacctcgatcccgaacaggttgttgattcgtctcagccaggaaacaccttcccggtagccagcccgatcaccagtgatacctgtgatttccgcacagtcacgttacggagcgcattcggggcatcaatgaacctgccaaacaccatcgcgcagagggatttcaccgggctgttctggaagccgatgcgcttcattcttgaaataccaccatacgaaaccgtttcacaaatcacgctggagataacgtcagactctgactatatccagctcgccaaaatttttataaaggaagttaaataa

SEQ ID NO: 226496 - DNA, 1533 bp, Klebsiella pneumoniae
atgaaaaaaagtgttgttagacaagtgcttgaaatgagcgggccatgcatctcttcagatcttgcagagagaattcagtggcaacatccctcaatgtcccctgaagcgatacgtaaaatgatctcgcgaagcacggacataggtaagctgccatttttgaaattcagccataacaggagattcatttatctaaaagatgattttggcagtttcaaattttggcgagctctcgaaaagtgcatgtacgaagcaaactcaacttactcacacgcgatacttgccgtaataaataatggcggttatttgaaggtgaaagattttgggattgtgtctggatctcctataaaacaagctaaacatttaagttatgaaacagttctaagaaatctactttcggcaaaaatacttagatctgtgtatattgatggagttggtgattgcgtactgataaataacaacatagccaacgatgttaatattagaacaatggcaaattgcgaatccttttttgacaaaccaatattggagcttgttaaagcttggttgaggaatttaggcctggtcgcttttaatcagataaaaacaaaatacgatggggagggaaatccagttgtaggctcttttgaatgggatatgaccgctccaagttacgtttcccctctcgctgaatatgtcggcggaaaactgatgcctggtttcgttgcctgtgatttttctctcggctttaatcgtgatgaaattactaccgctgcagcagaaacattcataagaaaagtccagatgactaagtcttctcgagcgagtcagaggataatgtttgttattttcgcaaggcgtttcggcaaaatagccttcaataagttgagaagtgagggggttctggctgtaactatagcaaatgcgtttggtaataaagttgatgaaagcttaaccaggttgtcgagggtggttcagggttctttgtccattgaaaagcatccagatgagttgcttcagatggttaaagatctggagtctgtttctggagagaatggcaatttgagagggtatatttttgagctttttgtatcctcgcaaatttctaatttttatggtcttggtaatatttacattaatagagagtataagataaatggtaagcatgcagaagctgatgttgtattagagagtagtgacgatatttatataatagagtgcaaaaatgttaaggtcttaccttcaactgaacttacgcgttggatgaaagaaagggttccaactataaactcttactataaaataaataatttagaaaaaaagaatatccaccattatttgtgggttacaggtaatgtgtacaacaaagatttaaaaaggttagactcttttaagagtaataataagaatatcgatgttgattatttgtttggtgagcatttggatgatttcttttacaagaaaaagcgggtgttcaacttatatagaaaagtcatttcacctgattataaaaaaggcgtaatgcctgattttgagttagaggacgattttttctag

SEQ ID NO: 226497 - DNA, 891 bp, Klebsiella pneumoniae
atgaagatattactgattggcaagaatggtcaggtgggctgggagctgcagcgctccctctccacgctcggtgatgtggtcgcggtggattactttgataaagagctgtgcggcgatctgactaatctggacggtatcgcgcagaccgtgcgtactgttcgcccggacgtggtggtgaatgccgccgcgcacacggccgtggacaaggccgaaagcgagcgggagctgtccgatctgctgaatgacaaaggggtggcggtgctggcggcggagtcggcgaagctgggtgccctgatggtgcactattccacggactatgtgttcgacggcgccggcagccattatcgccgggaagatgaagcaaccggcccgctgaacgtctacggtgaaaccaaacgtgccggtgaactggcgctggagcagggcaacccgcgtcacctgattttccgtaccagctgggtgtatgccacccgcggcgccaactttgccaaaaccatgctccgcctggcgggtgagaaagagacgctctccatcattgacgaccagcacggggcgcccaccggcgcagagctgctggcagactgcacggcgacggcaatccgtgaaacgctgcgtgatccggcgctggccggtacctatcatctggtggccagcggcgagaccagctggtgcgactacgcccgctatgtgtttgaggtggcgagagcgcacggtgcagagctggcggttcaggaagtgaagggcattccgacgacggcctatccgacgccggcgaagcgtccgctcaactctcgcctgtcgaatgaaaaattccggcaggcatttggggtgactctcccggactggcgtcagggtgtggctcgcgtggtaacagaagtcctgggtaaataa

SEQ ID NO: 226498 - DNA, 558 bp, Klebsiella pneumoniae
gtgctgggggataatatctactttggccagagcttcggtaaaaaactggaagcggcggcggcgaagacctccggtgccacggtgtttggttatcaggtgctggatccggagcgtttcggggtggtggagttcgacgagaactttaaggcgctgtccatcgaggagaaaccgctgaagccgaaatcggactgggcggtaaccgggctctacttctacgacaacaacgtggtggagatggcgaaggacgtcaagccttctgaacgcggcgagctggagatcaccaccctgaaccagatgtatctggagcgcggcgatttgcaagtggaactgctggggcgcggatttgcctggctggatacgggcacccatgacagcctgattgaagcttctcagtttattcataccattgagaagcgccaggggatgaaggtcgcctgtctggaagagatagcctaccgtaatcagtggctgtcggcggaaggggtggcggctcaggcggagcgtctgaagaaaaccgagtacggtgcctacctgaaacgtctgctcagtgaagactga

SEQ ID NO: 226499 - DNA, 1104 bp, Klebsiella pneumoniae
atggaggttatcgatggtggcggaagtatttggaatggtggtaagttaattagtgatacagtaccatatacggttatatatgattcacattggaacataattcagcaagggcctattggtaatggccgaatgcctttcaatgatgaaaaacgcatccctgctaaatatcaatcacaaatgataggctgtgctattattttccgctcttcaactcaaagtgtacaacatggcttgttggtccaaggattgagtacaaactatggtaatgtagtcgttgcgggctttgataattgcaattttataaactgcaatattagaggtggaaaccatataggtggtattagtattatgaatgggactagggaaccattattatgggcatactcgactactgatattaatccgtttatattttgtcgtgggaaaaatcataacatcataaattgcatttttcatgaatgtaacaataacggactatatttaagtggctcagacaacgttgtagtaaagcattgccgatttattaataatggtgagtcggggattaaaactgcgcaatatgtaaaaagatcatggacatcaacaaccagttgttgtacgaatgtttttatcaaaggttgtttttcttctggtcaatattatgatggatttgatgtacaaaatgcctatggcagtggttcttatatgcatttggactcttttgttaaaattgaggattgcattacaataaaaaattatcatgcaggtattgtttcccaagggggggggaatatttttaacaattgttttgccgagttgaatggttctcatggaattatttcgaaagaaagtgaaaatgtacaaatgttacattgccaggccattaataatgggcaatttttcggtggagttgagcttactttagttggtcctggatcgattatgcgagattgtttagccgtacatactttaggtagtaggccttatatggttataaatcaacagactgggaatttctcgaaaataaaaaataccagttattcaattgataatcgagtttcggatagaaaaaaatgcatgattggtattgacataaatataaaaaatttgaatgccaaaccatga

SEQ ID NO: 226500 - DNA, 1110 bp, Klebsiella pneumoniae; identical to SEQ ID NO: 215013

SEQ ID NO: 226501 - DNA, 483 bp, Klebsiella pneumoniae
atgactcagattaaacgcctttacgccagcagcggcccggagctgatcattgaaacgctgcagatcaccattggttctgacgtccattatctgtgccagggttacgagaacatcacagcaacgacggagaacggcgataccgtaacgtttaccgcctgtgcgatagacattgcgctgccggcgcgcaatgcggacggcacgcaggacctcaaatttgccttgtgcaatatcgatggtgttgtgtccacggcgatccgcaatgcgctggctaaccgtctgtctgcattgctgacttaccggcgttatatttccacggatttagcggcccctgcggaagtgccgtatacgctgaaaatcaagtctggttactggacggcgacagaggcgcagattaccgcgggttatatgaatatccttgatacagcctggccacgttaccgctacacgctccctttcttcccaggactgcgttatatcagctaa

SEQ ID NO: 226502 - DNA, 981 bp, Klebsiella pneumoniae; identical to SEQ ID NO: 95379

SEQ ID NO: 226503 - DNA, 210 bp, Klebsiella pneumoniae
atgaccgggagtaatgcgcggtggaaatggacaacagattacaaccgtcgctcgatagcggaaacggcgatgtaccgggtaaaacagctgttcgggggggcactgacgctgcgtgactacgatggtcaggttgcggaggctatggccctggtacgagcgctgaacaaaatgacgaaagcaggtatgcctgaaagcgtgcgtattgcctga

SEQ ID NO: 226504 - DNA, 204 bp, Klebsiella pneumoniae
atgatgcttacccttgagcgctgcgaaccctgcgaaggggccggggtggcctgttattccggatcaaccgtcacccatgtggggatcgtagtcagtatcggtggcctgctgcacgtcgcggaatgcaatccgggaacgaacgtcacctttctgcccttgccgcggtttaagcgccgatttgtcaaagtggagttctggcgatga

SEQ ID NO: 226505 - DNA, 174 bp, Klebsiella pneumoniae
atgacacctgaagagtatctttcaccagaatggagtgacagggaaaaggttcacgactggaaaaactatgccagcgaggaactaaaacgtatctggcatacctttaccgataagcaaaagagagtggtggctgaagccctgactgaggctgctgaaagagaagattgggagtaa

SEQ ID NO: 226506 - DNA, 441 bp, Klebsiella pneumoniae
ttgattccttacaaaactgaaccctacggtgcagtcgatgatgatgaatctatattaaatatgaaacgtgaagggatgtttttggtctttacgaatgatcctgataaaaaatttaaagaaatatctttaaagttagaagatgaaggaaaaactgattggttgtttcctaacccgatgccatttggtctggagccggtgatgaccctgcagtgggtgcgtgcacgcttcgggctgccgatgatttatgttgatgcgaaagtggttatgactctctatagaggagtaaaggagttttatccgctattagctcctgatcaaaatatagttgcgtcgtttagctataacaaagatttctttgtagaaagtgtgactttttatccgctggaacgagcaaaggagattcaggttgcgctggagaaaaaacgacttggtggcaaatga

SEQ ID NO: 226507 - DNA, 192 bp, Klebsiella pneumoniae
atgatcattgacgtcgaaaaactggtaaaacaattgggtaagccttatcatgaaatttacagtcacgggttgattccttataaaacaaaaccttatggtgccattgatgatgatacagccagattgaatattaaacgagaggggatatatttagcgtttattaataattcggaaaaaaacttaaagaagtga

SEQ ID NO: 226508 - DNA, 510 bp, Klebsiella pneumoniae
atgatcattgacgtcgaaaaactggtaaaacaactggggaatccctatcatgcaatttacagtcacgggttgattccttataaaacaaaaccagttggaccagtggatgttgatacagcatcactgtatatgaagcgtgaagggctatatttatcttttgagaatgataaagataaagtttttaacgaaattacgctgactcttgaagatgatgagaagatggattgggtcttccctaatgcaatgccttttggtcttgaacttgtaatgacacagaaatgggtgtgcgaacgctttgggctcccaatgatttatggtgagcctaaaacgatggggagctatagtcgtggtattagtgaggtatacccactgttgccacctaatcaaaatatagctgttttattcgtttataattctgatctttttgttgttagtgtaactttctattctatagaacatgcaaaagaaattcaggcggctctcgggaaaatacggttgtctggaaattga

SEQ ID NO: 226509 - DNA, 1338 bp, Klebsiella pneumoniae
atgtacgcactaacaacattgaaagtagttaataaggatgaacaagggaaaaatgacagtagtttctatataggggctaggtctggtcgtgtctctgaccaaatggaaaggaattttagtatagaagaactatctgaatggattgagaaaattgatttaggaacagcaaaagaagcaactaataatggccgattaataaagtcattctcgcaacccatcaatgaaaaacccaattccgatatagcttcaattattctagatttatcagatttcgatatcgaattaatttccgaaaagaatttcctaccggactattattaccttcaatattcagaaagtgaaggtgcggagttatttgttggttcaaaaccatttaaaatacaaattcagtatgaagaagataaacatagttaccttttgacaaccactaacaattatgatgatttcaataaaataatttcttatttaaataatgactattttagaattcttttcttagatggaacaacatatagtgcgtcgaaattttataaattttcacttccttttgaaaaaggtattactgctgaggaaagttgggcgggacgttcactcataagcattccagccctgctttcaaagggtcttaaagaaaaaggaaagtatgatgaaaaagatatgtatattaatactacaagcacaagctttgataagaattctatattttatttaattgatcaattaaaaaaccactcaaatagcaatgctactcttccacaattgggcccctttcatccttatattccaaattgcgatctcgttctttgcactgacatggatacagaaccatgtgattttatcgtatcatcaccggataaattatgtttcattcatgtaaaatgtgggaaatcattcagttctccaaaatcctcagcaggagcgatagcagaggtcggaagtcaagcaattaaaaacttaacctatctgatttcacactcagatgctaataccccaggaaactactctatttgggataaagcatggccatcccataaagccaaacataaacttgagtctcgttttagattagcctttaacgaaattggaaagatccctaataaagaaaataaacttaaggaaaaaacctgggagttaatatctaatagaagaaaatcaccactgtgcaataaagaaatatggatagtaatgggcaactctttttcgaaaaaacatttcattgaagagatgtcaaaagatactgaccagcaatctgaaacaatacaagcttttcaactaatcgaagattggttaagtagtgctgatgagatgggtgtagatataaaaatattcacatcataa

SEQ ID NO: 226510 - DNA, 612 bp, Klebsiella pneumoniae; identical to SEQ ID NO: 135022

SEQ ID NO: 226511 - DNA, 210 bp, Klebsiella pneumoniae; identical to SEQ ID NO: 135026

SEQ ID NO: 226512 - DNA, 219 bp, Klebsiella pneumoniae; identical to SEQ ID NO: 135034

SEQ ID NO: 226513 - DNA, 924 bp, Klebsiella pneumoniae; identical to SEQ ID NO: 135035

SEQ ID NO: 226514 - DNA, 918 bp, Klebsiella pneumoniae; identical to SEQ ID NO: 138181

SEQ ID NO: 226515 - DNA, 219 bp, Klebsiella pneumoniae; identical to SEQ ID NO: 135486

SEQ ID NO: 226516 - DNA, 771 bp, Klebsiella pneumoniae
atgagcaaaggaaccattatctgcctgtgcgatttcactggcgtcatggctgagccatgggtcgaagcaggttatcgtgccgttctggtggacccgcagcaccttgagacttcgatcgacggtcccattgagcgcatatcggcaaccatccttgatgctatgccgcggctttctcaaattattcgcaccgagaacatcgttatggtcattggttttccgccgtgcactcacgttgcggtatcgggctcccgttggttcgaggctaaacgagccaaagacccacatttccaggccaaggccgcactggtcgctgagcaatgccgcatgattggaatggtgacaggttgtccgtgggcattcgaaaacccggtgagtgtgttcagcagcatctttggctcggccgattacacgttccatccgtaccagttcactgggctgtgcgctgatgacaactacacgaagcagacatgcctctggacgggtaacggcttcaaggcgccggcagaaaatatgcacccgatggttgaagcggctatcgacgccgtgaagctggcctgcggccgcatggtgccgaagaaaaaggcgatcgaagccatatccggaacgtcctttgccggattggtgactgactggtatccggacaaccgaattcacgaatgtccgcccagcgacgagcgcgccaacattcgcagcgctactcccctgggatttgcaaaggccgttttcctttcgaatgaaccccacctcaacaagaagcgggaggcagcatga

SEQ ID NO: 226517 - DNA, 228 bp, Klebsiella pneumoniae
atgagcaaatacgtaaatcttgatatctcgataatgagcaagcttagcgagacgccttctccgtttagccgcctgttctctggtgacgtaggggctgagtgcgtcgatatagcgaaggatgaaggagataaaaaagagccgttccgcatcctcgaccgccgattacaggccttgcgtaaattgggggtgattgcccatgtgaaaggtaaaggatgggtgaagttatga

SEQ ID NO: 226518 - DNA, 1500 bp, Klebsiella pneumoniae
atgaatataacggattttctaaaaggctacagaaaccatccaatattatttgttggagcaggtttcagcatgagatacttatcaatttcttatagctggccggcactcttagagaaaattagtattgacctgacaaactctaatgaactatataaagatcttgtcagagaaaacagtaataaagatggtattatagaccttccaaaagtggcaacgcaattagagcaaatatttgatgcaacacttaaagcagataggaatggaaagttcaaaaatatcaatgacttatactacaactcggaagatacctcctcaaatattagcagatttaaaatctatctttcacagttagtgaatatcacagatttaaaattaggagttcaagatgaaatatctgaattagtaaaagcctccaaaaatattgcctctgtgattacaacaaactatgataattttatcgaaagtgcaattggttataaccctgtaattgggaatgatatacttttaagcaatccttatggttctgtttataaaattcacggatgcgttagcaaaccagaatccataataataactggtgatgactatgttcattttgataaaaaatatgagttgattcgtgctcaactcctatccttatttatacataacccgattatatttatggggtatagaataggtgaccctaatattaaaaaagtattaaaaacaatattttcatacataccacctcgttctaaaattgcagagaaaataaaaaacaacttccttctgattgaaagagaagaaggcattgataatttaaacgttgtctctcacgatctcgaagtagaagatgctgggttaattagcattaataaaatcgttacagataacttctcagacatatataaagaacttgctcaactgcacttaccagtttcggtaatggatatacgcagagcagagagtgtctttggtaaaataaaggaaggcggagacataaaagtaaaacttgttggggatttggacacgctcagaaatgatgaacttgttctagccgtcggttctgttaactctataaaaatacacatgcaaacacctcaggagatgatggaaaactattttgatctaatttcaaatcaggagtcgcatgttgtcgagttgcttgacaagttcaccatcaataaaagatcatatttcccagcttatgcttttcataaattcagtccaggtgttaaatgcttaacatcattaatgaaaaatcaaaaaagattaatagcgtcaaactatgctaggttacccaagaatcaaagaatagtagaacacaccattgaagatatttacgctaaacattcagatattgatagcaaattacaaaatattattttcttcaatgctcatgatggacatatatccttggaagatttagaaaaacatgtccgagaatttaaggacaagtctcatactgattatcgcaaacttttagcattgtatgattacctcgcacacaatgtataa

SEQ ID NO: 226519 - DNA, 1128 bp, Klebsiella pneumoniae
atgacgataacagcctattctagaaaatttaagcgtgaactggatgctaagcagttggaaaaccttttcgaacgtagcaactcagatccttctttaagttttagagattttgttaaagaggatgttgaatgcccggcatgcaatgtttctggtggttattacgtttcggaaggaagatcgcccagtaacggcaaagttgtaaagcaagcacactttgcatttcgagacaatctaggtaaagactctcacctcccattttgtgatttttatactggagatgataagttgaacgttgtttcaaatgaaggccgaattgattttatgcgctcgggttctgaagcgacacgcttaataggtcttatggtctgcgcgggaattcaggagaagatttttacgcaagaagatatacgtaacatgcgccaatggttcttagatttaagagaaaaaggcacttttacatttaatttaagccctcacataatttaccttgcaaaggcctcattgattagatacaagagaaactatgataattatgttgtcgatctcagcgccacaaacaaaagttggttcgacatcaatgaggaagtatatcaatccctttatttcaagtaccctcaattctatctaaaccgtaatgagaatcctgaactttggaatgtaaggcttaaatcagtagtcaaaaaagcaagaactatagtaattaaagactctggaacatcaacatttgacagatcaattctcaacgaaaaatatgagatagctactcaaatggcaagactgattcgagactaccaccctcgactccgtatgattattagttacacaccaacatctatcaaagcaaacaacccactcatggctttatctgcattattattacatgtttccgattggaatattcaggaaagctgtaaaaaaatccaagcaattttagcagttaagaaagttgacgataattctgcaggaaacattattggattaaacccattcattcaccatagcgcttggattcttgttaaagctttaaacgacttacattctaatttagacaaagaaattgattttgataaagcattaaacgaagaaaaagagaggctcatgaaaatttactatccaaatggtcaataa

SEQ ID NO: 226520 - DNA, 234 bp, Klebsiella pneumoniae
atgcgtgtcgaaataatgattgataaagagcagaaaattagccaggcgacactggaagcactcgaaaccgagctttaccgcaacctgacccctttatatcccaagacggcgatccgcattcgcaaaggcagtgccaacggtatcgagttgaccggcttaaaacttgatgaggataagcagcgcgtaatggaaattatgcagcaggtctgggaagacgacagctggttgcattaa

SEQ ID NO: 226521 - DNA, 258 bp, Klebsiella pneumoniae; identical to SEQ ID NO: 136970

SEQ ID NO: 226522 - DNA, 1065 bp, Klebsiella pneumoniae
atggcagagaatggccctattgaagatttggcaaaacgcatatcagaggatctactgagtcgatttaagtggcagcagcatggcccctgcgaccgagatttcctttgtgatgatgaggctaaacataagcctgaaggtaagaagcagaagcacacgcatcctgtagatgttgtatttagttataaagacccatatttaaacaaagtcatttatttaaatactgatttaaaaagttataaagcaggttcaatcaatgcgtcaaaaatagaatctgcattggagtcattagcaaaaactattgaatgtgctcgctatagtcctgagtggtcagaaaaatataatttttctcaaatcgactgtgaagttcgtggtttattgtttgtttttaatcatgacaatcagttacagcatgatttttatgatttttttaatccccctaaacccgctaaaggaagaagagataaggctgtcaacttagaaaagattcctttatccgcaggtcagcagattcatataatcgatccgtttctgattaattatatgttggcaataacgaatgatatgaatgatttgattgctaagaaggagtttcctgatgaagagtatggattctattaccctcaactgacttttcataaggtggctgtgactgaaaaataccttccagctactatagaagtcttgtcatcacctttcatgattatcaaacatggtgctgtttataaatttaacagggttaaaggtgttgaggaggaggtttatccagaagggtttgtcgtgtattataacaaaaaaggtaatagcgacaatgaattcttttatttgttagatattttgtcaaattatcaaatccttgatggtataaataaaattagaataagactggcttatcgagaaaaagatgagaggattctctcacactttcaacgtggagtcgaaaaatatgcacatgagtatgggttagatgaagaagctaaaaagaggcttgaagacttagatgttaaagttgtgtcttcagtaaaagaattcttttctgcagaagttatttcttgggagccgaaatga

SEQ ID NO: 226523 - DNA, 1065 bp, Klebsiella pneumoniae
atgaaaaatattcacagcgtaactgataaggctttgtatgatgctttaaaccaaaagcaaatcaccctaaatgaaattcaagaccttttcttagagagggggacgataatatgtaaaaaaactcctcgaaaagaattggcaagaaactattctcgaatgactcatgattattacgagcatcaaaaaattgcaacactgctaggtggtcagacaaggacagaaaaaattacatgtgtaagaattgagactgatatagataagaagggtatcatagacgcggcagaaaaacttaagaaacaaattaccgagcaggatgattattgtaaaataattgtggatgggccgcgagttctgattaatattagatatctttcaactaattatggaaaaagtgattttaaacaggctattaataaagaagcaataattgaaattgagcctcttgatgatggttacagtatccgccgtccagataatgaaaaccttgaagattacgagggactcttactgggtcacatcagtgctattcagagcgagcaagcggaagatagtaatcttgatttaaaattaaatgaaatttctctatctcacaatacatcagctgatgttagaactttattcttcgataaattaatccgtacacttgatggttatgagttactggatgttactgatgcttatgtgtatcaccctaagcctgaaactatagaggctgaagatggaaacaccgaaactggagtgcacgtttcaagagcatcactcaagggagagggtgtacttaaatctgatgaattaagcgatctttatgatagagggttctatatttggaaaataaaatggaaggtcaaggagaacttagctgatcctgatatatttgagcttgaggctcaatttggcgatcctctcaattgtactaatttctcatatttagttaagggggtcagaaaatataaggcaaacggacagtatttcagtaagccgcaaaaactctctggtagagaagctgagcgattcaataaattaattgaaaatagagcttattctattataatggaaatcagctaa

SEQ ID NO: 226524 - DNA, 696 bp, Klebsiella pneumoniae
atgtcacaattaagattgaagtggatgagattgaaaatcaggaccagccctgaggctgtctttgattttataaaaaacacgccttattctgatgctattggcgctggttttactaaatatgaaactattcataatggtatgactgcaactttcaataaaaaatctattgttttagagccggttgccgatccatttggtgaggtgatggaattcgaaagggttatatttgatcaaattagtttttctatccaaactctcagcaataagatatgtttattgactttttacaatcctccaaaaactgttaaaccttttatcgattttttgtctcaggctgaagggttaaatgttgcttatgggaatttaactgtagatcttaaagctttcatgagagtcattcgagacaatttcggcgtgaaggtgtttagtatttcaaaagtgaaggtgtcaaatcttcctgtcactgaaaaaacaagagcatgtttggaattgaattcaagtggcgatgccttgcatgatttgaagagttttgttggggatggcgagttcaagctcgataaaataaaagttggaggattttaccttgattcaaagattagttttgaattaaccagtggggcttctgcagtggttcctgatgagtatttttcgattttcaatgatgccatttcatgtatggaaattgataaattttag

SEQ ID NO: 226525 - DNA, 606 bp, Klebsiella pneumoniae; identical to SEQ ID NO: 136562

SEQ ID NO: 226526 - DNA, 2421 bp, Klebsiella pneumoniae
atgagcaaaatcagtgaaaccccacgctgggaaaatgaaatccacgcgctgacccgcggtgaaaaagtggaaggcggcagaggtggtgcagccaatatccaggcatcccagctgggaaaccgaacggcattccttaaaaatgagctggaggcattaggaacgctgatcaaatcaggcgatatgccgtttgccagcgaggaagccgccgccgccgccatcaatgaggggaaaatccccgatggtgccgtgttctctgtacgatcatccgatccgcgtgtttgggttgctgagtataaaaatgtcggaggcgaaccggttaagacgggacgtctgatttataacagcctggctgttgccgcgaccgtaatggcgggggttgatgacccagacggtacgataacgggtatcgcctcgacgtttagcggccagctgttccgcgttatcaccgatgacagcaacgctccgtccgaggtgatttacattaacgataacggcgaagccaggttcatcatgactctggcaagtgggcaggcactggatacggtgcgggccctggccgagcaggccagtgcagatgcgcttcccctgaaagggacgattcgccgggccgatattggcaatcttttgctggcgctggttgatgaaatcggccttatcccctggcaggttgacggggcgggcggttttggttcaggcgtggcttatatcagcaaggaggggattcgcgccggcgtcctgcaaatcatgagcacaccggacgctattttaaggctggtcggcgagcatgggatttacagcgacctgattaaaaaagacggctccgcgaatttcccccgatacgcgctgggtaatggcgtatatctgaccagcacgccagacgcgattattcgtctgactgaccgtaacggccttttttacgacattattgataaatatggcgtcccggcatggttgaaaaagggcaatggtaatggtggcggtggagaggaaatgacggaagccgcgtatattcgccagcagaatgcggtaaacctgtctgttatggaacaatctggccggcgcattatgacgcggcttaaatttccgtcagacgcatataatcattttattatgcagtgccagtcgctcggtatggggtttatgtgctttcctgccgtctcaaaggccccgaaatacggcaatctgatgctcggcaattccgtgcgcccggcgagcgcgtccaaaaatgaatttgcccccctaggcgacgcagctttccagccgctcaaatccgtggttcagagtgtggatggggcaacgatcctgacagatgcagagcagcaggcgttaggccggtacgcaggaaacgaaggggaaagccctattgtcggtgctgtaaatggttttcgccgccacttcctcgaaaaaaacgctttcagcgccgataactcacgcctttttgtggcatccgctgtcggcctgtccggtcagtcaattgcgtctctgctggatgatgagaaatattatcagcgttttgttgactgcgtgacaaaagcaaaagccctggcggacagcgaggggaagagctattccgttacgttgctggcatttatgcagggcgagcgcgactaccaggacggcacatcaaaagccgtttacaaggggctgctggggcagttgcgcactaaaatgctggcaactatccgcgccattaccggacaagccgacgatccggtgtggctcatgtatcagactggctatgtttacaccccgaaccctgataattcgccgattaatgcagtgacgctgccgattggtgaggctcagtacgagttttgccaggaaaacaaaaactgcttgatggtggggccaaattatcagctcccggataaacagggtcacctcatgactaacggtagccggtggatgggatgctatttcgccaaagttgcggacagggtacttaaccagcgccgcccgtttcagccgctggctccgcgtgattttcatgtcattggcaatgcgatttataacagcttcctggttgaacatccgccgctaaagtggcagcgcccgttccgggtaggttcgaggattgacatagccaataagggctttcgtgttttccacaacatccaggctgacgccgccgggatcggtacggaactgactattgccagcgtggagatcgtcgccgacacaatagtgaaaattgtctgcactacgcctcccgtcgggacggtgcgcgtcctctatggctccaaacagtcagagggccaggggatgctgactgacagcgatgattatgtgcctgacgaggtatacgaatacgatccgcaattcacgcaatggcctgaggaaaatatcgccgaattaatcggtaaaccatacccgatggagaactggtgcatagccttctcccggacatttacgcaggggtaa

SEQ ID NO: 226527 - DNA, 738 bp, Klebsiella pneumoniae
atgagcacaggatttttgttaggcaacatcagcgatatttcagcgttcgcgaccggttttttactgcctgttgacggcgcggtttacgccaatattttcggtgctgacagcagcccggcccgcaatctgatcaacggtcggccggatgcgacggtcattggctcgccggttgttaatgaccggagcgttaccctgaccagcatggaaagctatattgataccggcgtgaaacagaccggtgaaatgacgatcatcacgctggggcagccagccgggacaaccagcaattttatccactggtctaactatggctcgccagttacaaatggcgggtctggattaacctccattgattttgcgcagcagtcaaatgcgacgggcaacccgacgttgtcgctggggtacaccctcgataattttgcgaccaggctatcactgtcctatggcattacagcaggtgccgacacggttaaaaggcgagctattgcgtcggtattcagccagtcagcgatgacaacgcgtttgcgtgacctggtgaacaaaaaaagccagcagaatgccattccggctaatggcgtcctgcttcaggccgggaatatcctgctgggatcacattacacggcggcgacagcatcaaaaggtgacttgtactttgcggcgatttatccgcgggcgttaactgatgccgagattgacgcggtgtatgtgcctattaaggcgttttttggattgcagtag

SEQ ID NO: 226528 - DNA, 738 bp, Klebsiella pneumoniae
atgcctctcatcaccattaatcagatgcagaagtactacggcgacaaccatgtgttgaagggcgtcgatctggatatcgacatgggggaagtgatctcgatcatcggccgcagcggctcgggtaaaagcaccctgctgcgctgtatcaatggtctggagggctaccaggagggcagtatcaagctcgggggcatgaccatcaccgatcgcgattcacaggcccgggagatcagccgctccatcggcatggtgttccagaactttaacctgttcccgcacatgacggcgctggagaacgtcatgctggccccgcggcgggtgctgaagaagtcccaggcagaatgccgggagctggcgcagcggatgctggagaaggtcggtcttggcgaccgtctggattactatccggccaatctctccggcggccaacagcagcgcgtggccattgcccgggcgctggccatgtcgccgaaagttttactctgtgacgaaatcacctcggcactcgacccggaactggtgggtgaagtgctgaaggtgctggagcaactggcggcggaaggtatgacgctgatcctcgtcacccatgaaatgaattttgcccgcgaagtgggcgaccgcgtggtgtttatgcatcagggacgcgtctgggagcagggcgacagcaaaacgctgttcgccagcccgcagaccagcgaactgaaacagtttatctcctcggtgcgcggtcttaactaa

SEQ ID NO: 226529 - DNA, 657 bp, Klebsiella pneumoniae
atgaccacttttactgactgggacattatccgcaacctgctactggccggtcgctggacggtgctgctgtcgctggtcgcgttcaccggcggggcgctggtgaccttaccgttactgctgctgcgtctcaccggcggacgccaggtgaaacggctgatccgcgggtatattgagctgttccagggcacgccgctgctgatgcagctgtttctggcattctttggcgtggcgctgttcggcgttgacgtctcggcgtggaccgccgcctcggtcgccctgacgctctacaccagcgcctttctgctggatatctggttcggcagcattcgcgcgctgccgaaaggccagtgggaagcctcgcgctgtctcgggctgagcttcggccagaccctgtaccgggtggtggcgccgcaagcgctgcgcattgctatcgcgccgaccgtcgggttcgccgtacaggtgatcaaaggcacggcgctggcatcgattatcggctttgtggagctgaccaaggccgggacgatgctgaccaacgtcacttatcagccgtttaaagtgtttgcccttgtggcgctgggctatttcattctgtgctatccgctgtcccgctacagccgctatctggagaacaaattcaatgcctctcatcaccattaa

SEQ ID NO: 226530 - DNA, 270 bp, Klebsiella pneumoniae
atggggatagacgacggcgatggccgccgcggcagccaccatcgcttcaatggcgctgccgccctcgcgcaggatcgccagcgcgctctgactggcgaggtggtggggggccaccgccatgccgtgggtcgaaacgttgctactgtgcataaattatcctttctgaacgaatcacccgcagaacactgcaaaagctgttccatctctgaacgtttcgtttcattgataaaaacgatgaccagaattttcccactggcacgctatgtgtaa

SEQ ID NO: 226531 - DNA, 333 bp, Klebsiella pneumoniae; identical to SEQ ID NO: 139017

SEQ ID NO: 226532 - DNA, 234 bp, Klebsiella pneumoniae; identical to SEQ ID NO: 139016

SEQ ID NO: 226533 - DNA, 486 bp, Klebsiella pneumoniae; identical to SEQ ID NO: 139014

SEQ ID NO: 226534 - DNA, 927 bp, Klebsiella pneumoniae
atggataataaacccttagagaatcaagccgaagactatattaaagtaatactcaataatgctaacatcaagttcgttaaaccaaattatgacgaaaatggttcagatcttgttttattacacccaataaacaggcaccttgcaaagcaggttattgttcagtcaaagggtcggaatgtaacaaccaaaagcagtaacgttaccattccgattgattatgtagtatcaaattttatttgttttatttatttaaaagttgaagatgattttgataatcattgctatgttttttttcacgatagcataattaattggaacttgaataacgatcactacaccttaagtatacccaaaaaatttaaagagtcagtttacttcaaaaaacatattttcaatccaagaaatcatattccaaaaatcaaggacatgcttagacaagcgcctatcctgagacaaagttatattcactttgaaagtatggaattaaaagaagtgttatttgagatgtggaaaaaacataactccttcccagacattacgttggtgaaagccctttatgatgactttattaatttaacaggctctttttctttagatattttcttaatctgtatgattgctaaatatttggatgaaatggaatatagaactcttgattcatttatgcaagacttatatgatattagaaatattgacaagcccatatctcaatcattagttattcatgatgtcgaaaacattcatcggcaagatgcagtttcggcaatcgtttatccaattgtaaaatttggacaagttaatgtcacttatgatggcattgattataaagggttatattgccatataggtgatagagaagaccatgtagaagtcttattgtttgataatggtgattatgtttgttttggccaaagaacaaactcttaa

SEQ ID NO: 226535 - DNA, 1734 bp, Klebsiella pneumoniae
atggcaaactcaattactaaattaaataaaattcaggttacaaaatttagaggattaaaagatgtaaacattgagttcggtagtaaattgacagttatttgtggaaaaaatggcacttcaaaatccacaatacttggcattgttgcacaaatatttagtttttcgaaagatctttccaagaaaccagcaacgacattaacgggatataaaacactaacaaaccgaaatttcaaatccgcgttcaatgagcactttagattatcagaagaatttgatgttgccggttcaatggatgttaagataaatttatatgatggaaatgttaataagcatttagataaactaacattaggtctgtacggctatagtgacagaacaaaagctagaccaatcgttcgagggaatgatggtattcctaatgtaaaccaaagtcgtaatgtcactcacccagtaattttcctaagtttagccagattacttcctattacattgcgtacagattattctaccagggatgttcaatatattaaagataacgctgaagatatcagagttatgaataatcaattattgttaaaaaccagcggtagtgctgtaacagctactcaaggaactattgattcaatagttgttcatggcgaaaattatgatcatgaatctgtatcagttggagaagataacgttggacaaataattcaggctattttttcgttcaaaagacttaaagaaacatatcctgattatcatggtggcattctcttaattgatgaggctgatgcgggtttattcccagcagctcaatcagaattgatcaagatcctaactaaagcagctaagcaatacgatttgcaaatcatcatgacttcacactcgccattaataattgaggatatatataacagatccaaacaagatgaaaaatcatttaaaacggtctacttaacagatacctacggcgatatcaaaactcgcgacaatttatcttggatagatattaatgccgatcttcacgtccaaacagttaaaatcagtgatgatataaacctacctaaagtaaatgtttattttgaggaccgtgaaggatatgattttttcaagcaactgattatagatcgaagaatcaataaaatacttaaccctcttggaaatattaatatcagttgcagtgcaatcctagatttaatggccagaaaaatacctgaatttacatcaaaaagtttgattgtcttggatggagatatagcaaatgacaatagcgataatgcaaaaaaagccaaaaaagaaaagaatttatgtcttcttccaaatttattaccaccagatcaaatgatatttgagtttttatataacttacctcctgatgataaatactgggataataaaaatcgattcacaaaagctgtatttacaagaattgcaaatgacattataactacccttcggctggggaattccccaatcattctgtcagatgctatcaatgcttttaagaatggtaatcaaggtattttaggaagaataagaaagctctttaaggagttcgctcatactccagagtttcgtggattggtcgaggggccagtcaaaaataacccgtatagatattgggttgcctgcaacgtcgcagcatctgatcaatataaacatgacttcatcaagagtctcaaaacggttatgatttcaggacatggtatagattcggcattaattcactcatacctaccaagtaactag

SEQ ID NO: 226536 - DNA, 876 bp, Klebsiella pneumoniae
atgcgctttaacaccccacttcgctatcctggcggcaaaggcaaattatcaaacttcatgctaaatgttattgaggtgaataaactgtcacctatacattatgctgaaccatatgcaggaggggctggtcttgcattaaaactactggatttacaagtagctgaaaaaattatccttaacgatattaacatctcgatatatgctttttggcactcagtacttaataatgcagatgctttatgttctataattgaaaatacatcagttaacatggatgaatggcataaacagaaagaaatcatcattaacacgagaaaatatgatttgttaaccattgggttttcaacattttttcttaacaggacaaatcgttctggaatattaaaaggcggtgttattggtggaaaaaatcaagatggaaaatggaagttagatgccagatataataaaagtgatcttatttcccgcatacaaaatatttatgctgaaaaagagagaattgcattatataatctcgacgcaatcgaatttatcaataaaattgtaaccaaattaccagctaactccctaacatatttagatcctccgtattatgtaaaaggtaagggattatacattaaccattacaatcatcaggatcatgttgaggtatctaagatagtccagcatgacattaaaaccccgtggattgtatcgtatgataacacgcctgaaattagagggatgtataaaacgccatcattaatgtacggaataaattacagtgctcaagatcggtacaaaggttctgaagtaatgttcttcagcgaaaatttgaaaattccgtcaacagaagatccaacgaagattaaggcaccaaaaaaatccggactttaa

SEQ ID NO: 226537 - DNA, 405 bp, Klebsiella pneumoniae; identical to SEQ ID NO: 139401

SEQ ID NO: 226538 - DNA, 231 bp, Klebsiella pneumoniae
atggaaaagacaaccgtattcaaaagcaaccgtagccaggcggtgcggctgccaaaagcggtggctttaccggaggatgtcaaacatgtggatatcgttgcggtagggcgaacgcgcattattactcccgcaggcgaaagctgggacagctggtttgatggtgagagcgtgacgtctgactttatggctacccgtgagcagcccggtgatcaggacagggaagggttctga

SEQ ID NO: 226539 - DNA, 870 bp, Klebsiella pneumoniae
atgtcgcgactggcacaggatatgaaaaagctggcgcaccgcgcaggtggcagccacaaaaccgtccacgaccgcgaacagatggcgcagcgttttgcccgtcatttactggcgcagaatattcaggtcaccagcaccagccagctcaaagccagacacatcgcaggatatatccatgaacggctggcgcagggtatttctctgcgaacgctacagaatgagatggcgatggtgcgctctattctggctgaagccggacgcacacacctcagccagtcagaattaatcagcaaccagtcgctcggtatcagtggtgccagccgtgacgggatgcaccgggccattccggatgcactttaccatcaggtactggagcggatacagcaaaccgacgcaggtctcgcggccagcctgcaactggcgcgggtgatggggctgcgtggtcaggaagcggtacagtgctgccagtcgctgaaaacctgggataaacagctggaaaaaggcgctgaacgtctgccggtgatcttcggcaccaaaggcggacgaccgcgcatgacgcaggtgacggaccgggaagcagttcgccaggcggtgaaagcggcacttgagattgccggggagcgtaacgggcatctcattgacaaaccggatctgaaatccgcgatggactactggcacaacaatctccgtaatgcagggctgacgggtgaatactctccccactccctgcgctatgcctgggcacaggacgcgatccggtattacgaggagcagggactgagccataaagaggcgctggcagtgacatcgacagacctagggcatggggatggccgagcaagatatattaagcaagtatatattacgtaa

SEQ ID NO: 226540 - DNA, 1863 bp, Klebsiella pneumoniae
atgattaaagaatatacgttgaaagatgggaaaaaattacaattaaaagaagatgctcttaaccatatcactaaagggtgttttgtaaccaggccgatgagtgaacggagtaatatgacggtcttgagtggcggtttgcatacatattctgcttggattgaatttaaaaataagtatttaaatgaacttgagcatatacttttctataatagcaaaaaacataatttttggtattatgcaagggagcttagcaatggcgtaattgttttacgaattccacgggaactattcacaggaaaggctgctaaaataactatgtatcctgatgattattataagtctggttttttatggaaaactctatttccaaaagcttacgatcgtaatgaaataattaatgtgattgatgaagcattattacatgaaaatattgagcaaagacaaaaagggcagattattggttatgtaaacaattctgattctcagaataaaatgaaagtcgttattcaattccacgggaaagatattaaatccgtattcccagcttggacacaacctaattctggtaacaatggcaagccatacagtcattacgataatataggatttataatttcacaatctacagaatattttgatgacgtagaaaaaattaacatcagcccagaattttatttttctggagagccaattaaacctgaacgtctgcaaatacatacaccacagatctttacttgtaggaatatcccttcctcagaatactccattgaagagtggaagaaaactagattaagtgaacttgaacagtttaatcctacagcagatatgaatgatctgatattcagatatctaaatgattttgttctaataaaaagatatccagagttaatggttagtacgtatgcacataaatatagtcaacttcagagtgataaatctttctttaatatttttcaaattatacaaaactttgttgatgggctaaactatttatggatcagtaaacagcatgataaactttttgaaactatcagttttatgatgtcgaatatggtttcttatacagtatttgatttgttgttaaagaaaaaaattctgtcgacaataattaatattgtcatttcaattaattcgcctgagttatcgtatagatttatcatcttgctatcaagatcgcctatacgtcgagaggcatatattgaatataatttggatacgctaaataaaaaaagattaaaaaaacaactccctttacattccatccctgatgaactatttttaataatgaatcccggcctggaaattaatttaaattatcaagattttattgagattctcaaggagtctgttggagaaacgtatacattaaatttcaaggatgaagtccttgaacaacatttaaaagaattagttgatggtcagtctgataattataaggatttaataaaagatgggttgagttatttttgcagagatgactttatatcattttcagagtgtgctggaaatctttttgattctgcactacaataccctgaaattaatgaacaatgtttagttacaagcgtaggggtcatattaagggattattgtaggatacagtttgcacatcgacaaagaattaatgccagatatgtagaatatcatggggacaccaatgatatatatttgccaattgataattctttacttatgggtacgatcctaaagcatgaacgctggacaaatagcactaaacttgaggctttcattaaatccgttattacatttgctgaaagtatttcatgccgagagttaaagaatgatgctgagaactttatgaaaaaaattgggacggaaaatcctcctttaccagagaggtaa

SEQ ID NO: 226541 - DNA, 1254 bp, Klebsiella pneumoniae; identical to SEQ ID NO: 139451

SEQ ID NO: 226542 - DNA, 924 bp, Klebsiella pneumoniae; identical to SEQ ID NO: 136082

SEQ ID NO: 226543 - DNA, 1404 bp, Klebsiella pneumoniae; identical to SEQ ID NO: 138599

SEQ ID NO: 226544 - DNA, 1194 bp, Klebsiella pneumoniae; identical to SEQ ID NO: 137144

SEQ ID NO: 226545 - DNA, 642 bp, Klebsiella pneumoniae; identical to SEQ ID NO: 137141

SEQ ID NO: 226546 - DNA, 171 bp, Klebsiella pneumoniae; identical to SEQ ID NO: 137140

SEQ ID NO: 226547 - DNA, 855 bp, Klebsiella pneumoniae; identical to SEQ ID NO: 137139

SEQ ID NO: 226548 - DNA, 2505 bp, Klebsiella pneumoniae
atgaatgagctccttttaccagagcaagttaaaactgcaagagctcttctcgcttggtctcaacaagaactggcctccaaagcaaatgtggcaacatctacacttgcggattttgagcgtggctttcgtactccagtagcaaataatgcccaagctatccgtgatgccttagaagctgaaggtttgcagtttatagctggtggggtagttgaaaggggtatgctgcagccacctgaaaatgtaaaacctggttctttgatgcgctggattaatgcaactcacctttcacagtggggtgaacggagagatggtcagagtggtattcctgaattattacgacgtttaatttttgcaacagtaggtcctgccgcaaaagttcatttcccatcagatgagagtgtgcaatatcctggttgggatggtgagtgtaaaacgagtttgggtttgggcttcgttcctgagggtgattctgtttgggaaattggtgctcaacgtacctctatccgcgctaaggcagaagaagattttaataaaagatctgggaatccactcggatatactccagataaaacaacgtatgtattcgttactccacaacgctttcctggtaaaaataagtgggtagaggagaaaaaagctctcaatatttggctgaatgtctgtgccattgatgctgatgatcttgtccattggttagaaatttatcctgcggtcgctcagtggttgtcagtaaaaataggtcatcggccacagggattacgtaatattgaagagtcatggagcgagtggattcacgcaacgagaacacctctcactcccgatgttatcttggccggacgtgatgaagaacaaacaaaagtccttaggtggttaagagattcaccgcaacaactctcggtgcaagccgaagctcccgatgaagcactagcttttctttatgcatctataagtcctctgcctgaagagcataagctgttctattggagcaaatgtgtcgtagttgacaacgcaacaacagcccggcaattagctggtttaggcacgccattaatcattgttctcactatttcagaaccggggattgcgcaatctcttgttaataatggtcaccatgtctacgctatctatggctcagatgtgtctcatctatccggtcattcaatacgcctcccccgcccatggagatttgagctaaaaatagcattaactcatgctggattaaatgaggaggatgctcatcgttatgcccacgcatcaggccgcagtattacggtcttaaggcgcttaatgcccatagccccaaactataaaccacaatgggctgaacatgtttcatctgagcttattgccgcaatgttcgcggggagctgggatgaaacctcatctcaagatcaaaaaattattagtgatttagctggttgctcttatgagcaggtagaagaaatcttggcaccgttagcatccacttttggtggtccattaattcgctctggtaatctttggagagtagtttcattacgagatctttggactcaagtaggtaatcagctaacttcccaccaactaaagcgctttgagaatacattccattcggtggtgagcgccattgatccctattttgagactcaacctaatgccgataccttctatgaagataatagcgtagggaaaccatcaggtagcatcagacgtggcttaacagaatcgatgattgccttggctgttttccctgaggtagcaacgcttattacggatgtatcttctcatgtgaatagtgcggtgtataagttgcttaataatgcaactgagccactttggtggtctttgtctcaggatttccataatcttgcagaagcagccccaacggtatttctagacgctgtagaagctgggttggaaggcgattcacctcagattttgtcattattccgaagtgatgaagggataatgcaacccacagagtatctttcaaatttgttatgggcattagagatgttagcgcgtagcccacgttatctaatgcaatctgcacttttactggcttggttagatgatgttgatcccggaggtcgatggggaaaccgtccagcagtttctttaaggcggatttttgttagttggtcaccacaaacttatgctaattcatcacaacgtattaaggtcattgatcggatcatatcgctgcatccaattgctggttggaagttattgctcgcattagcacctcgttcacacgatacttcagaaccttcttctatgccaaattggcgtgatttcactcctaatgagccggagtctattacctggtcctctgttgcaacagcagcatgtgaaatcggtgaaagattattaatgcatataaatgggaggtgcgaacggtggtttgaacttttccatctttgggggaattttgattcaaactggaaattttcagcagctaagcaattagcagattactcccttaacctcacatcttctgataaaaaaagaaaggttgtggaatga

SEQ ID NO: 226549 - DNA, 1164 bp, Klebsiella pneumoniae
atgtctagtgattcagatatagcaaatattggtttgggaattttttatggactcaaagccacgaaaggctcagaaagcgaaacttgggttcaagaaatatgggaacaagctataactgataattggggggagttagcggaagtacgcattgcccaagtattaccacctgtaatgtcactttggctgaaaatagaatcgagaccagttaatattagtacaatatattggcagacgatccctacatttaggctttctgcagatttagagcttgagtatgtcattgatcatttacttctggcagaccgaagtcacgatgctcttgcgtggcttgctaataatataaaaatagaaccagagggctcagttattattagagtaatgcataccgctgcaagcactaaagactcttccaataatgataatacgatgtcgagctattatattggtattctcctagattacctggagagtgatgtaaagacttcaaaagaagaacttgtgaggctcgaatggatttattttcaagttttacggtattcacgacatccagccaggaacttacatcaggctcttgctaaagaccctgtattttttacctcactaatgaaattactctatctacctgaagaagatagtggtgtagttgaatctgaaccagcaaatcctaagcaggcccgtgatctagcaagccaggcatatcaagttttgcatgattgggcaattgtacccgggaccgatgagaacgggactattgactcttatgtattgatgtcgtgggtcaagcaagctcgtcaattactgaagtctgcaggtcgtggtgaaataggtgatgacacgattggtatgattctctctgccgcaaaaagaaaaaaaaatgaaacgtggccgccagaagcaattcgcgaagttcttgagtttgctagaagtcgagcaatggagagtggttttgaagttggtgtttacaaccgccgtggcgtaactgtacgcatgccacatgatggtggggggcaagaacgaatattagtagaacgctataaacaagatgctgatgatcttagatttgaatggcctcgaaccgcagcttgcttagaccgcattgctataagctatcaacaagatgcaattagagaagatcacagtgcggaccaaggtgattggttataa

SEQ ID NO: 226550 - DNA, 2172 bp, Klebsiella pneumoniae
atggcacctataagttataagaagcaagaactatcagaaacagatgaattagacttaggtcgtttagttggagaatttattgatcatcgaaaacttatccttagcgtaactattttttttacagtcattgcacttctctatgcaatgttctcaacaccgatttatcaagcggatgctctagttcaagtcgaacaaaagcagggaaatgctttattagatagtttaaatcaggtgctacctacaggtactcagcaatcagcaccggagattgcgttattgcaatctcgaatggtattaggtaaaactgttgatgacctgaatttagaaatagcaattgaaaaagattattttccagtatttggccgcggttgggctcgcttgacaggtacagatggtggaaatattaaagtcagtaaactcattctgaaaaaaaatgatatagagaatgtaaaacttaaagttatcaatgaaaatgattttcttgtaacaacaagttccggcgatatcaaaggcagagtgggaacggcgatcgataatcgtgattttactttaaaagtggatgaaataaacgctgatgaaggatccagctttacgatccaaaagatcacacggttacaagccattaacaatttacttaaagtattcagtgtcacagatcagggtaaagatactgggatgctaaatttaactttggttggtgaagatccaaatcagattactaatattttaaatacaattagtgataattatttggctcaaaacatttcacgccaggctgcgcaagatgaaaaaagtttagagtttttaaaagcgcaattaccgaaggttcgtgacgagcttgatgaagctgaaaataagttgaatacttataggcgaaaaaaagactccgttgatttaacaatggaagctcaagcggttttaaaccaaatcgttaatgtagataatcagctaaatgaacttacatttagagaagctgaaatttctcaattgtttacgactgatcatccaacatacaaagcattgcttgaaaaaaagaagactttagcacaagaaaaagttaggctgaataaccaagttacatcgatgccaacgactcaacaggaaattttaaggttgagtagagatgttgaatccggtcgcgctgtctatatgcagttgctaaatagacagcaagaattaaatatttccaaatccagtacaattgggaatgttaggatcgttgattctgctattgctgaaccaaaaccagtaaagcctaaaaaaataatggttgtactgatcggattagtctttgggttgtttgtttcagtcggcatagtcttagctagaatgttcttacgccgtggaatagaatctcctgaagaactcgaagatatgggaattaatgtttatgcaagtgttccagtttcggagtggttaacgcagaagcattttaaaaatggaaaacgattggctgcaaaagatgtgttcaaagaggatcgtgaatcccttcttgcattggaaaatccagctgatcttgctattgaagcaataagaagtttaagaactagcttacattttgcaatgcttgaatctagcaataatatattaatgatatctggggctagcccaaatgcaggtaagtcttttattagtagcaatttgggggcaattgtcgctcagacaggaaagcgagtactcctcattgatgctgatatgagaaaaggttatattcataaagtattcggggtaagtaacagcaatggcatatcagaaatcttgtcagggaaatccacagtcggtagcgcgattttaaaaacacaattggataatcttgatatcattactagaggacaagttccgccaaatccttctgaactactaatgcatgagagattgaaattatttttagaatcagtttctaaagaatatgacttgattttagtagataccccgccaatattggctgttactgatgctgcgattatcggccaatatgtaggtacggtattacttgtggctagatttgaattaaatacagctaaagagatcgaaatttcaaaacggagatttgaacagagtggtattccagtaaaaggttgcatactcaatggtgtggtaaaaaaagcaagtagttattacggttatggttataaccattatggctattcatataatactgacaaaaaatag

SEQ ID NO: 226551 - DNA, 240 bp, Klebsiella pneumoniae; identical to SEQ ID NO: 138578

SEQ ID NO: 226552 - DNA, 591 bp, Klebsiella pneumoniae; identical to SEQ ID NO: 138577

SEQ ID NO: 226553 - DNA, 2049 bp, Klebsiella pneumoniae; identical to SEQ ID NO: 138575

SEQ ID NO: 226554 - DNA, 1920 bp, Klebsiella pneumoniae; identical to SEQ ID NO: 138574

SEQ ID NO: 226555 - DNA, 1563 bp, Klebsiella pneumoniae
atgagcaacattatcttcaggaccatcaatggcattgttagacccattacaatatctggacataccgcgaaaattaaaaaaaagaaagcaacattcaaacctgaatatcatctagaaaagaatcattataacaattttcgtgcatttaccatcccaaacgtaaagtgtagaaaatgtggcctgcatgtttattattatgaacatccatcagggtcacgagtattgtttgatgaacttggtccgccgtggcccctccatccctgctttgctgatgggcagaatataaagaaaaaatccgttagtccttctgttaagacggtcagtaaaaaagaaaaaggatggtttcccattattattgagaaagcacagttacgacagaaccatattgaagttaacgcacgaacagaaaaatcagtgctaaattttctcattactgcctcaaccctaatggcaagaaagattacagtaagccagataaaagatctcttggtgctggcgaaggtgcaggcggaaaacaacatactggttcagttccacgatggtaaatctagctgggagcaaaaagcaacactatcctccctatcgcgttccagtaacgatgaaaagccagctattaccgaagtatcggtgctcagtgagaaaaaatttaaaaagttaacgccgctccaaaacggcttactaagcatcaaaaaagacaagctccttattgattttttattctacggggaaaaacatcatcagtctattggcggtaaccaatggcataagctacagaaaaaattagatcatctcaaactttactttaggaaagataaatcaggagataattttattttttatgttataaacccagtcagtagagagtttattaccttctttgtcaagggaacgaataagaaaaatgtgataggttcgtcagtcgcacctgacaatagagttaagttagtggatatttatcaagaagatatagaaacattacaaattaaaatcctaggtaaaattgacgatagttacattaccttctatatgcccaggaaatatcttcgtgcgaatgaaaatatcgacgcgttactcaacaatgaaataaccatctggctggaacatgccggaggcacagagtgtcatttatctatcgacgatgctttaggtaagcaaaaacaaactccgcgcggtaaagtcagcatcctctcttgcacccgtgcagaccagaccgatttacctgaagagacagattttattgttgaaaacattgatgcgcgagaggatgcacatatccagctatatatttactcacaaaagaagaaatggcagatgtctttatttgttagcgattctcaacgcaactattttattaatatttatgccactgaatcgaagctctctctgaaacggcgaattgatagaaaaaatgacatcatgcatttgtatgttaaaaatagatgtattggctattacaaaatgctgatccctgacgccaattcaactttgaaagaagtcgtttcaaaccatatatcgcaagatacacaattaggaatagcgtttcgcaacgcattgaaaatataa

SEQ ID NO: 226556 - DNA, 870 bp, Klebsiella pneumoniae; identical to SEQ ID NO: 137995

SEQ ID NO: 226557 - DNA, 2751 bp, Klebsiella pneumoniae; identical to SEQ ID NO: 137994

SEQ ID NO: 226558 - DNA, 3003 bp, Klebsiella pneumoniae; identical to SEQ ID NO: 137993

SEQ ID NO: 226559 - DNA, 1092 bp, Klebsiella pneumoniae; identical to SEQ ID NO: 137992

SEQ ID NO: 226560 - DNA, 3069 bp, Klebsiella pneumoniae
atgagccagggaatagagaatctggctgatctaattaacgacgcaggcgatggcaaagaattcttttcgagaaactatgttactcacggaatggagcaacttttccgcgaaggcatgcttcgcctgtctggtaagtcagaccaagcagtgtttgagcttacccaagccatgggtggcggtaaaacccacatgatgattgcgttaggcttgcttgcaaaacacacacatttgcgtcccgaggtcttatcccctgatcttaatgagcgcttagattttggtaatgcaagaattgctgcatttaatggtcgaaataatcctgataattacatctggggggatattgcaacccagctcggtgagtcagataaaattaaacagcactggattaatgggcctaaatctgttgaccaacaaaagtggaaggagatcattggcaatactccaacattgataatgattgacgagttgcctccctatcttgataacgcaagtacccaagtatacggctcaggtacactcgccaacatggtagtgtacagccttagtaccttaatgagtgcggcattagaactcccaaattgctgtatcgtcattgccaacctatctggtagttatgatgctcaaactaaaacactcaaagacgcaatttcaaacctgcagcaagaaacccgcagacaatcgatgaccatcaccccggtacaactatcgggtaatgaaatttatgagattcttaaaaagcgattgattgatgagttgcctgatgagcaaaccattaatgaagttgctgaggaatacgcacagcaaatcaaaaaggcagaagacggtgggtacattgttgcagcaagtatcgaacaaatcgctgaacaagttagagagacttaccccttccatccatcgtttaaacatttagttgctttgtttaaagaaaacgaggggttcagacagactcgtggcttgatgcagtttacagctcgactattaaaaagtgttgaacaacgccaagaggatgatgttttccttgtcggtactcagcatttggacctcaacgatgagcaagttaaggatgaaattgagcgaatttcaccaaaactgattccagccgtcactcgagatattgcagataagggggatgcgattgccgaaaatatcgatagcgaaatcagtaacgacgcagcttgccaattaatgacgttgcttcttgcatcgtcattatctcgtgctgtagggggacgtattggtctgtcggaaagtgaaataattgaattcttggctgcgcctaatcgtaaagcagatgagttcttagatgctcttcaaaagctgcgtgaacaagcatggtatctgcaccgtgaagaccagcggttttatatcaaggaaacagaaaatctttctcgccagattgagcgtaacgctaaggaaattcctcagccaaaaattgatcaagctttaatcaatcggctcaaaggaattctacagcctactcgtcgtaacgtttatcaagaagttcagattcttccacgcatagatgaactcaagttaagtggtcctcgtgtccttatcgttattaagccggatggcaaagtaccgcctagcgaactcattaacttctttgagtatcagcaggaaaagaacaatctcctagttcttactgggcaagatagcatgatggccgatgcagttgaagatcgattgcgtgagctttatgcaattgaacagattgttaagcgcctcaagggaggggacaccttgtttgaggaagcgcgagatagattagaagaagctgagggccgttttatcaaagccttatctgcatcctataacaccatactttttcctggtattgatgatattgatggctctgaccgtttactaaaagtcacaatcgatcatgggttgaaagtgggagaaggtgaccaatctgccgaagtgcaaattgaaaagcttatggcagatccacgagctaactataaattagcttcagatttgaaagatgactttggtcagtatttttctatggcagagtcggagctttggccttctggtgcaaataatcgccgtacaccatggaaagatatcgtcaatcgcgccaagtgcaacccagtctggccttggatgcctggtagcagtggcatggataccctcagaactgaagctctcaagcaggggcgatggagaatgggggaggacggctatatagaaaaagggccattcccgaaagaaaaaaccagtgtgaacgtcactctgataagcaccaatcctgaaactggggagtccttgctcactttaacgccgcgaaatgcaggtgagagtccggttatttatttctcaaccaaatcagaagtatttgatagtgacccacaagttcttgatttagaaaattttagtactttggaaggtaccctttattttaaagtggttgatccaactggaaagtacgaatgtggacccgcaacgcgctgggttgctgaactaaaaattagacatcaaattgaaccatctgcagacatgcgcaaggttaccttacagtgcagtcctaaagcggagatgtactacaccttggatggctctaatccgaaagatgggcaactttatacggtcccatttgaagtaggaactgaatctgcccgcttgctgatttatgctaaatctggtgaagcaaccaaaacagctgacttccagattccaaatagtggtgacaaaactattcaaatagatgatgtcaaacctgcgcggttaagtagtagtaagcgtgtaccacttgatacaactgaaaaggtctttacgatcattaaccgtttcaaagaccagatgaatactcgctttaaaggagttcgtattgagattggtgagggcgagaatactgttcgtataaacttcggtgtgagatatgttacagccgcaatgatcgaagcttctgtgaatagtcttcgcgaagtgttaagtgaagcagatgcgaatgtagctatcaaaattaccgacggtattgcttttgaaaatggctttgaagccagagagttcgccaagttagttggtattgaattgaaaccaggtgacattgctcaagaagagtaa

SEQ ID NO: 226561 - DNA, 192 bp, Klebsiella pneumoniae; identical to SEQ ID NO: 139513

SEQ ID NO: 226562 - DNA, 1194 bp, Klebsiella pneumoniae
atgcttactgatgccaaattacgcaagatgaatggcaagccgatccctaagcggatcgaattgtctgatgctaacgggctctctgtccgtattacccccaacggcgtcattgtattccagtaccggtataaaattgacggtcgcccgcggagaatgaccattggacagtatgaccaggtgtcgctaaaggaggccagggagcaagtcgcggagtttcgaaagctggtagctataggcaaagatccgatcaccgcacgtgatatggccgttgaggcgaacatcaaggctgccactgtagaggactgcattaaatcctggttatccagcgcatccgccagccggcttgttaagcgagaccaatgggagcgtgctttgtatcgtcatgtggtgccctatgtggggagcatgcttgtcgatgagatggctatttcccactggcaaccggttttcaagcgcatgagggataacaacgcggagacatatgccggagaagtactttcccgcatgaagacgatattttcatactgcatccgaatcgaactgataaaaaggaatcctgttaccgatctgcgtgttatcgatgtcggcaaaccagtaaagaaaggcaagcgcaacctcagcgacaaagagataggtgccttctggcatgcggttgaggcttcaacaattactcaccagaataaattgcttcttaagttgcttctgttaaccggctgtcgcggtgtggagctcagattggcgaaaaaggcagattttgatttagatgcaagggtgtggcgcgtgcctgatgaacactccaaaaccagggagccattcgaacgcggattatcagtgaaggcggtagagattctgcgggaggtattttccctgtatgaggatttcagtcaggtattcccgccagctgcgaagaaagaagatcgtccgatggcggccagcgtgatcctgaatcttgcaattcagttgcgagaggatatgaccatcgatcactggtcgatacatgacttacgccggactgctaaaaccaaaatggcagagcttggcgttatgcctcacgtatctgaaaaggtactaggtcataaactaagcggcgtccttgcaatctatgaccagcacagctatttgcgtgagcagcaagaagcgctcgatctccttgctgcccatattcagtcatgcgtcgactcaacgagcccctga

SEQ ID NO: 226563 - DNA, 243 bp, Klebsiella pneumoniae
atgcagaacacaaatatcactattcagccggcaattattaatcgtgagacggtacaggctatgctgggagggatttcaaggactactttctggcgaaaacgcagatactgggagcaaaacggcacccctttcccttcccctgccccgggtactaatccggggaaaggtggtgagcagtatcgctattgcgacgtaatgcgcttctttgcctctcaggggctcgttgagtcgacgcatgactga

SEQ ID NO: 226564 - DNA, 228 bp, Klebsiella pneumoniae
atgagcgcagaactcatcgatcaggccaacgagctggcagagcgccggctggaaatgaccatccagaacatgcgcatcaaccataacgcagtttcagctactcactgccgcgactgcggggaagagatacccgagcggcgccgggaactggtggcgggatgtcagcgctgcgctgactgtcaggaagaagaggaattgcgcggaaaacaccggaaggggtacaagtag

SEQ ID NO: 226565 - DNA, 537 bp, Klebsiella pneumoniae
atgaaggtagaaaaaagcgatgttctggcatttaccatttccgatgttgaacgcctcgaccctgtcagggtggtgattgaaaactacgagccaggaaaggggcgcatcactgtaacctgcttcggaaaggcgtggaccggtgcctggtttgctatgggcggagacaacgttcaggagttcattaagcgtgtcagcaatgactaccttatcggctatttcgacccgcaactgcaaagcacagttgatgatgataacgacgccaaccttgaatttgtaaagggtgaaatcatcaaactccggcgtcagcaggaaatcgatgctgaggaggccagggatatgtgggtggaggcagaaaacgctgaggatgtgaaggaaagctgctgcgattgtcgcatcggtaataagttgcctggtctgcttggtgatgatccgtggtatgcaaaatggacggcagtgccaaaccacaattatcaatatctcgaacgcatcattgacgcggtacgtggcgggctcgcagaactggagcgtgcagcatga

SEQ ID NO: 226566 - DNA, 222 bp, Klebsiella pneumoniae
atgacgccagaagaaaaagaaaacgctctccgcgcccaggctcgtcgctgcgcagaagagataaccaaagcgatgagcgcaaagcctaaaccgaaatggaacgctgtatgcccccccatccttcgcaagcactacgagaaggtaaagccgatgggtgtcagcctggtgaaatttgtaagtgttattggccgcatgaatgggcggtatggagtggaatcatga

SEQ ID NO: 226567 - DNA, 429 bp, Klebsiella pneumoniae
atgaagggcttcacctgggtgaagttgaatcagctggccgaactacgcattaccaaggctctggcagagggcgatgtgaccgatttttacgacttcctcgccctgcttaatgccgagacgcgcatgaatggcggcaaccacacccgcgccaacacggaagacgtactgatcgccacccgaggtgccgggctggaacgcaagcacgccggcattaagcaggtggtctacagcccactcggcgcgcacagcgagaaaccgtgggaagttcggcaccgcctggaactgctctacggcgacgtaccgcggattgagctgttcagccgcagcgcggcgccaggctggagccactggggcaaccagtgcgccaccgcttcagttgagctgatacctggctgcgccattgacgttgtgaagacggaggcagcatga

SEQ ID NO: 226568 - DNA, 789 bp, Klebsiella pneumoniae
atgaaaaaattaatagtcatttcagcatttattctttttgcattatctccgcctgccatatcaaagcagataacgtcacatttaaaaatggttgatggctattttaatggaattatcacggcaaatgatgacgagccgatatggtttggtatgttagaatttgactttttaggcagccagcacctaacctgcagaatggactcaatgcatacctccggagatgcgccggacaggatgtcgtcagttaactaccgttgccaaaatgggttttctgtccagctatcaaaaaaagaaaatgaaaggtacgctactttaagtctacaaaacataaactttgacagtggcgatgaaaggcagttaggtagctacaaggttacctcgtcaattcctttaacgatgattgaaaataataaatataatgatgatttattcaataagaggaatgccgagagggaacgatggataaatgaaaatactgttgacgttttttcagcgtgcgacattattatgtcatcccaccttctggcctatcaaatggtaaatactggaacacagaataacagcgcaggcaggaatgaaataagggatgtactgtcaaaactttacccagaaaatgcggatgaaatggcacaatcctttataagctttcactctggcgacaaagagcctttcgggatgccacttacatttggagttaaggggcgtatgattaaaatgtgcacgaatcagcctggtgattacattcctgagtttggctcgctggtcatgtcaggtaaaatattcagataa

SEQ ID NO: 226569 - DNA, 558 bp, Klebsiella pneumoniae
atgtcatacccaacagttattaacggacttgatttccgtgacctcatttttgttgctgacaacgacccggtaactgactcgtttatggtggcgaaggcatttgggaaacgtcctgacaacgtcattcgtgatatcgaaaagactattaaggcatgcccggaagagttcaatacaaaactcaattttgaggtttgctataaaaacaatgagttgcagaacggaaagccgcagaagttctatcgactccgcaaagatggattgatgcttctggttatgtcctacaccaaaaaagaggcgatgcgtattaagatcgcctacatcaacgccttcaactggatgtacgcgatgcttcaggtagggcggcgccagtttgaagaagagcgtaacgccgtcatgctggagttcctgaaagagaaggatgtcgccagtatgtctggtcgtctgttacgccggtgggggaaagagaagaagccacagctactttcacgcattgagcaactggacaagcaaggtcagttggcattgcccggttttcctggtgcgcttaccgaatcatga

SEQ ID NO: 226570 - DNA, 204 bp, Klebsiella pneumoniae
atgagcaagccaaaaccaaagagcactgtccgcatctcatttaccgtgattgatgagagtggagaggaaacgttgaaccgtgatttcttcgtaccatttgaaaaaatcaagagcgctcgattccctgttttacctgatgcagcacaggatgaggcccaaaagtttcatgaggccgccgtgatgatgggctgctttggtgaatag

SEQ ID NO: 226571 - DNA, 306 bp, Klebsiella pneumoniae
atgcgtcagcatatcattgactccacattagcagccgcccagcatgatacccccgctctgaactcggtgcagagcgtcgttaccgtgccgggcaaatggattccggtaagcgagcggatgccggaagtcggcgttaaggtcttgtgcttcccggcagaggatgagccgattcatgcggtattcaatggtcagttatggctgcaggatgtttcatggagcggaagtgaagagccaattgataacgtcattcctgtcaccgtaacccactggatgccgctgccggccgggccgcaggaggtgaggtga

SEQ ID NO: 226572 - DNA, 480 bp, Klebsiella pneumoniae
atggctgcactaaaaccagaagtgagagcctttatcgttcaagagctcgcttgctttgatacgccatcccaaatcgtcgagtccgtacaaaaagaattcaaggttcaggtgacgcgccagcaggtggcatcgcatgacccgacaaaggtagctgggaaaggtttggctcaaaaatgggtcgaccttttcaaccgcacccgtgaccgattcctcaacgaaatctccgacattccgatcgccaacaaagcctaccgcctgcgcgtcctgcagcgaatgtctacgactgccgaaggtatgaaaaacctcggcatgacagctcagttactggagcaggcggcaaaagaggttggcgatgcctacaccaataagcacaagtttgaacattccggcccgaatggtggtgccatccagacgatcaccatgagcaaagaggaatacaagtcagcacggcaggagatgatggaggatgacgactgctga

SEQ ID NO: 226573 - DNA, 204 bp, Klebsiella pneumoniae
atgagcaaagcaaagattaagaatacagttcgcatctcattcaccgttattgatgaaaaaggtgaagaaactttaaatcgcgattactttctgccttttgagaaaattaagcaggcgactttccctgttcttcctgacgttgcgcagactgaggctcaaaagtttaacgaagcagccgtgatgatgggtgtatttggagaatag

SEQ ID NO: 226574 - DNA, 177 bp, Klebsiella pneumoniae
atggaaagcgagaagcaaagagaccttattgcaagtctttatgaggagcttgttatagcaaggggtctgataaaggagatttgcactgaaagaaatattccagagcccaaggcatcacttcagagaatggagagtgccatcaaagaggcaaaggtatacatgctagataacatctaa

SEQ ID NO: 226575 - DNA, 363 bp, Klebsiella pneumoniae
atgtcggcaaccgcgaattggtcatacaccgcgacggcgacaatctggcggcgcatacgcgatgctgacggtagtgataccgacggcggaggtcagccgtacgggtgggaagcgccgatcgctatcctctgcgactaccagggtggtctctctgcaaaaatcggtgaccttggccgggagctcgttgttaaaaacacgatatggagtgaatacgcagaggcaaaagagggtgattacatttttcttggtgtgtctctatctccaaacccacctgatgatgctgatgaaattcgtcaaataattcgttatgcggatacattcgagagactagccgatgattatgcgattatcaccggcgcgtga

SEQ ID NO: 226576 - DNA, 636 bp, Klebsiella pneumoniae; identical to SEQ ID NO: 203945

SEQ ID NO: 226577 - DNA, 219 bp, Klebsiella pneumoniae
atgaatcgcactatccattttgccggagatggcctcggccctcgcaaagtatttgtgaatggcaaccaaatcgacggggtattttttgctgatatccagcgcggaattgttcggtatcatccaaggccattcagagcccataagcgccgtaaaggtgagatctacgagcgtactttaaagggacgcgtagaagtctttccatgtggagaggcacaatga

SEQ ID NO: 226578 - DNA, 558 bp, Klebsiella pneumoniae
atgaaatatccaacagtaattaatgggttagacttccgcgatctgatttttgtggccgataacgacccggtaactgactcgtttatggtggctaaggcatttgggaaacgtcctgacaacgttattcgtgatatcgaaaagactattaaggcatgcccggaagaattcgatacaaaactcaactttgaggtttgctataaaaacaatgagttgcagaacggaaagccgcagaagttctatcgactccgcaaagatggattgatgcttttggttatgtcctacaccaaaaaagaggcgatgcgtatcaagatcgcctacatcaacgccttcaactggatgtacgcgatgcttcaggttgggcggcgccagtttgaagaagagcgtaacgccgtcatgctggagtacctgaaagagaaggatgttgccagtatgtctggtcgcctgctgcgccggtgggggaaagagaagaagccccacctactttcacgcattgagcaactggacaaacaaggtcagttggcattgcccggcgttccagacgcgcttaccgaagcatga

SEQ ID NO: 226579 - DNA, 570 bp, Klebsiella pneumoniae
atgacaaacctcccctatgaatatttccttggtgccgatgatgacctcgtcgactttctcgaaaagcaaggcgaggaatgcataaaagaaattgagcaatcaaatgcaataaacaaagagaacggttataaactgctcggcatcctcatagtcggcgtcgggtcttcgtttttattgctgacgcaaaataaccaaccttattttatgacgttgggtatcggtattttcatgttgtactgggccgcttgcgcaatttacctggtttcaggcgtgctgtctgtacaggtacgtgcgctccttaactcagccccagcagacctttacactgaactttacaagtcattggggccagcgcattacgaggagttggcccagaaaggatttcgggcagagaggacaccaatttcagttatccggcgaataaggctggctaatctccatgatacggctgaagagttgtgtgagataaatgagcgcatcagaacaaggctggatagagcgaggatcgcaacaatcctcactccggtttgtgcattagctatttctactgtgggctatctttttttctga

SEQ ID NO: 226580 - DNA, 615 bp, Klebsiella pneumoniae
atggtaagtcgtttttatatgttcattttagctgctatttttttgctaactggttgtgataacaaaccggatgccccgtttggattcaaatgggggcaaactatccaacagacaatagatcaaaaacttgcaggcacaaaagtcaataacacagggtttgtcggttttataagtgctgacaccgcaccaaaacctgcatcttttgaaggtcgatattttcttggttttatggggggactcgggttaacaagcgtctcattctcaactcctgtagatgctaatgggtacttttttaaccaaggaaggaaagtttacggtgatatgtctcagaagcttgagcaaaaatatggtagcccagttgaaattaaagaaaaggtaagccgtgatggggcagatttctatgaatgcataaaagatgagtcttgcggcacatggcaaagaaagtatcagaaagatggcatgacaatcaccttaaacgttgaaccttcaccaggacggttaatggatgcaatgtcaaaagggtatgtaagtgtgcggtatgagtttgtgtcaaaagaagaactggataaagaagtaaagagatataaagataaaaaagaatccaacaatttctga

SEQ ID NO: 226581 - DNA, 2478 bp, Klebsiella pneumoniae
atggtgcgatatgagttacagaggctgcctggcgcgccgctgcagcggggaacggtagatgccggcaccacactggtgagtctgctggattccctgcagctgcaccgcgatgttatcgtaaaactgaatggccgagcgctgcctgacgattacgatatcagccggccactgcgatctggcgacgtcgtggctgtcttcgaccagccagagggcggggtgggaaagctcatcaccacgatattacgtccggtcacgaaaatcctctccggcgcgctgaaggtgttcggcctgtcaaataagcccagcgcgtcagtatcggtggcgacaggcgaatcccccaacaacgacttaaccggccagacgaaccgcgcgcgactctacaaggggcgccctaacatttacggccagtgccgcgtctttcctgacctgattcaggaagcactgtttgagttcgtcgacaataacaaacagcttacggagtggttcgaggttgggtatggccggtacaccatctcatcgatccgctactcggaatcgaacctcggcagcctggcgggagcaagttctgcgatttataacccgggagacgtgatcggcacgattgaagtcgggtatcagttcgatgacgtcgataacgagactgtgccaggcctgaatgaaagccaggacttcccggcccagacagcgaccacgacggcgccgacatcagtggcgatcgagagtaatcagctcaaagcaattgtgctgtcgaacgatgacaactttgcctacttcgctgcgctggcggtgccgcatccagtgtcattcgttatcaatgccacctggaacgacggcggaacaagcgtcacacggaacgtcactggcgccgggaacatcatctcctcagagagctttatcggcgacgatacgctttcttacacgacattctatattggcgagctatccggagagattacgtctctgccgggcaatgcggttatcaacgcgactctgttcacactgaacgaccagaccccacttgttatcgggccgtcagtgtcgccgatcgtgtccactcaggtctgggtgcatgtgttggttcagctcggcgcgacggccggcacaacgcaataccggatcaagttctggcaggtcgatgacgacaacaatcaggtgccggggacatccgagcagcacgattatttcttcgataacgacttccaggtgacgacccggtatttccgcacaacgcacaagtttgtcccggcagccggggcggggcgctacgcggtcaccattgagcgcctcgacaacagcaatgacgctaacgttgtgacactgatggcgatccacgcggtgaacgtacgcgaaaacgtcgtgtatccggaagacacgattgcccgcatcacgatcaaaggatcgaatgacagcaacagcaaccgcgagcagaagtacaacatgttggcgcagcggcataccatcagctacgaccggacgactggcgcggtcgattacacgctgcggccgagtcgttcttttgccgacgccatccttcacgaatgggtggttgtgggtaagcaggacgtggccagtatcgacgtcgccgctctgtatgccattgctgactcactgacggatgctcagcttggttatttcgattacaccttctctgatgagaagcagtcgctgggtgagaaaatagcgacgatcgccaatgtggcccgcgttgacggcaataatatcggcgatgtgctgacgttctggcgtgatgagaaagtgacaaatcccgatgcggtttttgcgcgctcaaacatgttctgggacgagtacaaagtagcctggcaaatgtctctccctggtggttacgacggcgtggcgctggattacgttgatccgctgacgaacaagaaggcgtacatctacctgcagatcgacagcagcggcatcactgaggttgaggatgccactgttaacgcgatgcagatcagcctggacggctgccgaaacgccacccaggcaaccgacagggcctggcttgaggcgagaaaaattctctactcacgcctgactatgacggtgaaagtgctcgaagagacccaggttgttcgcggcacggtggttcagtgtcctgacatgtacgacaacgcgcagcagactggatacatcaccgggcgatccggagacgtatttgcgacctcagagcgtatcgacttttccctcggcgatatgtgggtggtgatgaccgacagcctcggaaattaccgcgggcgctggcgagcttatccggtaagtggcaagcccaaagcattccaggctgcagccgatactttcgatctgaacatttatgaccgcagcacggtgcaaaaccccagccggtatttcatcgctaccgactcggaactgaactccacaatctggcgcgttgatagcgccaagccaaatggtgacgatactcaaacgctttccctgactgagtattcagactcgatttatccgtaa

SEQ ID NO: 226582 - DNA, 2223 bp, Klebsiella pneumoniae
atgaagaaaattcttataatgacgccggacattgaggggcctgtccgtaacggcggtattggtactgctttcactgcccttgccactactttggcaaaaaaggggtatgatgttgatgtattgtatacatgtggcgactattctgaatcatctgtatcgaaatttagcgactggtcacgtatttatagtacctttggtatcaatctgctaagaaccggactgataaaagagattaatattgatgcaccgtattttagaaggaaaagttattcaatttatctctggttgaaagaaaataacacctatgacactgttatttcttgtgagtggcaggcagatctttattacactttattaagcaaaaagaatggaacggattttgaaaatacaaagttcattgtaaatactcacagttcaacgttatgggctgatgaaggtaattaccagcttccatatgatcagaaccatcttgaactctattatatggagaaaatggtggttgaaatggcggatgaagttgttagtccgtctcagtatttaattgattggatgttgagtaagcactggaatgttcctgaagaacgtcatgtaattttaaattgcgagccatttcaagggtttgtgacgagagatgatgttacagttaaaataaatgaaaagccagcttctggcgttgagcttgtatttttcggccgccttgaaacccgtaaaggacttgacatattcctgcgtgcattaagaaaactatctgatgaagataaagagagcatttctggaataaccttcctcggaaaaaatgtcactatggggaaaactgattcatttacttatattatgaatcagactaaaaatttgggactcgcagttaatgtcatcagcgactatgatcgtaccaacgctaatgaatatataaaaagaaaaaatgtattagtcatcattccatcacttgtagaaaactcaccctatactgtttatgaatgcttgattaataacgttaattttctcgcttcaaacgttggtggaattccagagcttattccgcaggagcatcatgcggaagttctatttattcctacacctgtcgatttatacggaaaaatccactatcgcttaaaaaatataaatataaaaccagggcttgctgaatcacaagacaatattaaagaagcttggtttgtcgcagttgaacgaaaaaaaaaccgcacattcaagaaaatcgatgaagctaacagcccgttagttagcgtgtgtataactcacttcgaacgtcaccatttgcttcagcaagcactcgcatcaataaaatctcagacgtaccaaaatattgaggtcatcttggttgatgatggaagtacgacagaagattctcatcgttatttgaatctcatcgagaatgattttaactctcgaggctggaaaattgtccgtagttctaataactatctgggtgctgcaaggaatttggctgcgcgacacgcctctggcgaatatctgatgtttatggacgatgataatgttgctaagccttttgaggtagaaacgtttgttactgcagcattaaactctggggccgatgtgttaaccacaccaagcgatcttatttttggtgaggagttcccttctccgttccgtaaaatgacgcactgctggcttccgttagggcctgatttaaatatcgccagctttagtaactgctttggcgatgctaatgcgctgatcagaaaagaggttttcgaaaaagtaggcggatttactgaagattacggtttaggtcatgaagactgggagttttttgccaaaatatcattacagggatataaattgcaaatcgtcccggaacctctattttggtatagagttgcaaactccggcatgttgttaagtggaaataagagtaaaaataactaccgcagtttccgtccttttatggatgagaatgttaaatataactatgcaatggggttgataccttcctacctcgagaagattcaagaacttgagagtgaagtgaatcgcttgcggagcatcaatggtggtcattctgtcagtaacgagttacaacttttaaataataaggttgatggtcttatttctcagcaaagagatggctgggcccatgaccgttttaatgctctgtatgaagcaattcatgtccaaggcgcaaaacgaggcaccagcctggttcgccgggttgcccggaaagtgaaatcaatgttaaaataa

SEQ ID NO: 226583 - DNA, 555 bp, Klebsiella pneumoniae
atgattaagtcaattctcaatcatgagaatatcaaggttgacttacagcgggaatttatcgttgacgagcgaactcattacgatcacgtattctatagcggtccattagatgcgttttatggctaccaatatggccgtctgggctatcgaacattagattttaaaaagtttatctatcagggtgattaccagggatgcgcagtgatgaactactgttctgtggatgtgccctatactcgcatcactgaacataaatatttttctccctgggaacaacacgacggctctgtttgttataaagagtatagccgtgcttgtgaagaaaatgatattccttactatcctattcgccagatgggagaaatggctcttcttgaaaaatatttgtcattggccgagaatgaaaccaacatcacttttgtcggtcgtcttggaacctaccgttaccttgatatggatgtgaccatcgccgaagcattgaaaacggcagaagtctatttaaattcactcactgaaaatcagccaatgcctgtgtttacggtttctgtacgatga

SEQ ID NO: 226584 - DNA, 333 bp, Klebsiella pneumoniae
atggcgctggccgcaatggccagcgagccggtggcgtacatcttcaagcatccagcaggacggttgttctggtctctgacggataaaagtaacaagggtcatgatgatgttatgccggtctatgccagcccgcagccagcgccggtagtgcctgatgatgtgctggacgcattgcagaaggttgctcgtatacgcctcgacctgaatgacttcgacggcgatcgccggggcatcgctgattgcctgggtgatgccgaagaggcgttaatcgaggtagtaaaccgccgcgccgccatgctcgcagccgccccgcaggaggtgaaaggtgagtaa

SEQ ID NO: 226585 - DNA, 294 bp, Klebsiella pneumoniae
atgtggagaggaaccgatcgcaccagaagccagatgatactgaccgagtatcgctacgaccctaaagctaaagactccaaatccgtttacctggtgcggcataacagccgcattcatcagactgttctagagcagcatttgacgatagagcgcgatagtttcggtcgtttcataccgactatcgaactgaaagactttccggaaggacttagcgaccgcgagtcgatgctcaaacttgccgactggctgcaccgtttaggtgtggctatcgaggataactggagtcaaccatga

SEQ ID NO: 226586 - DNA, 597 bp, Klebsiella pneumoniae
atgaaaaacgaaatcgaacagattgcactgcaaaacgatatgagcattgaattcgtaacctggttctttaacgagaagaaggtggggtgcggaaatgtctggttcatgatgatggctgcaatgtgggagggctggaaaggtcgtagcatcgaaatggataagctggcggcggagaatgtggcgctgaaaaaatcagcgccggcaccgttcagtaagctgatgatggaagcgcttgatacttatcattcgaaagctgaagacgtgcctgagttggccatgctgagcgcatacgtaaaactgcgcgatgggctaaaaacccccgccaccgatcgcatcgtagccggctttaaggctgatggtgtagcagaacgggaaaagaccatcacattcacggcagctaaaaagcgcacgcaggatggagtagcgttaatcgctatcggaaagccttataaaattcacaacgatgatgtgattggcgaattcttcatcggtgagcgcgggcgctacggcgtaatcaccatgggtcgtctcgattacttcacaatgtctgacgaatacgcatgggctttttcgctgcgcgagggggccgacaaatga

SEQ ID NO: 226587 - DNA, 1218 bp, Klebsiella pneumoniae
atgataggtggtataaccgatttctatcgttcgtggcgtggagttgatttatctgctgaaataattttaatttttaagaattggacgttgagtctattgctgtcgttaggtggattttctcttctagcagatttaaatatcgaatatattatttttctacaatggttttttatagtatgttttggtttttttgtttgtagactttcgatccgtattattttgggaatgttgagaaaaattggttataatacgaggaaagtcgccgtggcaggctcgttacctgctggattgaatcttttaagaacttttcaaaatgctccttggcttgggtttgttgttaaaggtatctatgacgatattaaaattgatagttatgaggatgtcccatacggagggacgctctctgaacttgttgaagacgctcgctcaggaaaaattgatcggatatatatagcaatgagcatgaaagacgaaacaagattgagggatattatttctcaattaaccgatactacatgctctgtgttacttattcctgatgtttttactttcaatatattgcaatctcgaactgaagaaatcaatggtgtacctgtagttccgttgtttgatactccactcaatggtattaatatggtctttaaacggattgaggatgtcgttgtttcttcaattattttacttcttatatccccagtgttgtgcactattgcagtcatagtcaaagtgacttcacctggacccgttatattccgccagatccgttacggcatggatggtaagcctataagagtttggaagtttcgctcaatgaccgtaatggaaaatgacactaaagttattcaagctacaaaaaatgatgttcgtgtaaccaaagttggtaagtttcttcggagaacttctttagatgaactccctcaattttttaatgttttattcggtcaaatgtctgttgttggacctcgaccgcatgctgtttctcataacgagcaatatcgatcattaatacagggttatatgttacgccataaagtaaaacctggaattaccggcttggcacaaatcaatggatggagaggcgaaaccgatacgcttgaaaaaatggaaaaacgtatcgagtatgatcttatgtacattagaagctggagcgtatggttagatctcaaaattatttttctgactgtttttaaaggttttattaataaatcggcatattag

SEQ ID NO: 226588 - DNA, 546 bp, Klebsiella pneumoniae
atgcgcaccaaagtaatcacgctgagcctggatcaggttagctggcagaactgcggaacgataactatcgtagtaagctattgcggcagagaacgtcggtaccggaataccattctgcacggcataagccaccacatcacgcagcgcttgctgatagtcatcagcgatctgtttgaagtatggtgccagcaggaggttagcaatgccagcgttttgcgcataagcatcggtgatcttttgcaggaactgcgcacgaatgatgcagccagcgcggaaaatcttagcgatctcgccgtagttaagatcccagttgtattcatcagaagcagcacgcagctgggagaagccctgagcataggagacgattttaccgaggtacaacgcgcgacgcactttttcgataaatccagctttatcaccggccggctgggcctgcggaccactcagcactttcgacgcggctacacgctggtctttaagcgaagaaatatagcgagcaaatacggactcggttatcagagacagaggttcgccgagatccagtga

SEQ ID NO: 226589 - DNA, 192 bp, Klebsiella pneumoniae
atggcggctacaatcatggcaattgttgcaacgcagtcgctatatgtcatgaggtcttcctatgccagatgtatttacattttccgaaatgctttcaacagtcgcgctggcaatatctttaaccaacgccgtctggttgttctttttttggttaacagtcaagaggatgtaatggcgattaacaccctctaa

SEQ ID NO: 226590 - DNA, 144 bp, Klebsiella pneumoniae
atgcgcactactggaattctgacggcggaaattacgtttcgcccatacatgaagccgctgctcatcctttcagtgcttttgcgctggggctggctcactaagaagtgtatccgggttggccctgtaattgagaagagggcgtga

SEQ ID NO: 226591 - DNA, 207 bp, Klebsiella pneumoniae
atgaaactcgttgatgactggaaaagcgcatggcgctggttctccattcatgcactggtgctggccgggattatccccacggtatgggaagagttaccgcctgacctcaagaccgcaatcccgccggaagcgatgggcaccattacagcggtgattgctgcctgtggcgttgttggccgcctggttaaccagagtaagacgcaatga

SEQ ID NO: 226592 - DNA, 450 bp, Klebsiella pneumoniae
atgcaaatcagtaataacggcatcgcgctgattaagcgatttgagggttgcaggttaaccgcatacccagaccctggaaccggtggtgatccatggacgattggctacggctggacgggaaaagtagacggaaagcctatcaagccaggaatgaagattgacgacgcaacggcggatcgcctgctgcgcactggcgtggtgagctttgaccaggcggtaagcaaaatgctcaaagtaaccgtaacccagaaccagtacgacgcgcttgtgtcgctggcctacaacatcggtacgcgggcgctatccacctcaacgctgatgaagaggctgaatgcaggtgatgtgaaaggcgcagctgatgagttccttcgctggaaccggtcaggcgggaaggtaatggctgggttaacgaatcgccgcaaggcagaacgtgaggtatttctctcatga

SEQ ID NO: 226593 - DNA, 318 bp, Klebsiella pneumoniae
atggctaagcgtatgcaagacaaagagagcattgccgggatgtcctggctggttctgctgatcattgcttgctggggtggacttgtccgctacctgatagatgtgaagcagagcaaggcaacatggagcttgatcaatgctcttgcccaaatggtggtttcagggtttaccggcgttattgctggcctggtgagcattgaaagcggactgagcatttacatgattctggcaaccgcggggataagcggagcgatgggctccgtagcgttgacctatttctgggaacgtctgacggggattaaagatgcaaatcagtaa

SEQ ID NO: 226594 - DNA, 1749 bp, Klebsiella pneumoniae
ttgaaaagaagaagcttgttatttaagtcttttattgcaacctttgcatatataggattgtctaataaaagtcaatctgctgatgtcactcaaattcctgctaataaggagcaaaataatctaagacctccagtttctgttgacaattcgaatttccaaatcgtatcagcattatcaaaacctacaggtttagctttaatcggacaatgtgagtcgattaacgaattgagaacaattattcctgaaaatcatggccaacgaattagtgtaaaaggttattatccctcttctaatgaaggcggaggtgtgttttactatgacgagaatgataaaaccagcaaagataatgacggaactataattatttcaaagggaaggcggtggaagcgtgaaaatacttacctgatggaacctgagttttttggagcaaaaggggatgggagcaccgatgatacaactgctttacaaaatgcacttgatgcttcgattaacaaagttcttattttggcgcccaaaaaataccgtgctcgaaatctctttattaaaggtccacttattattaaaggtgccggaagacgaatcgatgcggccttgattccacttgacggtgtttctggtaactttattactatttcttgccctgaatcacctactttctatgacttgaccatctcagccagaaatgtaaatcagagctctccattgaatgggttatatatagcgaaaaacgatactaaacaatattcaccctctattttaatgtataattgtaacataaactctttttcaggacattgtcttctatccgaatatggtcgtcatatgggagtacttgataattgtcaatttgagtacagccatgatgattgcatcgtaataaacggtgtcgattggaatatatctcattgtgctattgggtatactaaaaatggaaatggcgtagtccttgggcaacctacgaataggatttctaacagcgatatatatttcaatcgccgtaacggtattgttttaaaaaataatgcaattaacggttatcttgcaagtaatgttattaatagcaatggtgagcatggaattgttattttaagtaaaaatcctagtaaacaaggccatcttatcgtaaacaattttttctttaataactccaagtcacaatcaggacagtattctaatatttttctgtcaaaaaatattcatggtgttggaattactgggaattcgcactttacttattctgaacaaagtgaacgaccgaaacaccttcttgagttagatgatggagcttccggttctttaattggagatagtttcgataaaagtagttatatgatatcccccgtaaatggttcaaaatcaactataattaataatgaatatactacattgggttcagaaactgaattcaagaaaattgttagtaatgataactccaagtccgcttttatagtcgagaacactgaagctagacgcaaaatattagaaataacaaataggggcgagtttgttttttatgatcacaataattctcctttaactatctctgcatctaaaattgtagataattcattagaattaaactgtagcttggcaatagggtcaaatgaagctgatcatgataaaatttattttttgaagcttggtgatttttatatttgggatgattcagcaggaaatataagaattcatactgaacagccgcattcaaaaactcaaggaaatatattatatcaaactaaatcacattga

SEQ ID NO: 226595 - DNA, 747 bp, Klebsiella pneumoniae
atgggaatgctgcttaaccagaacattagcctggctaatatcgcgactggcgtaatccttccagtttcagatggtcttcaatatttcaacttattcaatgatggcagccaacttggtagaaactttgcctcaggaaaacctgctgcaacggtagttggttcgcctgcagtgaacaccgaaaacatcacagtaacaaacctgggaaattatattaataccaatgttgctcaggggcaggaaatgacgatcataaccattggtaagccaactgcggccagtggcaactttgttcactggtccaactatggctcagctataacaaatggcgggtcaggccttacttccactgattttgcacgagcatcagtcagcacagggaacccatcgatcagcctaagttattcagatgatagctttgccacaaggaagactctgacatatggcgtgtcgtctggagctgatactgttaaattacgggccattgcgtcggtgtttagtcagtcagggatgacatccaggatcagggatttgaccaatgcaaaagtagcctcaaatgccatcccagcaggtggggttttatctgtcgctggcaccattttactcggttctcactatacgaacgtagaggggtcaacaggtaacttgtatgcaggcatgatcttcaatcgcgccctaagtgactcagaaatagacacactttatacctcccttaagtcctactattcagggaagggcatctcggtttaa

SEQ ID NO: 226596 - DNA, 1290 bp, Klebsiella pneumoniae
atgcagggggatgaagggtgggcgcaggtttccagaacggcaaaatatggaaacttgatgcttggtaactctgttaggcctgcaggggcaggagagaatgcattcaacccgctaggcggctctgaattcaaacccatgatcgcagtaacgcaatcactagatggctcgacaattctctcggatgcagagatacaggctttaggtcgtaacgataaaaatgagggcgaatcgccattagttggcgcggtgaacggattcagaaagtcatttcttgacgctcactgcctgagtagtgattcctcccgcttgtttttatcttctgctgtaggagtttcaggtcagatattagccaaccttattgatgatactaagtattataacagggttgttgattgtataaccaaggcaaaggccgtagctgatgctgcaggcaaaacatactccgttacggctattatctttaaccagggccagtttgactataacgctgggacaagtaaaagcgtttataaatctcagatggttcaactgagaagtaaaattaacgccactgtcaccagtattactggtcagtctgacatgccagcatggtttatttcggtgcctgggtattcctataccccaaaccctgccactcaaccgcttaatgctgttgaattgtgggtggcaatggcccagcaagagttctgtgaggagaacgaaaattgctttatcgtcggcgctgactatcctttacccagcaaaggcggacatctgatgcctaacggctatcgctggatgggatgttattatgctaaagccatggataaagttcttaaccaaaggaagccatttaaaccggtgcaaccaataagctttgaactaattggaaatcagatatattgtaatttctatgttcctcaaccgccattacaatggcaagctccgtttcgtgtcggaacacggactgttataggcaataaaggattcagggttttcagtaatgtccaggctgatccagcaggaattggtactgaacttacattgtctgctattgatatagtctcagatactattgtacggctaacctgctcgtcagccccatcaggtacggttcgtgttgtatatggtacatatcaaaactctggacaaggaatgttaacggatagcgacccatacgttcctgacgaaatttacgaatatgaccctcagtttacgcaatggcctgaggaaaatattacagaactactcaataaaccctatcctatggaaaattggtgtattccgttttctaaaactttttcagtttaa

SEQ ID NO: 226597 - DNA, 714 bp, Klebsiella pneumoniae
atgcaggggggcgggaattttggtgatttatatcctgagtttcaaaaatttagacaagacgtggtaagttcttttcctgatacacgaatcattattttaccacaaactgcatttttcgaaaatgagcacgaattggataaatcagtaaaagcatttggagcacataaagatcttatcattttctcacgcgatactagaagtctttcaatttttaaaaaattcacgtctcagaccttcttaatgccagacatggctcacagcttatggggaactttgccgaagtctcaaaaaagcaaaggtacattatatttaattagaaatgataaagaaatcaataaagtacagcgtaggcttctcgagcataaaaaaggggatgataaatatgttgattgggaagatattttgacttcgaaagatttattaatgagaaaactctgcagaaaacttgatggaataggtggggttacaaatctctcagtattaaagaatatttcgaatgttatatggtataactatacgtacaaaatggttcaacgttatgcattatattttaccagccatgaaaaggtagttacatcccgtatgcatggacacattttttcttgcttattatcattacctaatgatgtgattgataatgcttatggaaagaacagtggttattttaaagaatggacatatgatattgatggaacgaaactattagaagaataa

SEQ ID NO: 226598 - DNA, 135 bp, Klebsiella pneumoniae
atgtcacgctccgaggcgtatgagtggcttgcgtctaagatgggtattccgcagcaagaatgccattttggctggttcacagcagaacagtgcaatttggcaatggcccattgcaacgacctttttaatcgataa

SEQ ID NO: 226599 - DNA, 180 bp, Klebsiella pneumoniae
atgtcaaaaattttgggtgtttacaatgtgggcatccatctctttttaggaatctttttgggtattttaatgcctatattattttataaattttttaaaaaaatgaatattaaccttttctctttgagtggtgttttttctctggagaatctgttctcgagaaaaagaagtagcatttga

SEQ ID NO: 226600 - DNA, 240 bp, Klebsiella pneumoniae
atgcatcgggcgtcagacatcaatcaggcattccgcgagtcggtattgcgcaactccaaaggctaccagtacctgcacacaaaggattttgtgtcagcgctgcgccggcgtgggctgcactttaccgactcagaggctaatgcgtggatatctagagagcagacgtactttgtcgacaaaaccaccgaccatagcgaaaaccgtttgtggatgatggccaacatggggagggttctgtaa

SEQ ID NO: 226601 - DNA, 441 bp, Klebsiella pneumoniae
atgagcaagatgatgcatgaccagccttctgctgccgtacccgcttcccgggaccggcgcaattttctgatcgccggcgccggtctggctttggccgcaaccacccttggcaggagcggcgccgtgatggcgaaaccggctggtcaggacacgccgaacgccccttcggatgctgctcccgtccggaaggaaaccttaaccacgcgtaaactcggctcgctggaggtgtccagcatgggactcgggtgcctgccgatggtgggttattacggcggaggtccgcgcgatcgtaaagccatggtttcgcttatccgggcagccttcgaacaaggtatcacgttctttgatactgccgaggtctacggcccccatctattgccagcaattatgtatgtgacagggtattgcactggtatgaagggaaccagcatgcgccattga

SEQ ID NO: 226602 - DNA, 216 bp, Klebsiella pneumoniae; identical to SEQ ID NO: 219510

SEQ ID NO: 226603 - DNA, 213 bp, Klebsiella pneumoniae; identical to SEQ ID NO: 106534

SEQ ID NO: 226604 - DNA, 1059 bp, Klebsiella pneumoniae; identical to SEQ ID NO: 106535

SEQ ID NO: 226605 - DNA, 336 bp, Klebsiella pneumoniae; identical to SEQ ID NO: 106536

SEQ ID NO: 226606 - DNA, 522 bp, Klebsiella pneumoniae; identical to SEQ ID NO: 103332

SEQ ID NO: 226607 - DNA, 972 bp, Klebsiella pneumoniae
atgagccagaacgagacagaaaaaactgagaaatacgcttttttctataagcgcctgctgcattccacgcatatcgtgcgccaggatacaggagaagaaattgaaatccctccagagacggaaacactttacagctatatgcgtgaccagtacgagagctataggggtcgcgaaaagccgttttttgagtcgcaagaaagtatgggacttaagtttaaagggcgttgtcgccgctggatagctgcaaggattgaggttttaaacagactcggcctggtgaaatctgaggagcaggagcgtgattcctacggtcacaaacgttttcaccatactgttatctctttagaagaggtatccgacaaccttcttttctatggtcctgcatcgatcagtggtggaatactggctgaaggaatgctcatccgtccattaaagaagaagaagccgcgcggaacgcctaaaaagaaaaaagttgcagcgccattaaacgaggagaacaaaggcgatgacgagcaggcacagcagcaagaacacgaacagcaatcccctgatgtgtcccccacggcgagtgaacctgtgcaacaggctgatggtgtggcctcagcatctgccgaggatgatcctgaacagcgatctggcgtttcacagcctgctggtgataacggcgatgatgtttccggtagtgatgcgatgaacgaacggtactatgccgatcttaataccctcaaccactgggtagaaggctacgacaatgaaggatttatggcctatggtgcgacgtgggggatagaaaaacctggtgcgataacagatctgataaagagccatataagaaaaatccagagtgatggatacaaaggatcgaggtctgccgctaacgataccccatctggtgcagatgattattacaaacagcagcaggcacaaagaatagccgcagcaaaacaaggtgccaataccccgcagcagtaa

SEQ ID NO: 226608 - DNA, 429 bp, Klebsiella pneumoniae; identical to SEQ ID NO: 103329

SEQ ID NO: 226609 - DNA, 951 bp, Klebsiella pneumoniae
atgaaaattaaaacatttgaatcttatgattgggttgatgccgcaaaaggcattggtattattttagttgttgccgggcatactctggatgaaaaaatatcaaacatgatatttttatttcacatgccttttttctttttgcttggtggttatctgtatagtccaaaacctgtctcatcctattttataaacaagacaagaagactaataatcccttatataaagtatcttgcatttttcactacattccttattgccgaatccttatacaaaggaaacaacttatattcggttgctaacataatattaaggtctatctatggaggtcaacttctttctggggctacaggagtgttttggtttgttaccgtattcttttttactcaacaagccctgaactacttgatcaataagattggctttaaatataccggcctcatcgcaatcatatcactctgcatgtcgtatgtagttagccacatactacaccacccatctccttttaatattaccgtatctttacaagcatttcccttcatgtatattggctatgttataaaaacaaccaaaccagacatcaagccgatattttattttttattaggtgcaatatccatttggttttacattggtcatcaaaaccaaatgattttcgacatgaaagcttcagaatatggaatcccattcgtaagctttgctgttgcattaatactatcagcttgtatgattcttataagcgaagtatttaaaagcaaagcattaaatagcatcggaaaaaactcaatgagtataatgtttattcatcagttttttaatttctatgtcgcggaaaagataacatccaaccaaagcattatattcctaacgacattggcattatcaatcgcatattgtgttgctgttaaccttttaaaatcattatcttttaaaaggcagattcctgaggaataa

SEQ ID NO: 226610 - DNA, 2886 bp, Klebsiella pneumoniae
atggcagaattaccgttaccgttaccaactcccaccgacaacccggtaccaagtactgatattcgggatgcagtttatggcggcgccatgctggataaggttgtcaccagtaccgaaccgacatacatcgatcgcctcggcggtgagcactacaccatagacggaattaaggctgaaggggacaaggttgtcgaggaaacccggcagaacctgatccccctcagtcgccagtatacgacacttgcagatgcacaggcagatatcgctaatataccagtcaactcgtttacctatgtcagagatccatcaggcaacgcattagcactggaatatcaaaatgtggccggagttttaacagccacaggccgtaaaatgccttcacgggcatcaatggtcattggtattgtggattcgtgggttaataacaacctttatccatttgattcattgtcatcgccaaatgaaaactcggtgtcgatgaatgtagctgctgtaagcactattgcgtaccgagaggcttactctgctttattatctcctgttgctgtaggggatattatcactgtccgttataaatacagcggaaccggcggctccccaaccattggattaaaaacatcgctaaacggcacatttgtgagtaatcagccaacgctgacctcttcaaatgactggcaagaagtgcggcttaccgctaccgcagctacagcaacgctcctggctatcggggtgaatacaaagcttgcaaccactgttcagttatcaattattgcctacgcatcgaaaaagaacgctattaccacggcgatccttaactcactggatagcatttcaagtttaaatgggaaggtgcgtattggttctgtggattcgtgggttaataacaacggctacccattctcagttttctcgcaggttaataataaccgggtaaactacgtcaactcatcgggcgtctattcggagatgtatgccgatgttaatgtgccttctggcggtgctttaactttgaattattctctggatgttacagcaggtcgtttgtttgcgcgacttgcaaatggtagtgcatggacaggtgacgaagtgcaattagcgggtggtggagcgcgacaaacccttacattagtagcaactgatgataccagacaactgaaaatttactctaaagctgaaatttcagcagggtcaattttcgctgaggttgtttatggacaaaaaaatgcacttacggaacaaatcgactcactatatacagcagtagcatcagcaaacgctattcttgcaattttatctcaaagctcaacatttgattcatttgtaaaaagctcaccctatacttacacattaagtgattctggtattgcttataaacaacttattaacacaataaatactataagcagcgttaccactgtaaaaatgatgtataaaatttcatcgacaaatgctgtgttgaaaatacaaagtagaaacggcgggaactggggagcgaatgaaacgcctttgatagctgatggaagttatcatgaggtcaacttgtcaatttcttctggccaagttttttcagggtggggagtatattcgtctgcaaaagcaggagggtattatgctgatgttacaatgataccaatatctgcaaatggagttttctttaccccggctactgcaattttgtatgggttgatgcagacgtctgcagatttagatagtcgtgttactgccctagagcagggtattgcggccgaccaaaatacggacgtaatctttcctgcaaacttctacgccgtggattcccgccccctacgtttttatggcgctaatctggtcagtggtgaacgtccgtggcataacggcgctgatgtggtgctttccagtcatggttatgaaggaaagcctattttgctcaaaagtatcgtgccggacgccaccattttaccgtcagaaatcaatggccccacgctggtagttaatgcgcgcgcagatcaatcgggtgctgtttacaggaagaaagctgcgttcactaaactggcggcaactcagacaggaaacgtaaaagtcgcgactatcatggactctctcggcgagagatgcgtaccctggctatacttcgccctcaatgccacgggggccacctacgtaggcgccggttcccgaaaaacgcgcggcatgacggacgacgggagttataccctgccaaacacaccagcggacggaattccgtttgacggtcgcggcgggtggactacgttcgactatatcgggaagactcagaagacgaacttctcgcagcccttcctgcgagatgcggtagctgccgatttcgccgcttatcctcagtactgttacgacaaggcctactctggccagagctatgcagataaccctaatctggcggagtatcacatttttgatgtgactgcgtggatggcggcgtcaggggtgagcgcgagcgacaaactggttgtcgtcattcagcttggatacaacgacctctactacagctatacgcctcagcagaccgttgatgcgcaggaattcatgatcgccaaatttagggagaaaatagcgaattcccgtttcgttatttctcaccaggcatttggctggtcaggtgtaagcgcccctcaaagctggccagaattcgctaagtggatcacgcagaagctgcgcaagtttgataaccgtatcagcgagaaaattctcgtcgcccctgcatgggcacagctgagctacaaatacggaatgaacgaaactatcacagcaaccagtgatacgggcgtgcagactgtatcgttacctgacgatgtccaccccggtgagctggggggagcgcagtggggagatgctctcctcgctccagtgttggcggcttggtcgatttaa

SEQ ID NO: 226611 - DNA, 273 bp, Klebsiella pneumoniae
atggcactggtaaaagtaacaggcaataacctgttctctggtgccaatctccgcaagttggaggttggttcagaagtagaggttgaccgaagcactgcgcatcggtggaagagtgctgggttggttgaaatcatcgttgatgaagatcgcgtacttgaagtcgcctctcctggctctgatgctgaagagcagccggagcagccggagcagccggagcagccggagcagccggagcagccggacaccaccgctaaatcgaaaaagggtaaataa

SEQ ID NO: 226612 - DNA, 1083 bp, Klebsiella pneumoniae
atgcttgtattttcacgctctatcggtgaacgcaccggtaacctagaagtcaaccaggcacagttccgtgagctggagatggcgcgcaacatgagcgcccaggccgtggctgacttcatcgcccgcgctcgctttggtgagcaaggccatctggatgcggtgaatgcggtagacgatattcgccgcatgtaccgtgcgtacgaccagaccgttcttgctcaattcgagccaaataccgagttcaccttgtttaatgacttgatgccgctgtctcgctcggtccgtctggaagagtccgtgtatgaatacgctcgtactggcggccgtggctgggcgcacacatcaatgtcgggacagattggtgcggcacttgacgcacgtgcgtacagcttcgacggcacgatggtgccggtgcacgattctggtttcaagttccactggcgtgacccgatcttcaataaaggttctgcccttgcttccctgtctgacgcgcagcgcggttctgttgatgacgtgcgtcgtaaaatcgtggattacatgtttaacggtttccgcgattcagaaggcaacttcgtaaccttcgatggcaagacctggaaaggtttaaaggctgatgagcgtgttggtctggtcgatctcggagcagcaggcctgaacatcaactttgcaaccagcacagatcctgacgccatgcgaaagggggcgatcgctcttcgcgatgtgctgaaactgcagaaccatcagtatggccagcagacctggtatgtatccagtgaaatcatgtcgaactgggagcagtacttcgatacccagaacaagacccgtacagtcctggatgaaatcctgagactttccggcatcgccgctgtgaaagaagacgctgaattgactggaaaccagattttggttgttcctctggctgcaggggtgatcgctccagtcaccggacaggccgttggtacggttgcagacccgcgtcagttctacaacagcgacttcatctggcgtacctggggcgcaatgggtctgatggttaagcaggacatcaacctgaaacacggcgtgctctttgcgagcagctaa

SEQ ID NO: 226613 - DNA, 432 bp, Klebsiella pneumoniae
atggctaaagacggaaaacatgtaattcacgccggtggcgtattccctaatccgctgctcaaccgtgaaggtgccgcggcggccgccactaagccaggtactgttggctttttctctgccgccaagttcacggcctcggttgatggcaacgaagaggcgatcctctatgtcgctgactttgactatctgcgctgccagacggttgacgactcaatccctgtgaatgagttggtgttaggcatccatccgatgcctggcatgttccttaacgtgcgcgcggcggcaggcacttacaaaaaagggcagccattatccatcgcaaacggacaggttaaagcccatgccacaggcgagtccatccgcgcatatgtcgaagaagacacggcgtacaccgttgctgcaggcgatctgctgcgcgtcgttatcaagtaa

SEQ ID NO: 226614 - DNA, 1023 bp, Klebsiella pneumoniae
atggcaacaagccaaagcctgacccactggccgacccataatcagaagccaaaaagtccggtgataccacggtcgaaagttgaccccacaatgtcgcgcaagtccgtcagcaagatggagcgcgacattgaggcaaggtattactcgataaaggtggcgctgaaaggtctgttcgaccagcgcctgacagggcgagagcgagaggttaacagccataactggcatttcctgtgccacgaccacggcgaagatgtgcggctctaccaggtcaatgccggcaagttcatctacgacatgtcggcgcaggaactggctgacctgctggaggcggtgcaggcaattcttgatgaccatctgctggaaggcggcgagcaaaacctgtgggcgatggattacgtcgccgcagaggcgcagcgcggcacgctggaggcattcaacaacctctcgcagcagtcgcaggtgtacgccagccagacgacgcttcagcagcttttaagcagccccggttatctgaaccagatagcggcggccagactgacaacgttcagtgactggaaggttatcagcgacaccgcccgcggcgatttgaccaacatcatcaccgatgcggtcgcgcgcggggtgaatcctcgcgaaacggccagcgtcatcagcaagcgtctcgatgtgtcgatgtcgaaggccaagaccatcgctcagactgagcaggtcggcgcgctgcgccaagcgcaatggaacgaaacagactgggcagcggatcggcttgggctgaataccggcctgctgtggctatctgcgctcaagccgaccacgcgcagctggcacgccagccgccacggcaaggtatacaccacagaagaggtgcgggacttctacgctgagaacggaaaccggtacaactgctattgcagccagattccggtactgctcaacgacgacggtagcatcttcaatgaggggctggcagataagttggcgaaagagcgaaaggcgtataaaactaatatcactatctatagctag

SEQ ID NO: 226615 - DNA, 576 bp, Klebsiella pneumoniae
atggacgcatggattggctcaatgattggcggtgcagttggtgctgtcataggtcatataacaaatcattgcattggttggtataaagagaacaagcaatcatcaccagaaagaaaatttatttgcgctgagcttgtatttcttctagaagagtatgccaaaaaatgtgcagaaatttcagaggattatggtgaaaacactagagagtttggagacgctgaaccagcagttacacctcctaatctactagattattcatcagttaaaggtaattggcgttcattaagttctgacattatgtatcgattatgtagtttgcctgcagaacagaaggatgctcaaaaacatatctcagcatccttggagtatgtggctacacctccaaactacccagagtattttgaaacgcgacagtatcattactcaatcttaggtttgaaagctgcgcaaatcgcgtcagacatcagaaagcaaaataattttccagatggagatttatatcgttgggaaatcccagcgatgacgtcgaagatcaaagcgttagaaacaaagcgactaaaggaagatgtgtcttag

SEQ ID NO: 226616 - DNA, 795 bp, Klebsiella pneumoniae
atgcttgaatcacttaaagaatatttttcctcaatcgtcaatactgctgtaaacagaataagtaacccagtgtttggtgctttcgctatctcatggtgtgcatttaattggaaatcaatactttaccttttcctaagtgattacggtgttttcgacaaaatcaattacatatcaacaaatagtgactggaaaacagtgattatctacccatgcctatcagtattagttctgtgcggaggactaccatgggtgaataatatgatttcaaagtggcaggctaagccactcgacaacaacgactcgattgagaacttcaggaaggcaaagcttatccttcgtgccacgcgccttcaacgcctcaaggcaaagcatgatgttacatacgataaagttaagactggagctgaaaagaacattcaggagatgaaggaggagattattcgatcaaagaatagtatgggagaactaactgctgaattgaaagccaaagatgatgaattgagttctgctagtgctcagctagcagaactcgaacattcattaacagaaacatcagagacgcttggaagaatgaacgaagcttataaaaaacttaaaaatgatttcgatgaatataaaattaaataccctcccagggctggattaggcacccttaccttgtccaatggacaatctgttagcgattatatagaccgtcaagtattgactggactagcaaaagaagcttcgaatatttccaaaaattctgcaactctaactggattgtcgggtttaacgggtaaagataaagcttag

SEQ ID NO: 226617 - DNA, 750 bp, Klebsiella pneumoniae
atggaactccaaaaaaataatgatggtacaatcccccatgtcattgaaataattcgccgtatcaacgaggggtcgactcagccgtttctttgtaagtgtgatgatgggaaactgtatgttttgaaatcaaaaccttcaatgccgccaaagaatcttgttgctgagtttgttgctggttgtttggcgagtgatatcggacttccgataccagactttaaagtcgtgtttgttcctgaagaactaatagaatatacacctgaattaaaacgtgaaatttctaccggtcatgcgtttgcatcacagtacattgacggcgccgttgccctaacatttattcagtcaagaaacgaggcgatcatacccatagaacagcagaaattaatctatgtttttgataaatgggtattaaatgcagacagaacacttacggataaaggcggcaacgtcaatatcatttatgatgttggcaacgataagtattatctaattgaccataatctatcctttgatcaaaatgcagaaccagatgattttcttgttcatgtctatggcccgggtaatcgcaagtggcagtatgatttgattgatcgcgtagagtaccgccaaaaagttgttgatagtttatgcaaagtcccggagatttttggcgatgtaccagatgactgggtagttgatgatgattttttacctttcgtcaatggcaccttagagaaaggcgaccgtgatgaattttggagtgcgatagcatga

SEQ ID NO: 226618 - DNA, 828 bp, Klebsiella pneumoniae
atgaccacaccatgcctatatagcattgttagatatgcgccttatgcggagactgaagaattcgcaaacattggcgtagtcatgtgcgcaccaaaagaaaacttctttgactttcagataactaagcgcaacgactctcgtgttcgaagctttttccatgacgattgtattttccctgtagcgaaagatactatccagagagagttgcagtttgcaaaagctcaggctagccaaattgttgggcatcaacaacttgcgcagttttttcggtactttacctccaagaaagagtcaattttccagtttagctccacaagggtggtgcttagcgctgatcctaaggaagagctggaacatatttacaatagatatgtaaaccactctgactacaccaaagagcgcagggaagatgttttggcaagagagataaagcgaagcatcgatcgaattgatgggttaaaaaacgccttcaaaccagaatctattgatgggttttatgcaaaattcacaatgccattagttgccaaaaaacagaatataattcagtgtgcaatcaaaccattggccttcacgcaatccgagccaggaaaaatgatggagcacagtgacacatgggtaatgaggataacccgagcggcagaagaaaacttactggcaacagaagacattctgttcactcttgaggttcccgactctccaagctctgggcagcgaaaagtaattgatacaatcaagagaacaatggacgcgaagaagattaatcacacttctgctgataatcataatgaaactattaatttcgcgaagaaaatacttgcccatccctga

SEQ ID NO: 226619 - DNA, 804 bp, Klebsiella pneumoniae
atgaagtttgaagaaatggtttgtgggtatgtcatgcctatttccgatacgcctgattatcgctcaggacattgggaagatataaaatcaatgttggatgaagttacctctgaaattggatttaaagaaagtcgaattgttagtaccggtcttgatgtttcaacgattcataaaagaattgtcaataacatttataatgatgatataataatttgtgatgtaagctctagaaatccgaatgtaatgtttgagttgggaatgcggattgcttttgataagccagtaattataattaaagacaatgccacgcaatactgcttcgactctggcactatagaacatctcgaatatcctaaagatatgagatatgctgagattgataaatttaaaaacatattaaaacagaagattgaaaaaactattgagcaccaccaatctaatcctgacgaaagtcctatactaaatagctttggttcatttaccgcgattcggcctaacattcctgaaatgactgaagcagacctatttagatctgagttgcaagaaataaagtacctcttggcaaagaatttcaaaaaccgagagaattattggaaagaaccaacaaattggttgagggaaaaacgccctaaggctatgttcggcggaagtgacgaagaagtttttgcgaatgtaacttctatacccggaatcagtgtggaaggtgtcgatgacaagtttgtttatattatgtcaaagagcctgagtcccctaagggaattatatgaaaagtttgggagtataaaacctttgggaaatgagtaa

SEQ ID NO: 226620 - DNA, 1257 bp, Klebsiella pneumoniae
atggcgctaactgatgtaaaagttaaatctgcaaaaccttccagtaagccaatcaagctcactgacgggtttggtatgcatctacttgtgcaccctaatggttcaaagtattggcgttttcaataccgcttcactggtaaacaaaagatgctggcgcttggcgtctaccctgccgtctccctagctgaagcaagggagagacgtgacagcgccagaaaactgattgctaatggcattgatcccagcgaaaagaaaaaagcggaaaaaattgaagagagtggcgctttaacttttgaaacggtagcaagacgctggcattccagcaataaaacatggtcagaaggccaccgcacactgatactcaacagcctaaccacgcatgtttttccgataattggtcagagaaatgttactgacctgaaaactcgtgatttactggttcctgtaaaaaaagctgaactgaacgggcatctggaactggcctcacggcttcaacagcgtatcaccgccattatgcgctatgccgtacataatgcccttattgagcataaccctgcttatgatctggcgggagcaatagcaacagccaaaagtgttcatcgtccagcccttccccttgaacgtattgctgaattgatggaaaggatagaggcatacaaaggtaagggacttacccaattggctgttcgattgtgtttgctgacctttatccgttccagcgagttacgatttgcgcgttggtcagagtttgatttcaaaaatgcgctatggacgattcctgcagaacgagaacctcttaaaaacgtcaagttctctcatcgcggctcaaagatgaagactccccatctggtaccgctgagtaagcagagtctcgccgttctgaaagagattaaagctatcagtggcgctcataaatttgtattcgcaggttttagctatgctgacaagcctatcagtgaaaacacgattaataaggcattacgtgctatgggctataacactcaaaaagacgtttgttgccacggattccgcacaatggcctgtagcgctctgattgaatcaggattatggtcaagagatgccgttgaacgacagatgagtcaccaagaacgtagctctgttcgagccgcatacatccataaggctgaacatctggatgaacgccgcctgatgctccagtggtgggctgatttccttgatgccaacagcagcagtatgatcaggccgtttgagtttgcccacaggaatcaaagctaa

SEQ ID NO: 226621 - DNA, 285 bp, Klebsiella pneumoniae
atgatatcaggtcttgatggtggaattttcatccttagctcaatggctaaagaaagagtcaaatcaggtctacttgacagagcaacaatagaaggctctaaaggcgagtataccgtgatttttgatggttcagaatgggaaggtaagcctttagtcttatgcagttccagacagccttatgaagcacgagtcttcaaaagcatagatggtgcggcggcagaactactacgcataggactaaatgaagcttcaatcaaaaacaccatcaaatcgaacactaaataa

SEQ ID NO: 226622 - DNA, 2019 bp, Klebsiella pneumoniae
atggacatgcaaaaagaaacgattttttcagaagtagaaactgctaacagtaagcagcttgctgttttgaaggctaacttcccacagtgttttgataaaaacggggctttcattcaagagaaattgcttgagatcgtcaaatcagcggatgttgaactctctaaagaatcatacagcttaaactggctgggtaagtcctatgcccggctgttggctaacctaccaccgaagacgttgctcaccgaagataaagaccataaccaacgtgaagagaacaagaacagtcagaatctgttgatcaaaggggataacctcgaagtattgaagcatatggttaatgcttatgctgaaaaggtgaagatgatttacattgatcctccatacaatacaggtaaggatggatttgcctataacgatgatcgcaagtttacacctgaacaactttcggaactggctggtatcgatcttgatgaagctacacgtatcctcgattttactatcaaaggttcaagtagccatagtgcatggctgacattcatttatcctcgtctttatattgcccgtgaacttctacgcgaagacggtgtgatctttatttcaatagatgaaaatgaattgaaccaactgaaaactatttgcgatgaaatatttggtgaagcaaacttcatagaaaatatcgtatggaataaacgcatcccaaagaatgataaaggtatcgggaatatccatgagtacatccttgcttatgcaaagactaacgaaataagcaaagaatttttaatgcggaaagatggaatcgatgatgtatatcaattcattgagaagttaaaaaaagaaaaagttccattagatagagcagagcagcaactaaaaaaattctatagctctaacggatatgaccgcggaattaccctttacaatggtctgagtgaagattatagaccatggggaaaaattaatatgagttggcctaatgcagattcatttggtcctacatatgaagttttacaccctttaactaataaccctgtcaaaatcccagacagaggttggcgctggaaagaagacactttcaacgatattgcgaaaagaatagatggaaagtatacagacattaaaaaacttcatgatggtagtaccatctgtggaggaatttggttcgcttgtacagaaaacacccagccaagttcggtaaaatttttagatgaggttgaagaatttttacttagatcaattatttcaaccaaaagtgatggtggtgttgaggttgaaaatctttttggtggaaagggttatttctcttatccaaaaccgacaagtttaataaaaacgctatttggctcggtatacaccaaagctaatgatatttatcttgacttttttgcaggctctggaacaaccgctcatggtattctagagttaaatattgaggatgggcaggacagaaacttcatctgtgttcaactagatgaaaaaacagataaaaagaaacaagcttataaagaaggatatgagtccatcttcgatataaccaaagatagaatcatcaaagctggagaaaaattaaagaaagataatcccgattataaaggagatcttggcttcaaaatatttgaaacagttgacgacttccgtgcaaaaaatgagtctgaacttacgctgtctaatcttagcttctttgatgatgttgtactgactcctgaacagtataacaccctattgactacatggtgtgtatatgatggtagcttgttaacaacgccaattgaagatattgagcttaatggctacaaagcacacttgtgcgatggtcgtctgtatctgattgcgcctaatttcaccagcgaagcactgaaagctttacttcaaaagctggattcagacaaagactttgctcctaacaaagttgtattttatggcagtaactttgaaagcgcaaaacagatggaactcaatgaagcactgaaaagttatgctaataaaaaatctattgatttagatttggtggtaaggaactaa

SEQ ID NO: 226623 - DNA, 2913 bp, Klebsiella pneumoniae
atgtccaaagggtttacattcgaaaaaaacttaccccatcaaaaagctggcgttgatgcggtcatgaatgtttttgtttccgccatgcctcatcagacggatcatgttgctatccgcctgttagctaatccagaactgaatctatctgaacaacaatactacaacaacattaaaaatattcaggagttcaatggcattgagcattcaaaagataattacgatgccaaaagcaatgttattgatgtttcaatggaaacggggacaggtaaaacctatacctacacaaaaacaatttttgatctgaacaaatcttttggcattaataaatttattattattgttcctacactttcaattaaagctggaacagttaactttttaaaaagtgatgctttaaaagaacacttccgagatgattacgagcgtgaactaaagacttatgtagttgagagtcagaaaaactctggtaaaaatacaaaatcgtatatgcctcaagctattcatgattttgttgaagccagcaatttcaacaaaaaatatatacacgttcttgtaatcaactcaggaatgattaactccaagtctttaactgacacttatgatgttggtttgcttgataatcagtttgatacaccatttgctgctctaagtgcggttaaaccatttattattattgatgaacctcataaattccctacagctaaaaaaacatgggagaatattgagaaattcaatgctcaatatattattcgttacggcgcaacctttagtgaaggctataaaaatttagtttatcgcctgacagccgtagatgcatttaatgaagatcttgttaaaggcattgatgcttacattgaagatattgttggtgatggtagcgccaacctcaagttcgtaaaatctgacggtaaagaagctatttttgagcttaccgaaaatggtaacaaaaaaacgttcaaattagcaaaagatgaatcgctatcgaaaacacatagcgcaattcatgatttaacactcgatgcgttaaataaaagcactgcagtgttgagtaatggtattgaactaaaaattggtagttcaataaacccctactcttacgatcagacgctcgctgataacatgatgcttaaagctgtcaaagaacactttaagttagaaaaagagtatctgacacaaagaccacgtataaagcctcttactcttttcttcattgatgatattgaaggctaccgtgatggtaatgatattgccggaagcctgaaaactaagttcgaagaatacgttctgtcagaagcgaatgaacttataaaaacagagaaggatgagttttatcgaaactaccttgaaaaaactattcaggatgtatcttctgttcatggtggttatttttcgaaagataacagtgataaagatgataaaattgagcaggaaatcaacgaaatccttcatgacaaagagcttcttttatctttagaaaatcctcgccgtttcattttctctaagtggacgttgcgtgaggggtgggataacccaaatgtctttcagatttgtaagctccgttcgagcggtagcaccacatctaaacttcaagaggtagggcgtggtttacgtcttcccgtgaatgaatacatgtgccgagtgaaagatcgcaatttcacactcaactactatgttgattttacggaaaaagattttgttgattctcttgtcaaagaggttaacgatagctctttcaaagaaactataccaagtaagtttactcaagagcttaaggataaaatcttatctcagtatcctgaactttcatccagaacactaatgaatgaaatttttgatgctgaaatcatcgatgagaatgaaaactttaaagactctggtgcctatactcgcttaaaagataaatatccagcagcattccctaccggagttaaaccaaacaaaatcaaaaaatccactgatggtaaaaaacgtactaaaatgcgtgctggcaagttcagtgaactgaaagaactgtgggatttgatcaatcaaaaagctgtgattgaatataaaattaatagcgagagtgaattcttatccatattcaagtcgttcatgctcgaagaaaaagatagatttactaaatcaggcgttcatactcgcattgatagaatttatatccataatgatacggcaatgtcgaaaagcataattagtgatgatgataactttgctaaactcaacacaatgagttatcgagaatttcttgataacttatcacaaactatgtttgctaaacacgataccttgcataaggttttttgtgatataaaagacactatcaatatcactgactacctgaacattcaaactatcagaaagattaaatctggctttagcaagtatttgttgaacaattcgtttaacaagttcagtcttggctacaatgtgatatcaagctctattcatcctacaaagttgactaatgcagatggtaatcctttaaatgaggtattatcaagtgatcttggtgtattgcaggataatacaaaatcaccattggattcttatctttttgaagaagtattttatgactcagagcttgaacggctcaacataacagatggagagatccagtctgtatctgttttcacaaagataccgaagaactccattaagatcccggttgcgggtggttatacatattctcctgactttgcttacgttgttaaaaccaccaaaggtgattatctaaactttatcattgaaacaaaaaacgtagacggaaaagatagcctgcggcttgaagagaagcgtaagattgaacatgctcaggcactgttcaatcaaataagtaaaacggtcaatgtggagtttaaaacgcagtttgctgatgatagcattgctaatttaattaagagtagcattcattaa

SEQ ID NO: 226624 - DNA, 1098 bp, Klebsiella pneumoniae
atggaaacaaaaatcattattagccttgcatacttttttttactaataactttaatttttatttttataaaagggcgacactacagactcgatcaccaaagtcttttaaaacaacctattttctgggcttcaattggcactcctttagtaacatgtttgttttttggggccttaatctgggtagacaaatggcattcattcagccttacaagccatggctacagtcgattccttgagatatcaaaattaccattattaatattggcctctgcagttccctttgcttcaattataaacaacctccaccgaacaatccaaactgaaaaacagattgctgagtctgaaagaaaaaacaaaactgatgggtattatgcacatgttaaattccaaactgattactttaaatccttacctgaaaaggagttaacgaccaagatattgcttgaaattggaaaattaactaccgaatctaagttcattaaaataacctaccccctctccctatacaaaaagctatatccgaaatgcaaccctatcaatggtgtagaatatgaaacagataaaaactacacatctacaatattgaaatcttggatgaagattaataacctccttagcacctttcataaaaccaagaatgaaatcacgcatgccaaaaataatgaaatagaagattttagtgatttattaaagatatggtacaatcttgagattgaaattataattttatgtgatgctcttgaaatattatatccaacctatacaaaaacatttattataaaatataatgattccttgttattcacgtcgatttcttcttttaaagaaatgtataaattacttgaggctattgaggatatatcagtagggataattgacgcagcaaaccaatatactatggtagaaacacatatctttactaaaactaagaaactactttcttattggggaaaaattactgagtttcatgaaatgaatgcaggttttcagcaacaacaaagtagtgacacaacttctcctaaattaattttaagaggacaacattaccaaaacaaaaaaatggcgacactttggcggcagagcaataaaaatgcctaa

SEQ ID NO: 226625 - DNA, 939 bp, Klebsiella pneumoniae
atgcagcttgcaaaaaaactatgtgaaaaattctctcttacccctgtgaagctttttatactctccacaaaagctccaaaaaaatatcgtgtttattatatacctaagcgaacttctggcttcagagcaattgcacaaccaactaaagagttgaaggaaattcagcgatttttggtttcagaactggagcctattttacccattcattcttcagcaatggcttatagatgtggcattagcataaaaaacaatgcggaaaaacataagaataattcttttatattgaaaatggattttcagaactttttcaataaaatcaagcccggtattttttttgagaaatttgataatctcgatattcaatgcaatagtcatgatagatatttactgcataattttttgttttggaagcctggacaaaaaagaagtgttacgcatatattaagtgttggtgcacctagttcaccattcattagtaattttgttatgtttgatttcgattcagctataagtgagtggtgtgctaaattcgatattgtttatactcgttatgctgatgatataactttttcgacgtcaagaaaggggattttatttagtgttcctaagatcgtgaaaaatatgcttgcagagtatgcgtctggtattactctcaatgaagcaaaaactatttttacatctaaagctcacaatagacatgtaactggcgtaactatcaccactgatggtaaattatctataggcagaaagaaaaagaagtatttatattcacttgtttttaaatataccaaaggtgagttaacaaacgaagagattttatatgcaaaaggcttgatggcttactgcatacatatcgaaaggaacataataactagattgaaaaagaaatatggtgcggaagtaattaatcaattccttaaggagacaggagatgaatga

SEQ ID NO: 226626 - DNA, 1632 bp, Klebsiella pneumoniae
atgaatgattcaagaaaaagactagataatattttttcagaatttattaatttggttgataatagtgattcagaagatcaggtggtttattcacctttgttggaattgttaaatgatgccttaaataatgacaacctatacttaaaaaaattagcaatagtagattataaaagattgagggatttaatagtaaatcttgaagatgaccttactgttttcgtggcagataacggatacggtaaaacgactatacttgatgcaatcgcaatatcattaagttggcttcgttctaatatacaaaaaaaagataaaccaggaacatatattagagaggttgatataaacaactcgaaggatgcactatatgcatctattgcggcaacatttaaagtacaagagctgaacgcaaatgttcttgtaacaaatgtaaaagacggtgtatctttcaaacgtagtaatgatttacaagagattaaatcattagcaacaatgtatcgttatgttaatacgtttttagagaattctagtttaccagtaatggcatattattctatagtccgttcggttgttggtggaggagttgataataaaagaaaaaataataaaaataaattatcttggtcaaagttcgatgtttatgatgatttcatgttcgacagaaatgatttcggtgaattcctgaattggcttatatttttatctaataaatcagctcatgagaatgcggctgcacttgataatccggagtcacttataaaggaaatagaaagtattgataataccattaaacaattaagtgttgtttctaacattgatgctgatattattagtcaattaaaaaatagtcgtgatgaaaaacaatttttattaaataagattaacagtgcaagccgtttcagtgcatcgaatttttacagaaatgtgattaatactatattgaagtttttacctgagtttgatgacattaaccttgtttacagtgagagtgatgttaagcttgttctcaccaagaaaggtattgagttagacgctcaacaactttcgcaaggcgagaaaactatacttactttagttggtgatttatctagaagactttctcttctaaatccaaacttacagaatccatttgaagggaaaggtattgttttaattgatgaaattgatttacatcttcatcctgcatggcagcagagaattattgagcgtttattaaccacttttcctaatatacaatttatactatcaacacatagtccacaggttttatccaccgttccgtctcgaagcataaggattttagaggaagttgaggatgagctcgggatgatttctataaaggctttcaaaccttcttatcaaactaaaggtttaacgaatagcgatgcccttctatatggtatgagaattgacccaatgcctcctgttgttgaagtaaaatggctggatgagtataagcaagcaattgaattagaccaatttgatagcgcttcatctcttaaattacgtcaaaaaataattagtcattttggtgaggaacatcctgtggtcatggaacttaatcagatgatttctctcatggaatttaaacggaaaattaaaaaaaataaaactgatgagggatggcggaaatga

SEQ ID NO: 226627 - DNA, 669 bp, Klebsiella pneumoniae
atgaaatatcttcaaagagaattgccaggtcctgatgtattggctaagtatgattataataatcatacatgggatgatgtatcatcacacgacaaaaaagaaatatggcgtcatttagttcaaatgcagggtaaagtgtgtgcatattgcgagaggaaaatagatttacacaaagaaggtgataaacatattgaacattttaaaagaaaaggcatacatcgcgagttgactttttcttggcctaacctttttggttcatgcggagaacaaaaacggtgtgggttttataaagataaacaaaagtataatgagactgaactgctgaaagtcgatgaaatagatcctgaggatttctttgtttttttatataacggtgatgttattgtgaaggaaggaataagtggtcgaaatcaagtaatggctgaggttactctgcgggtgttcaatttaaatccccaagttggtggggttaaagcagagagaagaaacgtcattgaaaaagacataaatacgataaaaggatatgtcaagattgcaaaagagttgattgaaagtggtgaagatgttgaagaggtaaggcaatgtgttcgtgaggaatactataatcatatttctcaaatggaatttaggactgcaagaaaacatgtttttgacgcatttcttccttga

SEQ ID NO: 226628 - DNA, 762 bp, Klebsiella pneumoniae
atgaaagaaaacttgaatcttcttataaaaaaattaataggaaaggtatttcctgaatttagcaataaggtcacttggtctttaattacggtcggattcggtattcttgcgctaccagcccccacatacttattatttataaacctaataattgacttctataataaaacaaccaattcagacatcaaccttattaagattgatgccattgcaccaagcaatgggattgctttaactttaattttatctggactaatctatcatctagctataaaaggtatccaattatacccagaaatcctaaaagaaaataatgaaaaagaaactcaagaaagaaaaagactttctgatattaatctttatgaaaaatttattgaaatattacctccaacatcgctatcaattgagctattaaaaaaccatgacttcgggaactcctatcataacaacgcagtaaaagactttgataaactggaatatagttggaatcttgcaactcaacattttcacgaccaagagatcgaaagaaaatcagcgcatctttacagtgaaataataaaatttaattatttcatcgcgtgtaagtcgcactatataaatggaaacattttaagtatgcttactgagatagatcgagcaagggatatggaatggctacctcaaacagaagaaaatgttcaaaaagccaatgaatggggatcaactattcatcaactttacattgatttcatatctacatgtaagaataaattagctatataa

SEQ ID NO: 226629 - DNA, 1668 bp, Klebsiella pneumoniae
atgaaaagatcaaaacgatttgcagtactggcccagcgccccgtcaatcaggacgggctgattggcgagtggcctgaagaggggctgatcgccatggacagcccctttgacccggtctcttcagtaaaagtggacaacggtctgatcgtcgagctggacggcaaacgccgggaccagtttgacatgatcgaccggtttatcgccgattacgcgatcaacgttgagcgcacagagcaggcaatgcgcctggaggcggtggaaatagcccgcatgctggtggatattcacgtcagccgggaggagatcattgccatcactaccgccatcacgccggccaaagcggtcgaggtgatggcgcagatgaacgtggtggagatgatgatggcgctgcagaagatgcgtgcccgccggaccccctccaaccagtgccacgtcaccaatctcaaagataatccggtgcagattgccgctgacgccgccgaggccgggatccgcggcttctcagaacaggagaccacggtcggtatcgcgcgctatgcgccgtttaacgccctggcgctgttggtcggttcgcagtgcggccgtcccggcgtgttgacgcagtgctcggtggaagaggccaccgagctggagctgggcatgcgtggcttaaccagctacgccgagacggtgtcggtctacggcaccgaagcggtatttaccgacggcgatgatactccgtggtcaaaggcgttcctcgcctcggcctacgcctcccgcggcttgaaaatgcgctacacctccggcaccggatccgaagcgctgatgggctattcggagagcaagtcgatgctctacctcgaatcgcgctgcatcttcattaccaaaggcgccggggttcagggactgcaaaacggcgcggtgagctgtatcggcatgaccggcgctgtgccgtcgggcattcgggcggtgctggcggaaaacctgatcgcctctatgctcgacctcgaagtggcgtccgccaacgaccagactttctcccactcggatattcgccgcaccgcgcgcaccctgatgcagatgctgccgggcaccgactttattttctccggctacagcgcggtgccgaactacgacaacatgttcgccggctcgaacttcgatgcggaagattttgatgattacaacatcctgcagcgtgacctgatggttgacggcggcctgcgtccggtgaccgaggcggagaccattgccattcgccagaaagcggcgcgggcgatccaggcggttttccgcgagctggggctgccgccaatcgccgacgaggaggtggaggccgccacctacgcgcacggcagcaacgagatgccgccgcgtaacgtggtggaggatctgagtgcggtggaagagatgatgaagcgcaacatcaccggcctcgatattgtcggcgcgctgagccgcagcggctttgaggatatcgccagcaatattctcaatatgctgcgccagcgggtcaccggcgattacctgcagacctcggccattctcgatcggcagtttgaggtggtgagtgcggtcaacgacatcaatgactatcaggggccgggcaccggctatcgcatctctgccgaacgctgggcggagatcaaaaatattccgggcgtggttcagcctgacaccattgaataa

SEQ ID NO: 226630 - DNA, 759 bp, Klebsiella pneumoniae
atgccgttaatagccgggattgatatcggcaacgccaccaccgaggtggcgctggcgtccgacgacccgcaggcgagggcgtttgttgccagcgggatcgtcgcgacgacgggcatgaaagggacgcgggacaatatcgccgggaccctcgccgcgctggagcaggccctggcgaaaacaccgtggtcgatgagcgatgtctctcgcatctatcttaacgaagccgcgccggtgattggcgatgtggcgatggagaccatcaccgagaccattatcaccgaatcgaccatgatcggtcataacccgcagacgccgggcggggtgggcgttggcgtggggacgactatcgccctcgggcggctggcgacgctgccggcggcgcagtatgccgaggggtggatcgtactgattgacgacgccgtcgatttccttgacgccgtgtggtggctcaatgaggcgctcgaccgggggatcaacgtggtggcggcgatcctcaaaaaggacgacggcgtgctggtgaacaaccgcctgcgtaaaaccctgccggtggtagatgaagtgacgctgctggagcaggtccccgagggggtgatggcggcggtggaagtggccgcgccgggccaggtggtgcggccacttccaccgccgccatcaccccatcgcccgcgccctgattggcaaccgttccgcggtggtgctcaagaccccgcagggggacgtgcagtcgcgggtgatcccggcgggcaacctctacattag

SEQ ID NO: 226631 - DNA, 270 bp, Klebsiella pneumoniae
atggatttaaaactgactggaaaagtggctctggtaactggagcccataccggaattggtttcagcatttgtgaagaattggccgtgaatggtgtgcatttagtcatggtggccagacgagaacctgagctgattcttgctgcgaaaaaaatttcagagaaatacggtgtttcggtgctgcctattgccggggatgtgactgatcccaaactaccttctttagtggttgaacaagcggaaaagtttttcagcgtattgatttactggtga

SEQ ID NO: 226632 - DNA, 948 bp, Klebsiella pneumoniae
atgaaaaccttgcccgatctgcaacaaatagaaatattaatactcatagtgaaacatggcagttttcgtcaggccgctaaagcgttaaacctttccccaccggcccttaccgtcgctattaatcatctggaagaaaagttaggcgtgcgcctgctaaatcgctcaacgcgcagtttgtcattaaccgcagtgggtgaggaatttcttaataatataacgccggtggtcaatgattatcgccgggtggtggacagtctgaattatcaccgtctgactccggaaggcgtggtgaaagttaatttaccgcgcattgttattgacctgttttttcaagactattttatcgcctttaaaaacgcctgtcccaatgtgacgctcgaactgtatgccaccgatcggaaagtcaatattatcgagtccggttttgacgccggcattcgctattcgcaggatgtgcccaaagagatgattgccatcccctttggcgagaaactatcgctgatcccggtggccagcccggactatatacgcgaagccggagagcccgacaccccgcagtcattagttaatttccgctgcattaaccgctgttttcctggtggtgagaagtaccgctgggagtttattggccccagcggcgagcttagcgaggtcgcggttaaaggcgatctggtcgtcgatgccgatagcgcaatgatccaggccgcggagagcggattaggcatcgcctttgtctatcagtcgctggtgacgcagcagctgagcgcgggcagcctggtccatttgttacccgactaccgctatcctgccgaccatttttgcgtctactacccaagccggaaacatattcccgcccccctgcgggcctttatcgcctgggtgatggcgcagaataaaaatatcctcggtcagcagaccgcacgacacggatcgcggccggaagattaa

SEQ ID NO: 226633 - DNA, 132 bp, Klebsiella pneumoniae
atgaccgacgctatcgtgcacgtctgggataaagccgccgagaaagagtgtacgctgcgcaccgccgcctatatcgtggcctgcgagcgcatcctgatggcgcgtaaacaccgcggcatctacccgggctga

SEQ ID NO: 226634 - DNA, 1167 bp, Klebsiella pneumoniae
atggaaaagttatcttacgcatctgaaagtagtacatctccatggaccacctacctgcgccagatcgaccgcgtcgcgccttatctcggcgatcttgcctactgggtggaaaccctgcgccatccgaagcgcgcgctgatcgtcgacattcctgtgcaaatggacgacggcaccatccgccacttcgagggctatcgcgttcagcacaatctgtcgcgcggaccgggtaaaggtggtgttcgctaccatccggatgtcgatcttaacgaagtcatggcactttctgcctggatgaccattaagtgcgccgcggtcaatattccttacggcggggctaaaggcggcatccgcgtcgaccccttctccttgtcggaaggtgaactggagcgtctgacccgccgctacaccagcgaaatcggcattattatcgggccgcagaaagatattccggcgccggacgtcggcaccaatggcaaagtgatggcatggatgatggacacctactccatgaaccatggcaccaccatcaccggcgtggtcaccggcaaaccgatccacctcggcggctccctcggtcgtgaaaaagccaccggacgcggcgtgtttgtcaccggccgggaagttgcccgtcgcgccggtatcgaaattgaaggcgccaaagtggcgctgcagggctttggtaacgtcggtagcgaagcggcccgcctgttcgccggcgtcggcgctcgtatcgtggttattcaggatcataccgcgaccctgtataacgaaggcggaatcgatatggccgccctcaccgcctggcaggcggagaaaaagcagattgccggtttcccgggcgcccaggagatcgataaagacgccttctggaccaccccgatggacatcctgatcccggcggcgctggaagggcaaatcacccgcgagcgcgctgagaagctgacctgcaaactggtgctggaaggggccaacggcccaacctatccggaagcggacgacgtgctggccgagcgcggcgtgatcgtggtgccggacgttatctgcaacgccggcggggtgaccgtcagctactttgagtgggtacaggacatggccagcttcttctggagcgaagaggagatcaacggaccgcattatgaccgacgctatcgtgcacgtctgggataa

SEQ ID NO: 226635 - DNA, 144 bp, Klebsiella pneumoniae
atgattgtccggtcctggagcgagcgtgcctcaatccagaccgtagtgataagggaaatgatatgcgtatggatgcgttttaatgcgaaagccaataaatgtatttattatattgatatcggtgttgatactcaccgggtgtga

SEQ ID NO: 226636 - DNA, 2544 bp, Klebsiella pneumoniae
atgtcatcagaaaaaccatcacaaagcataaatgcacagcctgaggatatccgtaccggcgtcactgtacatggagccaggacgcataacctccgggacgtttccttcacctttccccgtgatgccatggtggtttttaccgggatatccggatcgggtaaatcctccctggcgtttgacacactctacgccgaagcgcagcgacggtttatggagtccgtcgcgccgcacgcgcggcgcctgattgagcaggcttcggcaccagacgtggacggcatagacgggttgccgcctgctgtggccctacagcagagccgggccggcgcgcaggaacgctcaacggtcggcagcctgacgcggatctccgtcaccctcaggctgctgttttcccgtgccggcctccatcccgctgacatcccgttcctgccggcagaggccttctcacccaataatccgcagggcgcttgccctgcctgtcagggcatgggcatggtgcatgaagttaaggccgacgcgcttgtccctgacgggtcgcttagcatccgcgaaggggcaatagcctcctggcccaacggctggcaggcaaaaaacctgcgttcaatccttgattcgctgggctacgacatcgatgccccgtgggatacgctggctgaaaaagatcgggaatggatcctcttcaccgacgaacagccgtcagtgccgatttttatggggctgaatgcggagcagcgccgggaggcgatcgcggcaggtaccgagcccgcctataccggtacctataccagtgccagaaaatatcttcttcagagctattcgggcggtaaggactcagtgaaaaaacgcctctcccgcttcatcaccgtgggaccgtgcaacgaatgccacggcaagcggctcaacagaaatgccctggcttacaccttcgcgggccacgacattgccgaaatgggtgagctgacgataacgcagttaaaggcgttgcttttaccctttgccgaaggccattcgtcgcatatgcctggcgaagccgcgctgcgggaggccgtcatcaggatgacgaccgatatctgcggccgcctcgaccagctcgaaaggctgggcctcggccacctctctctgggtcgccggactaccatgctctcgtccggtgagctgcagcgtatccgactggccacgcagcttatctcccgtctgtttggcgtgatctacgtgctcgacgagcccgcggccggcctgcatccggaagatgttcgcgccctcctccaatccctgcgtctgcttctggaggccggtaactcgctggttattgtcgaacataatctggacgttatcgccgaagccgactggctcacggaggtggggccgggccccgggcgcttgggtggtgagatcgtttataacggcgcgccatccgggatggcacggatttcccgctcgcctaccgcaggctacctcttcgacaaacaccgtccgggcctgcgccggcgtcgacttcccgaacgctggctggagcttgagcaaatcacctgcaataacattcacgggctggatgtccgcatccctcttgaacggatgaccgccatcaccggcgtatccggctcgggcaagtccacccttctggcccgggtgctcccggcgttgcttcagcgactagacaaaaccccggaggatgatgagtcagaggaagacaacctggtgccggaggtacagggtaagatcacggcaggcgggacctccctgaaacgtctggttcgcatcgaccagaaacccatcgggcgcacaccgcgctctaacctggcaacctataccggcttctttgataccgtgcgcaagctatttgccgataccaacgaggcgaaaaagcggaattttgacgccagccgcttttcctttaacctgcccgccggccgctgcccctcctgtgaaggacagggacagatcactatcgaactgatgtttatgcccgaggcaagcgcgccctgctctgcctgcggcggacggcgctacaatgaggaaacgctccaggtccgctggcataacagaacgatagcggacgtgctggacctcaccgttgacgaagccgttgaggtgttcagaaataatgactccatccagcgctccctggccgcgcttgccgcgcttggtctcggatacctgaaactgggacaacccgccaccgaactgtccggcggcgaatgccagcgcattaagctcgcctgggagctgcagcgcgtacagcggggtaaaacgctctatctgctggacgagccctccacggggttgcatccggcggatatggacaagctgatgcgggttctcgacaggctggttcagcgcggcgatacggtggtcatggcggagcacgatatgcgcattgccgcagaagccgactgggtactcgatctcggtcccggctcgggcgaaaacggcggacgcattgttgcgaccggcacgccggaagaggtcagccgcagtaaacacagcctcaccgcgccctggctggcggccaggctaaaaaaaaggaatggcgatcctgacgagtaa

SEQ ID NO: 226637 - DNA, 141 bp, Klebsiella pneumoniae
atgccccattcagaacgtaacatcatcattaccggcgccgggagcggtattggcgcggcagcggcacgggcattttcagagtcaggggatcgtgctcacctgtttgacctgtcactaaaacaatccaggagccggatatga

SEQ ID NO: 226638 - DNA, 1041 bp, Klebsiella pneumoniae
gtgctgggcagcctgctgctgtcaggctgtgaccagaaaagcatccacaaggatgtgccggtgaacccgctgaccgatattaacacccgcctggcgtttacctgcaaacaccagatcattcctgaggcgtctgctgaaaccgatgtcctgtttaaatatgcccgctggctgcaaaaaaataacctgattaaccgggataaaacggtggatgcggaaattgcgcgactgtatcgcatcgcggcggaaaacgggcattacaaagccagtattaacctgcagaacggtgcgctgcgcgggcgctttgcgctgagcagccatgaacgtctgcgcctgagtcagcaactgattgatgcgaaggtggccgccggctactactttattgccatctatctggagcacggtgcggcaggactggcgcaggacccggagatggcgctgcgttactatcgtaaggcggcagatgaagggaatccccaggcccaggcttatgttggtgaaaaactgtttccggccaaaatggcaccacaagtggccatgcagatgtttcaatgtgccgctgaacagggggaagggaaagcagctaattcgttaggaaatatgcttgcaatttacaaaaaatatccggaggcagttgaggttttccaactgggcgttgcagcaggagattcaacctcagccggtttcctgatgcacggattttccggacctgaaccaacggacaggctgttctatctggcactggagaaagacccggagcgtgcccgtcgttatgagcagataggcgctgtgctggcaaaatactcatgggctcagcctgtcgtcccggaaatcaacgatatcgtgccgctgccgccggcgccgctgccggaatgggacggcaagctgaagtggctggaggaacgggaggccaatatcccgccgccagaacccagcgcagcgctgatagagaaactggcgaaagcgaaacagctgaacccggcaacgggcaggccgttgccgacgtcaccggacttcgagaaggacagcgtggcggccccgtga

SEQ ID NO: 226639 - DNA, 1272 bp, Klebsiella pneumoniae
atgaaacgactcttaattttactatgccttttcctgaccgcctgtgaccagaataatacccacaaggacgcgccgatgaacccgctgaccgatatcaatacccgcctggcgtttacctgtaaacgccagattattcctgaggcatctgctgataccgatgtcctgtttaaatatgcccgctggctgcaaaaaaataacctgattaaccgggataaaacggtggatgcggaaattgcgcgactgtatcgcatcgcggcggaaaacgggcattacaaagccagtattaacctgcagaacggtgcgctgcgcgggcgtttttcgctgagcagcactgaacttttgcgtctgagccaacaactgattgatgcgaaggttgccgccggttattactttattgccatcttcctggagcaaggtgcggcaggactggcgaaggacccggagatggcgctgcgctactatcgtaaggcggcagatgaagggaatccccaggcgcaggcgtatgtgggaaaaaaactcgcgcctgctgatatggccccggatatatcccgtcagatgcgccgttgttccgctgagcaaggggaggggcgtgcagctaatgcattggggaatagccttgcagttgacaaaaaataccaagaggcagtagaggcattccagttgggcgttgcagcaggagattcaggctccgccagtttccttgaacatggatttgcaggcccggaactgaccgacaggctgtactatctggcactggagaaagacccggagcgtgcccgtcgttatgagcagataggcgctgtgctggcgaaatactcatgggcccagcctgtcgtcccggaaatcaacgatatcgtgccgctgccgccggccccgctgccggagtgggacggtaagctgaagtggctggaggaacgggaggccaatatcccgccgccagcgcctgatgcgaccctgatagagaaactggcgaaagcgaaacagctgaacccggcgacgggcaggccgttgccgacgtcaccggactttgagaaggacagcgtggcgcggctgcagtgccgcagcggtgaaccctgcccgcaaagcggctactggcagccggcgtggcggccccgtgaagggatgagcgaacatgccatccgttacttccgcgagggagacatcatgccggtggagaaggtgaccttcgttcggccacgtccctggccgctgcgcgacagactggtcgtggaggagcaggagacggtgtggcgccgggtcggcgaggcataa

SEQ ID NO: 226640 - DNA, 1872 bp, Klebsiella pneumoniae
atgactcaggaagacattattaccccgattgccacggttgccacccgtcaatgtatgatcacctctccctggtttgtgcagaatacagaatactcaccgatgccggcgacctataagccgctggtaaacggggaagaggcgtttgctgccgtttatcatgccatcatgaatgcacagaaaacggtggatattatttgctggggatttcagccttcgatgtactttatccgtgatggtcagtcgttgtgtatcggcgaattactttgcaagattgcggaaacaaaaaaagtccaggtgcgtattctgggctgggaaatgccctgtaatgccgcaggtgtgggaggagaggccaatttaccggggaagggagtcattcgttataaggaccggcaaggccagagtactacggatgaacgttatgcctatgaccgacaatggttccgtcagtattctctgtcaggggaatggtccgatcatcagttaaaaaagggacaggcggggatagcggaaattgctgccgcacccatagcgcaacgacaagaaaaattaagctcactttctcctttgtttgtcgggcgtgggtttaatttcctggagagagctgaaattgcctatcgcgctgcgaatatggcgcttgatccggatatcagccctgacacgatgcttactcttgcgggtaccgtgacccatcatcaaaaaacggtgctggttgactacgaactgccggagtctgcggttggttttgttatgggtcacaacatgcttgatgagtactgggatacggataaacattcagcactgtttcgcccgggcaacaatatggatccccgcttaggcgctaacggtaagctgccgcggcaggatatttccagtcgggtaaccggcccgattctggagcatctgcatcataattttgccatggcgtgggagaaggaaaccggtcaggatctgctgactatccgtgatagcgtgtccatcgcgaaaaagctgaaactgcgtgcgctacacggcacgccggtgatggcgcaactgttgcgcactcaggcgcaggcaggaaagcatgatattgaaacgctttatctgcaggccgtaaataatgcaacgcagtttatctatatcgaaaatcagtattttcgctggccgccgctggcagagttaataaatcaggttgcggaaagacagagtaaagtggggcgagaactgcatctgtttgttgtgactaacgtaaccgatgaaggcattggggcgggtacggtgaatacccagcggatgcttgaggtgctgggtcaggcaaacattatccctgaagtgactaaactgcgtaaggtcggacaactcagcaacgcaacgttcggtggttctgtgggttatatcgaccccggagatatcaataaacgtaaccgcgagatgagtgagaaaattgctgattttaaaaagaaggccgatgaaattcagagcagtgaaatcctgccggaggaacgccccggactgaaggttcatatctgctcgctggtggctccggactcaccaccggaggaatgggtgccggtatatattcactcgaagctgatgattgtgaatgatgtatttaccacccacggttcagcgaatatcaacacgcgcagtatgcaggtggacagtgaaatgaatattgcccatgaatgggccagcgtgacgcgggatttacgacggcggttatggaatatgcatactaacggacgaggggggcaggatgatgcgaaggatgcttttaaggcctggggtgacctactggataaaaacgagagccatcaggattccaagaaagaacaacctgaggcttctctgattaagttttattataacaagtcaacgatgagcgatctggactga

SEQ ID NO: 226641 - DNA, 1281 bp, Klebsiella pneumoniae
atgaaagggataaagacatggatagtgctgggcagcctgctgctgtcaggctgtgaccagaaaagcgcccataaggaggcatcatcagagccgctgagcgatataagcgccgccatggtgtttacctgtaaacaccagattattcctgaggcgtctgctgataccgatgtcctgtttaaatatgcccgctggctgcagaaaaataacctgctgaagcaggacaagagcgtcgatgcgcaaaccgaacgactgtaccggatagcggcggagaacgggcactataaggccagcattaacctgcagaacggtgcactgcgcgggcagttttcgctgagcagccatgagcagttccggctgagccagcagctgatcgccgccggggtggcgaccggttactacctgaccgctatctatcttgaacggggcgtcgcgggactgcagcaggatcccgagcttgccctgcggtattaccgtaaggcggcggatgagggcaatccgcaggcgcaggcatatgtggggggtaagctggcgccggtggacagggcgcccgatattgcacgccagatgcggcgctgtgccgcggaacagggagaggggaaggcggcggtaatgctgggggttaacttacagggcggaggtcattatcggagagcaatagaagctttccaaatggggattgcagctggtgatgagagctcagcgagtttcttagaacatggatttagtggtccagaattcactgatgaactgtattacctagcccagcagaaagatcctgagcgagccagacgctacgagcaaataggtgatgttctgggacgttattcctacgccagccccacggtcctggaaattaacgatatcgtaccgctgcccccggcgccgctgccggagtgggacggtaagctgaagtggctggaggaatgggaggccaatatcccgccgccagcgcctgatgcgactctgatagagaaactggcgaaagcgaaacagctgaacccggcaacgggcaggccgctgccgacgtcaccggactttgagaaggacagcgtggcgcggctgcagtgccgcagcggcgagccctgcccgcaaagcggctactggcagccggcgtggcggccccgtgaagggatgagcgaacatgccatccgttacttccgcgagggagacatcatgccggtggagaaggtgaccttcgttcgcccgcgtccctggccgctgcgcgacagactggtcgtggaagcacaggagacggtgtggcgccgggtcggcgaggcataa

SEQ ID NO: 226642 - DNA, 1275 bp, Klebsiella pneumoniae
atgcgccagttaatattaattgtgatactgataacttgtatccagcacagcgcatcgtctgctaaaaaggacttatttgtgaatcccctttccgatactcatgccgccctggcgtttacctgcgcacaccagattattcctgaggcgtctgctgataccgatgtcctgtttaaatatgcccgctggctgcagaaaaataacctgctgaagcaggacaaaagcgtcgatgcgcaaaccgaacgactgtaccggatagcggcggagaacgggcactataaggccagcattaatctgcagaacggtgcactgcgcgggcagttttcgctgagcagccatgagcagttccggctgagccagcaactgatcgctgccggggtggcgaccgggtactatctgaccgctatttatctggaacggggcgtcgcggggctgcagcaggatccggcgcttgccctgcggtattaccgcaaggcggcggacgagggcaatccgcaggcgcaggcatatgtgggggataagctggcgccggtggacagggcgcccgatattgcacgccagatgctacgttgtgctgctgaacagggtgatggtaaagcggcaggtgagcttggcattgatatgaaaatcaacaagcggtatcaggatgcgcttgaagctttccagttaggtgtggcggctggagacaccacctcagcgcttgctttaagtcatgggtttgatggccccgaatcttctgatgaactgtattatctggctcagcagaaggatccggaacgtgcccggcgctataaactgataacgaagatcctgagcaattattcctacgccagccccacggtcctggaaattaacgatatcgtaccgctgcccccggcgccgctgccggaatgggacggtaagctgaagtggctggaggaacgtgaggccaatatcccgccgccagcgcctgatgcgattctgatagagaaactggcgaaagcgaaacagctgaacccggcaacgggcaggccgctgccgacgtcaccggactttgagaaggacagcgtggcgcggctgcagtgccgcagcggcgagccctgcccgcaaagcggctactggcagccggcgtggcggccccgtgaagggatgagcgaacatgccatccgttacttccgcgagggagacatcatgccggtggagaaggtaaccttcgttcggccacgtccctggccactgcgtgacagactggtcgtggaggagcaggagacggtgtggcgccgtgtcggtgaggcgtaa

SEQ ID NO: 226643 - DNA, 1878 bp, Klebsiella pneumoniae
atgagtcacaatgatattgttaccccggttgctacggttgataccagccaatgtatgatcacctcgccctggtttgttcagaatacggaatacccaccggcagtggcaacgtataagccgctggtaaacggcgaggaggcctttgcggcggtatatcgagccatcgaaaaggcacaaaaatcggtggatattatctgctgggggtttcaaccatccatgtattttattcgtgacggacaggcgctgcgcatcggggaattgctatgtctgcttgcggaaaaacaggttcaggtgcgtatactggggtgggaggcgccctttaataccgccggggttgtcggcgaggcaaaccttcccggaaaggggatcctgcatcttcaggatcgcgccgggcagagtgcgacagacgaacaatatgcttttgaccgcgattggtttacccgtcattcatatagtgacgatctgctggattccagcaactttttagccagcacaatcaataagcagttcaatcagtggactgtcaatcccctatttgtgggccgcgggtttaataaagtagaacgtgcggaaatcgcctggcgggcgagatatcaggctctcgataaagggctcagtgccagcgcggtggggataatgacgctagcgccgtcccaccatcagaaaacggtgctggtggattatgaattacctgaaagcgccatcggttttgtcatgggacataatatgctcgatgagtattgggataccgatgcgcactcttcccagaatcggttcgggggcccggccccctggggacctgatcaaggcgctcgcggctttttaccccggcaggatatttccagtcaggtgacgggaaccattcttgaacatctgcacgaaaattttgcccaagcatggtgtaaggaaaccggggaggaccttatcaaaaagcgtcaggcccttgagatggcgaaacgccttaaaccgcggaaagagtgtggtaccctgatacttgcccagctcctgcgcacgcagccgcaggagaataaacgtgatatcgaaaaactctatctgcaggcagtcaacaatagcacacagtttatctatattgagaaccagtactttcgttggccaccgttggcggaagttataaaaaaagcggcgcacgtgcagattgataaaggacgaacgccagaaaaagacggatcgttacatttatttgttatcaccaatgtcacggaaggggggattggggcgggtacggtaaatacccagcgtatgctggaaagcctggggcgcgccaatacgattccaggcgtgacccggtcccgaatgatagagaagatcagggaggaagatccaggcaaattcgcctctctcgcctggtcccgcaatccggccacccaggcgcagattaatgaagagtttatccgccggctgaaagaatatgaagcaaagctaaaacaagcagaagagttaaaagatagcgatattccaatggtaccaatacccggcctgaaaatacatatctgctcactggtggctcaggactctcccgtggataactggatgccagtttatatccactccaagctgatgatcattaatgacgttttcacaacacatggttcggcgaatattaatacccgcagtatgcaggtggacagtgaaatgaatattgcacatgagtggggcagtgtgacccgggatttaaggcgacgtctgtgggggttgcataccagcgggaaaggcgtgcaggacaatgcttctgatgcgtttgatgcatgggaatatattctaagtgaaaataaaaaacgccagcaaaaccatcaaaagcctattgccccgctgattgcgttttattacgccaaaaacgaacttaaggatctggattga

SEQ ID NO: 226644 - DNA, 2592 bp, Klebsiella pneumoniae
atgccgggcaacctcattgtcaacggcagttttgagcgcggcgcggcgggctttaccggctggagcagtaccgcgacggtggccgatttacaggttccgcattcgggtaacaaggcgctgaaaatgtccgccggccagtcgaacctggtcgggcaggaaatcagtatcacgcagggtcgtacctaccgcatgggggtatgggcgaagcaggacccgggaaccacgattaaagatgcgggtaacacgaagtttcgtgtggccgacagcactggcctgctggtcggctcaaactacggaccgtttagttctggctggcaactggtaacgtttgactggaaagccacgaagaccacgacggccagtttccagctgacgaccttcctcagcgcgggggcaatgtatttcgatgatttccatgtcctcgatgttacggatgaaaaggatatcgcagctaatgccggggccatttctcagatgaatacccgcgtcaccgctgctgaaggggctatcaccacccaggcgcagcagctgacgaaactcagcggcgatctggccgtcacgaatgcggcggtcagtaagaaggccgagcaaagcgctgtcaccgggttgaccacccggatgacgtctgccgagggtaaactggattcgcagtcgcagcagctcaccagtctgcagaacagcctgaccacgatgaatactgagctgggtaaaaaggctgacacgtccgcggtgagttcactgaccggtcgcgtaagccaggtggaaaacaccatcaccagccagtcgcagagcatcacgtcgctgaccagcaccatcaataccatccgcactcagggagctaatccgtgggttgacggtacgtttgaaagctacagcgatggccaggtgctgggcgggaacggcacagccgttgtggtggcgtctcagaaattcaccggcaataagagcctgcaggtgagtcgaggagcgaacaataacggcaacagcgataaacagcttgggagctggcagtcagtccgtgaggatgcgaaattccggtttgagttctgggctatgatgccggcggatcaggcgccctcctccgggtggacaacgctggtcggcattaactcactgaatgctgccggtcaaaactcctggcagtcggcggtcactgtcagcgaagccgctcttggtgcgcgtgataagtgggtgaaatttacgggtattgccagtaacaacgggggtgggagaacacgcgcagtggtctggatctctacccgtggcgcctccggcagcggcacccccggttattcgctgtatatcgacgatctggttatcacggatgttaccgatgcgaaagctgcacaggatgcctctgacgcgacggcgagtgccgtgagcggtctgacggctcgcgtaacggatgctgaagggaaaatcaccgcccaggcgcagcagcagacggcactggccacgaaagtggataatgccaactcccgcgtcgataacatggcgaagacgctaagcgacagccagagcacacaggccagcctgaatacctcgcttcagtcgcagattgacgcgcaggcggccgccaacatcaaaaaccagacgacgctggacaacacgattaaatcggtggccagtatcaccagtacccagcagacgcatgcaacggcactggaggcgctggcaacgcagcagacgaccctgacatccagtgtcggggatctcagcgcttccgttcagaacaccgccaaaaccgtggcggatgtgaatggtacggtgagttcgctgtggtcgatgaaggttgagacggttaacgggaagaatgttggcgcggggattacgctgggcagcaatggtgaaacgagcgacatgatcctctacgctgaccgcttctcgctgtttaaccgtactaatgcgacggctgttccggtgatggttgccgaaggcaatgagctgtatatcgatacggcacgtatcaaaaacagttccctgacctctgccaaaatcgcggacggttccattacgaacgcgaagatcggcaacgagatccgctcgaataactttgttgacgggtcgcaaggctggcgtatcgccaaggatggctcttcgcagttcaataacgtgatcgttcgtggcagggtcgaagcgaatagcggcgtgttccgtggcactgtccaggcggatgcgttcatcggtgacattgcggtggcaaaaggttacgacagcctgaccttccgccgcaaccagacggtacagcggaacggtgcgtatcagaacagggggtatagcatgacagtggttctggcctgcaccctggtgtgccagacctatgggacgggcagtggcctggggtatacctctgatattacgttcaacattggtgggcaggaggtaatccgccgtatcttcgtcgatgccggtaatatcacagctggcaccacggcctttgaattgcggtttgccgcgcgcctggatgctgactacaacaatgtcggcttctttatcaaggctacaggtcgaaatgccgcgattgattacacctgcacagtcgagaacatcaccgcaaccgccttccgaacggacagcagttcatttagctaa

SEQ ID NO: 226645 - DNA, 369 bp, Klebsiella pneumoniae
atgtccgttactagtcaagatttcataagttttgctaccatgtgcattcagcgtaatgacgaaattggataccgcaatgctattggtagagcatattatggcgcttatcaccatactattgccaaattagtcaatggtcctaagcaaagccatgcagaccttattacatatttacaaggcgaagcgtggcaggtgcctttagaggcgttcgacaagaaaaaaatgatcgctctcagccatgttttgtttgcaatgaagtctcaaagaacactaagtgactataagttaaatttaaatattgataaagccaaagcagacttggctatgactaatgcagctaacgcattaaaaatagtagactctttatag

SEQ ID NO: 226646 - DNA, 798 bp, Klebsiella pneumoniae
atgatcgcagcggtacctaaatctcttgagtttggaaacaaactcgttgatatcctttcctctaggcaaacgctgggggagatggagctacagcgctgggtccgtgacattaaacaacttaaagattatgcgaatgaatcctatttgttagctatggcctatgctgctggtggcaaaaaggaaaaggcaatcctatactttgatagatctttgtctaacgatgaagacggtgtaagcgcaactaattacatcacttttatagcgtcagaaggcaatgttgaagactatcttaaagtatcgactaaacttgccgaaatgtatgtatccagagaattatatggctatgcatactatatgcatcttcattgtggaaagtttaatgaagcaattgattatgcaaaaaaattcatcaaagttagcccgaatggagaggatgagtctatgcaacagcaagtagattacctcgaaagaagcctcaaagattttaaagagttggcaagcatttctgatgccaaatttgaactcattgctggctctatggctaaagttatgcgcaagcacaaagctacgtcagcgcttcatttgttccatactgttcgtgaagaatcagtaaatgcatatgtaattacgatttcggaaattgatttagaagaaatcggacagatgaattatgaattggcttttgaaatggctgaacacgatgaattacttggtatgcatgtgagtgcttggtttgaaatggaacttggcgctgaagcggaagaagagtctgtgctaaattatatggataaaaaataa

SEQ ID NO: 226647 - DNA, 1071 bp, Klebsiella pneumoniae
atggctttatcaaatagtggaatgaaatttgaaacgacgatgcctgacaagtaccgatctgctcacaaactttgttttttaatgcatgatattatgctacaggcattgaaatctggagaatcttcaggggtttttatgacatctctaaaaatctctagtgaagatgaggagtcacttaagttagccaaaaatatttttgattggttggatgtaaaggaacgctctaaagataaaattaaaataattagggcgacagttcttaaggccgttttgtctgatgcactacactgtatatatgaagctctaaaatgctcagagaaaggaaaattaaacattacttacatgttaataagaaaaccaattcaagaaactctatatttgattgaatctctgtttatggatgatgctgaattttcgaaatctttatcagaaagtcctttaactcttcgtcctaagaatgcagggggaatcgataatcatataggtcgagtttctaatgtgttgaaattattaggggatgaccctaggtttaatgctggatatatagcaaggctgagatatgacaaaaattctgaagataattttgatggaatatgtaatctcgctatgcatctttttaccgagcacaaagctatcagaactgaaaaacttaatgtaaattttatattttcagattggaatggtaaaatttcacagtggtcatatttatatagcaggctaccatacattctttattatttctacaccattgtcgagagcatcctttcaaaaatcgctaagacccctgatagatatatttttgatatgcaaagacggattatgtcttcagtatgtctgtggtgggatgatgtaagtgaagattatcagaatgatgagttgttggaattttatgctttatcaaaaatatggcttgatcgtcattgcatagaaaatggattcaaagaaccaaataataaagatctaatacggatggcgaataatggtgcgtttcctaatgaaagtgaagagtcagtgaagcaaagataccatgactttacttctctgcatgaggagactctccctaaaatttaa

SEQ ID NO: 226648 - DNA, 1434 bp, Klebsiella pneumoniae
atgattatgaatgaatctggtttcttttggttgtctaatctttctgagggtgaacttgctgttccggggcaattgacgattgatgataaaggatttattgaacttgaacttcatcaaagctttgcaggcagacttggagctgaagcaatatttggtgccgttggaattgataagggaatttatattttaggtattttgaaaaaatcagggaaatacattattttaaaaagcatcagaaccaatggggcacaggttggacatatttcatatgagaaattcgtggctgagatttgcctaatttctaatgaggaaataaaaacggagaaattcaagtcaattagaatacctctaagcaacttgaatgattggtctcacccaggaacattcgaatatttaaataacacagaattaacctcagcaataaatattaaattgaatgaggataactcctggcccatgaatggggggactcttaaacttgtaaatcatctagaagggaaaatacccaatcgtcaaacggctaagctcgacgttagcattacatcatattttatctatgaactaaaccaaagtactgaaattgatgacctcttagataagtatcatggactccaggacttattaatgattctaatcaacgaccaagcatcggttggttggccattgttatactggggagataatgaagtactccatacagtagagtgttatttcagaagagatcacctaacggagaacgcatttaaatggatcgacgtaacagttccgttccctagaattagggacaaattcggatcaatggttactacgtggtatgaaaaaaggaaaactcttggtccaggcataaatctctatttgagcatccttagaaacaaaagcacttatgcagagaatgtttttgtcaacatggtttggggactagaggcattagacagaagaaatgatttaaattctaatgtaatggttaagtcaaaacttgaagagaaaatacaacgaatatctgatgtaattaaagaaaacaaaatactcacatcagatgatcgtagatggctaatgaatgcattatcgagaaataatgaacgctcacttgctgaaaggctttatgacacgttccttcatcttaatctagctattgaaccaacattactgagagcgttttgtgattcctgtgcacatctcagaaatgatttatcacatcatggaggagaaagaacccctggtgaatatgataagtttatagcgaaacttattccgcatatgcgcgcactttccactttatatttacttgttatgctggatatacttcaaatagaaaatgaagagttaaagaaaatcctttattactaccctggatgttataagcatagaaatgctttaagttctgttggtttgattcagggcatttcctcacgtccgaaacttgatatgcagtaa

SEQ ID NO: 226649 - DNA, 1209 bp, Klebsiella pneumoniae
atgaatgaacgtgaactttcccttatcagggctcttggagaggagttctcccaggcgctaagagagcttcgtgagtccttcgacataagcctcaatgactatcagcagagaactgaagaaaaactgaccctcctatctcaggaggttatgtccctaaaggataccacggcacttaacattacagcacaactggctgatgcagtggcatccatcccggctccgaaaatccctgaattgccggatattggcgctatggtcagcgaggcggtggcggctttacctctgccacaggacggcaagagcgtgacgccggaagacgtgcgaccgttgcttcaggagttagtcaccgcggcggttggtgaaattccggtcccgcgtgacggcaaagactacgatccggcagtgctgaagcaggcggtggaggatgcggtcgccgcgttaccgccggcgcaggacggcaagagcgtgacgccggaagacgtgcgaccgttgctgcaggagttagttaccgcggcggttggtgaaattccggtcccgcgtgacggcaaagactacgatccggcagtgctgaagcaggcggtggaggatgcggtcgccgcgttaccgccggcgcaggacggcaagagcgtgacgccggaagacgtgcgaccgttgctgcaggagttagttaccgcggcggttggtgaaattccggtcccgcgtgacggcaaagactacgatccggcagtgctgaagcaggcggtggacgatgcggtcgccgcgttaccgccggcacaggacggacgggatgccttacacctggaaatacagcctttcattgatgaaggaaagagctatacgcgcggctcttatgccacccacaacggaggcctctggcgtgcttacgagaaaacccatggtatgcgtggctgggaatgcatcgtcgatggcgtatcagatgttgatataagcatgaatggtcaacgcaattttattgtcaccgtcaaccgtgccagcggtgccagtgagaaaaaatcttttgatataccgactatggtgtaccgcggcgtattcaaatcgggcgatgagtacctgcctggcgatacggttacatggggtggttcactctggcactgtgacgaacagacgcaggataagccgggtgaaactggctctaaaggctggactctggccgccaagcgcgggcgggatgggaggggtaaagcatga

SEQ ID NO: 226650 - DNA, 852 bp, Klebsiella pneumoniae
atgagtaaaggaattcctcgcggttcaaaagccctagcggtgctgaataggttcaaaagagttaacgctatcctgtatgtcgaaggaccaactgatcgcgttttttggaaaactcttttagactccaaaggagtgaatggtatatctattgaaattgcgggaagctgtacaattattgatgattacatcgataaaatattgaatgaagatcttgaaattttcgtagctagagataaggattataaatatacattgaataaaatacctcaacatgaaagggtactgtttacctttggtcatagcattgagaacaccttagtttacaacgatgccatcgtaagtataggaaaatcaattggtggcgaagaagaatactgttcattatcagtccatcattggcatgagtatattataaatcaactacaaccattagttattcgtgagtttgcaaatgaggctattggttcaggcctgaatatattaggtgatcatggagatagtttatttggcaaaacatggaatagtgataagtttcctgcagaaagaatattaaaaaaaatagaagaaatagacaaaataatttcaccccatgatatacaagtagctacaagtgttgtagaggagagatgcaatgatatttattgctatattaggggccattttcttttcagtttagcactaaaatttgttaaagaaatgatgatcacactgctgaataaaaagtcagttaatgtatctaatgactccttgatgacaatgctttcaatggcatttagaggtgctatcgattcaggaatgcatcctcataaagaacattatatgaccgaacttgataaattaataataaattga

SEQ ID NO: 226651 - DNA, 1317 bp, Klebsiella pneumoniae
atgtatacattagtaaatgcaaaaataaccggagtctggggatggaacaatattgaaactaacttctatgaagatgtaagcattttcattggggcaaacggcacagggaaaacaacattcataaatattcttgttgcaattttaagagttgatgtggctgcactagaggaattatggttcgatagtgccacattgatttttgaaggttattttgacggtaaaaagaagagaagaacattaactatcacaagacaatcagagaataaacacagtgacgaatctgtttcttataaaatcagtagagttgtatatgaccttccatttttaaatggcagaaatgttcgttcaattcacgttcaaagacgaatactacctgtagtggaactaattaaaggtaaactacaagaaattatatctttttcaagtttatctgttagtcgtgcaggcattagcgatattgatgatctagagtatttagattcaagaaaggatctaaatcaagtgaactccatcgatagtattcttacagaattattaaacaagctaaaagtttatcagctaaagaaagctcaagaatcaaaagaaattgctcgagagtttcaagaagaggttttaatttcagtgctttacgatgaggatattgactcatcaattggtttgaatgaactagctcaaactgattttcaagaagaaatgaaaaatttcaccaactcttataaccagctgggcatccaaagtactctaagaaaaggtaaagctaaagaactgatcagtaaacatttcaatgcaattcaggaaagcgtaacatatttacaggaagccatggcagaaaataaaggagtttttgacgttgacaaaattttcgcctttccactcttaaaaagaacaaaaaaaatattacaggcaggtaagtctgctgaaaggagaagaaaaagactatttagaccccttgacatttataaaaaagaacttcaaaaatactttaatggaaaaacaataaatttattatcagatgggggtttatatttcaaagacacaaatagaaatagtagtgaatatgatttcaaaaaactttcatctggtgaaaaacagatcctaatattattaaccgaatcacttcttcaggatggtgaatctaaattattcattgccgacgaacctgagctttctttacatatcgattggcaaagtaaaatattaccatcaataagaatgttaaacagaagcgctcaaattattgtagcaacgcactccccagaagtcgcaggtgaatacccagaaaatattctagatatggaagatatctgctatgagtaa

SEQ ID NO: 226652 - DNA, 1374 bp, Klebsiella pneumoniae
atgatgaagaatcaaaaaaaaccacatggtgaaaatgtgattccagcgggctacaagcggacggaagtaggggtaattcccaatgattgggatgaaataaacctgaattcaatcgtttctggcctagaagctggggtaagcgttaactctatcgatcagattgatgcctactcgcatggaaagcacatacttaaaacatcatgtgtatccaatggacattttgatggatatgaaaaaaaatctatcctgccaactgatgtaaagagggctaaatgctcccctgttaaaggagggataattgttagtcggatgaatacacccgccttggttggggaggttgggtatgttgcggaaagcgatctagatagttttttgcctgatcgattgtggcaaatgaaattcaaaaaggatgttgctcacaaccctaagtggttggctacattacttagcttccctcctttttcaaaaaaaataaaagacactgccactggcacaagtggaagcatgaaaaacatctcgaagagtgcttttttgtctttgaaacttccttggccatcattaaaagaacagaatattatcggtacagctctctccgatgccgatgctctaattactgcacttgggcagttgatcgccaaaaaaaatgctatcaaaaatgccaccatgcaacaattacttactggtcgcactcgcctaccacatttttccgaaaatcctgatgggtcacttaaaaggtatattaatagtgaattggggatgattcctgaagattgggaagtgaaaccatttggtgagttgtttgaatcattacctcatcgtcggactctgcgaaaagaagacattgtttcttttgtcggaatgcaagatgtcagtgaaaatgctcaactaattaagcaaacacaactctcttttagtgaagtgagaagtggatttacttatttcgaaagaggtgatgtcctagttgcgaagataaccccatgttttgaaaatggtaaaggttgtcacaccgattcattgctgactgatgttggcttcggaagcacagaatttcatgtacttagggctaaaagctcctcttattcaaaattcatttattactggacaataaataataatttgcggactgttttagagtctgagatggttggtagcgctggccatcgaagagttccgttttcagctattcagaattatttaattccgtgccctaatactaagctcgaacaaaaggcaatcgccaccatcctctcagatatggatgctgagctcacaacgctagaacgaaaactcgccaagatccgcgatataaaacagggcatgatgcagcagctgctgacaggccgtagccgtttaccgttggaacagcagccatga

SEQ ID NO: 226653 - DNA, 390 bp, Klebsiella pneumoniae
atgtttgccaaatcctttctcgctctcgacggtaacggcggtctgaacggtgcacgtaccgcgcagatagccccttatgatagcgatacctaccacctctgcggttgtgcgctgcaatgccatcctgagtacaacaacgaatgcccgtggttcgaacacaccgaaacgggtctcaccagcaatggtcgacagcattgtccctataccaatccggatgccagtgaacagcaactggtcagacggttgcagcgcctcctccctgatgccactcccagggtcggtaaagacgactggcaatgcacgcaatgcgagagcaattactatggtgaacgttactgcctaacctgtcgtaccagagacttcagccagtcaaaatgggtgacatcatga

SEQ ID NO: 226654 - DNA, 573 bp, Klebsiella pneumoniae
atgcaaaacaaaccgcaatgggagccagactggtatctggaatctcttctgaacatccatattgacgaaatggttgatcgctatgcctgcctgcgggcactccgaatcgacttgttctatcagcatcacaccgctaagtactacctgcaaaaccacaatcatcttgaatgggatctccggttactcatggattacatgatgcaaatgggcgcagtcgtgggttatttctgggttatcgaatggacagaagaccatcactaccatgcgcacgtagtcttctgggtagatggtaaccgcagtcggaaggtttatccctgggctgagaaggcccgtgagttctggacgttaattaccgaaggtgacgggggcttccatcgtagtgaatacaaaaaatattacagagccaatatcaatatcccggtgcgttacagcgaaccagacagtatcgacaacatccgacaggtgttggcgtatatgacaaaaattcagcagaaacatggcctgctgctgttcggctgcaacgatgttcctgaacgaccagcaaccgggcgaccacgcaagactgacttctga

SEQ ID NO: 226655 - DNA, 777 bp, Klebsiella pneumoniae
atgatcctgagagaacttaataatgaatttaaaaatacccatgagtacaataagttcgtacgggaaatgaaaaatgggctattatccagtatcgtcccggagactaattttgaatggataaaggactatagctccgcttattttgcatggaatatactttcaaccatgggccctaaggaaatcaatccactagaggttgatttttaccgtgaacggcctccggttattcggcatggcgtattggctattattccagaaacctaccagcatgcacttttagtactctacacctgtttcgatagttgggatgtcgagctaatttttaagatcaaaacactctcttcattaaaaaatatctggattcagcgaaaccgggagttaccagaaccatttaaatggattgaccttaaaaatcataaacaatgtgcatgggcttttaaatatgttatggagcatatcaaacccgattacatgccttcatttatgactgaaatcagacagcaacaggtgattacgtttctcacggccgtgttgtattcctggcctgcccatcccgatactcgacgtctgatgattcaacggatgaaaaaaacgtacaatcagaatgtattccgggaaaacattgttgacaaaaaagtgattaacacctatgtccagaaggacattaaagaaaagctcgatatgcttgcaaagaaaaatggtcgaaaaattaacgaagagctggaagttatcattatgaatgcctggcacgatgccagatatgcagaagataaatag

SEQ ID NO: 226656 - DNA, 876 bp, Klebsiella pneumoniae
atgcaaaaatctgacggccttctggccattgagaagcctctggcttcactgccccatactcttcgcagtctaattcttaaacgccttcgtagtctcacacagtacgagccggttattggcattatgggcaaaagtggggcaggcaaatcgtctctctgcaatgccctattccagggagaagtcacgtcggtcagcgatgtggaggcctgcacccgcgatgtgctgcgcttcaggctccgcaatggcaatcacagcctgatgattgttgatttacctggtgtgggtgaaagcgagcaacgcgatgaagaatacactgcactgtatcgccgcatcctacccgaactagatttagtgttatgggtcatcaaggctgatgatcgggcattgtcagtggatgaacacttctatcgcaaggtgatgctggcgtatcagtaccgggttttgttcgtggttaatcaggtcgacaaggccgaaccctgtcatgaatggtgtaccaccgatagcacgccttcacctgctcagcagttaacgattgagactaagagaatcgcgatgcagcagttgttcctgccgcaccatcctgtctgtgtggtgtcagcccgcacagggtggggcgtggaaacccttgtcgatactatgatgcatagcctgcctgaccgggccaccagtccactgacaacacaactgcatggaaggctctgcaccgagccggtaaaaaagcaggcacgtgagcgctttggtcatgcagttgatgaaatgattggcaatgtggagtcatcatcttttctgccagcgcctgtaagggctgtgattcgaaccgtgcgggaagccgtggtgaccgttgcccgtgccgtctgggacaggattttcttctga

SEQ ID NO: 226657 - DNA, 705 bp, Klebsiella pneumoniae; identical to SEQ ID NO: 93969

SEQ ID NO: 226658 - DNA, 570 bp, Klebsiella pneumoniae
atgaagaaattactgaccacaacggcgctggccgtcagtctctgcgctggcgctgtctttccggcgtctgccgaaactgtcgtgggtaccgtcaaattctggcagtacatgcaggcggatggctggaaatcggccgatggcatggataacgacacgctgaacaacacgctctatcaggccagtgtcattggcaattatccctggaccaggcaattcctgctgcgtcagcgtggtggtggtgcttattttctcgccgacaagaaaacgcataccgtgcgcaagctgaatctgaaacctgccagtggttattactccgacctgacatcggtctatcagggagaagaccaggggaaagggtgttacttcactatcatcgacacccagtatcagctggaactggctgacgaacctcacagcaaccaggtacttgctgcattcccggaaaactgtgtcaacaaacagcagcaggctgccctggcggcgaagcgttctgcctcagagcagaaattgcagcagtgggtagcccaacagagtctggctgagttgtgccgacgaactggcaactgctga

SEQ ID NO: 226659 - DNA, 450 bp, Klebsiella pneumoniae
atgaacaaggtgaaaggcgttatctcagttttcgctctgagcctttgtctgctttcaccggctcaggccgaagaacagcgttacatcagtatccgcaacacagacatggtctgggtgccgggcaatgtctgcgtatggcagtttcgtctggataacggcggaagtggtgaggggttcgggcctctgacgctctccctgcgtctgaaagacaaaggcggaaacacgctggttatggggaatatggcggtggctgcatttggtgagagcgatgcgactcgctctcaggaagcctcgctggagaaccaatgcgtggaaaacgtcagctttgtcgaaatcatgaaggcaacggaagagcgtaatggttaccagattgacctgccactgtctgttttcgacccgcagtattaccaaccgctgcaagtcacggttgtcggaggtaaggcgtcttaa

SEQ ID NO: 226660 - DNA, 492 bp, Klebsiella pneumoniae; identical to SEQ ID NO: 170481

SEQ ID NO: 226661 - DNA, 2472 bp, Klebsiella pneumoniae
atggataactggctggcgctttttgacggacagacccgatattttctggatatcaatgacagttcagtgaagccggatgttctgcgctttcgcggcagcgaagccctgagcgagcccttccggtgggacattgagtttacctccccgcaggcggacattccaccggaacaggtgctgatgaaatatgccaccttccggatgcgtggcggcaaaaatgtccacggcatggtgacccgcctggaatggctgtccacctctcaggaccagtctcactaccggctcacgctcagttcgcgcctggcgctgctgggatacacccggcagtgcgccgtctttcagaaccagtccgtgccggaggtggtggagcaggtgctgcgcaagcacgggctggagggcgctgattttgaattccggctggagcgcacctacccgccgcgtgaaattatcacccagtggcgggaaacggatttgcagttcatccggcgcattctgtctgaggtggggatttactggcgtacggagatggatgacacccgtgagctggatacgtacatttttgccgacagccagctgaactatcagtttgatgtacgcctgccctacagcgaaccatcgggcctgtttgacggcgcggcagagtcggtctgggatgtgcggacctggcacaacatcgccaccggcaccgttgccacgcgggattacaactaccggaccgccgccacgccgatggatgcgacggtcagcgtgcgcagtgatgcggtcaccaccggggagcattaccgctacgccgcaccttatcgtgacgcaggtgatgacgccagcccggagccggaaacggaatccggcgcattttatgcccgccttcatcacgagcgggagctgaaccggtcggcccgcattcatctgttcagcaacgctgcccatctcacacccggacaggtgctggagccgcagggcgatgtcattacggccctggaggaaggcgtcgtcctcaccctggtgacctaccggggagcacgtgattcccgtctgcacgtgtcggtgtggggcatgccttacaccgaacggtactgtttccgtccggcggaaatcccgcgacctgaaatccacggcacgcttccggcgcggactgaaagccgggagaaaaatgatatttacgcgcatctggacgaacaggggcgctaccgggtcaggctggattttgaccgcagcgacagcgaaccgggctacggctacctgtggttgcggatggcgaagccgtatgccggagacacgctgggctggcatacgccgctcattgatggaaccgaagtggcgattgcgtacagcaatggcgatattgacctgccctacatcgcttatgcgctgcacgactctgaacatcccgacctggtgaaccgggacaatcacacccggcacattctcagaactcccgcgaacaacaagctacggatggaagacaaacggggtgaggagcacatcaagctcgccacggaatacggtaagacacagctcaataccgggcatctggtggacgcgcagggacagcgtcgcggtcagggaaccgaactgcgcaccgatgagtggggcacaatccgtgccggtaaggggctgtttgtcagcgcggatgcgcaggcaaaggcgcagggtgaggcgctggacagggacgccgccctgaaagaaatcgacaggcttaaccagcaactgcaacagctggaaatggccgcagagcaggctctggcgctgaaggcggatgttgacagtcagatagagatgtttgagcagcggctgaaaccgctcaatgaagtcgtgctgttctcggccccggaagggatggcgctgaccagcggggagcacctgcagatgacggccacgaaaaatgtcgccattaatgccgggggcgatatcagtgccggtgtcatgggcaatatgacggcgctggccggggaaaagctggggctctttgcccggaccggacagctgagcgtcaaatccggggagggggcggtagaggtccaggcccagaacgccagcctgcggctgtttgcggagaagaaactgacgctgagttcagcgagtgacatctcgtttgccgggaagaagcgtatcacgcttatcggtggcgggagctatctgcgacttgaggccgggaaggtcgagtatggtacgacggcgacgtatatacggaaggtgaagcggacgatgtttgctggtgcaaattcaacaccaacgccatcaatatcaataccattagttgacgatttaatccggaatggattcttcgatgaacaattccgaatcttggatgatagtggtaagcccatggctaatgtcccatattttatctctagcgaaaatggtgaaacatttaaaggtgtcaccgacaatcaaggtttgtgcaaacgcgttttttcaaaagaatcagccaaacttaccgtttggctaggtgtcctggctctggagaggtggtag

SEQ ID NO: 226662 - DNA, 1608 bp, Klebsiella pneumoniae; identical to SEQ ID NO: 219721

SEQ ID NO: 226663 - DNA, 3372 bp, Klebsiella pneumoniae; identical to SEQ ID NO: 219723

SEQ ID NO: 226664 - DNA, 1176 bp, Klebsiella pneumoniae
atgctggacaagaatgtagcagttagtgttttaaacactcaagccctggccagagcgaaaattaacgccgagaattttaaaaatggcatagataaaaagcttaaatatggcgagtcaaaatgtgcccgctatgttaaaaaagcattaatcgctggaggggcatctgcaaaaaattcaggaattgaatcagctaaaaattatggcccatggctgcttgaaaataactttaaagttgtgggtggcgctacaacagtgtgtactggcggtgtattcacaatttctggtcagcaagtgggggatgttgtcgtaatccaggcagcaccacaccatgtgcatggtcatatggcgatgtttaatggtacacactgggtatctgattttgtccaggaaagggggttctatcctgcccagatatatcgtgatcaaaacataccctatacactttatcgttatggcgataataccacatcagagcagaacgccacggctacccaaaaaggaaaaattaaaattgtctggccgatcccttctaataaccggggaagtgagttcaataatcaggaagagatcctctctcatgtcgggggggaatccaccgggcagtatatgattggccgtagcgggatgtggcatggcgggatccatatcacggaagcaacgaccccgtggtgtgctctgagtggcaagtctcctcttgaagcattagatttcccagttccctttaaaggtgagcaggctgtgcgatgcatggctgatggagaagtcgttgcttatcgtgtctgcaaggattatctgacgattgcatgggaatccggcccactgagcttttccggttcgtttgttctggttaaacactttattcaaccgggggagaaggaatccagcgggctgtatttctataccctgtatatgcacctggctccctattcagcctatagtgtcaatcaggcggaaaccaagtggacagtccaggatacgctttctgcctacgatccagaatgggtcatgaccgccagtaccaacaataaaagtatcagtgaaagctatcgcaagggtacgatcccaaaggatctattgttgagtgggataaaacagacagcagcctccataccgttgcatttaataagcgagagtatggccttgttacttttgttagcctctcagaacatgcgttga

SEQ ID NO: 226665 - DNA, 2358 bp, Klebsiella pneumoniae
atgattgatagcttaagcagcctggcgcagaaggcgatggatgaagccctgagcctgtcccgctaccgggttgctgtgcatgaatgcagcgatttcctggatgttctgcgttacagcgcggtggaatccctcagtcagccctggcggtatgacgtggcggtcacctgctcctcggcggatattgcctgtgacacgttactgctgaaacccgcatcatttactttcatgaccccggtgtttgacggcaccccggcgctgccggtccggacggtttatggcgtggtgcagtcgtttcgccggatatccacgtcaaatgacgatacccgttatgctatgacgatcgttccccgcatcgcccttctggactatacgaaagggagtgaaatctatctcaatcagtcagtcactgaagtcgtcgaaaagatactgcgtaaacacggcctggaagggtctgatttcgagttccggctctcccgcgaatatccctcccgggaactcatcactcagtggcgggagaccgatcttgagtttatccagcgcctgctggcggaagtgggcatttactggcgctatgaaatggacagccgtcttgaacaggacgtggtgatttttcaggacagccagcagcagtatgagttcggtgtcatgctgccattacgcaaccaggccgggatgagcgacagcgggcaggagagtatctgggatattcagactgcatataacgtggtgagcggaagggtggccacccgggactacaactactgtgaagcgctacaacctcaggacagtgccgaaagcattttcagcaaggaggggatcaccaccggggaaacctaccattacgcggaacccttcctgacagcaggtgacgctgaaagcgcagagtccggggcatacttcgcccgtctgcgtcacgaacgcattctgaacgcccagtatcacgtcaccgggcattcctccagccctcatctggctcccggtcaggtactggaaacggacggcacgttacccgatgccgtcagggaaggtatcgtcatcaccacggtgcgttccagcggttcacgtaaaagtagtttttctctgacgtttgagggaatcccctacagcgaaactgtctgctggcgcccggcactgctcagtcgcccggtgatatccggctcgcttccggcacgggtggaaagcacacagaaaggtgatacgtactcctggctcgacccggagggccgctatcgtgtgaaactggactttgaccgcaacagtaccgaacagggctatgcgtatctgtggctgcggctggcgaaaccctatgccggtgatacgtacggattccactcaccgcttatcgacggaacggaagtggccgtcgtatttgacggtggagacccggatcgtccctacatcgcttatgccctgcatgattcagagcatccggaccatgttaccagcgagaatcatacgcggaacgtgtggcgcacaccggcgaacaataagctgcggatggaggataagcgccaggaagagcatatcaagctcgcaacggaatatggcaaaacgcagctgaacatggggcatctggtcaacagccagcgtgaaaagcgcggggccggttttgaactgcgtacggacgagcatggcgcagtccgtgcggcaaaagggctgttcctgacggcggatgaacaggccaaagcccaggggccggtactggaaatggcccctgccattaatcagattaaccaggcgaacagccagatgcaggccctgaacagcgccgccgaagccgccggagccctgatctgcgacatcaatacccagataaattttgtgaccgacaaaatcaaagacctccagtctgcggtcctgctggggagtgcgccgcagggggtggcactgacctcaggcgaacaccttcagctcagcagcacccgtaacaccatgatcaatgcaggccagcatcttgatatcggtgcgatgaaaaatctgtcggtaacggtggaaaaagcccttggtctgtttgtgcataaagagggggctaagctcgttgccaaccaggggaacatcgaaattcaggctcagcacaacacgatgtccctgttttctgaaaaacagctgacggtgaccagcagtgaagatgaaattattatcagcaccccggaaacgctgacgctgaacggcggcggatcttacctgaggctgagtaagaacggcattgaacatggctcatcaggtgagttcattatgaagacgtctgactatctggtaccaggatcgggcgcaaatctccccaacgaaacacccaatttcagcctgacggatatcactcaggaaagcaaaatcagcagcaaatctttcaatgactaa

SEQ ID NO: 226666 - DNA, 789 bp, Klebsiella pneumoniae
atggctgacaacgcatccccaaaaactgaaccgcgcaatcaacgtaacgctggcaataaccgcccgttagggatggtcatttcaaaattaaagccactttcaagtgagttctatacgcactttcatgaaaaaaacagagcctgcctgcgccagtttaacgccatttccaatgcaatttataatattttccggctgatagaaggtgaccaggcgacaagcactaaagttcagaaatggctctccggtgtttacgatgaactgtcgggtaatgtaaataccttcaaagagcagattgacaaaaatgtcgccagactgcctctggatgattcatcattcgaagggtttgactatggtgaatttgaaattcgctggaaccacccaatgacctataaattgctggatattatccggaccatcaacgtcctgactcgtcaggcacatcagttgtggttatatggtcagatatcacaacaggttcatgaccgaattatcctgcaactcctgagctcactgcgggttgcgatggacaacatcactaaaatactgaacgctgaaaaccgcgtgaatggaaaatacgacgcattgccattcatccagagcattaagcggtttaaatcggtggaactttatattgccagtctcgaaactaaagcccctgttcagtccggtcacagtaacagttctgctgatgctggcagtgagccgacattaaaaccagaagaagcagctggctccggtaaaccatctgacaaaacacagccttctgcaactcctgtttcggtacaataa

SEQ ID NO: 226667 - DNA, 465 bp, Klebsiella pneumoniae
atgaacccgataattacggcacatcaggaaatcgttatcgaaaactcggttcgctatatcgagttactgaaatcagaagcgacaaaaattctggatgaatactgggagaactggaaggcacgaaatcagttgatatcccagaccacgtatgcaaacggggggaaattcatgcccggtcgattcgcaccggtgtttaaaaaggtcggctcatcgcaaaagctgacaattgtatggaaagatttttcgcccaggttcaaaaacaaaattgaacatcatggcgtggttgttaaacctaaactcggaggatacagcgttagttgttttaaaaatgccctggactgggaactggagatgatcctggaaacagaaaacaaaattaaaccgatccgtgaactactcgcggaataccatcaacgaaaactggccgacatcaaaagactggaaaaactgaagaggttaatataa

SEQ ID NO: 226668 - DNA, 288 bp, Klebsiella pneumoniae; identical to SEQ ID NO: 76838

SEQ ID NO: 226669 - DNA, 243 bp, Klebsiella pneumoniae; identical to SEQ ID NO: 76839

SEQ ID NO: 226670 - DNA, 156 bp, Klebsiella pneumoniae; identical to SEQ ID NO: 76840

SEQ ID NO: 226671 - DNA, 258 bp, Klebsiella pneumoniae; identical to SEQ ID NO: 76841

SEQ ID NO: 226672 - DNA, 252 bp, Klebsiella pneumoniae; identical to SEQ ID NO: 76842

SEQ ID NO: 226673 - DNA, 771 bp, Klebsiella pneumoniae; identical to SEQ ID NO: 76843

SEQ ID NO: 226674 - DNA, 369 bp, Klebsiella pneumoniae; identical to SEQ ID NO: 12613

SEQ ID NO: 226675 - DNA, 711 bp, Klebsiella pneumoniae
atgaaaattgcagtaatgaactacagtggcagtgtcggcaaaactattatttcgtcatacctgctgtatcctcgcatggctggcgcaaaattctttgccatcgagacaatcaatatgtcggcggcggatttgggtgttgataaagtaatgagtttgaccggggataattttggtcaactggttgaagaaatcgtatttgaagataacgccatcgtggatattggcgcgtcgaacgtagagcgctttctttctaccatgacaaaatacgagggtgcaattgatgaatttgataaatatctgattcctgttaccccggatgataaagcatggcaggaaagcattaagaccgctctcgcgttaagcgctgctggcgttccaaaatccaaaattgttcttctgcctaatcgcattaaagcaactccgcaggaagatattgcttctgtgtatgaatgggcgaaggattctaaaaaagcctctattcataaagatgccgccgtttttgaaagtgaaatttatgaatacctcgcgtatcacaaaatttcgtttgaagaactgctggctgaagatccagaaacatttaaagcgaaagctaaatcctgcactgatgccgacgaacgcgcggcggctgcgcgacgttatcgctggatgaaattagcgctgccggttaaacgtaatcttgatcgtacctttgaaatattaacggctgaataa

SEQ ID NO: 226676 - DNA, 435 bp, Klebsiella pneumoniae; identical to SEQ ID NO: 76846

SEQ ID NO: 226677 - DNA, 348 bp, Klebsiella pneumoniae; identical to SEQ ID NO: 76847

SEQ ID NO: 226678 - DNA, 1578 bp, Klebsiella pneumoniae; identical to SEQ ID NO: 76848

SEQ ID NO: 226679 - DNA, 2910 bp, Klebsiella pneumoniae
atgctgaacattacgacgattacccgccagcgtatcgataaggttgttgattactatgctgatggcgcagacgattactatgcgaaagacggtaacgcgatgcagtggcaaggcgctggcgcggaagaactgggcttaaccggcgaggtagaacaaaaacggtttgcgaaattgcttgatggcaaagtaacggatgacatttccgtgatgcgtaaaacggccaacagcgaaagcaaagaacgattgggatacgatcttacgttttccgcgccgaaaggcgttacgcttcaggcactggtcaacggtgataaacgtatcattgaagcgcacgatcgggcggtcactaaagccatcgaggaagcggaacggctggcactaggccgctttaccgtcaataaaaaaacgcacgttgaaaacacgaataagctgattgtcggcaaatttcgacacgaaacgtcacgcgagctagacccggatttgcacacccatgcctttgtaatgaacctgaccaaaaccagcgatggtaaatggcgttctctcacgaatgacggcattgtgaactcgcttacgttattgggtaacgtttacaaatccgagctggcaagagagctggagctggccggttacaacctgcgttatgatcggaatggtacgtttgatttggcgcatttcagccaggagcagatagcccaattcagccagcgcagccagcagattgaggccgagttagcaaagaatggtttaagccgtgaaacggccagccatgagcaaaaaaatgcggccgcgctgaaaactcgtaaaagcaaaggcgaagtagatcgcgatgtactctatgagggctggaaaaaccgcgccaaagagcttcagattgattttgatagccgggagtggaaaggtgcggccaacgacgatatagcgcggaatacgcagccagcagcgctggaaaagcctatcgagtaccaggctgacaaggtaatgacctttgccattcgttcacttaccgaacgtcaatcggtgattaccgagcgggagctgatggacgtggcgatgaagcatggctatggccgcttaaccctcgatgatattcgggctgcgagagaacgggccataacctccggcaacctcatcaaagaagaagcaacatacgcagcggccacgaccaataaaaaacagcagaacgtagcaatgacccgcgaacaatgggtaacggaactggtgaaagctggccgcaataaagatgaggcccgtaaactcgtagataagggcatcacaaacgggcggctggtacagcaaaagccgcgttttaccacacagttagctcaacaacgcgaacgcaacatactgaagatggagcgggaagggcgcggaaagatccagaccccatacactcgcgagtttagcgagggctggttagccagcagaacgttaaaacccgaacagttaaaagcggttatgggaattattcatacccccaaccagtttatttctgtacatgggtttgccggtactggcaaaagttatatgaccaaatcggcagcggattttctaaaagagcagggcgtacacgtcaccagtcttgccccctacggtagccaggttaaagcgcttcaggctgaagggctggaatctcgcacactccagtctttcctccgggcctcagataaaaaaattggccccggctcagtagtttttattgacgaagcaggggtaatcccggcccgccagatggaggaaaccatgcgcgtgatccgcgatgcgggcgcacgagcggtattcctgggcgataccaaacagactaaagccgtcgaagcgggtaaacctttcgagcagcttattaaagccggtatggaaacggcctatatgaaagatattcagcgccagaaagacccggaattgctgaaagctgcgctaaatgcagcagaagggaaaataaaggcgtcgttgacccacgtaaccagcatcgtagaagaaaaaaatcatgatcagcgctaccgccgcattgtcggggattacgtggcaatgccgccgacagaccgggctaacgccctgatcatcaccggcacgaacgacagccggaaaaaaattaatgagtacattcaggccgagctggggctaaaaggccagggtatcaattacccgcttctgaaccgtcttgataccactcaggcccagcggcagcacagcaaatattacgaaaaaggagccgtgattatcccggaacgggattacagcaacgggctgaaacgcggggccgtttataccgttctcgataccggccccggcaataaacttacggtaagcgacggcagcggcgacacaatcgcattttcaccggcgagattttccaaattatccgtgtactcagttgaaaaaacggagctggccgtaggcgaccaggtaaggatcacccgtaacgatgcgcatctggatttagcgaacggcgaccgttttaaggtaaaaggcgtccagagtggtgaggtactgctggagaacgagaaagggcgactggtaaaaattgatgccaacaaacctatgtatttagggctggcttacgcttcgaccgtccatagcgctcaggggctaacctgcgacaaggtttttatcaatatggatacccgatcactcacaacggccaaagatgtttattacgtggctgtcacccgcgctaaacacgaagccgtcatttacacagacgatgagaagaagctggataaagcggccagccgtgaagggttcaaaaccgccgcgcttgagctggaacaactcaaacgctatgccaaagagcagcagcatgatgcccgcgaaaaaggccgagacaaaaccgagccgacgcaggaaaaagacaatgccaagcgtaaaggcaaaggtcatgacaaaaataacgacgagagagcatttacctcgctctaa

SEQ ID NO: 226680 - DNA, 195 bp, Klebsiella pneumoniae
atgggtcaaggtatcaacacgttgtctttagatctggatgacaaagaagcgctggcgctggcgcagtttgttaagcggttgacgtggagtgatttacgggggtgtgccgttgatgatgacgaggcgtatgtcatcaaggatgccgtcgataaattacagagggcaatggcccaagaaggtttttccccgcgatag

SEQ ID NO: 226681 - DNA, 483 bp, Klebsiella pneumoniae; identical to SEQ ID NO: 76851

SEQ ID NO: 226682 - DNA, 555 bp, Klebsiella pneumoniae; identical to SEQ ID NO: 76852

SEQ ID NO: 226683 - DNA, 1032 bp, Klebsiella pneumoniae
atgactgagttaaccagtaatattcaagatattcgccaacgcccccgccgtgagcagggggtatggctgacgctcgaaccacttcagcgctacctgagtgatcccgatgtgtgggagctgagaattaacaagtatcagcaggttgtctgtgaaacgtcgaaaggccgtattttccacgacgatgagaaaattacggctgaatatatatcacgcttaaccgacacgctttgtggttataacggactaccgaaagagtccgttaataacgtgcttctgccggacggctcaaggggaattatttgcttaccccctgccgtactggagggaacagtagccatcgcgtttcgtaagcatctgcccgttgataagtctcttgaacaactccgcgatgagggccgtttcactggctggaaacgaaaggttcagggtgaagtagcccttcagccattcgagcaagaattgctggagttgctcgataaagacgacctcgtttcgttttttaaaattgcggtacgcaacaagctgaacatcgttgtatcagggtctaccggttcgggtaaatcaacgtttacccgctccctgctccgggaagtgccttataccgagcgcattgtagtttcagaggacgttcacgaaattgggtctgatctgcatcacgaaatggtttatatgctgtacggcgatcaggatggccgtctggccccggcggtcagcctgaaagcgtgtatgcgtctttctcccgaccgtatcatgatgacagagcttagggatgatgcagcatgggattacataaactcgctgaataccgggcatccgggcgggatcacatccacccacgccgacgatgcaaaatccactttcagccgtattgcgctgcttatcaagcaaaccggcgtcggccagacgctggattatgacgtgattatgaaaacgctgtacaccacgatagatgttgtggtgtacatggaacaccgccagattgttgaggttctttatgatccagcgtttaaaaaagcgcaactttctctttaa

SEQ ID NO: 226684 - DNA, 1155 bp, Klebsiella pneumoniae; identical to SEQ ID NO: 76855

SEQ ID NO: 226685 - DNA, 888 bp, Klebsiella pneumoniae; identical to SEQ ID NO: 76856

SEQ ID NO: 226686 - DNA, 717 bp, Klebsiella pneumoniae
atgctgaagaaaaacaaacatcaagcgatatcgcgggaagatctgaataagtaccatgaggaaactcaagggcttgagcgcgatatggttaatgagatccttaattcccgctctcgcgcctggaaaattgccacggcctttttcgtctttgccgttgtgagcatgattactgcggtcggcgtcattatccgttttgcgcagccgttaccggcatacctcaccacgattaataaagatacaggcgaagtatcgcaggtgaaaattacccgcgatgaagcgacttatggcgacgtgatagaccagtattggatttcacaatttgttgttcaccgtgagtcctacgactacaacagtattcaggttgattatgacgccatgagcctgatggcttccggtgatgtagccgatgaatatctctccatgttcaaaggcccgaaccgcattgataagcggttgggtgactctgaaagaacgaccgttcatatcaactcggtgatcaccgaccgcgaacacggtgttgccaccgttcgctttaccacgcagcagcgcattcgccagcgtccgaaccctgagccgccgcgctactggattgccacgattgcgtatgagtacaaagcgttaccaatgaccgcgcagcagcgctatatcaacccgcttggcttccgtgtaacgagttaccgtaagaacgctgagaacgttggcgcagtgggaggctga

SEQ ID NO: 226687 - DNA, 171 bp, Klebsiella pneumoniae; identical to SEQ ID NO: 76858

SEQ ID NO: 226688 - DNA, 1044 bp, Klebsiella pneumoniae; identical to SEQ ID NO: 76859

SEQ ID NO: 226689 - DNA, 237 bp, Klebsiella pneumoniae; identical to SEQ ID NO: 76860

SEQ ID NO: 226690 - DNA, 708 bp, Klebsiella pneumoniae; identical to SEQ ID NO: 76861

SEQ ID NO: 226691 - DNA, 2631 bp, Klebsiella pneumoniae
atggccgtagcggaaatgaaaaaaaggggggtgaaagatttcaaaaaagaaccttcctctttgaaatatattccttactcctaccatgtgacgccccatgttatcagtacggtaaatggggagtacctttctatatttaaaatccgtgggcgaacccatgactgtgcctctgatgccgaactgattaagtggcacgctgatttgaatcagcttttaaaagggattggtagtgagcatgtaaagttatggactcacttacatcaccgcgaaattaataattatcctgacacgcattacaatatgacgttcccgcgtatggtgaatgaatattatcgtgatcagtttgatgatacccccatgatggtaaatgacctgtacctgacggttgtttataaccctgtgggggatgccgctcaaaagatgctggcaaagtttgataagccatcggctagcgagctgcgcgaaatgcaggctgatgctattagtgcgctggaagatatttgtgagcaggtcatgaactccctgcgtccttatggcattgaccgcttaggctactacttccgtgacaaacgggggaacgtcattcctgaacagaaaaaagatgatgcagaagatgatgaggatattatcgatctgcgtgaagatttgctggccgatgtggaatatcaggacgttcaggaagataaagaagtctttagtggcactcaacacacctattctaaagcgctggagtggctctattacctcgtcaatggtgagtgggcgccagtgccggtttgtcgtggccgaatccgtgaatatttggctactacccgcccaacttcttcattttggggggatggtatcgagattcgcggtaccgacgaacgccgctatacgtctgccgttgaaatccgggattacgattccgatactgagccgggtcagatcaatatcctgatggaagcaccgtttgagtttttgttaacgcaaacgtattgctgtatgtcccagcaagcggcaagaacttacctcactaaccagcaaaaagcactactggaaacaggcgatccatcctttacgcagataaaccagatgaatgacgccgttgatggcgttgtttcacgtacctttatcatgggctggcatcacctgacggtacacacctttggcaagacgcttaaagaggcccgttcaaacgccggtgttgccagaaatatgctgaacaactgcgggctgattgccagccaggtagggttagcttcagaagcggcatattatgcaaaacttccggctaatcaacacctgtcgccacgaccttgcccgctgaatagctggaattttctttgcttctcccccttccataattttatgtccgggaaagcaaataataacccgtgggggccagcgctgacgctgttcaaaacggtggcaaatacgccgctgtatatgaacttgcatgtaacgccagaagatgaaatgtctttcggtaagcgaccgctggcgcatacgttaatgcttggacgttcgggggcaggtaaaactacgctgcttaacttcctgctgacgcaagcgatgaagtataacccgcgcatttttgcctttgaccgcgatcagggcatgatgccgatgattaaagcgttacacggtcactacacggttctgaaagagggcgttgcttccgggtgggcacctctacagatgcctggcaccaaagttaacattgcattttgtaagcgcctgatgcgcctgtgcgctgaaattaccaaaggcagcgtactcgatgctgatcaggttaatgaccttaaccgcgccgtcgatgctttgatggatgagaactccctcattccgacagatttacgcaccgtggatatgttaattcagcagatgccgaatccatatcaaacagcgggcagtaaacaaacactggcgtcattgcttgttccgtggactcgcggccatgaaaacggttggttgttcgataacgattcggattcactgaatcttggtgaatacgatatttacggctttgacctgacagatttcattgttgcagataatgagatcccccctgcaacacgtactccgctcctgatgtatctcaatttccgtgtgcgtcagtctattgatggccgtcgccgtgtgattcaggtattcgatgagtttcaccagtaccttgacgatccaattatgagtgtggaagtcaaacgtggccttaaaacagaccgtaagaaagatgcggtttacgtattctccacgcaagagccgaacgatgcgctggatagctccatcggtaaaaccatcatgcagcagtgcgtaacgaaaattcttctggaaaacccggatgcggattatgaggactacgttactcgcctcaaattgacaccggcagagtttgacgcgctgctgtctattcctgagaactcccgccagttcctggtgaaacaaggcagccaaagcgcgatggcgcaattcaacctggccccgcgcgttaagacgccggagaacttcaggaagctggataagatccttagcatcctgtcaggggaaacccaaaacgccgaaacactggcgaaaattattgagcaaattggggatgataaccctgataaatggctcgaaccctactggaaatctgtactcgcagcgtga

SEQ ID NO: 226692 - DNA, 315 bp, Klebsiella pneumoniae; identical to SEQ ID NO: 76863

SEQ ID NO: 226693 - DNA, 291 bp, Klebsiella pneumoniae; identical to SEQ ID NO: 76864

SEQ ID NO: 226694 - DNA, 318 bp, Klebsiella pneumoniae; identical to SEQ ID NO: 76865

SEQ ID NO: 226695 - DNA, 741 bp, Klebsiella pneumoniae; identical to SEQ ID NO: 76866

SEQ ID NO: 226696 - DNA, 438 bp, Klebsiella pneumoniae; identical to SEQ ID NO: 76868

SEQ ID NO: 226697 - DNA, 315 bp, Klebsiella pneumoniae; identical to SEQ ID NO: 76870

SEQ ID NO: 226698 - DNA, 654 bp, Klebsiella pneumoniae
atggatatactttcccttttcccctctaacgtaatcgcattgtgggccgtgtcatttgcttttctggccgtcctgtattggtggaagatcaccgccagaaaacgcagacacaaacgcaagcaacaacaagcccggcgtgtactcgcaaaaattcagaccctaccggcgttcggctacaagatcgcttatctcaggaagatagaccctttcacctttgaggaactgttactggaggggtttaagtcgcatggcttcagaactatcagaaacaaacgctataccggtgacggaggcattgacggccaggtaataatcggaaaacatcgctatctcatccaggccaaacgctatcgcggccatattgctttacagcacgttcaggagttcgatacgttgcttaaacgacataactgtcgcggtttgttttgccataccggaaaaaccggcgcagcgtcaaaagctgttagcttcgccagtgagcggatggagattatcagcggccagcgcttgattgatttactcacgcccggcagctccttcaccatcgcaaccgcaccgcagacaatgatgaggcgtaccgcagcaacgcgaggaacgaacatcattgtcgaggaagcggataaaaatacaaccgatagtatgagagtcaattaa

SEQ ID NO: 226699 - DNA, 438 bp, Klebsiella pneumoniae
atggctattagcgaatcatctctaggcaagcagatacttgaaaagataaatgatcatgatcgtttaaattctaaattgcttttaaaaattaaaattttaaacgtgcttgtgttcgttattctttttgcaataggagataagtttaacgaactagttatatgtgcgattgctttcgttgttttctttgtgctaaccggtgtgtatttgaagtgcaagatggttatttcatcgtcgttaatatttgattatttcgaacgtagtgctgttgacgaggagtttagaaacttttttatggggttatttaacagcaaaaggtttcttacgatccgggatgatagaaagaaaattcatgattatatttatgagcaagataagaagtttgaagaattgaagaaaatagaaactattaatcatggtatgaatggacgtagtgagtaa

SEQ ID NO: 226700 - DNA, 258 bp, Klebsiella pneumoniae; identical to SEQ ID NO: 76875

SEQ ID NO: 226701 - DNA, 246 bp, Klebsiella pneumoniae; identical to SEQ ID NO: 76876

SEQ ID NO: 226702 - DNA, 588 bp, Klebsiella pneumoniae
atgaaaataggctacgccagaaagtcaaccaaagagcaagacacatcccttgagtatcagatcgaggctttacaaaaagctggctgcgaaaaatggtatgcagagcaggtatcgaggggcggtaataagcgcctgaaaacaggtacaccagaattggaaaactgtctgaaagcgcttcgcgccggtgacacactggtagtatgggcgctagaccgattaggtggcactctcttgcagctcttgcagctcatgaatgagctacgcagcaaaggtattcactttgagagcctcaaagagcgcatagacacacaaagcccaatgggtgaaatgtactattccctcatcgctattttttccaatttcgaggtagccagaaaccacgaaaggacaatggccgggcttgcggccgcaaagaagaaaggacgcattggaggcagaaaaccaaagctatctccacaggacattaaagaaattaacgcgcttgttaaatcgccagaaattacggtaaaagagatcgcggcacgttttaaggtttcacgtccaacgatttacagacatattacccccgacagcaataatactgattaa

SEQ ID NO: 226703 - DNA, 885 bp, Klebsiella pneumoniae; identical to SEQ ID NO: 76878

SEQ ID NO: 226704 - DNA, 552 bp, Klebsiella pneumoniae; identical to SEQ ID NO: 76881

SEQ ID NO: 226705 - DNA, 228 bp, Klebsiella pneumoniae
atgtcgcacgaacaagtctgggaacaaacagtccacgcggtactcggtgccgcaattgaacttggatatgatgttgacaagattgcagaaaaagccaaacaaatcatgttaggtaatgaagtgtatcgctttgtaggtcattcagaaaatgaagtgactagaacaattgacgcgatcgaaagtactgtcgatgaagttaaaaaaatacatgagagcaaaccaaagtaa

SEQ ID NO: 226706 - DNA, 246 bp, Klebsiella pneumoniae
atgtcagaaatcaccgcatccgagcaaatccgcctggatatcatcaagaaagttaactacgacaccgcagcggccaagctggccattgactgggtaggcgacagctatctgaaatctgagcttttcgcagactcctttgatcgtgttttcacggaaagcgagattgtctcgaagacccgtaaagcgattcaggaagcgaccgaagcgcttgcgctgtttgatacgggtgcagagcaggcgagctaa

SEQ ID NO: 226707 - DNA, 282 bp, Klebsiella pneumoniae
gtggtaataaatgacccggcagcgctggccaatgcggtgatatgtgccgttattgtctgcgctttgatgttttatcaacgtcgcggtgccaggcatcgtcctggtatctccattcttgcttacttgctggtattgatttacgcgagtattcctttccaatttatcttcggtctttacgtacagtcccactggctggtggtaatggcaaacgtgatgatatgcgccgccgtgctgtgggcacggggtaacgtggcgcgtctggtcgatacactgaggcactaa

SEQ ID NO: 226708 - DNA, 396 bp, Klebsiella pneumoniae
atgtccgatcctttaactggtaccggcctgatttttggcggcggtttaattggttccgtcgtatatggcgttatcacccacaccgattttggtgtggtatttggggcttttggcggcgcggtgttttatgtggcaacgaccgcaaacctgacacgtggaaggcaaatagcttacttcatgacgtcgtttattgtcggtgttctggctgcaggattattaggctcaaaatttactacctggacaggctatacagatcgtccgcttgatgcgctcggtgcggtggtggcatctgctgtcaccatcaaggtcctgactttcattaacagccaggacttgagcagcctgttcggattactttcccgattaaggggaggaggttcgagtggtaataaatga

SEQ ID NO: 226709 - DNA, 1290 bp, Klebsiella pneumoniae
atgagcaatatcttcctcaaagacagtgtatttggtgaattaaaatacgaaaaggtttatgagttttttgaagggccaaagtttttctctgtgacgaatgagataaatagtacctttgctgtttattggttaggagattatgatgattttgataaatggattgtcattccaatttctgctgaaagactagagtcattagaaagaaaaagattagacattcgtagtattttaatgcatcaagaacagaaaaaatattatcagttagatatttattatgaggatgagcgtgttgtcctttccgcgctagattcatcttcagtagctaataatatgacacttcctgacagcgggcttttcataagctctgtgctgcctgttttatccaatgggaagatagggaagcagattgagttttcgacacatgaaattcatgttgaaaaaacgaaatcttctactgatcccttagtattgaatggcgtttctaaattgtttgagtgtttcaacaatttatacttgtctattatgaattcttttgatgaaaaggacttagtacgtcctgtctcgggtcgtcctgggtcttttgtgctttcttttcaggctgaaaaaatgcacaaggttgaaccattgttaaaagagttgaatgatgttatcgatgttaaaggcgatattattggatttgttagaaacaaaaacatggatgttcaaatgctttccgctttatttgactcagtaatcaatacaagctcaagttttgagttgaaaagtaattataccgacgaggttatattcaggcttagtaaggctgatgcagagttttattctaaatctctagccaaaatgtccactaaggttgtcggtggatatcaagtgccccaagcaaatttaattgatcaggtttttaaaattgtagagttgaaatggaagggcgtttatcttgatgtgctaagtacaggattagattctcgccatatactctactatatacacgctgctaaaattctcggattgcttaatgaaaatggttcagtctcagcgttagggcaacaattagctgaatcagatcatgagaagaaattaaggatcgctgctcgtggctttgaagccagccattgtggctgggcttggatacaatggagccaagttaaaaatctttcagaggtagatccatcaacagcggagccatttttgtttgaaatgtgcttatccctgagcgataaaactataaaaagaagagcttcgactttaagaaaatggtgtgaagctttgaaaccatcataccgcgaactgtaa

SEQ ID NO: 226710 - DNA, 1383 bp, Klebsiella pneumoniae
gtgcatcgactgaacacgaccagcgaaggggaaaagctggtggaagaggccgaactcccaatcaccagaagccaatactgtgttgctctggatgcattacgtgctgcacctgcccactatctcaaggaggtaggcgaccagtggagatcgcccgatctgttgttctggggggttaacgctatgtatggcccgctggtgctggacctctttgcagacgaaagcaatgcaaaatgccctgcgtggtactcagcagaagacaatgccctgacgcaggactgggcggggcgactgatagaactcggcggcgcggcatttggaaatccgccgtatagccgttctcagtatcacgaaaagcaggcgatcacaggcatgacccacatcattagttatgcatacgctcagcgtgaaaagggtggtcgttatgtctttctggtgaagtcagcgacgagtgagacgtggtggccagaagatgcggatcatgtatgttttatccgcggtcgcatcggtttcgatctgcctacctggtttaagccggcggacgataagcagaagccgaccagcgccttctttgccggggcgattgttgtattcgataagtcatggcgaggtgagcgctttagctatatcgatcgtgtggctcttgaagcgaaggggcgcgcgagtatggcccttgcccagtacgccgtgggtaaacaggcaacagctccagtaatggatcagcctcagacagagcaagctgaaactgaaatcccgcttcttcaggacgaaatcctcgcaaaaagcggcatacgatcctgggcctgcgtggttgcggcttttggatataaagccgagtacacctttgccgagtcgaagtttggtcatacctgggcggctgattcagtggataaaccggagtttacgccggttaactcagaaacgatcgccgcagctcaatccctgatcatcaaacaaactgcgaaacaagcgctggtgggctggctaaacggtattgatctcggatccacaactgcacgtgaagaaaccatagaacgcatgaactcggtgtatgcagagtttgtcgacacatgctctgtaactgagttcatcgatattgtcagcagtctggataaagcgagctggttcaacagcagactgatccgcactcatgttcgggaagctctctcagttgctaaacaggccttacccgaaagccggatatggccactggaagtaggcctggtgtttgagcgagtcgaaggcgtgcaccatcttaacgagtctcagcaaaacaaactgaaagcacacatcaatcagctgtggcttgagcgtacgcccagtagcgaaatcataactattgccagcgggctggtcagcagcatgcagggggttagccatgcgtga

SEQ ID NO: 226711 - DNA, 204 bp, Klebsiella pneumoniae
atgttgaaagctaaagtcgtaacgttttatggcggtatatctaaaaccgctacagctctgggggtaacccatagtgctgtatgccagtggggagaagttatccccgagaaacaagcgctctacattgagcggatcacagatggaaggctgaagtacgacgcctccctctatcacaagaatatcaatccaacgactcagcagtaa

SEQ ID NO: 226712 - DNA, 633 bp, Klebsiella pneumoniae
atggataccgttggcagcagattaagatttagacgtaagcagaagaaacttacgcaacgtgatgttgctgagtgggccggcgtcagcgcgtctgcggttacacaatgggaaaatgattcaaccaagttatcaggcgagaatctcgtattagtatgtcagtgcctgagatgctctcccgagtggcttatcttcggtacaggcgatatcgagaacggtattaacattaaccttatatctgttagagaagtgccggttatatcttgggttcaggctgggaactggagcgaggtcattggcgatccagctaatgaactggttaaaactacaaagaagctttctgaatcagcttttgcattacgcgttaaaggtcactcgatgacttcgagccaagaacttagcattcctgatggttcggttgtcattgttgaaccagaatacggttttgttgatgaggcaaatggcaaaattgtgatagcccaaaccgttactggtggcgaagcgaccatcaaaaagctcgtcatagaccctccatattcctatctcatacctctaaatccggcgtttagggctatagaggtggaccaagatacaaatctgatcggtatagttaagcaaataatcatcgatctataa

SEQ ID NO: 226713 - DNA, 216 bp, Klebsiella pneumoniae
atggctatagaaaacccgagttcatgcccgcactgcggcggtgagaatggattccacacgaaagaggttgtggatttcgagcggttttatgcttgggatggttcattccttgaggggcagcacaccagcggcattcgcggcggtaaagcattctactgctgcgactgcggtcggaatataacatcgcgcatcaataagccaggagccaagcaatga

SEQ ID NO: 226714 - DNA, 1143 bp, Klebsiella pneumoniae
atggcagctagaccgcgtacccataaaatcactattccaaacctatattgcaaacttgataaacgtaccggaaaggtttactggcaatacaaacaccctatctctggtcgttttcatagcctaggcacggacgaagctgaagcaaagcaggtggcaagtgaagcaaatacgattattgcagagcagcgcaccaggcagatccttggtattaacgagcgtctggcacgcatgaaaggaaaccgcacggatattacagtttcttcatggctcgacaaatatgaattggtgcaggaggaaagattgaaacacaacgaactgcgcccaaactcttttcgacagaaagctaaaccaatccgtctttttcgtgaacattgtggtatgcaatatcttaaggatataacagcacttgatatttccgaaataacagatgctgttaaggcagagggtcataacaggatggctcaagttgtacgcatggtactaatagatgtttttaaagaagctcaacatgctggtcacgttccaccaggatacaaccctgcccaagcaacgaaacagccacgaaataagataagcagacaaaggctatctctggaggaatgggaggctatttatacatctgccgaacaacaacaaccttatttgcaatgtggaatgttgcttgccattgtaacagggcaacgccttggagatatttgcaatatgaagttttcggatgtatgggatgatatgctgcatattgagcaggagaaaacaggaactcgtttagccattcccctttctctcagaaatgaagcgttaaatattactctgagtgatgttatttcaaaatgtagagatgctgtggtgagtaaataccttgttcattttcgccatagcacctcacaggctagtcgtggtgaccaagtgtcagccaaaacacttacttcaacgttcaagaaagcacgggataaaagcggtcttacctgggaagagggaacagcaccgactttccatgaacagagatctctttccgagcgcttgtatcgtgagcaagggatagacacccagaaactattgggccacaaaacaatgaaaatgactgacagatacaatgatgatcgcggtaaagagtggatcgttgttggtaaaaaagcagtatga

SEQ ID NO: 226715 - DNA, 1812 bp, Klebsiella pneumoniae
atgccacggagacaaatactcagtagtgaagaaaaagaacgcttgttgattgtgccagatgatgtcgtatttcagacgcgcatgtgctttctgagtgaacatgacctcgcgctcattaataaacaccgcaggccagctaaccgtctgggctttgcagttttactctgttatttgcgaggactagggtttcctcccgacaaaagtatttcacctcacgactgtgttgtcttcaggctggcggctcatttgaaagtccagtctgatttgtgggccgagtatgcatcaagagaggtcacccgctgggaacatctggctgaactctaccgctacctggaattatccccttttaaccgggcgctgcaaaaaacctgtattcgccacctttatccccacgccatgcggacagacagaggttttttacttgcggaggaaatgctctcctggctccacaataataaggttattttcccctctgttgaagtgatcgaacgaaccctggccgaagcaacaacacttgccgacagggcggttttttctgcgcttaccgcgcagcttgaaccagggcataaagcggcactggaccgtctgttggtatctgagggtgagcaaccttcacggctggcctggctgctccagcctccgggaaaaattaatggtaaaaatgtcctgcaacatatcgaccggttaaatgcgattgagtcgctggcactccctgacggcattgcactttccgttcaccagaaccgactcctgaaactcgcacgcgaaggcaggaaaatgagtagccgggatctggcaagattcacggatgttcgccgttatgcctcgctggtttgtatcatatcggaggccagatccaccctgactgacgaagttattgatctgcacgagcgtattctgagtagtctgttcagcagggcaaaacgtactcaggccgagcggctccagcaaacgggaaagctgattcagagtaaactgaagcaatacgttaccgtcggacaggcattacttaacgccagagagtccggggaagatccctgggccgcaatagaagacgtccttccctggcaggaattcatcaacagcgtggaagagacgcggttcctgtcacgtaaggacaacttcgacccgttgcatctgatcacagaaaaatacagtacgctgcgtaaatacgccccccggatgctgtccgtgttgcagttcagggctgcacccgccgcaatgcagctcagtgacgcattggataccgtcagagatatgtatagaaaacaactccgaaaagtaccgccttccgcgccaatcgggttcatcccggaaagctggagaaaggttgtgatcacccccaccggcattgaccgaaaatattacgaattttgcgtgctgaatgaactgaagggagccttacgttcaggtgacacctgggtaaaggggtcacgccgctacaggaatttcgatgattatctgatcccgtcagacgattttgaaaaatcactccgggataaccagttaccccttgctgttccggccgattgccatgaatacatcaagagccgtttgacgcttcttgcatcgcgtctggaagaagttaacgcgatggcgctggccggtgatttacccgatgttgatatatcggataaaggcgtgaaaattaccccgctggataacagtgtcccttcagcagcatccccttttggcgatctggtttatggcatgctccctcaccctaaagggggccgcttggaaaacggaaaatatcctacgttaagcctgttttttgagctggcatggcgggcagctatgagcgaagtatag

SEQ ID NO: 226716 - DNA, 123 bp, Klebsiella pneumoniae; identical to SEQ ID NO: 177811

SEQ ID NO: 226717 - DNA, 852 bp, Klebsiella pneumoniae
atgagacagaggctgatggaactcatcgagcagcatgccagcgctggcggctggcaaaacgtataccgccataattcacaaacacttaattgtgagatgaatttcggtgtttatcttccacccaaagcagcaacagaaaaactgccggtgctgtactggctctcgggtctgacctgtacggagcagaatttcatcaccaaatcgggtatgcagcattatgccgccaggaacaacatcatcgtcgttgttcctgataccagtccccgtggagagcatgtcgcagatgctgacagctacgatctgggccagggtgccggcttttatctgaacgcgacggaacatccgtggagtacgcattacaggatgtatgactatattctccatgagcttccggctgttgtcatggagcatttacctgtaacatcaaggaaatcaatatccggtcactccatgggagggctgggagcgctggttctgtcgctgcgaaatcctgatgaatacgtgagtgtatcggcattttcaccaatagtgtcaccttctcaggtgccatggggacaacaggcattcaccgcgtacctgggtgaaaataaaaaaacgtgggagcactacgatcccgtcagtctcattttacagggtgcgaaattaccagaaatttttattgaccagggattaagtgacgccttttatgaagatcagttacgcactaaaagtcttgaaagagtgtgcaacgagatgaacatcaacacatcattccgatatcatactggttacgaccacagctattatttcatttccagctttattggtgagcacattgcttaccatgccaacaggctctggctgtcagcatga

SEQ ID NO: 226718 - DNA, 963 bp, Klebsiella pneumoniae
atgctaccgcgccctaaaatcacggaaattctcgatgaggtaaacagctggacgatatttacccgacatttttcgcatataaaaaatgacattacccgtcccgatacccgcctgctcctcaccaccatccttgcggatggtatcactcttggcctgaccaaaatggcagaagcctgccccggtagcaccaaatcatcactcgaagatattcaggcatggtacatccgcgatgaaacctattcagctgctcttgctgagctggtaaatgcacaggggaaaagtccactggcggcattctggggcgacgggacaacgtcatcatcagatggacagaatttcagaacaggcagctcatgccgctacgcagggcaggttaacccgaaatatgggcaggagcccggacgtcagttttatacccatatttcggatcaatacagcccgttttacacctgcataatcagtcgggtcagggattcaacccatgttctcgatggcttgctgtaccacgaaagcgacctggaaatcagcgagcattacaccgatacagctggtttcaccgatcatgtctttgccctgatgcatctgatgggatttgcgttctgtccgcgaatcagggatctccacgacaagaagctgtttatcaaagggaaagctgaccaatacccggcgcttcagtcactgatatcaacgaccagcctgaatctgaaagagatcgaaattcactggcgtgaagtgctgcgtctggcgacctcgataaagcaggaaaccgtgacagcgtctctgatgctgaaaaaactagccagctacccgaagcaaaaaggacttgccaaatcactgagagaaattggccgcattgagcgaacgctgtttatgctcgactggttccgcgatcctgcactctgtcggcgagtacaggcggggctgaataaaggtgaagcccgtaacgcgctggctgttcactga

SEQ ID NO: 226719 - DNA, 276 bp, Klebsiella pneumoniae; identical to SEQ ID NO: 177817

SEQ ID NO: 226720 - DNA, 633 bp, Klebsiella pneumoniae
atggcgcagcatcatctctgcggacaggatgatggagcccgggttcactttgtcctggccggcatacttcggcgcagtaccgtgagtcgcttcgaacagcgcgcactcgtcaccgatgttggcgcccggggcgataccgataccgccaacctgcgccgccagggcgtcagagatatagtcgccgttcaggttcatacaggcgataacgtcgtattccgccggacgcagcaggatctgctgcaggaacgcatcggcgatcacgtctttcaccacgatctctttgccggtgttcgggttcttgattttcacccaaggaccgccgtcgatcagctcgccgccgaactcttcgcgagccagctggtagccccagtctttgaacgcgccttcggtgaacttcatgatgttgcctttgtgcaccagagtgacggaatcacgatcgttggtgatcgcgtattcaatcgcggcgcgcaccaggcgtttggtgccttcttcagagcacggcttgatgccgatgccgcaatgttccgggaagcgaattttcttcacacccatctcatcgcgcaggaatttgatgactttgtctgcttccgcagagtcggctttccactcgataccggcatagatatcttctga

SEQ ID NO: 226721 - DNA, 423 bp, Klebsiella pneumoniae; identical to SEQ ID NO: 76888

SEQ ID NO: 226722 - DNA, 303 bp, Klebsiella pneumoniae; identical to SEQ ID NO: 76887

SEQ ID NO: 226723 - DNA, 480 bp, Klebsiella pneumoniae; identical to SEQ ID NO: 76886

SEQ ID NO: 226724 - DNA, 825 bp, Klebsiella pneumoniae
atgttatctagccgttttcgttctgcaaatatcctgcgttctgaccgccctcttaacgatgatcagatcatgcgttatgccccgtctatctttgccactgaagcgcatgaaagccgctccgaccgttacgcctacattgcgaccagcgaagtattaaatggtctgcgtgataacggttttcatccattcatggtttgccagactcgcgttcgtaacctggataaacgcgaacacaccaagcacatgatccgtctgcgtcatgctgggcaaattaacggcactgaagcgaaggaaatcatcctgcttaactctcatgatggcagcagcagctatcaaatgctggccggtgtattccgtttcgtctgccataacggtttagtgtgcggtgataccgttgctgacattcgtatcccacacaaaggcaacgttaccgagcgtgttattgagggcgcttttgaagtgctggatcagttcgataacgttgaaaaccatatggatgctatgaaatctgtcacactgaatgcgctggaaaaacgtattttcgctgacgcggcgttagcactgcgttatgacgagaaagacggccccgcaccaatcgccgcgagccagctccttgaggcgcgacgtttcgaagatcgcaaagatgatttgtggacaacgtttaaccgcgtacaggaaaacatcatccgtggcggtttgagtgccagaactaagcagggcaaatcaacccgtacccgcgccgttaccggaatggacaaggatacttctttaaaccgcgctttatggattctcagcgagcgcatgaatgaactcaaagccgcttaa

SEQ ID NO: 226725 - DNA, 216 bp, Klebsiella pneumoniae; identical to SEQ ID NO: 76884

SEQ ID NO: 226726 - DNA, 360 bp, Klebsiella pneumoniae
atgagtcttatagatttaatcaaagataacactcctcaaattgtcgagtttgttgataaggctgaatctttatttctttattttgttttgtttttgttttcccttgctgtattgattgttttcattggatatatatatgacgaaataaaatcaggtgaggctatagataatatttttctttgggttggcgggcctgtagcggtggctattggtttctttcttataactagttttagctacagtgtatatgtcgttatatcaggattgcttatctctattgcgggtgcattgttttttattgggatgctcattcttttttttacatacatagtcccaaacttaaagaatctcaatgattaa

SEQ ID NO: 226727 - DNA, 273 bp, Klebsiella pneumoniae; identical to SEQ ID NO: 76882

SEQ ID NO: 226728 - DNA, 249 bp, Klebsiella pneumoniae
atggataagaatacattctggtcatacacaactcctctccccactcatttggatggtgttgaagaggaacggttctcttctgcttctgaatatgatgcttcgcatcaacatgtacatgaagtattgtatattgttagcgaagatattttgaatattgaaattgaagtgcgaaatttcaatatagctgattcagggttagagcattctacccgaagcttcagagaaagaatatttttaaggaaaaaataa

SEQ ID NO: 226729 - DNA, 378 bp, Klebsiella pneumoniae
atgaaaaaactgtttatcgctgctctggtgagcctgcctcttaccgcttgcacaacctacggcaacaaatctctgaaagacgaatcccaacaaaccgtaaaagccaaaatcgttaaagggaaaactactcagcaagatgttattaatgcattcggggaaccacaaacgcgagctaccaatgacggtcaggaaatgtggtcctactccagcatgtcaggcgagagtcagatctcgaactacatccccggtctggccctgctgaaaaacagcaatatggcgcatatgaactcccttgagatctggttcaaggggaatgttgttgagcgatataatttcagtcagacggcgagtaaggtttcgcgtgggttattggaataa

SEQ ID NO: 226730 - DNA, 552 bp, Klebsiella pneumoniae
atgaagaagattttactcgttacttgcacagctcttgctttgacgggatgcggtgaaaaaggcgattttgagaaagcgatcaacgcgaaaatatcacaatcgaagctgtgctactccctgcaggacaacgacattgtattcaacaaaggttttccgattaaggttaaccgtggctaccgttctgctggatacagtgccagtgatgaaatccttagaggacttgttgaacaagggctgctcactgtttcacaacagtctaacggctttagcagtgttgatgttctggaagtcacggacgagggccaagaggttgagttttgggaccgtgagaaaggtgcctgtgttggtcatcgggaagtttctgagataaaggaatggaccgaaccgggaaacggtgatcagaaagttgttcgcgtgtcatatacatggaagttggcggatgttccttcatgggtggacaagaaagcgttctccagcgtcaagggtatggatgaacctgaagaaggcatgattaacattgttaaaaccagcaatggctggaaagcgatttaa

SEQ ID NO: 226731 - DNA, 759 bp, Klebsiella pneumoniae; identical to SEQ ID NO: 177968

SEQ ID NO: 226732 - DNA, 1020 bp, Klebsiella pneumoniae
atggcaaataacgtctcttcagacattgatatcgcggagttttatgctgcccgggaacgtatttatcctctggcgctggccaccccgttgttctattcccgcagtttatccgatctgttttctgcgcaaatttatctgaaatgcgaacaatttcagccgacgggggcgtttaaaattcgcggcgccgccaatacgattctcggcgagctgcaaaaaaatgagcaacggatcaggcgcaatggcgtggtcaccgcgtcgactggcaaccacgggcgagccgtttcttatgtggcgaaaaagctggggatcccggcgacggtctatctttcttctctggtgccggaaaataaagtccgcaatatcgaactggaaggctgccgggtagtgcgtgttggcgccagccaggatgatgcgatggccgaagtgaaacgcgcggtggcggaattcggcatgatagaaattccgccctttgatcatccgtcgattattgccggacagggaaccatcgcctttgaactgaatgaacagctcaacgacattgattatatctttagcggactttccggcggcggattgcttggtggcatcggtctggcgatgaaacaccttgctccacaaacccatatcgtcggcgtgagcctggcgcagggcgcggcgatgtgggaaagcctgaaggcgggcaaaccggtgatggttgaagaggtcgccagcgtggcagattcgctgggcggcggcattggcatggataaccgctggacgttgccggctgtgaaacaggtgatggatcagcatttccaggtgagcgacgattatatcgccgccgcgctgctgttgctgttcgaaaaagagaaaattttggtcgaaggggcggcggcggtgggtcttgcggcgctattgcaatatcgtccggacatcaaaggccgtaaggtcgtcctgattttaagcggcaatagtattgccaccgcgacgttgccggctttacggcaacgggcagtgaatgtggatgaggtagggcaatga

SEQ ID NO: 226733 - DNA, 945 bp, Klebsiella pneumoniae; identical to SEQ ID NO: 177966

SEQ ID NO: 226734 - DNA, 252 bp, Klebsiella pneumoniae
atgtataaaaataacgatgaagccatcaatcttgaagcaaaacgattacttgataatggaatctataccgatctggaaaaagcgtatagtgaagcagaaaagataatcacagaaataagagttgagtttaaaaagaaacaggaaaagaaaaagttccgttcccggattaaatcaatcaaacgagcactttcagatgatgagttcagaagtaatattccttataatcataggcatcagtggagaaaagaatga

SEQ ID NO: 226735 - DNA, 354 bp, Klebsiella pneumoniae
atgagtgatgatgaaataaaaaatacctatctaactggcaatgtttttcagagtgatagaagcaggccggaaattaagaaaacacttgagcagaaaattgctggagcacaaaacaaattaaattaccttaaagcaaaagaaaaaagagacagcaaaaaagaaaacacacgacaaaaaataattcttggtgcagaggttgccaaggttttaaactgtgatataagtgaggtagataagcaattactctttggtttgttattagaagttccatctttgcatacgcacgatatcgaacggtataaagttaatggacaaatctacattgaaagagttctcaagaaattcagaccataa

SEQ ID NO: 226736 - DNA, 399 bp, Klebsiella pneumoniae
atgacagacgctattaaaacacttaataacatccgtactcttcgcgctcaggcacgagaaacagatctcgctactctggaagagatactcgaaaaattaacagctattgtcgaggacaaacgccaagaagagacaatcgcaaagcaacaaaatgctgaacgtcagggcaaaatcgaagccctgcgtgcgcaactgcttgaagatggcattgacccgtctgagctgctgggtaatgttaaatcatcacgtcctgctgctttacgcgctcctcgtcctgcaaagtacaaatacatcgacgaaaacggcgatgagaaaacgtggacaggtcagggtcgaacaccaaaagtgattgcagctgcactggaaagcggtaaggttctggaagattttgccatttga

SEQ ID NO: 226737 - DNA, 1473 bp, Klebsiella pneumoniae
atgaaaaaacaaaataagaaagggttctccctgttagaactcgtattggtgctgggtgtgggtagcatgatggcatttatgcgttttcaggatatgaaaaatgaacaggaaacgattatagctaatgctgttggtcagcaaattaaacaggtcggggaggcggttaatggttatattaatatccgatatgataaactttccactctgacttcaagcagcagtcagtcaagcgatccgggtccccgtatctgtaatgcttctggctgcgaaattacataccagacactggttaatgaagggttattacctgcgtcatacaccggtattaatgcacaaaaatcttcatataaaattatattaaaacgttcaggaatatcacctaactatgtagttaatggtcttattacaacgactttgccttggatggaaggggacaagtatcgttacgatttattggggcgagcgatgcaagcggcaggtattgatagtggtatgacgcaatcagcaaccttagcatcaggtttgcagggtgcatggaaagaggcatctacagattacagtaatatcacaagtgctggattgatggcctatcgcgtaggatatgattccaccatgtattctgtttatcttcgtcgtgatggcacattgccgatgacaggggatcttaatatgggaggtaaaagcatcaataatgcccaagatataactgctgcgggaactgcgactgctaatgttctgaattccacaggagatacagttgtcggtgcacatatccgtgttggcggtagtgctcaggtcaatggttcaataaatgctaataacactgtttcagccgaaaatatccaatctagaggcgagacatacacgcagaactggttcagaacattaggtgatggaggtatatactttcagaaatggggtggtggttggaatatgactgatgcaaatactattaccgcatataatggtaaaaatgttaaaaccaccggagggatactgagtggatatgtgaaggtaagtggaagtatagaggccaccggaaatattcattcagataaaactatcgacgcaaactattttttaccaaactcgactgaggttgtagggacagcctgtcctactcaaggtttaatcagtaaggagtccacaggagctattatttcgtgtcaggatgggatttggcgaagaataaattatgcagcagatgctccaaaaccgctaaaaataattttatcttgtcatgcaggaaacaactccagcaatagttgtaggaaagacgtttatactgatttaactttctggcgagatggtattacacgctctgaaataaaattagttagcgaaaggataacccgttggtggggagatggatgtgggagctgctaccccggaagtttcacatattcaaatggagtgatccagatgtcggtaaatcaggcattcgttgaacgagagttcactttatcatggtaa

SEQ ID NO: 226738 - DNA, 600 bp, Klebsiella pneumoniae
atggcaaaagcaaaagttttaatagacgatacagaagaagcaataataaaaaatgcattagatgttgacgatatgaatgaagtaaacattaacgtcacgagaaaaaagaaaaccggatttttgggaacttattcaatagtttttcacgactcagtgaaaacattgtctaaaatgaacttaaaaccaaatgcatataagattgtaatgtacttatttggcataatagagatgggtaatattttagttaacttctcacagaaaaagattgctgatgatcttggcttacagccatctaatgtatcaagagctttcaaagagctttttgataaaggggttttaatcaaagatagcgaggatggacacgtttacttaaattcaaatctatgcacgatgggtgttccgaaaaattttgatcaaaagagaatgaaaagcttacagaaatcaaatattgaaactgaagattttaaaaatcagatcaatttgtttactcctacgaacacaacaaaaataaaaactaatgataagaaagttatcaagaaaaaagaaaaagaaaacgttttagagtttcccatgcaaaatgattgggttgatattgaatag

SEQ ID NO: 226739 - DNA, 153 bp, Klebsiella pneumoniae
atggcgataaaaaataaagcaatgcccacttacgcattatcgctccgctctaatgccgtggggtctaccgacggttgcctgccgcaggctaaaaccgtttccttcggaaacaaaatcaaggtcaacgtcaaccccggcgttttccttacgtaa

SEQ ID NO: 226740 - DNA, 1410 bp, Klebsiella pneumoniae
atggcgatatacagttttaaaatggagaacatcagcagaggcgaaggtcagtcttcggttaactctgctgcatatcgtcaccgtaaagttttcttcgataacagaacgggtgaagtttgtggtcgcaaaacagcacataagaaggaccttgcctttgcgcagatttttgcacctgaacatacccctcctgccctgattgttgacagtgaaacactctggaatgctgttgaagcctcagagaagagaaaagatgcccgccttgccaaagagtttaagattgccctccccgcagagctaacaccagagcagaacattgaactcactgcagcttttgttcttgagcactttaccaagcaaggcatcattgccgatgttgttattcacgatattaatggtcataacccacatatccatataatgggaaccacccgtgaggttctttctaccggctttggtaaaaaggtccgtgagtgggacaagcctgaaatgcttgatagttggcgtaaaggctggcaggaaacgtgtaatgagttccttgagctgtatggtcacgatgaacgcattgatcaccgttctatcagggttcagtatgaggaagcacttgaacaggctaccgctgccgctacaaacgaagagaaagcaatctggctggctaaagctattgaaacaaaccgcgatccaatacttcatatccctcgtgaccgctggggaactgttgcagctcaggaacaacgtgctgcagagcaagccatacgtgatgagctgaaaaaagaagctgacgaagcctactttacctttaaagatcttccattggacattgttgttgatgttgccagctttagggttcatgcactggctgaaccagaagaaattgttatcccggataacacaggcagagcttcatctacaggctcgcagaaacctgttctggttgctcctgcgcctcatacacgcactacactgaaaaccccatcctcttcaacggcaagagcatttaaacgcgctcctgttaaaagtaagagaaagcaggttaaaccccgtcaggatgggatcttcaagcgcttcaccttactggtagcagattatataagagagaaattcgtctgggccaagaagaagccagcccctgtttcagtcgatgctaaacacgataagcgtatagctgaaaactatgtctttgatgaggttctgggcatttatgtttcacgctctgagcatgaaagacgtgccagatttaacagtgacacttatagtccaaccaaagaggaggtcagacgctttccaagccgccctaaagaagaacagcacaaagcagatatcgatctggactatacccctgctcctccgccagtatcaggaagaagcaggaatcatccatcgttaaagccgccgggatttaacaacaaatga

SEQ ID NO: 226741 - DNA, 186 bp, Klebsiella pneumoniae; identical to SEQ ID NO: 159331

SEQ ID NO: 226742 - DNA, 750 bp, Klebsiella pneumoniae
atggattctgacgataaaaaatcaggtaaattttcaggtgcaacggcagcttttggggcattaggcagcatcggtaagaaagttcttgcaaagaaagacatcgcccaaagtgaggatggtgaaatcactgaatcaaaagtcatgcaggtactggactgggcctatgataaagcctgtaatggtgttgtaggtttggattcggcgcaagagcttgctgcaccatatttgaatggtaatggagaacttgttgataaggttaatgcgctaatacgatggcaaaatacaaaagcgggaacatcaggctttatcaccggccttggtggaataataacgctcccggtagccattccagctaatatttcaagcgtcatatttatacaagttcgtatgatcgcggcaattgcacatatgggcggatatgatttaaaagatgaccgtgttaagacacttgtatatacctgtttaaccggaaatgctgcgaaggatatagtgaaaaacataggtataacaattagtacaaaaatgacaaataccttaataaaaaatatttctggtgaaacaataaaaaccataaataaagcggtaggatttaggcttataactaagtttgggcaaaaaggtgctattaatcttggtaaagcaataccactagttggtggtgtcgttggtgctacatttgatagtgtatccaccaatactattgggaatatatcccgtaatattttcattgaagaaaaaatacctgaatga

SEQ ID NO: 226743 - DNA, 1398 bp, Klebsiella pneumoniae
atgggaggcctgcagctcgtcgccggggtcggtcatttcggtcaccaggctccgcacccaggtgttcagctccagctccagcagacgccggtccttggtggtgccgatattctcgcgctggatcatcttcaggtagtgcgcgatgcgcgacagcaggaagatgtaaggcagacgcgcgttgatacggctgttggcggtggcgtcggcggtatcgtacagcgccggtttctgcgcggagttggccgagaagaagcaggcgtaatcgcgatttttgtagtacgacagcgggataaagcccaggctggcgaactcaaactcccgcgtttccgggatcatcacctcggaagggatcttcacctggttgccggtgcccagatcgtacagatggatgggcagatctttcaccgcgccgccggcctgcggaccgcgaatttgcacgcaccagccgttattgacaaagctcttcaccatattagatgcgaaggagaacgccgcgctggtccagagatatttttcgtgatccgggcccttcacctgctcgacatagttgaagctgcgcaccggcacggtgtccggaccgtacggcagacgacccagcacgcgcggcatcaccaggccgatgtagcgggcatcgtcagtttcgcgaaacgccttccagcggatatattccgcacgatcgaagtagttgccgatatccttaatggcagccacctcttccatggtctctttcaggaagaaggccgggccgacggcgccgataaacggcatatgggcggccgcagagacgcgggagatattgcgcagcagcgccacatcctgcgggctggcgtcgaactcataggccgagatcaccgagccgatcggctcgccgccgggagtgtcatactccgcggtataggtgtgccagtacaggccgctctggataagctccggcgcgtcctcaaagtcctggcgcagatcgtctttggcgacgtcgaggatctccgttttgacgttctgccgatagtcggtgttgtccaccagctgtttgaggccgcgccacagggattcgacctgctgaaactcctgatggtgcatcaccgcgtccagctgacggcttatctggaaatccagctcggcgatatggtggtcgatcagcgttttgtcgagcttttccacccgctggccggactgacggatgcgttccataaacacctgcatcgccgcggtgagacgctccgccgccggcgcctcggagagcgcggcatcgtccagaaagtcgttgatatccccgaggcaagacgccggggtgagattaattttttcaaacagcgaggcgtaaacgccctcgcccgccctgttttcctgcagcgtggtttgcccctgaacaggggcgttttctgtggtaacagacattag

SEQ ID NO: 226744 - DNA, 789 bp, Klebsiella pneumoniae
atgaactcagataatgaagaaaattttgtggctgacgttttgaaatattttgatctaactgtaaggaagatccctatagaaaatgatgtaaataaaaggagattatcccctgattttgtagtatcagatggggagcataaatatcttatggaactaaaaacaaaatttgataatgagtcagtaaaagacgcaagaaaacgtggaatgaatgaaaaactagtatatcatgagattacctccactgaaagaaagaacaatattcgtacaattattaaggaggcggcgaagcaactcttagctcgccgtgaccaagaaaatgccgatttttgcataattatactgctagcaacaggtgtcaacgaaattctatttagagaacagttcaaaaatagcttatatggaaaagtgaagctcttagttaaaggtgactttgttgatgttaaagaatgcttttattacacaaatagtgatttttttaattacagagacatcttagatggggctattttaattggagaaaacaatctcactttatgtttaaataatttatccccgcgctatctagcactgaagaaatcctctctaactcaaaagctattacacggagtaactgatcctcttaagttagaaaatgataataaaacattccttattgatgacgatattgatcgtgacaatgcagatgcactacaaaactatcttattgaaaaatatgatatttcatccgtcacgccacttccaatgaattatattactttgatgtcaaagttagacaaaagcattgaatag

SEQ ID NO: 226745 - DNA, 258 bp, Klebsiella pneumoniae
atgacctgtatagttaaagacattgaagagcacgagcaaggtgtaaaacttacccttgaaaacggtaatagcatctatgttaaagattacgattattttttcctgtctgaatcagcggatgattgcgacaaggaaagaatggttaatgtatatagaagattgatttctgaacttagccaactcagcgaagaaacagtaagatcgctgatgtcagataccaaagtctacaacagcctgtccctcaacacgtccttttag

SEQ ID NO: 226746 - DNA, 876 bp, Klebsiella pneumoniae; identical to SEQ ID NO: 213968

SEQ ID NO: 226747 - DNA, 339 bp, Klebsiella pneumoniae
atgaatacccgcatcgttcattccatatcgtccgttctgcgtactgatggctttgtgcgcaatatccacgccgctaacccgttcgatgttatccgcgccgatgtggtgctggcgcgcatcgagaaagaggcagggcgctgctgcgggatgcattacgagctgtatcaggcgcgcgtgctgggcgatgcgctggattatctggacgcgctgccgctgaaagaccgcccggtgttgatgggcgcggcggcaaaacgcgggtatctgctgacattagccgaagaagagcacgcgcaggaagcccgtgatgtgctgatgagtgaactggcggcaaacgagtag

SEQ ID NO: 226748 - DNA, 567 bp, Klebsiella pneumoniae; identical to SEQ ID NO: 152557

SEQ ID NO: 226749 - DNA, 462 bp, Klebsiella pneumoniae; identical to SEQ ID NO: 226242

SEQ ID NO: 226750 - DNA, 576 bp, Klebsiella pneumoniae; identical to SEQ ID NO: 215006

SEQ ID NO: 226751 - DNA, 426 bp, Klebsiella pneumoniae; identical to SEQ ID NO: 214798

SEQ ID NO: 226752 - DNA, 2544 bp, Klebsiella pneumoniae
atgccaaataagaataatggattattcaaactatccactgtctttatcgcaatgctttcggcattgctttctggtttgaataataaagcgcaagcacgtgactttttcgatccctcattcattagctcattgaatggtagcgatccatcaaccactcccgatttatccatatttcagactcagaacgcgcaggcgccaggggattatcgggtcgatattatgtttaatggccgctacctggacaccaggaccataaagtttgtcgccaacaatcgcgccagcagcgataaccgcgaacccgctctggttccctgcctgagtctaaaagcactcgcggaatatggcgtaaggataaaagcctttccagagttagccgaggatcaaaacggctgtgcaaacttttctgtcattcctgacaccaaagcagattttgactttaccgcccagcgcttaaatatctctattccgcaggcggccttatccaccaccgcacagggatatattccaccggatcagtttgatgacggcatcaacgcgttattggtgaactatcagttcagcggctcaaacgacatgcaggccaatgatgaatactacagtctgaatctgcagtccggcctcaacgttggcccgtggcgcatccgtaacctcagcacctggaataaaaacaacagcggtgccggggactgggattccgcctatctctatatgcagcgcagcatccgctccatcaatagtaaccttgtgatgggtgagagttcatcgctcaacggtatcttcgacagcgtgccgtttaccggtattcagctggccaccgatacgacgatgttgccggaaagtatgcgcggctatgcgccaattattcgcggtatcgccagaaccaatgcccgcgtcatcattaaacaaaacggctatcaggtataccagacctatgtcgctcccggggcgtttgaaatcaccgatatgtacccgagcggcggtagcggcgacctttacgtcacagtggaggaatccgacggatcgaaacaagaatttgtcgtgccgttcgccaccctgccggtgatggtccgtgaggatcagctggaatatgagatcacatctggtaaatatcgcccgtacgatggcggagtcgatgaaacgccgtttacccaagccaccgcgacctacggcgtctccagcagcctgacgctatatggcggcatgcaggcggcttcgcgatatcaggcgctgtcgacagggcttggctataaccttggtgaactgggcgccgcctcggcagacgtcacccaagcctggtcaaaaaagaaagaggatgaaaagacttccggacagtcctggcgagttcgttacgggaaaaacattgtcgaaaccggcaccaacgtcaccatcgccggctatcgctactctactcgcgggtttaatacgctttccgaagtactggatagctactctaatgacggcagttatacctctcgttcgctacgcaaccgtaccaacctgacgctgaaccaaagcctgggtaaaggcctcggtagcctgtcgataagcggattgattgaagattactgggatgataagcgtaccaacaaatcaattagcgtaggatacaacggcggtttccgtaatgtgaactactacctcggctacagctataaccgctacacctggagcggagataactctggtaaggatgctcaggacgatcagcgcatcactctgaccgtaacgctgccactgagcaactggctaccgggcacttacaccagctatcaattaactaacagcaacccggggtctaccgatcagtctgtatccatcggtggtaatgcgctggagaacgacagtctggaatggagcctacatcaagggtacagcaaccgcgaatactacagcggcgatatgcgcgcaacctataacggtgcccgcggtagcgttaatgccggctatagctatgacaataacagccaacgtatcgactacggcgccaacggcagcatccttgcccatgccgatggaattacgctgggtcaggatatcaccgacgctgccgtgctggttaaagcaccagggctagatgacgtcaggctggccaacgataacaccatctccaccgactatcgcggctacgccatcgtcccgtatgttacgccttatcgtcgcaccgatatcacgctcgacagcaccacgcttggtgaagatatggaactgccagaaaccaccaagagtgttgttccgacgcgtggcgccatcgtgcgtgcaagctatgacggcaatatcggccagcgggcctttgtgcacctgaaaacagccagtgggcaggatgtgccttatggcgcgatggtcctactcgtcggcgacagcaaatcgcagccaagtatcgtcagcgacgctggtatggtttatatgtctggcctgcagcagaccaggatccttaacgtccagtggggcaaaagcgccgcgcagcagtgcaatgcttcatttactttaccgaccagggaaggcaaagcgtctggcatcaggcaaatcgaaacgatttgccgttag

SEQ ID NO: 226753 - DNA, 2124 bp, Klebsiella pneumoniae; identical to SEQ ID NO: 214606

SEQ ID NO: 226754 - DNA, 1281 bp, Klebsiella pneumoniae
gtgtggccactcccggaactcgtcccgcgcaatgatgatttgcgcgcagcgggcaaacagcattttttgcacacggatcaccgcctcgtcgtccatcgagccgataacgtacaggcagccgccgccgttgataatccccgccacatcgatgccactgtccgtctgcaggacgctcaggtcagcgacgttttccagcctagtgatcaaccccttcacgtcctttttcagggcctccggcagcgcgtacgccgccgccagcacctgctgaatgtttgccccctgcggaaactgctccgcaatcagcttcgccgctttctgctcgctgatgcggtagtggtccgccacgtcgccggtctcgcccaggttaagcccggcaatcagcaggtttttcagcgcgtactggtcgagatcgcggaacagattcagctgcgccggtttccccggccgcagatccagcagggtgaagtccggacagtgcgcccggaagacgtgcggcgcccatgcgtcccctttggggtcgaagtacaccaccgcgtccccgaaatcgcgtacgcagcgaatgagcgcgttggtggccatcacgctcttgccgctcccgggcaggccgaggatctgaatgttggtcttgcgccaggtatcacgcggaaccagcaccggcttgccctgctcatccttacccagaaacaccgcctgctcctgccgggcctgctccgaggaaaaatcggccagcgcattaaccggtaccggctccccgaaatgcaggtggcgcacgtcggtcatctctcctgtccgctggctgctgcgccggctctcctgattcagtttcgcgttcaccgcctcgtcagcagccgcaaaatgaccgtcaagcagcaggaacgccagcagccgcgccaacacaatcccgacagccagcccgcccgcgcaccaggcaatcccgaacaggttagccggctgcagcaggtaataatctgcgtttgcgtagaggtccggacgcaggacggtttctccccagctctcgataaacacggcgacaaccagcccccccagaagggccagaccggccgcgccggtcagccagtacgcgtagttccagacatgtcgacgtgccctgaccatccgcccgggcgaatccagcgaggccagcaccgaaaatggcgctggccgtttattatcgcgcttatagcgatcggcatactcccgtcgctccttatgactcagccccacaaaacgcatccgtccggcccaaagttcagccagaccgaaaaacaggccgataactag

SEQ ID NO: 226755 - DNA, 249 bp, Klebsiella pneumoniae; identical to SEQ ID NO: 121673

SEQ ID NO: 226756 - DNA, 222 bp, Klebsiella pneumoniae; identical to SEQ ID NO: 121664

SEQ ID NO: 226757 - DNA, 552 bp, Klebsiella pneumoniae; identical to SEQ ID NO: 214415

SEQ ID NO: 226758 - DNA, 192 bp, Klebsiella pneumoniae
atgacgaaacaacagaaaacggcgctgaacatggctaaattcatccagaatcagtctctgctcctgctggagaagcttaacgagcttgatctcgatgtcgaggccgacctttgtgagaaactccacgatgatgcggagcatcttttccgtacactctcctcgagactggattcattacaggatggtaactga

SEQ ID NO: 226759 - DNA, 192 bp, Klebsiella pneumoniae
atgacgaaacaacagaaaacagcgctgaatatggcaaaattcatccagaatcagtctctgctcctgctggagaagcttaacgagcttgatctcgatgtcgaggccgacctttgtgagaaactccacgatgatgcggagcatcttttccgtacactgtcctcgagactggatgaattacaggatggcaattga

SEQ ID NO: 226760 - DNA, 192 bp, Klebsiella pneumoniae; identical to SEQ ID NO: 121669

SEQ ID NO: 226761 - DNA, 2082 bp, Klebsiella pneumoniae
atggaatacaaaatagacgacatatcggcccttttaagtggcgttcatgtagtaagtgataatgaagatggtgaaggttggtttttctctcaagatttaactacggactacgttccagccagactatcgttgaatgaaaacctgactggggatattgatggcgcgagagtgattcttataagcgcccccggggctgttggtaagtcagtgctggcgagggaactaagtaataaaactggtagtatatatttggatttatcaaaggcttcaagtattgctggtaattatgttattggcgggttggcaaacaaagatattttatcagcatggaattccggatcggttggtttaataattgactctttagatgaggctaggttaagagtaacccaagattcatttgaagactttttgctcgacgtcagtaaagtttcaaagagaaataagaacccaataattatatttggccgagtgggtattattgaggaggcttggctaattttaagtgagattcataatattaattgccctgttttcgatattgaattttttaatgagtctgaagctactgacttcatcgaaaaaaatcttctgagattatctgaaagtcaaaggcaagaatatagacacttatcatcttctcttagcgtgcattcacaagtatataaaagctcaatccgtggtgtagttgacgaattgaaggagatatcgggcgctgaatccactagattcttcgggtatgcaccggttttggaagccgtatcaaaagttattggcaccatcaaaaatccatctagaattcttgaggaaatgaaagatattttgagcggtgaaatgttgttgagtatatgcatagctgttttgtcgcgagagcagtacaagctgactcagcagttatctgaaaaatttgactcaataaaagaagatctttattcaatcgatgagcaacttagtcgacttgcatgtagattatttaacatcccgccgataaatagtatgagtatgctaagtggtgatttaattgctttgtataatgatgctgttgaaagtatgttgcctcaacatccattcttagacgggacgggaagaaaggttgccagctctgtctttgaagcatgcatattgtcctatgcattgaggagtgaaaataaaagtatttctaatgctgcaaagaactattgcctattaggcgtttcaacgcctaacccattcctatttgactttttcgttgagtctagggtgcagcatggtgatttagaaattaatagttccttcataggaattcttttcgactctgctctatctaagctaaaaattaatgacagtgctaccttgatagttaatgatgatgaagatatgaggcttcacgttgaatttattatctctaattcgaatgatgaagaaccaaaagagattgagtttacatccgatggatatagctcaatagttctcggaactaaagtaggcaacgttttcatcaatacggaatcttctgatgttgagttcgtttctggcgaacagcttgagcttttctcacctattagtatttcttgtgactgccttcgcataaacagcgaaaagttaattgttaagtcagtcaaaaaagatgagggaaacacaagcgttattcttgaagcaaaccgattcgaaagtaatcaaactattaatccccctttggtccgccctggatctgagctttatgtgaactggccatcatcagaaggttttccatggtctgcgttttcaaacaagcttgtaaattctaattccgacgatcgggttgctgatgcgttaagagtgtttcggcgaatcgttatggcgtttaggtctcacagtaaaggccgcttggcaaggcttcaagataaagttaatcatgctcgtatgttacgaggcgaggacggacgaatgcttttgtctcagcttgttaaagacggagtgataagtcctgaaaatcacatgtattaccttgaaccaaaccttctaggaagtgttgcaggtgcatcattcttacaggtaaataccaaaaactattctgatgagacacttcaatatgtagcgcgtgcgataaagcacaatgagtga

SEQ ID NO: 226762 - DNA, 1053 bp, Klebsiella pneumoniae
atgactaaaaagatacacgtttatgattttttctccggttgcggtggtactagtgctggcctgaaaacagttggcatggaaatcgtctttgggcttgatattgatctcgactcggccaataccttcaaaaaaaacaacccactagcgcattttattcatggggacattaagcaaaccgatgtcgagtctattgaacatttggtttctaagtcgcgaatgagcaatgcccatacgcttttttgtggatgtgcgccatgccaaccattctctaagcaaaataagtcgcgaaatgaagatgacccacgtaaagaccttctgagtgaattcattcgatttgtttcatactttgcgcctgattttgtgcttatcgaaaatgttcctggcattcagaatgttgacataaataatggcaactttcagaagtttttagaatgtctcaagtccctggattatagtttcgattatggtgtaattccggcgctatggtttggtgtaccacagacacgtgaacgttttgttttactggcatcgaaacttactgctatatccctacccgctaaaacccatgatggcataaaaacgccatacgcaactgtacgagattggataggatctctaccacccattgccgccggtgagagtcataaacaggttgttgatcatactgcagccaagctatcttctcttaatataaaacggatacaagcaactcctgaaggcaaaggacgtgaatcttggccagaggatttgattttagattgccataaaaaatattctggtcatactgatgtttacgggcgtttgtcttgggataaaccagctagtggtttaaccacccgttgcataagctattctaacgggcgtttcggccatcctgaacaagaccgagcaatatctcttcgcgaagctgcgttattacaaacattcccattcgattatatttttacaggatcaatggtttctaaagccaaacagatcggaaacgccgtgcctcccaaaatggctgaagcacttggaaaagccatcatttactcactttcaatgaagccctaa

SEQ ID NO: 226763 - DNA, 1782 bp, Klebsiella pneumoniae
atggaatatatacaaagacttagaaatgtaatgaagtcagcagatattgaacccttcatcagacatattcgttttcctttttttaaaaatcttgccgagggatgcaaggttgattttaactaccctatcacagctttcgtgggacaaaatggcacaaacaaaagctccgttctcagagcgctttttggttcgcctaacaactattcactcggtagcttatggttttcaacagatgtagatgaaattaaagacgaaggacgctcgcgttttatttatggatattttgatgcaccaacaaaatcaatcgtagaagttatcaaaactcgtatttctaaagaagaagacccggattattgggagccatccagacctataagatcggatgacatggcccctatgcccgagaagatactctcgcataatcagttgaaaacacgatggaaagcaattgataagaatgttatatatttagacttccgggctaccatcagtgcctttgataaatttttttatcatgctgactttcaaacatatccaaagaaggactatctaagaaaacgtagccagatgctgaaggatattattgacaatgaccttaaaacatacagacctcacaaaggtaaaaaagacaaattatttgtaaatactttactagacaaggttaaagttgatatcattggcaacatacttgggaggaaatataaaagcatcagactattagaacattctttatttaccaatgacagagcaccaacaattatcctccaatctgagaatttgaaatattctgaggcatttgctggaagtggagaattcgctgtatctattttggtacataaactaatcgactgtaataaagcctcattgattttattggacgaacctgaagtatcacttcaccccgctgcgcaacgtaatttaatgagttttttaagtgagcaagcattaaagaagaaacatcaaattgtcatatcaacacattcttcatcaattgttaaagacttgcccaaagaagctataaaattattttgtttaaatgataaacttggcaaggttgatgttcttcagaatgttagtccagaagagtcttttttcattcttggcgaacgcattgaaaagaaaacaattattgttgaagatcgtttagctaaaaagttcgttgaaaaagccttaaaaataggtggtgatggtttattcaattcatttgatgtacaatattgccccggcggtgccggaagcatatatcaaaacattgctttacctttatgcattgctaaggtaaaaaacgtgatgtttcttcttgacggtgaccaatgtctaactgatgaatttccaacttcaaattcaattcctgagaaagaagatgtaaatttacaggaaactatcaaaaacattatcaatcaagatataaaatttcactgtgatggttccaaagggattgctaataataaacaaaaaatcaagatgcaaagagagttcatagatttcattcatgataaaattgcctttttacccgtattaacccccgaaatatttcttattgaaaatacttatggcgattataaagcttacaaagactctattccgaatgaaatcatagactcaaagcagatcaccatggaaatttgcaaactcgacacgggcgaggaaaacattactggtgataatattttcgaaactcaaataagaatgttaaataaaatacctaacaatcatgatgcttttacaaaaactagagagatgctgcaaatcttcttagatagtgatactataaggccatga

SEQ ID NO: 226764 - DNA, 9621 bp, Klebsiella pneumoniae; identical to SEQ ID NO: 8671

SEQ ID NO: 226765 - DNA, 7323 bp, Klebsiella pneumoniae
atgacgatacatcatgccgcattggcgcgaatgttaccggcggaaaaaaaggaaaagctattacgacagttggcgcaatcaggcgtgtcgcccagccgcattcccatcatcaaagcggatccggcgcaggcaatcccgctgtcgtttaatcaggagcggttgtggtttttgcaaaaatacgacagtaccgccactaactacaacctttatgtggtgtatcgtttgcatggcgtggtggatatgccgatgctcacggaggcattgcgccatgtgcaagcacgccacgccatcttgcgtacccgtatcatagtacgtaacgatcggccttgccaggtgatagatgatgcgtcttcgttagttctcgatacggtcacgctggcagcgcaggccccaacttcagcgctagatgcggtaattcagcaggtgataaacacccggttcgatctggcacgcggtcctctgtggggggtaactcagattattcaacccgatcaaggttgtcatttggtgttttgcgcgcaccatatcatcatcgacggtatctcgttacggctattgttcgatgagttacagcagcagtatgctcgattgcatgctggtaatgaaacgtcgctgcctccgccgccgctgcaatatgccgattatgccttctggcagcgcgaatggttccaggataccttgctggcgaacgaacttgcctactggcgtgcgcgtttgcaagacgcgcctctgctgtcgacatttccatcgctgcacccgcgcccggcacaaccctctacacatggttcccggttcagcatcaccctggatgaaacattaagcctcgcgttgaaacacgtagcccgcacgcaggaaacaacgccgttcgtgctgatgctgactgccttccaactggtgctgatgcgttacgctcagcaacagcgattggtgataggcatgccagtatcggggcgcattcgcccggaattgcagagtagcattggttattatgccagcactgcggttatctacaccgattttaatggggttgaggtagggcgcgaggcgctccagcgtgtgaaggccagcgtgaaagagacgcaggggcgccagcaactgccgtttgaaaacttggtgaatatgctggatctccctcgcagcctttcccattcaccgttgttccagatcctctatatctaccataaccacgtgaccccacgcgcttttaccttggctggtgcgtattgggagcaggtgacgtatcacaatcagaccgtcaaatacgacatgacagtcgaggtgttccaaaacgacgccacgttcgacgtctcctttgagtacgatttggggttatacgatgctgatgtggtgaagcagattgccgaggcgctgcgtcagcactgcttatcgttgacatcatcactggagaccccgataggggcgatccctctgcatgcaccggagaccgcaacgccgcggcgtgatccgctcaacgccactaacgtcccgtggctcgggccgcaggatgtgctgcgtatcattgaacagcgctgtgtgcagcacccaaagcaactggcaatacagcagcatgacggcacactgacctacgctgagctctgggcgcgtgtgcagttcatcgcgatgcgttttcgagcgcatggcatacaaccgggcgatcgtattggcgtgctgttgccacgtcacagggatgtgattgcaaccatgttggcgacgtggtttgtgggggcgtgctacgtgccgttcgatattcatcagcctgccgcgcgtttgcaacgccttatgcaacgcgcgcgtttggtctgtctggtggtccgtcagccgggagagtggggtgaaattgtacaactgtcgttgccggaattgatgcaggacatgtcgaatgcgatccggtattctacaccttgcgcgctgttgccggatatgcaggcctacctgttgtttacctccggcagtaccggtgaacctaaaggcgtgtgcgttgttcaccgcgggttgctgaacttgttgttggatatgcagcgtacctttgcggttggctcgcaagaccggctgctctcggtgacgacgccaacatttgatatctcattcttggagtatctgttgccgctgatctccggtgcgagtctctatctgacagaggcggaacgcgccgcagacagcttccgtatgattccgctgattgccgactatcgaccaacgctgatgcaggcgacgccctcgttctggcacgggctgttgatggcgggttggcgtggcgacccggaactatgtgtgctggcaggcggtgaagcgctgccaacgaaagtggcggaagaactgttgcgctgttgtggttcattgtggaacctctacggtcccaccgaaacaaccatttggtcgctgaaatcgcagataacccaagcggaaaacatcaccctcggcgctcccattgccaatacccgtatatacattctggacaatgagggccatccagtgccgcaaggcgttgacggcgagctttacatcgccggggatggtgtggcgcaagggtatgatgggcagcctgagttgaacgcacagttcttcttgtcagaaccaggggtccccggtggcaggatgttccgcactggcgatctggtcaggagtgatgcgcaggggcagttgttttttgttgggcgcaaagatagccagatcaaactgcgcggttatcgtattgagttaggcgaaattgaacggacgttggcacggcatccgcatgtggacgccgcggtggtggcctgtattgaaagagcaccgttacacaaagcactggcagcattcatcatcaccagtgagcctccctcgctattcgagcaactgaaaaacgagcttcggcagcaactgccagactatatggtgccaacgctgtggcagagggtggccgacttcccgaacactgacaacggtaaaatcgatcgtaagcggttagcggaaaatttcgttgccgatagctcccttgtgtcgccgcagacgcaagcgctgagcgacacggaacagatgttgctggcgctgtggatgcgctatttgccgataaaaaacgtcgatcctgagtgcgatttctttcgcttggggggacattcgctgttggcggtaacgttggtagcagagatcaaccgcacttttcactgcgccttgaccctgaaggacattttccactactccacactacgggcactgagtgcgcgtattgcacagcaatctatcacggacgctgccgcgtctcaggatgactgggtgatagtgcacgaccctgagcatcgtcatcaaccgttcccattgacggatgttcagcgcgcctactggcttggacgacagacgggtgctacctcgatcgcgacccacatctaccatgaatttgacgtagaacactttaatgttacgcattttacccatgcggtgaatgcgctgatcgctcgccatgaaatgctacgtgcgcgggtactccccgacggtactcagcagattctggcgcaagtgccggcgtatcagttagagcagcgcgatctgagtgctttgtcccctaacgcacgaaacgatgccttgatggcgatccgcgatcggctgtcgcatcatgtgcatcccgcagatcgttggccgctgtttgatttcagttattcggcttgcacggcgcaacatggccgcttgcatttcagtctcgatctgctgattgccgatgctctgagtatgcgcacgctacagcaggagttgatgatgctgtaccgtgagccccatgtgtcactgccgttgctaccgttctcttttcgtgactacgtgcaggcgctgttggtagagcaggcgagtgaagcctatgcacgcgatcaggcctattggcaacgggcgctgccgcagctgtatggcccaccaacgctgcccgtacagggcgatttggcgcaactgtctgcgatcaggttcgtacgtcgccgtcatcggctgtcagcccacaactggggagtgctgagcgcgctggcccaacgcacacgtatcaccaagacggcattgttgttgacagtctttagccaagtgctggcacgttggagccttagcccgacgtttacgctcaatctgacgttgttcaaccgcccgcagggttaccccaacgcagaggcagttattggtgattttaccgctgtcagcttgctgaatgtttgttacgacagccagcactcttatgcccacaacgctcagcgtattcaggtgcaactgtgggaagatctcgaacatcgtcgtttcagtgggatccgcgccagcgaggcgctgatccatagcggtcgtttccatgcgccgatgccggtggtattcactagtatgttggatatcgacggggagacgactgcgcaagaccctcgggacacaacccgttttactctgtgtccggacgccaatattacccaaacaccgcaggtgtggctcgatcaccaggtgatcgagttggctggggagttgcatttcaactgggacgcggtcgagcaactgtttgataccacgctgctggatcagatgtttggtgcttattgtcatgcgctgcaggcgctggttgccatgccgcaaagttggtggggggtaaatagttctctggcgctgcccaccgttagtgcaccggtcacgcaggcccctgcacctacggccttgttgcaccatgggttactgcgtcaggcagcactgacgccacaggaaactgcgctgatcagtcctatccgtgaattgacctatcgccaactgtcgacggcggcggatcatgtggcccgcgccctgttagcgctgggcgtgcagcatggcgaccgcgtggcggtggtgatggaaaaaggctggcagcagattgccgccgtacacggcattttacgactgggtgcggtctatctgccagtggatccggtgctaccgccacagcgtcgccagcttttgctgacggtgggcgaggtgcgggtacaagtaacgcagccgggtctcacgcaattggagccgtcgctgcccgtgctgatcatcgacgacggaatgctggacacgcctgctgcgccgttgcctgaagtggctggggatgtcacggatctggcctatatcattttcacttccggctccaccggtaccccgaaaggagtgatgatcgaccaccgtgcggccatgaacacgctggaagacatcaacgaacgctttggcctcaatgcgcaggatagggtgttcgggctgtcatcattgagctttgacctgtcggtttacgatgcctttgcgccttttatggtgggtgcagcgctggtactgccggaagcaggacgggaaaaagatccgcgtcattggcagacagttatggtacacggtcatgtaagcgtctggaatgcagtgcccgcactgatgcagatgctgtgcgaataccacagcggcgatcggatgagttatccgacgttgcgtctggcactgttgagcggcgactggatcccgctaacgttaccggagcagatgcgcgagcggctcaatgaaacgatggacatcatcagtctgggtggagcgaccgagtgcgccatctggtcggtctactacccgataggtgaggtggaatcgacgtggaccagtattccctacggtcggggtctgcgcaaccagccagtatacgtgctaaatgcgcaactggaggaatgtccggtcggggtggaaggagagatttgcattggcgggatggggctggcacaaggctacctgaacgatgcagagaaaacggcggcgagctttgtctggcgcgaagcgagtggtgagcgaatttaccgcactggggatcgcgggcgctactttgctgacgggcaagtcgcctttttggggcgcaacgatacccaagtgaaggtgaatggttaccgtatcgaactgggggaaatcgagcgctgcattgcgcgacatcccgatgtggagcagtcagtggtggtggcagtgggtaattctcaacatcgtcggctggtcgcttttgccaaactgcacgatcgccaccaggcgcaggcattgcaagctaaggaagcggaggcggcggcactggcgcagggtattattgtgaatccggcacagcgtctagcgttcaaactcaaggagccacatattcgcgcgctggatggtctgggcattgcactgacggcaccggcggatagcacacgttacatcaaacgccgcagctatcgtcatttcagcgcgcaaaaaaccacgctggcacagttggggcaattgctgtcgggcttggggcagatgcgtctacccggtctaccttttgccaagtatgcctatgcgtccgccggggggctatacccggtgcaaacctacgtgtacctgcatccagacaagatcgaagagggagtatccggtatttactacttcgacccgcgacagagctgtcttatgccggtagcaccagaagtcgagctgaacagtggttttcatgccggacctaatcagtctattgccgatcgggcggcattcacgctgtttatggtggctgatatggcggtgatctcgccattctatgggcaagaggcagcttggcacttctcggtgatggaagcaggtactctctgccatttactggaagaagatgcgccgcgctacggattggggctgtgccaacttgggatggcagacttttccgctgtggcatcgcattttcaattgtcgccacatcatcgctatgtccattgcaccgtggggggcgtgatagggcaagaggcggcaagtgctgcagcattgctgcgcgatttctccacctatgagaaaccgaaggaaaccgctgcgccgctggacatgcagagctacaaagatgccatgctgcgcggcctgcgtcagcaactgcctgactatatggtgccgagtgatctgatgttagcgaccgattttccgttaaccgctaacggcaagctagatcggcaaaaattacagctgcagggcgaacaaattgcccaccagcgtgacggcgtgggtccaatccaggtggacagtgcgttacaacagcggctggtggcgctctggcaggaggtactcggcgtgagccacgtgtcggccgaagacgatttcttctcgctggggggcagttctatagaattggtgcgtattcagcaggcacttgaggcgattatcgggcaggagattcccattgtcgatctgttccgtctgccaaccatcgcggatgtggcgcgttaccttgatgagcaactgcacaatctacccgccgcccacgatatcgtattagcgcaggctgaggtttcgcaggtcagcgctgcgcgcgagaatctggcgttgcggcgtaaacgtgcccaacagggagaaaagggcgatgagtga

SEQ ID NO: 226766 - DNA, 1740 bp, Klebsiella pneumoniae; identical to SEQ ID NO: 71843

SEQ ID NO: 226767 - DNA, 924 bp, Klebsiella pneumoniae; identical to SEQ ID NO: 210799

SEQ ID NO: 226768 - DNA, 552 bp, Klebsiella pneumoniae
  misc_feature (277)..(277): n is a, c, g, or t
atgaaccatccaactttatggggtcagtccagcagcgccgccgggcaaggacagcgggcacggagccgattttgtgccgggtggcggctgcgccttacccggcctacgttcgtacgacctgtcgttaatttattcacttttcttgctgaaactgccggtgctgacggcctcaaaatcgctgagacgttcccggcaggccggggcagcccgcatggatgcgggctgagggccgtgttttgcagggacgctgcctcggcccgacccgaagcctgcaggnataagtcgaaggcaccgcgcagcggcgatgttgctggccggagcccgggggtacagggggcggcggcgactggccgccccctgtgcgctccctgcgccatacgaaacataacgcagaagatcaaccgggagcgcaatctgcccggaattaacatagaagttgtagccctgccaaacgttgtggtcctgccaaacatagtgcgaacagggacatttccggttgtgccgccatttcgccgggtggcggcagctccttacccggccaggggttcgtga

SEQ ID NO: 226769 - DNA, 654 bp, Klebsiella pneumoniae; identical to SEQ ID NO: 212771

SEQ ID NO: 226770 - DNA, 393 bp, Klebsiella pneumoniae
atgcacaacgcactgaacgcttctcgttctatacagacaatccgtgattgtacgagtgttattgagactcacgtgcttgctaagcacaagattgaagtccgtaaactcaacaatgacgcggttgagcttaaagacacacgcttcatcgttacctttaaggacgacgttgagatggcgcgtgccagcgtaaaaccgttagcggaagctatcttcctgaacggccgtgttcgttttgtcgtaaaacctgataagcagtacccggaactgttgcgcgatttaaaagaattttctgaggtcatcgaacattctattcgccgctttgtattaggacatggtagcattgacagtcatgtaaaggctgatagatctgctaccaaatggctcctacactag

SEQ ID NO: 226771 - DNA, 750 bp, Klebsiella pneumoniae
atggctcctacactagatagcgcatactcaaaagacctaagcgagtttcctcaccctggggagactcgcgttgctcgttttggctttcttatcaacgaagcctctctctataaaatctccgaaatcgaaatcatcgatccagaagacgacatttgcctttatgtctctatggagcgagtaggtgcgtatgaccagagccagctgagcgagtttatcctagatcgagccgatgaaggtgctactgaagaagaaatcatcaaagagttgctccgctcagggcttttggacgatagcaaaaattcgatcgcaggcagaatagctctgcgtgaatatagctttgttgaaaatgacactgaagttgagagttatcaggtagctggagttgaaactgtcagagcgcttcgtcagcgaggactgtgtcacagtacctatcttttccttcttcattggtacgaacatttggtttgcgatgacaaccaaaccattcccggcgccaagatctgggctggccctctgatgcgtaccggcgatgtccgtatttacaacgccaaaacagaaaagttcgaggacgtgctgggtgaatatggtatgggtaagaacactggttttttaccatggaaccgtggcctactgctcgaccccgaactgagctcatggttgcccaataaagtgcagatcaatgtacaaaagttcattgttctaatcatctcgcgctcttcaagaacaccagtcggctggttcgaacagtaa

SEQ ID NO: 226772 - DNA, 765 bp, Klebsiella pneumoniae
atggcgccttttaacaaagggattttgcaaatgctgtataaatatattggcaatcatgataaagaagaaacaattaaatgccttaaatactttctagaagatggaacaattaaagcaagtgatcccttctcatttaatgacccctctgaattaaaaatagacctaggactggacactaacagggcgatagcaaaaaaacggtatcgcaaagataagcctaaagaatccaattttgatcaatggttttctggcttaaaacaggccaggtgggacataataaatgcgacaagagtacaaatgatgtcaaagtatgggatcgtttgtttaacacccaaccctgacaattttctcatgtggtctcactactccgcatcccatacgggcttctgcatcggatttgatgatgattttgttggaacgatagatgaagtacagatagctggttcagttatgtatagtgaaaatgtaccaatatataatttctttactgacccacaagcagaatttgctcacaagatattttttacgaagcatgtttgctggagttatgaaaatgaatatcgagtgatttgtaattctcaagggattaaaaaatttgataaatcactcatcagagaggtgattttaggctcgcatgtttcctatgagctagaacgctacgcaagaagttttcttaacactggtattaaaatatacaaaatgatttctccatataatacctactctgttgttaaaaaagaaattacagacaaaacgtttttttaa

SEQ ID NO: 226773 - DNA, 1167 bp, Klebsiella pneumoniae
atgactttgtggactgactcatatcaaagttcaattgactcaatcagtaattatatcaaaaataatttcacgccttataatgatattcctgataatttatttcaactagatgattcggttttggccgattgtataatcgtagtcgcatggcgttactttagcaatctatacaacaatcgtcgagactcgctcaataaatatacattatataatcaaagaatttcaaatcaaggcaacacacctagcttacaagaattaatggatgataaatttaggtttcttaatataatattaagaattatatttgaatataacttttgggcctctgacgattttggcccgccaatgtttttacgacccgagattttagaaaaattagacaagcttaaaccagcatcggagttcccagtgaatttcatttggatcgagcgttctatgcctgcggctttgacaaaggatttattattatcagaagaattctcagctttaagaaagattgcaggaagcgtaggtctttttgaagaaaaaatcacaacagagataaagagagggttcagtgatgtaaacaaagaggctgatgcccttaaaaacaatattgaaggccttgtaaaatctgctggcgctacagtacagtctctcgcagaatatgatgaaaaactcaaacagtacaaaagtgaatataacttcgtcctgttaagcaaagctttctcaaatcttttaaaaaccaaaaaagcagaatatgtcacaaatcacagaagtgtaattattttttcttcatggctgattgctacacctttatttgctttattgaatcatatctataatttcttccccgtagaatttaatttaaatgcattattctattatctaccaatattatcattagaattgttatttttttattttatgcgtctgtattatattgagggcaaggccatcaaggctcagatacttcaaatagaacagcgcctaagtctatgcgagtttatacatgactacgtggagacaaaaaataactcaggtgctgaaaaggaatcatggtcgctgtttgagaagttaattttcagcccaatacaggtttcttctgaaaacataccgtctttactggatggcgcatcatctattgccgagttagcaggaaaagtattgtctaaagattctaaataa

SEQ ID NO: 226774 - DNA, 717 bp, Klebsiella pneumoniae
atgacaaagctattttttagcttgaaaatttgggaagccaagacatcgattgcagtcatgaatatgctagtagagcaggctgaggcaaacattggtcgtgctttcattgacgctgatcttccagacgcagtctcggaagatgagtatgaagactatcatgaggacgatgacggtaatatatataggtacactataccattttttacctgcggttcatgttctggactagatgctaatgaagtcaagtcgaaatacaaacatctggtttcacaacttactcgtcgttctgcatttttgaccatgttcggtttattcgaataccgcatggtagagtgtctagatgtcatggatagattgactggcgaggtaactgataaaagattcaaaacggtagaagactgtcataaacggcttaccggatctataggtggcaaagccatcaggaatattgaccatcttgttgctatcagaaacatcatggcacacagcaatggcgtagccaaagactatcatagcatattgaattcaaacgcaaaaaaaactcgtgagattaaagcaatacgtcgagcaatcaatgaaaatgctggtattgcagtaaatgattttgatgaagttctcatggacggtcggtttttgaaatatgttctgggtgagtttaatcgatatataagtgagttagtagcttccgttagcagataccaaagcagtatcagttaa

SEQ ID NO: 226775 - DNA, 189 bp, Klebsiella pneumoniae
atgttagataccctggacaatctgcagttaagcaaggaagaggcgcttgcactggcgcaactcgtgaagcggttaacctggactgatatgcgagggtgcgccgttgatgatgatgaagcctatacgatcagtgatgcggtggccaaattgcagaagagccttgccgaagccggcttcgcaccaaggtag

SEQ ID NO: 226776 - DNA, 2037 bp, Klebsiella pneumoniae
atgtctgcaacagagtctaaggtaaaaactgcaccgaaaaccagcaaaaaaacacttaagtctgccgaggctgaggcgcttaaagtggctctcgatgccgcacaggtcgagtatgtcccggtgtctgcactggtgaagtctcccctgaacgtcaggaccattccctatccggcggagaaagtctgttcaatggctgattccattgaagccattggcctgttgcagaatctggtcgtgcataacctcccggatggtcgctgtggtgtggctgccggtggtcgtcgcctgaaagcgctgcagctcctgcagagtgaaaaccgtatcgatgccggatatcaggtgatggtgaaaaaggtacctgatgaactggctgttgcggcatcaatggcagaaaacgaacagcagatggcaatgcatccgtctgaacagatcgccgggttccgcacactggcagagcaggggaaaacccccgcgcagattggcgatttgctggggttcggtacgcgtcatgttcagcgcatgttgaaactgaccgaactggctcccgaaattctggcggcgctggcgaaggatgaaatcaccaccgaacactgccaggcactggcgctcgaaagcgatcagaaacgccaggtggaagtgctggaatccgcccgcaaacggtcctggaataatgaagtatcagtttcctcgatccgtaacctcattacctcagaagaggtttccacaaacggcgacaaattccgctttgtgggagaggccgcattcagtccggatgaaatccgggttgatctcttcagcagcgaaaaccgcggctatgtcaaaagtgcatcgctcgataccgccctgctggaaaaactgcagaacatcgcggagcacctccgcgaagcggaaggctggtcatggtgtgatggtcgtcttgacccgatttcacactacgggaaggacactaaaatctggcgcctgcatgctgtcccgcctgtggaatataccgaagccgaatcagaacgtcttgcagagttggaagctctggaagctaagtatgaagacgagaaccccagcgtgaatgatgacgtcgtggccggggctctggaagccgtctgggaagaacagcagaccatcgcgcaccgggcaaaacaccgggcatggacggatgaaatgaagcaatctgccggagtggtggtttcctggactggccaggaggtgaaagtacagcgcggtgtggtgctgtgcgccgatgaaaaaatggaggagaaggatgcatccaccgatcaggcacctgaaaaagtcgatccgctggacgccgtcagtgtcccgttgctgacccgcctttcttctgaacgcacactggcggttcaggcggccctgttgcagcagccgcagaaagccgtcgcgctgatggtctggaaaatgtgtaactcggttttccataccacaacgtccgtcaaagagccgttctgcattagcgtgagtgtgtcgcattacgcgctgacccgtgaagcacctgacggtgaaaacagcgttgcgtttcaggccatccagtcagaaaaagaacgtcttgaagccctgctgccggaaaactggcgaaaggatatgaccaccttctttacgctcgatggcgcaaccctgatggcactgatggctttctgcaccgcctgttccatagatggtgtacagggcaaggatgaatttggtcgtaaacaccagagttcgctggatggggtggaaaacgccattcagtttgaccttcgtgactggtggaaaccgacggctgataaccttttctcgcacatgaagctgccacacattgtacaggcactctctcagaccggactggctggcgcagcacaggacgccgcgaagatgaagaaaaaggatgccgctgaacatgcagagcacttcctctcaaaaatccgttgggttccggaatggatgaccagtgctgacaaccagaaacagcttgccgcaaagtctgaactcagtctggcaacaagtcagaacgataccgacgttgatgccggcgaccgtcaccgaccataa

SEQ ID NO: 226777 - DNA, 1080 bp, Klebsiella pneumoniae; identical to SEQ ID NO: 221108

SEQ ID NO: 226778 - DNA, 1080 bp, Klebsiella pneumoniae; identical to SEQ ID NO: 221108

SEQ ID NO: 226779 - DNA, 162 bp, Klebsiella pneumoniae; identical to SEQ ID NO: 139499

SEQ ID NO: 226780 - DNA, 291 bp, Klebsiella pneumoniae; identical to SEQ ID NO: 102305

SEQ ID NO: 226781 - DNA, 318 bp, Klebsiella pneumoniae
atggctgaatctctgttaagttttgatagtgatggttatgtacgactgttttttgcaatggcaatcattatctgtggttacggctatgtaattatgggtgtttttataagagatgcgcttgcctatattttaatgttgtttgggcttacaggtctcagtgctttattttctttcatggtgttcatggataaaaacatgtgggccggttctcctgatttgacgctgtcagtaataacgggattttttacagccacagtgatcttttatatgttttatgtcttgatttattcctttgatcagatgggggcaggtgaatag

SEQ ID NO: 226782 - DNA, 348 bp, Klebsiella pneumoniae; identical to SEQ ID NO: 136986

SEQ ID NO: 226783 - DNA, 378 bp, Klebsiella pneumoniae; identical to SEQ ID NO: 101384

SEQ ID NO: 226784 - DNA, 171 bp, Klebsiella pneumoniae; identical to SEQ ID NO: 214382

SEQ ID NO: 226785 - DNA, 1134 bp, Klebsiella pneumoniae; identical to SEQ ID NO: 213023

SEQ ID NO: 226786 - DNA, 537 bp, Klebsiella pneumoniae; identical to SEQ ID NO: 94102

SEQ ID NO: 226787 - DNA, 813 bp, Klebsiella pneumoniae; identical to SEQ ID NO: 94108

SEQ ID NO: 226788 - DNA, 744 bp, Klebsiella pneumoniae; identical to SEQ ID NO: 211103

SEQ ID NO: 226789 - DNA, 399 bp, Klebsiella pneumoniae
atggccgaccataacaatggagtgcaaaggcatcaggctgaagtattagagcaacttatcgagaatcaaaggcttgatattgaggtcaggcgagcagaagtagaaacaaaatctaaggaaattgaggccaatgaaagaattggcctcagatctattgaggcccaggaaaaagtccaggtatctctagggcgtagagaaacgaccaatattctcatccgcgttggtgggtttcttttggcgtttcttttcgttctgatcttcattggttttgccataaaaaatgatgctaaagatatagttattgagctaatgaagtatgttgtcccgcttatcattggtggacttggtggtttttatattggtaaagccaagggaaaagatgaggctagtggtgagtaa

SEQ ID NO: 226790 - DNA, 213 bp, Klebsiella pneumoniae
atgcgtatcaaaaaatcaggcagaaaagccatgatgctggaaggtatcatgacagacaatgttgtgaccgcagatgccgcatccttcctgagcatagccaacaagagcaggaacgagatcgagtctgtaaaatttgaaccaccaaaaattggtggtaaaggttttggttacttcagagtcagaatgaaaaccagacattatgaggctcagtaa

SEQ ID NO: 226791 - DNA, 258 bp, Klebsiella pneumoniae
atgagagaatcaactgtagttacgttttctcggcctttcgacgttaatgtatgccacgaccttcaagaaaacgtgtgggtggctgaatgtgatgctctcggtcttgttactgaagcagcaacatacgaagaactgaccgagcgagtttgggaagtagcgccagagctgtacgaaatgaatggcttcggtggaaacccttcgcgtataagtctgtcttttaatcaggaacagtcctactctgacaggatcgcactctga

SEQ ID NO: 226792 - DNA, 792 bp, Klebsiella pneumoniae; identical to SEQ ID NO: 136708

SEQ ID NO: 226793 - DNA, 411 bp, Klebsiella pneumoniae; identical to SEQ ID NO: 211100

SEQ ID NO: 226794 - DNA, 594 bp, Klebsiella pneumoniae; identical to SEQ ID NO: 211085

SEQ ID NO: 226795 - DNA, 1206 bp, Klebsiella pneumoniae; identical to SEQ ID NO: 211083

SEQ ID NO: 226796 - DNA, 201 bp, Klebsiella pneumoniae; identical to SEQ ID NO: 214892

SEQ ID NO: 226797 - DNA, 330 bp, Klebsiella pneumoniae
atgaaagaagtaacattaacgttagaggatgaaagcaagagtgactggttgtttcctaatccgatgccttttggtctggagcctgtgatgacgcagccgtgggtacgggcgcgttttgggttgccgatgatttatgttgatgcgaaagtggttatgacgctctatagaggagtaaaggagttttatccgctattagctcctgatcaaaatatagttgcgtcatttagctataataaagatttttttgttgaaagtgtgactttttatccgctggagcgagccaaagaaattcaggttgcgctggagaaaaagcgacttggtcgcaaatga

SEQ ID NO: 226798 - DNA, 891 bp, Klebsiella pneumoniae; identical to SEQ ID NO: 214895

SEQ ID NO: 226799 - DNA, 183 bp, Klebsiella pneumoniae
atgttaaaaatattactgcatcgggaacaggtaatttcggtggtaatattactacggcaggaagtgtcactgccactggtcaggttactgctcataatgggtatggtgatactattacattcggtggcgatggcgctggcgacgattatgaaatcaggctcagcaatggtgttcgccccttaa

SEQ ID NO: 226800 - DNA, 525 bp, Klebsiella pneumoniae; identical to SEQ ID NO: 226165

SEQ ID NO: 226801 - DNA, 981 bp, Klebsiella pneumoniae; identical to SEQ ID NO: 95379

SEQ ID NO: 226802 - DNA, 360 bp, Klebsiella pneumoniae
atgcgccgaacggtcgagcgcatggccggtcaggagtgcgggctgctgactgagtcccatcagctccggggcgagcgtggcggcgagctctgtcccgtgcgcctgcataaagtcattcagccggttgcggatactgatgcgctgcaccgcttcatgggagcggatatagcgcccggcggcctgatttatctcccattttttgacatcgataatgtcgcgcagtgtctgcattctgcccggtatacggtcatccccggccagtacctgttcctgatattcctgctctgcggccgccagttcggctttacggttcagccaggcggtttcgttcttctgacaggcttcaaaagcctgctgtag

SEQ ID NO: 226803 - DNA, 246 bp, Klebsiella pneumoniae
atgatgcactgtccgttctgcaaaaagtcggcgcatgcccgtacctcccgctatctgtcggagaacgtcaaacagcgctatcaccagtgcaccaatattgagtgctcggcgacgtttcgcaccactgaagccattgacgaggttatccggcccccggcggagaaagcgccgcctgtcgcggacccggtcacacccccggcaccccgtaaagtgcagggctgctacagctcgccataccgtcattaa

SEQ ID NO: 226804 - DNA, 390 bp, Klebsiella pneumoniae
atggtgctgactaaatgttttttccggcgcgagaatttgatggcctcacttttattttgcatcgtttcatatgggttgctatctacctggctttaccttgtccattcaattaatgaaaaagtagaatcaacattaccctcatctttactgattcgtgttttgataatcattacagcattatcatttattattcagaaaaaacctggagtttttaaaaacttcattgcaataacattcggtctggttttagtgtttatacacaccatcattgtattacatctgcttttgaatacttttccagatatctatgattttgttttttattatgaattttttttaatggttttcttttgcggactacctttatgtttatgtataagaatggtttga

SEQ ID NO: 226805 - DNA, 141 bp, Klebsiella pneumoniae; identical to SEQ ID NO: 131154

SEQ ID NO: 226806 - DNA, 534 bp, Klebsiella pneumoniae
atgatccggaccgcaggctccctgaagctgggcaaagtacaggcctcagtgctggtccgttcattgctgaaaagtgaacgtccttccggactgactcaggcaatcattgaagtggggcgcatcaacaaaacgctgtatctgcttaattatattgatgatgaagattaccgccggcgcattctgacccagcttaatcggggagaaagtcgccatgccgttgccagagccatctgtcacggtcaaaaaggtgagataagaaaacgatataccgacggtcaggaagatcaactgggcacactggggctggtcactaacgccgtcgtgttatggaacactatttatatgcaggcagccctggatcatctccgggcgcagggtgaaacactgaatgatgaagatatcgcacgcctctccccgctttgccacggacatatcaatatgctcggccattattccttcacgctggcagaactggtgaccaaaggacatctgagaccattaaaagaggcgtcagaggcagaaaacgttgcttaa

SEQ ID NO: 226807 - DNA, 690 bp, Klebsiella pneumoniae; identical to SEQ ID NO: 210527

SEQ ID NO: 226808 - DNA, 171 bp, Klebsiella pneumoniae
atgatgattactctgcgcaaacttcctctggcggtcgccgtcgcagcaggcgtgatgtctgctcaggcgctggctgtcgatttccatggctacgcgcgttccggcattggctggaccggcagcggcggcgagcaacagtgcttcaaagcaaccggcgctcaaagtaaataa

SEQ ID NO: 226809 - DNA, 552 bp, Klebsiella pneumoniae; identical to SEQ ID NO: 209882

SEQ ID NO: 226810 - DNA, 1338 bp, Klebsiella pneumoniae; identical to SEQ ID NO: 209879

SEQ ID NO: 226811 - DNA, 447 bp, Klebsiella pneumoniae; identical to SEQ ID NO: 213418

SEQ ID NO: 226812 - DNA, 348 bp, Klebsiella pneumoniae
atggattttgaagcgcggaaacaaaaggcgctggcgataatggccagctgtaagatgtggaaaagcaattatgcaccgcttctgatacgactgttgtggcggctggggataaacattcccccgctgccgtttgctccgttctggcaggtttttggcgtgatggcaggctctttctccgtcggatacggactgtggatgtactggatggtgtggcgggcccaggggatgccacccctgttcgcttgcaaaatcagtcttattgcgggcgtgttatttggcctgacgatggcactgtttcatctgtggcgccgaaaggtgaataaattacctgactggaaagatttataa

SEQ ID NO: 226813 - DNA, 507 bp, Klebsiella pneumoniae; identical to SEQ ID NO: 214891

SEQ ID NO: 226814 - DNA, 327 bp, Klebsiella pneumoniae; identical to SEQ ID NO: 121677

SEQ ID NO: 226815 - DNA, 510 bp, Klebsiella pneumoniae; identical to SEQ ID NO: 121678

SEQ ID NO: 226816 - DNA, 642 bp, Klebsiella pneumoniae; identical to SEQ ID NO: 102318

SEQ ID NO: 226817 - DNA, 171 bp, Klebsiella pneumoniae
atggcgcatcgcgccatcgagcagggaaatcgtttccttcaggctcagcttctccgcctgatccacgatgagtgttccgcccggaataaacgccgttccgtcctgcagggcggatttaccggtcaccgtttccccggccagacgcacatcaccggcgagaaaatcacgtga

SEQ ID NO: 226818 - DNA, 831 bp, Klebsiella pneumoniae
atgacttccgctctgcgccagctggttgagggtggcgttatccagctcacgctgcgtcaccgacgcaaagaccgttgccgtctcgctaaccgacctgccgggactttccacccagccgtggccgattttaataccgtcaaacacgcccgcgcccacggccagggtctgcgtggttttctgccccggccgctgtaccgtcagctgcccttcctccactttcatcaccgtgatgctttccccgcccttcaggcgtgtgtccggtatcttcccgagcaccgccagacgttccccctctgccaccggcagtgtctctgcccggaacagcgtccactggctgtcgaccgcggaaaccttcagatccagacggaccccatcccggtctttcagggtcagcatattgctgctcgcggtcacccggtcaatgacaaagcgatcgtgcgtccggttctccggatcccagcgttccatcaccatcccctcccggtaataatcccgcacgccccggcttttactgtccagccacaccggcgtcagggctgtaatggtcgtgtctttctcacccagcaccccctcctgtctgagggagtcacggataaggccgttgagtacgctctgttcacgcgtcccgctgatttgggccacgctttcctgcccttcacgtacgctgacggcaaactcctgtgccagccggctgtagcgtgctcctttatccggttcactgatgatgtcggctgtggtctgttggccgccctgccagcgatacgtattcacgccgctgtccttcagcaccgtcagcgcactgccggtcccgctgcgcttcccgctgtctga

SEQ ID NO: 226819 - DNA, 990 bp, Klebsiella pneumoniae
atggccagctttgagtctgcctatgtggctttatcccgcatgaaacagcatgttcaggtctacaccgacaaccgtgagggctggataaaggccatcaagcattcacctgagaaagcgacggcgcacgatattcttgaaccccgtaacgaccgggcggtgaaaacagccgatctgctgttcgggcgggcaaggccactggatgaaaccgccgcgggccgggcagccctgcagcagtccggtctggcacagggaagttcaccaggaaaattcatttctccggggaaaaagtaccctcagccgcatgtggcgctgccggcatttgataaaaacgggaaagccgccggtatctggctcagcccgctgaccgatcgggacggacggctggaggctatcggcggagagggacgaattatgggcaatgaagacgcccggttcgtggcgctgcagaacagccgcaacggagaaagcctgctggccgggaatatgggggaaggcgtcagaatggcccgcgacaatcccgatacgggggtggtggtgcggctggccggtgatgaccgcccctggaaccccggggccatgaccggtgggcgggtatgggctgaaccggcgccggtggctccggtaccgcaggccggggctgacattatcctcccgccagaggtactggcacagcgggcggcagaagaacagcagcgccgggaaatggaaaaaaaggcggaacagactgcccgggaaatggccggggaggcgcgtaaagccggcgagccggcggaccgggtgaaagaggttatcggggacgtcattcgcggactggagcgtgaccggccgggtacggagaaaacgacgctaccggatgatcctcagttccggcgccaggaggaggcgattcaacaggtggcctcagaacgtctgcagcgtgagcgtctgcaggctgtggagcgggacatggttcgtgaccttaaccgcgagaaaaccctcgggggcgactga

SEQ ID NO: 226820 - DNA, 327 bp, Klebsiella pneumoniae; identical to SEQ ID NO: 31781

SEQ ID NO: 226821 - DNA, 546 bp, Klebsiella pneumoniae; identical to SEQ ID NO: 31780

SEQ ID NO: 226822 - DNA, 213 bp, Klebsiella pneumoniae; identical to SEQ ID NO: 33452

SEQ ID NO: 226823 - DNA, 510 bp, Klebsiella pneumoniae; identical to SEQ ID NO: 79465

SEQ ID NO: 226824 - DNA, 345 bp, Klebsiella pneumoniae; identical to SEQ ID NO: 31783

SEQ ID NO: 226825 - DNA, 177 bp, Klebsiella pneumoniae; identical to SEQ ID NO: 31782

SEQ ID NO: 226826 - DNA, 219 bp, Klebsiella pneumoniae; identical to SEQ ID NO: 222344

SEQ ID NO: 226827 - DNA, 597 bp, Klebsiella pneumoniae
atggctaagtctctcattactgctgttctgtcagtactgcgctgggctcactggctggttaagtgtgcggtggtgtatccgctggccatgatgatgttactggttgttctggtgttccggacgggaccgtacacgttcggccagacgctggtgaaaaccgtagagtccgtgcagcaggagggatatgtcattcaggactgcacggggccgaaagaactcaatagtgatgcggtgaacgcaccactgcctccgcttttacaggaagactgcaccaccgtcattacagatgcagcagggtatgcagcctatatcgaccagagctatacgcataatattctctggctctggctgctgatggcggtggtgtttaccgggatcgctgtggttttccgtcggactcctgtccgcagggggatcatacggaaaaacggtgttgtcgtcggagagtctgttttgggttcttcagggctgattctagcccgatctgatgtcagccagattaagcgtgtttacgatgaaatgagtccgggtgaaggggataaatttgttcggacgattaaggaaaatacccaaatcaggatgaacctgaagaaataa

SEQ ID NO: 226828 - DNA, 981 bp, Klebsiella pneumoniae; identical to SEQ ID NO: 214345

SEQ ID NO: 226829 - DNA, 1461 bp, Klebsiella pneumoniae; identical to SEQ ID NO: 214344

SEQ ID NO: 226830 - DNA, 1209 bp, Klebsiella pneumoniae; identical to SEQ ID NO: 214343

SEQ ID NO: 226831 - DNA, 432 bp, Klebsiella pneumoniae; identical to SEQ ID NO: 179494

SEQ ID NO: 226832 - DNA, 990 bp, Klebsiella pneumoniae
atgaaagccatgttttttttaatctgcatcgcgttctcaacgttcagtggccgcgccgccgcagacccctcctgtgagggccggtttgttaacccgatcaccgatgtgtgctggcgctgcatatttcctttatcactcggcagcgtgcaggttggtaaaggcgacctgcctgataccagcaatcccggcagtcccctgcagttgtgtccggcgccgccaccgctttttgttcgtcccggcctggccatcgggtactgggagccgatggccatgacggacgtcagccgttcgccaggctgtatggtcaatctggggggcttcagtatcaatctcggcaagaccggcatggggaccgcgagaaaggacgacaagcaggtgaacggcgccttctatcacgttcactggtacaagtacccgctgacgtactggctgaacatcatcacctctgcaggctgtctggaaggcggagacatggatatagcctatctgtccgagatagacccgacctgggtggacagcagcctcaccaccatcctgaatccggaagccatcctgtttgccaaccccatcgcgcagggcgcctgcgcagcggatgcgctggccagtgcattccatatgccactggatgtgctcttctggtgtggtggaagtcacggctcactttacccatttaacggccaggtcagtaatgagtccagcccgctgcagtcgtcggtactggtcagtgagcgtatggccttcaagctccaccggcagggacaaattatggagagtatcgggaaggacaaggcagtctgttacgaatatccctccccgatcatcccgaaagagcgctggcgctatcagatggtgaacatgtatccggacagtggtcagtgccatccgcttggacgcagcgtgatgcgctgggaggccggcaaaaatccacccaacacccgcaagaactacggctatctgatgtggcgtaaacgcaattgtgtctttctctga

SEQ ID NO: 226833 - DNA, 132 bp, Klebsiella pneumoniae
atgaaagcgcgccgggaagagggggtcgatatccacgatgcggtgtacggcctcgcgtgtcgcaactttaaagacgaaatggcagagcttgaatcccgaataccggtgaatgacattgaggataaacagtga

SEQ ID NO: 226834 - DNA, 321 bp, Klebsiella pneumoniae
atgaaaacgccattaccgcccgtattacgtgccgccctgtatcgccgcgccgtggcctgtgcctggctgaccctgtgcgaacgtcagcaccgctatcctcacctcaccctcgacgcgctggaaagcgccatcgccgccgagctggagggcttctacctgcgccagcacggcgaggaaaaaggccgcctgattgcctgtgcgctgctggaagatttgatgcaggccgggccgctgaaagccgccccgtcgctgtccttcctcgggctcgccgtgatggatgagctctgcgcccgccatctgacatcgcctgtactgcactga

SEQ ID NO: 226835 - DNA, 1566 bp, Klebsiella pneumoniae
gtggttgatattgacctcttcacgccgctgcatatcccgctgtgtctgctcatctgccagccaggcgtcatacgcctgcatgtcctcgatgacaccgtcctcgttcatgccggccggcagcatgtcctgtccctgttccgcagactgctgcgccagctcctgttctgtcccgcctgcagctgcagcaggggtaccggcagaggatgctgttgcggctgcagcggcagcagcggctgcttttggcttgatcaacggtacggtcgtgagccgcaggacggaaggctccgttgctctgacggaaggttcctctgccggcatcttcgttgtcggcggcgcttttaccggtgccggagatactgtcatgtctgctggcgcaggctgactgaccggctcaggttgttcaccggcgtgactgtttgtatcagcgggcccggatgccggcgcatccggcgtgaaaagtgccctggcaagactgccttcagcttcccgcgcttcaagcaacgcactgagccgcgcatccacccgcgcatcgagagtgcgaggaataaatccctcggcaattttcggacgcggtttgtatttgagggccagtttcacggccggatacggcccgggcagcgtgacatagcaggacaggtcaggcagcgtctgaatatcggagtaactgaccagcgtttcccgctctttttctttcccggtcgatacaccatcacgcaccgggtcagcaccgtaggagtactgctcgctggccttgaggatttccttctcaccaatttcaccggcagcaaactccgcaatctctttactcggggagcggaagaaggcccgggtgttcatcacgtcaaagagcgtggcggcaggcttaacgccatagatgtcttccagctgggcataagactgaataccgaacacataacaaccaccaaatttacgcgcctccgggaggatttcgaccaggtccggcagcttgtgcagcgtgggaagttcgtcagcgaagatccacacacgccggttacggttctcgcccatcgccaggaggccgcggatggcaatcgacagccacatcgagataaccggcttcagggaggcatgggtgtcagcattggaggagataaacagccagccattgggtcggtcctcacggacgccgcgcatccagtcccggatagtgaacggctcgccgttcttctcaatgccctgcaggtagcgaatagccttgacgtagttggtcagcacagctcgaatggagatggcggttttctcaattttctcttcaaccaggttcgctgccggcgtgttctgcagataggcgcgcagcttgtcgatcttaatggacagcatggtatcgaccagcttctcgtagctccgatcgtcgtcttcgcgcatcagatacgcgccttcggcaaagatagtgcgaccggagccctgccagaacggatcttctttggtacccatcgggataagggtgttggagatgttgtcgaagtccggcagcgtcaggcactctttccacaaatcccaggctgcacagcgcgagtccagcgggttgaggattttatccagtga

SEQ ID NO: 226836 - DNA, 690 bp, Klebsiella pneumoniae
atgacaatatctgagcctgtcaggtctcttaatacacatgaactgatgcctggcgatatttacccacatcctgcagtgggggaaagttattccctgtcacattgcgaggtctgttctctcttcagtgaccacttcatgtatatctgcagcgcgttagttattcttctacttgttttcattgcaggtgtattttttagaaaattaatgacgtcttccacggggcgtaagcgagacacggtgtcagttattcccgatacaaagccagaagcacagagcaaaccggaatacttccatctttccatatgtgtggaaggcccggccagcacggatgactccgccttgtcctctcttgcctcccgtgttgtccgcgaagcagaaaatctgtatatccccggcgtcaatcgccgcgacagcgctgacgacgtgtttgcctggtccgtgcagactcagtttccttctgacaggctcttcggcacacggattttcccgtcgaccggctggtttgaacgtccggatatgattaaacctccggtgaaatgctactgcgtctgcctgcagtacacggctgaaacattgccatccacactgcatgccctggtcgatgaggccggacggcaggtggcgaagtcgtatattaaaggcgggcactgccctggctcagagggctattccttctgcataacctcttaa

SEQ ID NO: 226837 - DNA, 423 bp, Klebsiella pneumoniae
atggccagagtgtctattagtgaagctgcacggcttgttaaggttagtcgtcccactatttacaagatgattaacagcgggaagttaagttatacctctgttgtaaagcacgggaaggatattaaagttattgatgtatccgagcttattagggtgtttggttctcttgatggtgtaactgatactgtaaaatatgatgtaaaaagtgacgcagaatctacaggtattaacagcgttggtttacatgatttacaacatagaatcgctttacttgaagctgaaaacgatggtcttaaaggggctgttaaggctcgagatgagcatattgattcccttcgtcaggctatgcagcttctggagcacaagcacgaaccttcttcaccatcccattccccgtggtggaaattctggaaaaaatcctga

SEQ ID NO: 226838 - DNA, 192 bp, Klebsiella pneumoniae
atgacgaaacaacagaaaacggcgctgaacatggctaaattcatccagaatcagtctctgctcctgctggagaagcttaacgagcttgatcttgatgctgaggccgacctttgtgagaaactccacgatgatgcagagcatcttttccgtacactctcctcgagactggattcattacaggatggtaactga

SEQ ID NO: 226839 - DNA, 267 bp, Klebsiella pneumoniae
atgagcgaagcagtcaatgaaaccggtgtcacgatcaaccatgcgcagtacatccgcaatccccgttgtgggaatttgctggaagaagggattgttgaccagatgatgtttgctggccgaaggcaggcgccagaagcgtttaccctgcggattacgcaagatgatattccggttgtcttcctgttcaagatattcgccgacttcgtacaaacgggtatccaattccatggccatctgtttgatcagcttttcaggctcctccgctaa

SEQ ID NO: 226840 - DNA, 957 bp, Klebsiella pneumoniae
atggccactgacatgaacagcatgaacctcagttcctgccaggctgctcagggaattgtgggtggcctgtttcctcgtacccaggtcgctcaacaaaaggtctgccaggaaattgccggtgaaagcaatatcttttcggactgggccgcctcgcgccagggttgtacggtgggcggcaagatggacagcgtccaggataaggccagcgataaagacaaagaacgtgtgatgaaaaacatcaacatcatgtggaatgccttatcgaagaaccggctcttcgacggcaataaggagctgaaggaattcatcatgacgctcaccggtacgctgattttcggggagaacagtgaaatcacgccgctgccggcacgcaccactgaccaggatctgattagagccatgatggagggcggcacggctaaaatctaccactgcaatgattcggataagtgtcttaaggtcgttgctgatgcgaccgtgaccatcacttccagtaaagcgctaaaaagccagatttccgctttgttaagcagtatccagaataaagcagtggctgatgaaaaactgacggatcaggagaaagggtttatctccagcaccaccattccggtattcaaatacctggtcgatccgcagatgctcggggtgtctaactcacttatttaccagctgacggactatatcggctacgacatcctgctgcagtacattcaggaacttatccagcaggcccgggcgatgatttcaaccggtaattatccccagtcgacaatggatatgatcatggaaaacctcaatcaggcgagtgtccagattgccgcttttcagtcccgtgttcaggttcagcaggacgccttgcttgtggttgacaggcaaatgagttacatgcgccagcaggtctctgcccgcatgatgacccgctaccagaataactatcattttggggggaatctgtaa

SEQ ID NO: 226841 - DNA, 1140 bp, Klebsiella pneumoniae
atgacgactggagcagataatacagagtcgtcgcaagacacaatggctaaaagtaagatgtggaatgcggtggttgctaatgcaaaagcaaataatatatctaatgagcagtcctttcagaatctcatggatgaatccactagaggtacagttacaggtgaagcccatgtgggtgcaagatggagttcaggagatcagcttgctggtaaaattgggaaattggctacaggcgccagtgtagaaggtggcataaaaggatcaataagtgggagcggcagcacaggatcaactgatactgttggccagtctggtcgacattccagcgatagcagacatgatataagtagtcaggccgctaaagattttagagaggcaagtgattatcttgttagccataaaactaatacttcaggtaatataactgataacaatgcaagctctcgtgtcgatcagtttgctgcttcactttctagtgctaaaaatagttacgaccagtacacaaccagtagaacacgcagccatgaatatagtgaaatggcttcaagaactgagagtttgactggccagatgagcgagaatctcactcagcaatttgcgaactttgttcagcatcgtgctccacaggatgctgaggccattctgaccaatacaagctctcctgaaattgcagcgcagcgtgagatgctggcacgagagtttgtgaaagctcaagtagaaccacgaatcgacagttcctttgaacaaggaagaaatgatataggtaatggtatggcaagtgtttccgggacgccaggtgaccaaactgttgttagcgattttggcaagcacagtggtgatattgagtcaatgtcacgaaattctggtattaaagagaacgtaagaaatcaagtggattctatggtggaagataacaccaggataaataatgctggtaaaatcaatatcaaagagcaaggtgaagggattaaacaacagaatgcggattttgagatgttacataaaaaagaaggaaatgactttaatgagcgatataataaggaattgaatggtcaagtgaacaatccactaagcaacacgactgaggagttcaggaagaaggctgaagaatctgcaaggaaaatggatggtaaattaccataa

SEQ ID NO: 226842 - DNA, 531 bp, Klebsiella pneumoniae
atgatgattacgaacaaactacttattgaggaagtggaggagctgaaaaatctactttcacaagggaagactgaaattccatctttttggaagtgcctttggcctggcgtagtgttagttgcatggaatatgctttgcgctgtaattagtgtggatgctgtttatttgaccggaaagtatatatttcatgttttggtttttcctgtcggggtcagtatcattatgctcctaggtattgccagttcacgctctctctttttgtcagttcctaaaaactttagagaaaaatcgaatatatatcgctttttttctaagaaggttttgatttatgctgttgtgtacatggcagtgattatgttattagctatttgtaatagagtggtttatgacacgccattttcttttgcatttatggttattttaacgtctgttttttttggttttgtcatgaatctggattttggacgctatcagctatcattgctcacctctgcaataaactctttccgagcggaaaagttgggggggtaa

SEQ ID NO: 226843 - DNA, 1098 bp, Klebsiella pneumoniae
atggccagaagcaagatgtggaatgcggttgttgctaatgcgaaagccaacaacatcagtaatgaggagtctttccagcagttgatggatgattcagctaaaagtacgcagggcgttgatttatacggatctggtaagtggagttcaggggatcagctgtttggtaagctaggtaaatggggaactgggttatctgctgaggccggagttaaaggcagtgcgggttggacccacagctcgggtaacacagataatgttggcacttccggtcgtgaatcgaatgacagccgacatgataccagtagtcaggcggccaaagactttaaggaagcatccgattactttaccagccgcaaaaccaccacatcgggcaacattaccgataataatgccagctcgcgtgttgaccagtttgccgcgtcactctccagtgccaaaaacagctatgaccagtatacaagcagccggacacgcagccatgagtacagtgagatggcgtcacgcacagagagcatgactggccagatgaacgaaaacctgactcagcagtttgcgaactttgttcagcatcgtgctccacaggatgcagaggccattctgaccaataccagttctcctgaaattgcggcgcagcgtgaagccctggcgcgtgaattcgtcaaagagcaggtagaacccagggttgatgctgcgtatcaacagggtcgtgaaagcattggacagaatatggctggggtgtcaggtggtggtgacaatggatcggtaatggccgactaccgacaaaattctggtcgtatcgatgctatgacgcaagatgcgggtattaaggataatgtggatcagaaagttggtgggatgattacagagaataaacaacagcagcaggaaacccgcgaaaacatacaacggcaaggcgcagaggtgaaaaatgagaatactgaaatggaaaaggaccataaaacaaaagcaaatgagtttaaaggtgattataatgaaagaaagagtaaggtgaaatctttaccaggagctgactcgcctactgagttagaggcaaaagcggcgaaaattcaaaaggattatcttgatggtaaaaggtaa

SEQ ID NO: 226844 - DNA, 1488 bp, Klebsiella pneumoniae; identical to SEQ ID NO: 214992

SEQ ID NO: 226845 - DNA, 741 bp, Klebsiella pneumoniae
atgaaaaaaattaacccgttatttatttcaggctgtctgctgttggtcgcccccgcgatgtccgcgaccctcagcggtacgctggcgccgacagtggtccccctcaccaatggtggtcaggcaaatattgccgtgagtaacaccgacccgaatctgttcacagtacctggagatcgcatcacggcgataaacagcctggacggtggcctgacaaaccaggagcagaccgacagcggcggtgccattctggcgaccgtcagtaaaaaaccattcaccttcattgtggaaaccgaacgcgggctgaacttctccattcgtgccgtgccccgtgcgggctcaggccggacaattcagctggtcagcgagctggcgggtacccccggtccggcaaaagcctgggaagagtcgaacccctatgaatcgttactggtttcgctgaatcgcgccgtgcgtcagggcagcgtacccgatgagtatcagtctgtccccgtcacttctgaagtgctgcaggtgccggctggtctgcgcgccactgccgacagggtctgggtcggccaccacctgaaagtcgtccgttacagtctggacaatgtctccctgtcggcccgtatggtgcgtgaaagcgatttctggcagcccggaacacgtgccgtcatgttcagtaccccggcgggcctgctgactgccggtggtcgcatgcagatctgggtcacgacgtcagatgaaggagtgaagcgctga

SEQ ID NO: 226846 - DNA, 879 bp, Klebsiella pneumoniae; identical to SEQ ID NO: 52347

SEQ ID NO: 226847 - DNA, 318 bp, Klebsiella pneumoniae; identical to SEQ ID NO: 52346

SEQ ID NO: 226848 - DNA, 585 bp, Klebsiella pneumoniae
atgaaggaattaatgctgttaattcctctgggcggcgctttgctcttaaccgggtgcgcgggcacagagactgaatttcaatgtaatgccacgacgtcggatacctgtatgacgatggagcaggcaaatgaaaaagcgaagctgaaagaggaacgcagtgatgcaaagccggctgcggccgggttgccacaactggctgagggtaatttcagaaccacgtcagtgaattcgtacccgttgccgccacagtccaacctgacccaggccagagtggccgcggagaaagatcgagcacgtgcagtgtacctaaataatccaacggcaaagaatgaggcaacatatttcgaaaccgagaaaaggctccagtctttgccggtagtgaaaatgtctttaccagtagtggcgtcaacgtttacgtcaccgtcaacaccgccaggtaattatcctcgtccattaagaaaaggggaggagacaacgtcattgtggatagcgccgtatgtggactcagatgatgtatatcaccagccagcaacggttctttttgtcgtaaaaccatcggcgtggggacagcctcgccttaattga

SEQ ID NO: 226849 - DNA, 333 bp, Klebsiella pneumoniae
gtggacctgcgcgactggaaagtggtgctgttcatgcagggacactgtccctactgtcataaatttgacccggtgctgaagcagctggccggacagtatggcttctccgtgttctcttacaccattgacggacagggtgatgacgcgtttccggaagcgctgccggcgcctcctgacgtgatgcagacctttttccccaatatcccggtggccacaccgactacgtttctggtgaacgtaaacacgctggcagcgtacccgatcctgcagggcgccacggatgcacagggctttatggccagagtggatacggtatttcagatgatgcactga

SEQ ID NO: 226850 - DNA, 444 bp, Klebsiella pneumoniae
atgaacaaatatatacgttcgacgggactgtatgcgtttttatttccagccagtttaaaggactccgggcagacagcagcagaaaaaatagaacaactgaagccggaatttatccaccgggaaaggcgtctggaaatctatctggaattattcattgtgtttctcactgcaggtgctctgctgttatggataatgagatttttatttaatctctgcgtggatgactggatagccagcggtgacctgcgagtaaaagacctgtggaatattatgatgtacgccatcccttatgcgctgatcgctgttggggtggggttctttgttgccggagtgacattagcaatccgcaattttttcagttatcaccttaagaccctttttattctgagaaatgacagagttaaaaagaatgctgtgcgtaatggaggacaggatgcgaattaa

SEQ ID NO: 226851 - DNA, 993 bp, Klebsiella pneumoniae
gtgaaaaccctgacgcttttcctgagtgccctgatgttgtgggggtacagcctcagtgcggctgctgatccctcctgtgagggccggtttgttaacccgatcaccgatgtgtgctggcgctgcatcttccccctgtcgctcggcagcgtgcaggttggtaaaggcgatctgcctgataccagcaatccgggtagtcccctgcagctgtgtccggcgccgccaccgatttttgttcgacccggcctggccatcgggtactgggagccgatggccatgacggacgtcagccgttcgcctggctgtatggtcaatctggggggcttcagtatcaatctcggcaagaccggtatggggaccgcgagaaaggacgacaagcaggtgaacggcgctttttatcacgttcactggtacaagtacccgctgacctactggctgaacatcatcacctccgcaggctgtctggaaggcggagacatggatatagcctatctgtccgagattgacccgacctgggtggacagcagcctcaccaccattctgaatccggaagccatcctgtttgccaaccccatcgcacagggggcgtgcgcggctgacgctatggccagcgcgtttcatatgccactcgatattctgttctggtgtgccggctctcagggttcgatgtacccgtttagcggctgggtaagcaacgagtccagtccgctgcagtcctcgttacttgtcagcgagcgcatggcgtacaagcttcaccggcagggacaaattatggagagcatcgggaaggacaaggcggtctgctatgagtatccgtccccgatcatccccaaagagcgctggcgctatcagatggtgaacatgtacccggacagcggccaatgccatcccgtggggcgcagcgtgatgcgctgggaggccggtaaaaatccacccaacacccgtaagaactatggctatctgatgtggcgtaaacgcaattgtgtctttctctga

SEQ ID NO: 226852 - DNA, 765 bp, Klebsiella pneumoniae; identical to SEQ ID NO: 6031

SEQ ID NO: 226853 - DNA, 216 bp, Klebsiella pneumoniae; identical to SEQ ID NO: 139664

SEQ ID NO: 226854 - DNA, 306 bp, Klebsiella pneumoniae; identical to SEQ ID NO: 139665

SEQ ID NO: 226855 - DNA, 249 bp, Klebsiella pneumoniae
atgaaaatgcctgacaaaatcttttcggcggcctcgtactgcacgtcaggcggccttatatgcaccgggctggcaaggacctatgactggtttcatggccttgactggaattttattgccctggccagtggcgtgataatcggtgtagcgacttacctgactaatctctactttaagcgccgctggacgaagatgtatcagcagtccctcgatcgtggttatggtggcccgccaccgcaggatgaatag

SEQ ID NO: 226856 - DNA, 705 bp, Klebsiella pneumoniae; identical to SEQ ID NO: 8686

SEQ ID NO: 226857 - DNA, 126 bp, Klebsiella pneumoniae
atgcttgatttcaccaattttatggacgacctgatgaaaaatcaaaaaataccggaaaacgatgttctcaccaataagaccaaggaacgaattaaggaaatcatgagtcagcaatccgcgcaataa

SEQ ID NO: 226858 - DNA, 618 bp, Klebsiella pneumoniae
atgagcgaaacaatctggctggaaccttcaaataataagacggtttatctgcaaatcaaaaatacctccgataaggatatgagtggcctgcaggcaaaaattgccagcgccgtcacttcaaagggatatcaggtcgtcagtaacccggatacggcgggctactggatccaggctaatgtgctcaaggccgataaaatggaccttcgtgagtctcagggctggttaagccggggttatgagggcgctgtgactggcgccgctttaggggcagggattaccgcttacaactccagttctgcgggagcgaccctgggggtagggcttgcagccggtctggtggggatggcggctgacgcgatggtggaagatgtgaactacaccatgatcaccgatgttcagatcgcggaaagaaccaaaacacaggttcagactgataacgtggccgtattacgtcagggaacatctggcgcaaaagtgcagacaagtacggaaacgggtaatcagcataaataccagactcgcgtcgtctctaacgctaataaagttaacctcaagttccctgaagcccagcctgttcttgaagaccagctggcaaaatcgatcgctaatattctgtaa

SEQ ID NO: 226859 - DNA, 720 bp, Klebsiella pneumoniae
atggccgatatctttgaggagaattaccgctgttacgactatcggcgccttcacgcgatgcttcgcggtaacaacagggttatttctgaaaaggttgtccgcagactgatggcagaagagcagctcgttgttaagcgcaccaggcgacgacgatacaactcttactgtggcgaaatcggcccggcaccggaaaatttactcgcccgggattttagttcctgcaggccaaatgagaagtggctgaccgatattacggagttccagcttccggctggaaaagtctatctgtcgccggttatcgactgctttgatggcctggttgtaagctggtcgataggaacacgcccggacgcgacgctggtgaatacgatgctcgatgacgcactcgatacgctcaacgaacatgataaaccagtgatacacagcgatcgtggtggccattaccggtggccgggctggctcgagcgtatcaacacctccggacttataaggtccatgtcgcgcaaaggatgctcgtcggataatgctgcgtgtgaaggcttcttcgggcgtatcaaaaacgaaatgttctatggcagagactgggcgggtatcacgctggaaaaatttatctgcttcctggacaggtacatacgctggtataacgagaaacgtatcaagctatcattaggtgcaatgagtcctgtgaagtaccggcagcatcttgggatcacaacataa

SEQ ID NO: 226860 - DNA, 294 bp, Klebsiella pneumoniae
atgatgtgcatcagcctgcggtgccggctccgcctcctgattctgagcctgctgttgcccgttcttttccgcttccagctcttcaatcgttttcagctggaatccatcctggaacacgacagtcacttcgttaccggcaccaatcggaatgaccgggtgatactgctcagcccttttgatgtagtactcgctcagcgtctgcgcagctttagatgcaccaccgccgacacccattttcagaacatcaccggcgccaacagatgcggttgcccccaggccaactgccggctgtga

SEQ ID NO: 226861 - DNA, 198 bp, Klebsiella pneumoniae
gtgctgtgggccctcatggtgttgctgatgaatatgcatgacgtgagtgaatcagtggccgggctggcgattgcgctgctgacgctgatggtgtgctcatctgccggagaacgtgtgaaacgcttctggccgcggcagttcttcgtgatgttctatgcggtgcacctggcggtactcggtattgtcgtctcgatgtaa

SEQ ID NO: 226862 - DNA, 1149 bp, Klebsiella pneumoniae
gtggcgacgatacacagcacaatcatcagcggggctggcgcctcatcggccctgctcccgctgctggccggtaaaacctcaatcctgctggtgaccgacaagaacgtcggggcgctggaggcaacccaggcgattcatcgcctgctggcggctgaaggacgtgaagttgaggtcattgacagcgtgccagctgagcccaaccatcacgatgttacgcagatcgtcagccagctgggcgccagccagccgcagatggtcgttggtatcggcggggggagcgtactggatgtagcaaaactgctgtcagtacttctgcaccctgaggcgccctcgctgacgtccctgctggcaggcgagcagccgcaacgacgaatttgctcattgttaatcccggccaccgcgggcaccggatccgaagcgacgccgaacgccattctggcgatccccgagcagcagacgaaggtggggatcatctccccggtgctgcttccggactatgtcgccctgctgccggagctgaccaccagcatgccgcccagcatcgcggcgtcgaccggaatcgatgctctgtgtcatctgctggagtgctttacctccaccgtcgccaacccggtgagcgataacgcggcgttaatcggtttacacaagctggtacgccatatcgagcgttcggtaaatcagccgcaggatctgacggcgaagctggagatgctctgggcctcgtggtacggcggcgcagcgatcaactatgccggcactcacctggtgcatgcgctctcctatccgcttggcggtacctggcacctgccgcacggggtggccaacgccattctgctggcgccctgcatgcgggtggtccgccctcacgcggtggcgaagttcgctcaagtctgggacctgatccccgatgcagatcgcacgctcagcgcggaagagaaatcccatgcgctggtcgcatggctggcggcgctggtcaaacgactgccgctgccggacaacctggccgcgctaggcgtgcctcaggagagtatttccgccctcagcgcagcggcgcaaaacgtcaaacgcctgatgaacaatgccccatgcagcgtcagccgcgaagagatcgcggccatctaccaaacgctgtatccagaacatgcctaa

SEQ ID NO: 226863 - DNA, 1347 bp, Klebsiella pneumoniae
atgcgcctgcacaatcatcgtcttgaacttcttagtcctgcccgcgacgccggtatcgctcgcgaagcgatccttcacggcgccgatgccgtttacatcggtggaccttgctttggtgcccgccacaacgccagcaacagtctgagcgatatcgccgggctggtgcctttcgctcatcgctttggcgcaaaggtatttgtgacgctgaacaccattctgcatgacgatgaactggagccggcgcagcggctgattaccgatctctacgacgcaggcgtcgatgcgctgatcgtgcaggatatggggatcatggagctggatctgccgccgattgagctgcacgccagcacccagtgcgatattcgcagtgtggaaaaagcgaagtttctctccgacgccggcttcagtcagatcgtgctggcgcgcgaactgaacctcagtcaaatcaaagccatttacgaccacactgacgccactatcgaattctttatccatggcgcgctgtgcgtggcctattccgggcagtgttacatttcgcacgcccagaccggacgcagcgccaaccgcggcgactgctcgcaggcttgccgcttgccgtataccctgaaggacgatcaggggcgggtggtggcctatgagaaacatctcctgtcgatgaaggataacgatcagaccgccaacctggcggcgctgatcgacgctggcgtacgctccttcaaaattgaaggccgttacaaagacatgagttatgtgaaaaacatcactgcgcactaccgtcaaatgctggatgccattattgaagatcgcggcgacctggcgcgcgcctcggctggacgcaccgagcatttctttatcccgtccacggataaaaccttccaccggggcagcactgactactttgttaatgcccgcaaaggcgatatcggcgcctttgattcgccgaaatttatcggcctgccggtgggtgaagttctgaaggtaggcaaagaccatctcgacgttgaagtcagtgaaccgttaaccaacggcgatggtctcaacgtgatgattaagcgcgaagtggtgggcttccgtgctaataccgtggaaaaaaccggcgaaaaccgttatcgggtatggccgaacgagatgccagcggatctgcataaagtgcgcccccatcagccgctcaaccgcaacctcgatcataactggcaacaggcgctgctaaagacctccagcgaacgccgcatcgcggtagatgtgacgttgagcggctggcaggagcagctggttctcaccatgacctgtgaagatggcgtcagcgtgacccacacccttgacggggagttcgccgaagctaactag

SEQ ID NO: 226864 - DNA, 669 bp, Klebsiella pneumoniae
atgcgtactcgcgttttactgaaagtcgccgctctggcgggaatattggcgttgaccggctgtgcggcgaaagtggcgcaaccggatcagtattcgggcttcttaaaagattattccagtttgaaagaaacgacctctgcctccggcaagccggagctgcgctggatcgatccgaacttcaatccggccaactatgacaatatcgtttatcacccggtgacctactatccggtaccgaagccgaccacccaggtaggggagaaggcgctgcaggatattcttaactacaccaacaaagagctgaaacaggctatttccgagcgtaaaccgctggccactaccgccggcaagcgcagcctcatcttccgcggggcgatcaccggggtggactccagcaaagaggggctgcagttctatgaagtgatcccggtcgctatgattgtcgccggcacccaggccgccaccggccatcgtaccatggacaccgatctgtactttgaggcggaggtcattgacgccagcaccaataagccggtcatcaaggtcgtacgtaaaggggaaggcaaaaccctggcgaatgagaatacaccgctgaccgtcgataccctcaagcaggttatcgatgatatggcggtcgacgccgttaaattcgatccctctcagcgttaa

SEQ ID NO: 226865 - DNA, 2160 bp, Klebsiella pneumoniae
atggcctttaacccggagctggggagctcgtctcctgaggtgctgctcgataacgctaagcgactcgatgagctgacgaacgggcctgcagctactgttcccgatcgtgcaggtgagccactggactcctggcgaaaaatgcaggaagacaacgccgctctcgttgatgaaacccgtcagaacctgctccctctcagcaggcagtacatgaccctggctgcggcgcaggcggatatcgcgaacatccccgaggggagtaccacctattatcgcagcccggatgacagcgccctggcgatcgaggtcatgaacgttggcggaacgttgcagcctaccggtcgcaggatgatttcagctggatatgttgacgagttgagagatttggttgccactgaactggcgaaaatcatggctttcggtgctgctcagactaccgatgcatacccagatattgctgagctcattcttgatagtgtagggcacgccgtttatcgccgttatgccgatggtacgagccagtttccggcattgatgataggttcagggattgagcttgtgcaaatggcgggcggaggatttgtctgccagatgcgcgccaccggagaagaaatatttaatatttcggcaatgggaaacatgacacatggcagcctgaccacgtggtttgctgatgatgacagtgtcagtgactatgctgaaatacatatggacggacaggggagaatttttcgtagagttcgcactgatggtaccgtggagcaggtgggcgatgacacacctgatgatgacgcctctgaattcccaatggttgcttcagttgatggaaatatcattgcggtagatggcagcgatgtaactcagatcacgaacgactcaggagtttcaaatattgcgccagtggcatatgcggaatttatgcgatatttgtcgaatatcagcggcaactacatcacttatcgatccacgtatgacgggaattaccgggcgcgcgagtcattgcgctttcttattcacctgattataactggtcagtctcttgctgcaggcggttcaacgcaagcacaaagccctgtaacgacaacagcgcaggcggattacggcatactctcgtttgagaccggcccgaaagtcgattttaagtatgacacgctgaatgaatcgctccttgaagctgtcatcccatgccgggagaatgctgggacgcggcctggacaggagtcgccatcaagcggtatggcgtttaaaattcatgatctcaccgggcatacggttctggtttccgatgcgtgctcatccggtactgcaattgccgacatttcatccggttcagcgacttttaccggtgcaacgaaaatgattcagtcagctgtagccatggctgaaaagttgggcatgcagtatgttcccgtaatggtgcttatccacggcaatcagaatgcagcagcaggcacatctatatccagttatcgcacagcaatggaaaccctgcgtactcagtatgagtctgtgataagtgcagcaacaggcgaaacgcagtccctgcatatgtttgtcggccagctatctaataccattccatacggcggaactgccggcacgaccaaaaccaataatatcggcattgcacagtaccaggaggcccgtgataacgcgttaattcatctcgccagcgcacaatatgcccgcccgtattcagacggggagcatctgaccagcgcagggtatcggactgaaggcgaggttattggctcggttgttggtgggtggctgaatgacaatacaaaatcctcgcttgtgccgatagagtcggatgttgtgcagtcaggaaccacgatcactatccctgtggcgggttgtattggtgatctcgtgattgacaccgcgagggttaccgaccctggcaactacggttttgccctgaccggggccactattgcttcggtagccgtcagcggcagcggaacagcggcaaaaatagttatcacaaagaccgattccaccactgcgacggcaatatcttatgcaagccaggggattgcgggacaaaaccctggacccgttactggttcgcgtgggtgcattcgtgactctcagtctggatcatcactatccggcctgcctctctataacgacctttgcgttttctccatccagctttaa

SEQ ID NO: 226866 - DNA, 753 bp, Klebsiella pneumoniae
atgactacccgcttttatgttgataacggcgtgacagccacgcgttacctggacacttacccgtatccgaacgacatcacccaacttccggcgctaataccgggaattatcctgcaggctgattttgacgtaaatgacactgcatcattaacccgaaaccgggttggggctgccatgtccgttgttggctctcctgctctgggtgattacggagtcagccttactgaggctaaccaccttgatacgaacatcgacatagcagcatataacggcagcgatctgacaatggtgacaatagccgtccatccaggggtaattggtgcagttgtgggccgggtgcaaatgaacgcgccacagcgtactcgtggcacacaaactacggctacagcgtggagagctaaatggttaacggctgcaggggcagcacaacaggctgatctcaccccatctactgccgcaactgatggcgaaatggccgtaagtcgctttgttcgtaataacggtagtggctcaatgctgactaaacttgatttgccacgcacatcacagtcagcaaccggcaccgcagcgacgactccttatgccgtaacttcgtcaaaaattctgctgggcggttcggttgagggaaccacgacggccactatcttcatgcgggcctgtctgattgtatccagggcaataacggatgctgaaatggcgactatttacacctgttacaaaaactactatcagctgaaaggtaaaactatttaa

SEQ ID NO: 226867 - DNA, 204 bp, Klebsiella pneumoniae
atgaccaaatatattgcaacttattctgcgagtgctgaaggtgttgagatttactctggatctctgtttgttgaggttgagtctgtcgctgatgacactatcaaacaggcggtgacggaacagcttgcggcaatcaataaaaactatggcggtggaacaccggatacagtggctgttaattcgtatagtgaagcgacgtcctga

SEQ ID NO: 226868 - DNA, 930 bp, Klebsiella pneumoniae
atgacatcacatattctatttggtgcaggtgctagttatgggagcgaaaatgacactaccattaccccaccgttgggggataatttatttgataagttggtttccaggaatggtattgcaacagatttcccgcaggaaataaaaaaagtattttacgaacaaggttttgaatatgggatgaatgctgttattgaaatttataaaaaaggaaattacaaaaccgtaatcgcttttcaaagggaattggctgagtatttacttcaattcacccctacaaatgggaacctataccgcaaggtattaagaaaaaccaaacatcacaatttcacatacagcacgcttaactatgatatgttgttcgagttatcggcatttcagcttggattgaatgtatactatggtgggaaaaaaaacaaaaacgtcattaatttattgaaaccacatggttcggttaacttctggccagacctaaatggattaagcataggtgtcattgatggggatcagccaatcagttcagtagtggaatgtgatggaaagattctaactaggagcgagtcactatcagcatgcaaaactgaaaccgcactcagtccaagtatggcttactacgtaaaagggaagagagttgatttcgcgccgaacgaggtaggaaggcaacaagcggaatgggtacaggaaataggtaggtcgaggaacatttttattataggagtcagggttaacttcgaggtagacacccacatatgggggaatttggccaaatgtgaagggaatatacattactttggaaacaatagtgacgagattgaattcaagaattgggggggaagtataagcaaagaaaacttacacttccatcacggatattttaatgaagcactagatactataaataaaatgaaatggcaagagcaattcagatcttaa

SEQ ID NO: 226869 - DNA, 327 bp, Klebsiella pneumoniae
gtgggctttccatcgccagcagcagactatgtggaagggcgactgaccgtcgataaactctgcggttccggccctaatactcggatcgtgcaaacagaaaccggttatgccgtggttgatttctccgttaaaccaaagcagcaggacacggtattgatccagtactccggcggtacagattttgcaaaagtcatgggccgcgcatttattacaagagacggtgaggcgctggaaggcgaagctctcgacgatgtcgttgtgttaggaatagtgacattcgttattacccggatagggaaggatgatgatgattatccagtaatatga

SEQ ID NO: 226870 - DNA, 909 bp, Klebsiella pneumoniae
atgagcgacgtgttaattaatcctgcgcgtgtgcggcgcgtgaagccactgagtgccgaagaggtggtcagcgcggtagagcgcgcgctgttgaccgaagttcgcctgaccccaaagcccgggttggtggatattcgtaacgctggcgcgcactgggatatggatctggcctcgtttgaggccagcaccgcggtggtggctccgtggatggagaaatttttcatcatgggccacgatactgcggcggtcgcgccggagcaggtattgatgatgctgcgcccggtagggatggcctgtgagaacgatatgctggaggccaccggcggggtgaatacccatcgcggggcgatcttcgcttttggcctgctcagcgcggcggcgggcaggctggtgtcgaaaggtgagccgatagagcagcaccggctttgcgaccaggtggcgcgcttctgtcgcggcatggttatgcaggagttgtcttctgctggcggggaacggctcagtaaaggcgaggctcattttctgcgctatggtctctccggggcccgcggcgaggcggagagcggtttcctgacggtgcgtacccaggccatgccagtatttacccgcatgatggaagagaccggcgacagtaatctggcgctactgcaaaccctgctgcatctgatggcgtggaatgatgacaccaacctggtctcgcgcggcgggcttgccgggctgaactttgtccagcaggaggcgcagcgactgctgtggcagggcggcgtgctggcggacggcgggctggaggcgctgcgacagtttgacgatgagctgattgcccgccatctcagccccggcggcagcgccgatctgttggcggtgacctggtttttatccgcgtttcccgccggcgcgcttttcccgctgtaa

SEQ ID NO: 226871 - DNA, 228 bp, Klebsiella pneumoniae
atggcgattatcgccgagtatcagcagcggctggtcggctgcggtgctatcgccggcaatgtgctgaaatgcatcgccatcgatccctcgctgcagggggaggggctgagccttaaattactgaccgagctcatgacgctggcctatgagctggggcgcagcgaactgttttgttcactaaaccttgcaatgccgcgttattttccggcgccggcttctggccgatag

SEQ ID NO: 226872 - DNA, 2172 bp, Klebsiella pneumoniae
atgacttcagtcacatctaagaaatcaacgatactaggatctgatgaaatagatttaggtcgcgttatcggtgagctaattgatcatcgtaagcttattatatctataacatcggtttttaccttatttgcaatactctatgcattattagcgactcctatctatgagacggatgcgctaattcaaatagagcagaagcaaggtaatgctatactaagcagtctaagtcaggttttacctgatggccaaccccaatctgcacctgaaacagctttgctacaatctcgaatgattcttggcaaaactatagatgatttaaaccttcagattcaaattaaacaaaaatattttcctgttattggccgtgggttagcaagattaatgggagaaaaaccaggtaatattgatattactcggttatatttgcctggtagtgacgatattagtaataatactcctagtataatattaacagtaaaagataaagaaaattattcgatcaatagtgatggtattcaactcaatggggttgtagggacgttattaaatgaaaaagggatatcattactggttaacgaaatcgatgctaaacctggagatcaatttgttattacacagttgcctcgattaaaggccatttctgatcttttaaaaagttttagcgttgctgatttgggtaaagatacgggaatgttaacgttgactcttactggagataacccaaaaagaatatctcatattttggacagtatcagtcagaactatcttgcacagaacattgctagacaagctgcgcaggatgctaaaagtctcgagtttttaaatcaacaattacccaaagttcgtgccgaattagattctgcggaagacaagttaaatgcttatcgtaagcaaaaagactctgttgacttgaatatggaagctaaatcagtacttgatcaaatagttaacgttgataatcaactaaatgaattaaccttccgtgaggcagaagtttcacagctatatactaaggaacatcctacttataaggcgttaatggaaaaacggcaaacacttcaagaagaaaaatctaaacttaataagcgcgttagtagtatgccctcgacccagcaggaggttctgcgattaagtcgagatgttgaatctggtcgtgctgtatatttgcaattgctaaatcggcaacaagaattaaacattgccaaatcaagtgccattggcaacgttagaattattgataatgctgtaacagatcctaatcctgtaagaccaaagaagactatcataattgtaataggtgttgttttagggctaatcgtttcggttgtactggtattgttccaagtgtttctacgccgtggtatcgaatccccagagcaactcgaagaaatcggaataaacgtgtatgcaagtattccaatatctgaatggcttgcaaaaaatgctcgtcagtcagggaaagtcagaaaaaatcagtcagacacattgcttgctgttggtaatcctgccgatttagctgttgaggccattcgtggtttacgcacaagtttgcattttgcaatgatggaagcaaaaaataatgtcctaatgatatcgggtgctagtccaagcgcaggtaaaacttttattagcagtaacttggcagccactatagcaattacagggaaaaaagttttattcattgatgctgaccttcgtaagggatatgctcataaaatgtttggtcataaaaacgataaaggattatctgagtttttatctggacaagccgctgctgaaatggtcattgataaagtagaagggggggaatttgattacattggtcgtggacaaattcctccaaacccagctgaattacttatgcatccgcgttttgaacaattattaaattgggcctcacaaaattatgatttaattataatagatacacctccaattttggcagtgacagatgctgcgattattggtcgatatgctggaacatgtctattagtcgctcgctttgaaaaaaatactgttaaagaaattgatgtaagtatgaagcggtttgagcaaagtggtgtggtagtcaaaggctgtatacttaacggtgttgtaaagaaagctagcagctactatggatatggttataatcattatggctattcttattctgataaaaaaatagactga

SEQ ID NO: 226873 - DNA, 1353 bp, Klebsiella pneumoniae
atgaaactttctgcgatctatatcaaaaattttaaagggataagcgaagagataaagattttaatagataatgtcgtggttttgataggtaaaaacaatagttgtaagtcgacgatactagatgcgtatgaagcctattgcaccttgggttccgggatccgtagtcttgatgattttcataatagagatgaatcacttcctatagaaattactggtttgtttactgaggttgatgaggatgatataaggcagatcgggcaggaatggtttcatgaggagcttgatggttttagacaatgttcaaaattcaaaataatttgggaagacgctgaaaatgacggcaaaaaacttagttttagtaatcagaccaatgattggaaagctggaggcgctggagggtggaattcaattctatcaagtagattaccaactcctataagaataaatccaaatgattctcatgttgctttagaaactatagtaaaagatttaattgcaagtaatgccgttgagaaattaaaaaaagacaaatcgaaagcggcaggtataatcgccgaaattcaggttttagcaaaggaaattgaagctgatttattagacagtatccaggatataagttctggtattgaagagaatgttgattcgatgtttaaaggtgtaaaagttaggtttgagacaggggtaggaaagtttgagccggaaaaagcgattaaagaaggtagtcgctttatttttgatactaatggctgtagttcacctctttcgcaccaaggttctggtgtacaacgcgcatttctgtgggctgccattaagactttgtgtggtaaagggctccttaaaaagggtaggaaagctataagcgatgaaaaagctaaaattttattagtagatgaaccagaaataaatatgcacccctcagtagtgcgatctgtacgtgatgcaatttataccttagctgatatcgctgggtggcaagtaatttgcacaacgcattctcctctttttattgatcttactcgttcacatacaaccctcattaaagtaactaatattcaaaataatttaaaatattttcaaactgagaaaattacttttactccggatgaaaaggaaaatttaaaaacactaaatagatgttgtccaacagttaacgaatttttcttctatgatagttctatattagtggagggggacactgagtttttagcctacaatcatatcttgtttaactctggcaaagaacatgaatattgtgtcataaattgtagagggaaagcgaatataccaactttcataaaaatattaaggaaggtgcgaataagcaggtcatttcttcccaagctgactcgctga

SEQ ID NO: 226874 - DNA, 612 bp, Klebsiella pneumoniae
atgctattcaatccgatttttattttcgttgctggaatattatctattttttatctttttattctaccacctttggtggcaacaggaataattgaattatctgctttaagtattgcttttgcagcgttcatgctttttcaggcatggatattgattgctgaatttgcttatgaatcagctgctgctgcttttggatttaaacgtaagcaattgattaaatttattaatactcaaagatatactaaagaaaatgttaaagaggtgtctggtttctcagctctttttacagcatttctatcatattttttcatgatttatgcgtacggtgtaatctatatgttcatgtcaagcatctctgcggatgccttctcttctagtaagcttggtattgtagatggtttatatttttcattagtaaattcatctacggtagggtttggagatattacacccaaaagttcagctgccaaactagtggtaatgtcacaaataattatgagtatgatgtatatgatcatgctattttcttcagctgtaagccatattagagatgaaattaataactcgaacaatttaaatcaagatgacatcaataatcccattgatgactaa

SEQ ID NO: 226875 - DNA, 1125 bp, Klebsiella pneumoniae
atggcgatgaaaaaaaatcaacatttagttccagtttgttacttgaaaaattttcaatgccgtattactaatgagagtgataatagaaaagggtctgatggtgccatatatgttagcaataataagctgtcttcaggttggaaaatgagaggcttaaagcataattcgtttgtcgagtcttacttctataatatagaaggcgatgacccaaatcatcctcaaatagaagactttttggcaaaggtggaatttaattatccgcgtaactttaaagaaatcgagaatggtaaaattgataatgataacatgtcattcatgtcttattttactatgattcaatttataagagttgaagtctttatcaaatcaatgcaggatacctttgataaagtggcgatgtatattgatggtttttgtggtacgaatgaacatagcttgttattcaaggatattgttaaaaaacaaatagttagcctggatcttggtggggttattcatccgtattcaaccattgtatataacgacactaactttccgtttattacatctgacaaccctgttgtcaacagggctgtcaatgttaacgatcttttaaaggtgattcctaaagaatacgttgtggatcatgggaataattcggatgaatttaatttcattttttttccattgagtccgaaaattgcttatgtatcatgtaagttactatccacaaaagataaaataattataagtgaagcatctattgctaatgtattttatcttaatttattttcaatttataattcccacaagaatatatactcgcccattgatgagccgataaaaggtgagcgagagttgtctatatatctttcatccgagaggggttttattgcggcaattttcactgccgctgagagggttatttcaaaagggatgattttaagtgactctgacacgacgttaactgtaaaggttgatgacttagatgcaatcgaaaatataaaaaaaggcgagttcattaaacttattgagataattaaaaatggagattctattagagggataaggaattgtagagtttcatctgtaaggcataataatggaataataacatttaagtccaatttaccctatgggatttga

SEQ ID NO: 226876 - DNA, 2007 bp, Klebsiella pneumoniae
atgactgaattaaaaaatatctatccagggaaacatttctctgtgagagaagaacattttagccaagaagaaaaagacatcattaatgttttatcaaaagagttttacgtaacaaatggtgggggggtaataacgcttacatcaaacagtaagtataaatacatattactacgacccactgatatatatatagagatgtttaacctcgatagagagataatagttcttttcagtgattatacaaattttcaatcgcgtacattggatgctatagagcaggcggcaaaacaactttcatctttaagagtcgataaaacatgttgtattttgataagtaaagatcaagatatagaagaaaatatcagtgacctgattaaaaaagaacctgaaactgcaaatataataccgtttacctataatgaaacgcaaaaaggaaactctgatggttatttttttagaaacagagttcaaaaatatttgtataatagagatttgttttcatttgaagctccgttgaaaagtgattggcttttctttggaaggaatgaaatcatattgtcgactattaatcggatgaagggtggcaataatgcaggggtttttggtctgcgaaaaactggcaaaacttctcttattaatgccatatcgagaaatttacaaaagaatggcgaagttgttacaactattgattgccagagcccatcaattaataaaagaaaatggaatgaggcaatttattatgtatgtaagaaaacaaaagaagataattatcttcaatccttccttccagaagaggcatatttcaccgagaaggatgctgctgaactcttggcaaaatttgttagagatgtaaacaaagaaaaagataaaaaattattcttgattttcgatgagattgaaaatatttcaagagttacatccccaacagaacattggaggtcaggtgctgattttctttatttttggcagtcaatgagaaccgttttccaaacggtagggataaatttagcatatcttattgttggcacaaatccgtcatgcattgaaactccaagaatagatagttcagataaccctctgttcaatcattttacacctacttatcttcctggtttcgatattcgctctacacgtgacatgattagaagaatcggaaaaagaatgggggtgaattttgaagaggcaatttatactaatattaatgaagaatatggtgggcatccatttctaatccgccaagtatgtagcataattgcaagaaactcttttagtcaaactaaacctgttagcatagggaaaatttcttataaggaggcagttaaatcatttggggaaaatagttttaattatttagaaatgataataggtgtattgaaagaacattataatgaagagtatgagcttctaattactttggcgcatgaagataacgaaacgtttaaggaagcctccagaagaaaacagaattcattagcgcatctattgggttatggaatattaggaaaggacaatggcggttattattttatcatcgattctatgagaagctatcttctggagataaataaatacaggaaaatggaaacaagtattgagcaacggtgggctgaaatatctgaacgacgcaatattgcggagagaaaattaagaacaataataaaaacaaccttgaaatccatgtatggagaggaattggcaaaaagtgcaattcttgacatattgggggggaaaagaaaagctgaatatacatctaagaattttaatgatattttcgatcctaatctatctacaatttttttcgaagatattagaaaaatcatttcaaaagaatgggggtcttttgagaatatatttgaaaaatcaaagaaagaaactttcgattcccttggttttataaacaaatatagatctgatgcgcatgctaaagatataacgcctgacgagtttgctttgtttagaataagcatgctaaaaattgaaggggatatatctcaatacttctcgtga

SEQ ID NO: 226877 - DNA, 240 bp, Klebsiella pneumoniae
atgccgcgtttatacgaaatcgagacggcttgccggaatgcaatagatatcctgcctaatggaaagcgcatcctcaccaccaggcgatttctgcaggaactggagagatataactggcactggtcgccacggcaggctaaccagtggatagagcactatgtgacaacattccgcgacgtctcaacgcaggaaggtgacgatcgtacgttccagctttacaacccgaatggagggctgtaa

SEQ ID NO: 226878 - DNA, 315 bp, Klebsiella pneumoniae
atggcaggaataacagtactggcaatgagtagcgccgcggtgggaaaggatgtcgtccccgatgaggcgcggacccgagatatgatgcgctgtcaggattatctgcaactggatccgcgcgcctggacgccgatggtgatttggctgatgaacgatcctttttcactggagccgccggagtggaccgacttccatgaagccgagctggtgctgacgccgatcctcaccgaaatctgccgtcaggagccggatgtctggctcacctcgctgcgggaacggctcaattcttatcagcaggtgcggtcgctgaactaa

SEQ ID NO: 226879 - DNA, 183 bp, Klebsiella pneumoniae
atgaccagcaaatcaaaacttaaggaagagttgaaaaggccccacccgaggccttcattcaaaccaccttctttagccaccttttccgtcttagtttcggaacacatgaaattgcggcgagttgagttccacaaatggaacaggctgcgccatgaaattggtttgcatcacctcggtaggtag

SEQ ID NO: 226880 - DNA, 672 bp, Klebsiella pneumoniae
atgaagatgactaaagagagtctcctcaaagttattggtgcagctgatgatgttatttcagcattggcaggcactaacgacgaatttcacaaagacgacaccgataagatggttcgtttgtgggatgacctgaacgaccaatatgcgccacctgaagtggtcagagagctggcccgcttagcattggccgcaatggacagcgagccggtggcgcttcaacctgagctggcaaaagttatctatcacttccgtgactggaatgaaggatttccggttgagcggttcaaggccgactacgtcattagttggatgctggcaaattatccgccagcgcagccagcgccggaacgtgaccaggtacgcagtgcgcatgccgagtggtcacaggcaactttcggtaatgtcggcccggttggcccgctgaagcacctcagcaaagaagcactggaagccgctgaacagcccggcgacctgtcagaatgggctgatatgcagttcctgctgtgggacgctcagcgccgggctggcatcactgatgatcagattacccaggcgatgatcgataagctggcggtaaacaagcagcgcgaatggccggagccgaaagacggggaaccgcggttgcatatcaaatcgcagccagcaacgcaggaggtacatgatgaaaaatga

SEQ ID NO: 226881 - DNA, 201 bp, Klebsiella pneumoniae
atgaaaaatgactgcatcccggaggctgtagccgtggcaatgattaatgccgccagagatatcaccgtggcaaaaatcaacgctaagggcgcgcgattcgacggttacgccaacaatttcaactggtttaatcagtcaatgaaggaagttagaaatgccgttaacgaagtaattaccagtgtcgagaaggaggtgaagtga

SEQ ID NO: 226882 - DNA, 1260 bp, Klebsiella pneumoniae
atgaaaaaaaatagtattattaatgcagcttggatgatgtctgaaaagatagtaactttatttgggttgttttttgttacttcatttgttgctaaatacatcggtcctttccgattcggtcaactagctttagctattgccatatttcaagttattcaagtaatagctcagttaggttgtgataatattatttttaagcgtgtttcggaaaaggttttatctggtctaaaactgatttattctacctttcttattcgtggtgggatatattttatattatctttttttgtgcttttgtttttttataataaaagtgatgttattaattatgtatttttgatttctgtgtgtttagcatgtttttttacgtctatggacgtttttactatatataatgatgcgactctaaattcgaagttcaacactcttgccaacgtgatcggattgcttattggtttgattttacgctacgttatcgctttttttgaatggccaatttattttttagctataccaatagtactaaccaccttaatcccttttttaatccgacttgtctatacaccaaaggtatatgttgttaaaggaaagaataaatggcgctataacaaatatctctttacaaccggaataccattggtgatatctacagtttcaatgactctttactcaagaataaatcagttcacactttcttactttgatggcagctatgaacttggtatctactctgttgcactaacactcgggaccgcctgggttttcataggtaacgctcttgcaatttcattcctttcgaagatatattctgagaaagacgacttgaaagcccaggataaaacatcgggtttattatcttttgtttttattattttgtcagtatttccactgtttttttatttttttggaaaaaaagtgattttattactctatggagagcaatatgttaattcttatgggataataatcatattgtgtatttcgaccgttataacggcaatgggttttatatccaataggtatatagttagattgtcagggtataaatatttatcaaagaaaacccttttggttttggggttgagtatacccatttcaacaaccatggtatatttttttggagtatatggtgctgcttatagcgttctaattgtagaatttttatccttaactattatgaattattttttcaatcatggagttattctgaaagttcatagaggtgcttttaatttaaaaaagatcgcctcgctgagataa

SEQ ID NO: 226883 - DNA, 1164 bp, Klebsiella pneumoniae
atgctacaaaatgttagtgttggtcttgttgctgattggttagtaacttatgcaggatcggaaaaagttattgcagaatttataaaactgtttccccagtctgatctttattcagttattgattttctttcggatgaatctcgaagtcgatttatgaataaacgagcaaaaacaacttttattcaaaaattacctaaggcaaaaagtaactaccagcgatacttaccattcatgccacttgctatagaacaattggatgtttcaaagcatgaaatcattctctctagtagccatgcagtggccaaagggatattaacaggtcctgatcaattgcatataagctatgttcattctccaattcgttatgcttgggatttacaacaccaatatttaagagaagcaggccttgataaaggcattaaatcatatatagcacggatgcttttgcataaaattagattgtgggattgccgtactgctaatggtgtagatcacttcattgcaaattctcaattcattgcgcgacgtatcaaaaaagtatatggtcgtgatgctgatgttatttatcctcctgttgatgtaaatagatttgaattaaattttaataaagaagattattttttcactgcatctcgattggtaccatataagaggattgatttgatcgttgaggccttttcggaaatgcccaatcgaaaattggttgtgattggggatggtcccgagatgcaaaaaattaaaagtaaggctaagacaaacattgaaattttaggttatcaacctgattcagtcatgcaggaatatatgcgtaacgctaaagcatttgtttttgctgcagaagaggattttggtattatacccgtagaggctcaggcttgcgggacaccagttattgcatttggtaaggggggggcactggaaactattcgccctcttggtgttgataaacccactggattattctttcagaaacaaactgtggcagatataattgaagcggttactaatttcgataataattttgaatcatttaatcttcatgattgcaggaacaatgcagaaaaattctctgtggaaagatttaacaacgaaattttaaattatattactgacaagtacgaatcattcaaattgaaaggtacgtctggggtttgtaatatataa

SEQ ID NO: 226884 - DNA, 810 bp, Klebsiella pneumoniae
atgagcggaagaattgaggtgttaaaaggagtggttaacgataccgggaagaaattttatcgcgataaaagcattaacaatggtacccgtagcgtatttgatatggctgtcgatgcaatgggaggaggtaaagatttagctgctggagcgataatccacgatctaacctataacgatcacaccggggcgttttccctggctaaaacctacagcgcagcaaataaaggtatggtgttcgctggcgtaaaaaacgacgggtttgatctggatgccgccagctgcatgaaagtcagcgatacgcactggatgtttatggcctgggtaaaagttacgaaagccgggtccctgtccactttcaacaaccagctcctgcatttttccacgaccgaaacaaacggctatgcgaatgcgcttttatcagttgtgccgacgaccgatgcaaccggacaaccgaccaaaatagagctggccgtacgtggaaaaaattacgtggtgaccagcaatttgctccccctgtttgatggaggacggcatcagttcgccgttgaatgcgagttcagcgcggatggcacacagcatactgttcgcgcctatatcgataaggtggtggtgtttacctcaacatctgcgctggcggtgacaccacccggagagcccacgacgcgacgggttggaacgagcaatccgtttccgttgtcctggacaggtatgctgtatcgcgcacgggttgatgatgtcggtacatccggcctgacggccaccgatatactgactgccgattacaacctgtgcgcctccagattcatttaa

SEQ ID NO: 226885 - DNA, 1890 bp, Klebsiella pneumoniae
atggcctttgatccgcctcttgggagcacgtcgcccgcggtgctgctcgataacgccactcgcctggataatttgctgaatagcctggcgctggtctaccctgaccgcgaaggggctgatctggatacctggcgaggtatcatgtcgcggatttcgaatacgctggacgatatccggctcaatctggttccgttgagccgtcagtatatgaccctcgcggaagcacaggcggatatagcgaacattccgccgggctctgtagcgttcgttcgtagcacatccgacgaagcactcgcagatgaatatatcaatatcggtggcacactcaccgcgacaggaaggcgtatgccctccgatattgtggtcagtaaactgatcccgctaatggcattgtctgaaaccacgactttcaggacgatgacagaattaaacgatgaatacgattctgttgtggtggacagcgaatacaacattctgatcgcgctcaaaaacggtttatttgatttctgcggcctttccgttaacggggaaagtattaatcctgccggtatcctgggaacgatggataaaacaaacctcgaagtgctcagcggcacaacggaattcagctctgcatcgggtgagtatgagctgaaccccgcgagatatgtcatcctggacgaagataaaaacattcagtttgatctggatgagtacatacagcgttccatcggatggcaacaggcttatctgttttctttacaaccgcctaaagttaacccctatgcaccattctcgcagctcgacgccagcgggaaatcacaggttcgcgtttatgatactgagaataagaaagaaatcgccgtaacatcagggagcagcaacgaaacgaatccccggccggatattctaaaccggatcgtatggacgtcagacagagccgacaatgcacccggcgggttgttctatgccgagggcccagactttaaagaatatccctatatcgccaagccaaaactggttggatgggggcacagcttcatggagaacggccgctttctttcacggctcgcccagctgacaggcctttatacctacaactttggcaagtctggactgacatcggaaggtgttgccagccgccagggagctgcccgaacgttttacacccctgctggcggtgtcatccccgcatctggtgcagtgacgttaagccccgctaaacccggcccaaatcgcatttttggtaatgctgccgccaccagtattgcctgctcctttgcgggtattgacgggatgtttggctgggacgggacgaatgcgacgtttaccaggactgctgcaggcgctgcggtgacagtcagtgtgcccactccggtgatcgtttatccgataacagggttttctgtaaccaacggtgcgccgggtggaacccggtacgatcagcatgacgagtgtattaatattttctggctgggtcgaaataacatttctgagattgatttgataatcagtaacgcgctggcgatggtgtcatggcttaaatcggtaggaaaacgatttgtgatattgcctgattttcctggtgggactgagccaacggggtcaaccaataataattacgtccgtattttaaataacttatataaacagaactttccagataattattgccagattaatggtgtcgatctgctgcaaaactttatgaatcattataacccgacgtcaccaggagatgtcgaagatatcaataatggcgtaacaccaagatcgttacgttacgacaatttgcaccccagccagagtatatctggttcagtcacaccacaatatgcgctgtatgccggagcagatgttaatgccgagttcgtttacaactttatgaaattaaaagggtgggtattgtaa

SEQ ID NO: 226886 - DNA, 276 bp, Klebsiella pneumoniae
atgagcttcgaaattattgctgggctggtggtcgtcatcctgggtgcgatcgctggcgcgttcggcatcggccatgcacgcggaacaagcaaggcagaagccaaagcccagcagcagcataccgaagagaaagcagccgccagtattgctgtggcagaacgtaaggcggaagttgtgaaagaggcaagcgatgtacaggaagacgttaagcgtatgggcgatgacgatgttgatcgcgagctgcgcgaaagatttacccgccccggtagtcgttga

SEQ ID NO: 226887 - DNA, 540 bp, Klebsiella pneumoniae
atgacagcagaccagattatcgaggggatcctcggcaaagagggtggttatgtcgatcacccctctgataaaggcgggccaacccgctggggcatcacgcaaaccaccgcccgtgcacatggctacaccggtgatatgcgaaacctgccaagggaaacagcaaagcaaatcctgctgagcgattactggaccggcccccggttcgaccaggtagcgagtttgtctacgttactggcggatgagctttgcgacactggcgtgaacatggggcccagcgtcgccagtaagtttttccagcgctggctcactgctctgaacatgcgcgggaagctataccccgatctgatcccggatggcgccattggcccccgaaccatcaccgcgcttaagggatacctttcagcccgcgggaaagagggtgaacaggttctgttgcgtgcgctgaactgcagccagggtgccagatacctcgaactggcggagggccgcgaagccaacgaggattttctctacggctgggttaaggagcgtgtcatgtga

SEQ ID NO: 226888 - DNA, 1173 bp, Klebsiella pneumoniae
atggcgcaagactatcaccacggcgtgcgtgttgttgaagttaacgacggcacccgctctatcacgacggtgagcacggcgattgtgggcatggtatgcaccggcgatgatgccgatgcctctgtgttcccgctcaataagccggttctgcttgccgatgtactgaccgccagcggcaaagcgggcgagtccggcacgctggcccgctcactggacgccatcgccgaccaggcaaaacccgtcaccgttgtggtgcgtgttgcccagggcgaaaccgaagcggaaaccacctccaatattatcggcggtgtaaccgcagacggtaagaaaacgggcatcaaagcgctgctttcggcgcagtcgcagcttggcgtgaagccgcgcattctgggcgtgccgggccatgatacgcaggctgtttccactgagctgttaagcgtggcgcagagcctgcgcggttttgcgtatctgtctgcctacggttgtaaaaccgtggaagaagcgattgcctaccgcgaaaatttcagtcagcgagaagggatgttgatctggcctgatttcatcaactttgacacggtgctgcaggcggatgcgactgcttacgccactgcccgcgcgctgggtctgcgtgcaaaaatcgacgagcagaccggctggcacaaaaccctttctaacgtgggcgtcaacggcgtaaccggcttgtctgcggatgtgttctgggatctgcaggacccggcaaccgatgccggactgctgaaccagaacgacgtcaccaccttgatccgcaaggatggtttccgcttctggggttcccgctgcctgagcgatgacccgttattccagtttgaaaactacacccgtaccgcgcaggtgctggcagacaccatggcggaggcgcatatgtgggcggtggacatgccgcttaacccttcgctggctcgcgacattatcgaaggtatccgcgccaaaatgcgcagcctggtaaatcagggctacctcatcggcggtgattgctggattgatgacagtgtgaatgacaaagacacgctgaaagccgggaaactctggatcgactacgactatacgccagtgccgccactggaaaacctgatgctgcgccagcgcatcactgaccgttacctggtggatttcaccacccgcgtaagcgcataa

SEQ ID NO: 226889 - DNA, 135 bp, Klebsiella pneumoniae
atggtagatgacctggtggcggatatcgccacgatctttcactggccgccgtccgtcactgacgttatgccgctgacggaagtgctggagtggcggcacagagcgataatgcgtagcggggccagcgatgagtga

SEQ ID NO: 226890 - DNA, 219 bp, Klebsiella pneumoniae
atgatgaattgcccaaaatgcggacatgcggcgcatacacggagtagctttcgggtaacggaccagacaaaagagcgttattgtcagtgccagaacatcaattgtggagcaacctttatcactcatgaaaccgtagtacgattcatcatgacaccgggtgtaattgataatgccccgccgcatccgacgtcaggggggcaggggcatatgaacttctag

SEQ ID NO: 226891 - DNA, 372 bp, Klebsiella pneumoniae
atgaaaaaatctcttttgatgctgttactcttggcttcatgtaacgctttcgccgacaagatcccggactcgatagaaaatttaattgctgtatttgacacaaggacgcatagccttgaaaacggcgagttaacagttagatacggcagacctgaagttactgaagagatggcccattcgttccttgacagtatttgtactgatttcttcatgaacaaatggaagcccgagacgattaaaaaaatcacgcttgtgaatatcacacgcgatcaaggttataaaatcaatgcgggtggcgctgaatgtaaaaacgtgggctttatgaactctgataaaacgaaaatttacatcgaagatgccactcagttttga

SEQ ID NO: 226892 - DNA, 348 bp, Klebsiella pneumoniae
atgaaaatgcctactaacccgagtaactggcctgatctgctggagttgctgcagagctggtggcgcggagatacgccgctgggggccgtgctgctctccgtttttatggcgggtctacgtatcgcctatggtggtggcggctggaaaaagatgctgctcgaaggattactctgcggagccctaacactgacattcgcatcagggcttgaatacttcgacttccccaaaactctctcaatcaccattggcggtggggttgggttcgtaggcgtggacgccatcagggcgtttgcaatgaaatatcttggcagccgattcggtatcggtggcggcgataacaaggcttaa

SEQ ID NO: 226893 - DNA, 1053 bp, Klebsiella pneumoniae
atgaaaaatactgtaaaaatatccagtattgaattaatcaatgctgatagccctcactacatcggcaccctcccggacaactccattgatttaatcgttacggacccgccttacttcaaggtgaaacctaacgactgggacaaccaatggaaaggggatgaggactacttacgctggcttgatagatgcctggctgagtacgcacgagttctcaaacctgcgggtagcatctacttgttctgtggtcaccgtttggcctcagatatcgagatcatgatgcggagccggttcaatatcctgaaccatataatttgggccaaaccgtggggacgatggaacgggtgcaataaagaaagcctacgcgcttactttccatcaacggaacggattttgtttgctgagcattatctagggccgtacacagggaagcaaaacgattacgagagcaaaagcaccgaactcaaacagcatgtaatgacaccgctgattgaatactttcgagatgcgcgtgatgcactgggagtaacaacaaaagaaatagccgaggcgaccgggaagaaaaacatggcctcccactggtttggactcagtcagtggtcgttaccgaatgaagtggattatcagaagctacaagcgttattcacacgtatagcgattgaaaagcatcttaaacagaagcttgaacatccgcatcatcagctggtggctacctaccaatcattaaaccgcaaatattcagagttgctcgaagagtataagacgctacggcgttacttctccgtttccgcatctgtaccgtataccgacgtatggatgcataagcctgttcagttttacccaggcaagcacccatgcgaaaaacccgctgacatgcttaagcagattatcagcgccagcagtaagccgggtgacatcgtagccgacttctttatgggctctggttccaccgtgaaagcagcaatggaactcggtcgccgcgctattggtgttgaactcgaaactgaacgctttatgcagacagtcagcgagatagaaaagattaataaaacataa

SEQ ID NO: 226894 - DNA, 279 bp, Klebsiella pneumoniae
atgtaccaggacgaatatttccacgtgactatgcccacggtttttgctcgtgaggacgccccgtggattaaagagcagttggcaacactcccggcaggtatgcgggaaaaaatcgcgatggcgtatgcgcaggcgtaccaggaagcgttcgatgcagagccggtgtcattccggcagcagaacgccgcacgacggacggcaaaccgccgattgcgagagttttgcacgaggtataccccagcggttaggggatatacgtcgctcccacccagggtttga

SEQ ID NO: 226895 - DNA, 1389 bp, Klebsiella pneumoniae
atgctgcgccttacccttgcatcaggtgtattgcgagtcggcgacaggatgatctccgcacgtaaactggccgaacgagagcaggttagcctcccaacggcactggaagcactccgttgtctcgaggccgagggcctgattgtagcgcgtccgcgttcgggctacttcgtttgccagataaacacatctcagaacatgccgtcttcccaggatttacctggcccagttcccgtgacaatgtcagcagtagcccgttcactatttagtagcgcagaagcccgtctggtgccacttggtgcagccctgcccgatccaatatggttgccaacaaacacgctacagcgggcgctacagactgcaacccgccgccttgacgcgcacgggcagagctacagcctgccgccgggaagggcagacctgcgcagaaatatagccgtacgcgctgcacagtggggagcccgttttggttcggatgatctcgtcatcacggctggagcgacgcaagcactgcgtctggctctgcgggctgtatgtcagccaggtgacgtagtggcaattgagcaacctgcctacttcggtacgctcctgctgcttgaggacttaggcctcaaggcattgcaaatccccacggatcctgctgaaggcttgttgctggcatctctggatgaagctattcagcgtcaccgtcccgcagccgtgctggcttcgcccacggtgcaaaacccactcggtgccagtatgcccgtcacccgtaagcaggaacttgttgctctgattgaacgtgcaggcatccctttaattgaggacgatgtgtatggtgatctggccggtgaagggcagcgtcctccggcctgcaaggcgttcgaccagagcgggagtgtgatctactgcagttcattatccaaaacccttgccccgggctggagaatcgggtgggttgcggcaggacgctatcacactcaggtattgcaggctcgcatggccggggattgggctggcgcaccgctgcttgaggctgccgcgagcaatatactggcaagtggggactacgatcgtcatttacgacgcttgaagttccggatatcagagggggtacaagccgttatcgcccgggtcaaggcaagcttcccacagggcactcgtgttaccgtgccgacagccggtttcttgttgtggatagaactcccgcatccgctgaattcattggtggtacaccgtcgcgcgctggcgctgggcattggtgtcagtcctggcctcctgttttccccaggggccgagtttcagaacttcctgaggttaaattgtgcgaatgaaccctcgtccacgctgctcaatgcagttgaaaagatcggtgcgctttgtcatgaactggcaggtcagcgcaaataa

SEQ ID NO: 226896 - DNA, 789 bp, Klebsiella pneumoniae
atgcatagcgataacttcgatctttctgcttatttccgtcgcataaactacaccgggcatgcagccgccgataccgccacgctgcacgcgctcatgcgtcatcaactcttttcggtgcccttcgagaatctggatgtacaggctggcaaagtcgtatccctggtacccgaagacattgcagataaactgctacatcgaggtcgtggcggatactgctatgaggttaatgggctatttgcaatggcattggacgctttaggtattacctaccgtttcgttgccgctcgcccgatgttctacccggcacgccgaccgaaaacgcatatggcattaattgctgaagttgatgatcgcctgtggctttgcgatctagggttcggcagctatggtattcgcgcgccgctcgctatagacatgacagataccgatatcgaacaggatttcgacactttccgacttatccgtgacgttaataacgagtatctgctacaagcgaaggtggagggtgcatgggctaatcaatacagttttgatctgtccccccaggagtggattgatttcgtcccggccaactacctcaattccacccaccctgatgccatctttgtgcagaagttactgatcgtgcagcacgcccccgagggtcgcctgattttgctaggtaatttgctgaagacgatcaccgcagagggtatcgaaacgcaacaactgatggatgacggtattgccctggccctgaaaaatcgctttgctctgcctgtaccgcaatacatcgggaagagcgcttaa

SEQ ID NO: 226897 - DNA, 231 bp, Klebsiella pneumoniae; identical to SEQ ID NO: 197183

SEQ ID NO: 226898 - DNA, 363 bp, Klebsiella pneumoniae
atgcattcatacgaggaccggattcgggccgtcgaactctattaccggtacggaaagaaagcctccgttgtcgtcatggagctggaatatccttccacaaaacagctgggccgttgggttcggatttatgaagagaagggcgatttacccagggaattaaaaccaagagaacgctattcacgtacacagaaaattgctgctgttgagcattatcttactcacggtggttgcctgtcgtacactcgccgagccatcggctaccccagtaacgaaattctaaagcgctggattgaagagttttatccaaatgcgcgtcccctggtcattcgctcaggcacaagcaaatgcttcagcccggaatag

SEQ ID NO: 226899 - DNA, 1038 bp, Klebsiella pneumoniae
atgcgcaaacgaaaggcagcccctcaagataaaaatcaggatgctttactcggtgaaatccagcgactcaggcagcaggttcatcagctgcagctcgaacgtgacatactgacaaaggcgaatgaactgataaaaaaagatctgggcatcagctttctgacactgaaaaacagggagaaaaccctgatagttgatgcccttaagaaaaagtaccccgttgctgagttgctaagcgttctgcaacttgcccgcagctgttatttttaccacaaagccagcaaacgtctgtgcgataagtatgcggaaatacgcgtgatcatggccgatatctttgaggagaattaccgctgttacggctaccggcgccttcacgcgatgcttcgcggtaacaacagggttatttctgaaaaggttgtccgcagactgatggcagaagagcagctcgttgttaagcgcaccaggcgacgacgatacaactcttactgtggcgaaatcggcccggcaccggaaaatttactcgcccgggattttagttcctgcaggccaaatgagaagtggctgaccgatattacggagttccagcttccggctggaaaagtctatctgtcgccggttatcgactgctttgatggccaggttgtaagctggtcgataggaacacgcccggacgcgacgctggtgaatacgatgctcgatgaagcactcgatacgctcaacgaacatgataaaccggtaatacacagcgatcgtggtggccattaccggtggccgggctggctcgatcgtatcaacacatccggacttataaggtccatgtcgcgcaaaggatgctcgtcggataatgctgcgtgtgaaggcttcttcgggcgtatcaaaaacgaaatgttctatggcagaaactggactggtatcacgctggaaaaatttatctgcttcctggacaggtacatacgctggtataacgagaaacgtatcaagctatcattaggtgcaatgagtccggtgaagtaccggcagcatcttgggatcacaacataa

SEQ ID NO: 226900 - DNA, 384 bp, Klebsiella pneumoniae
atgacaaaggacattgtcctgaatgcactgctgatggctatatgccggcgtaatccccaaaaaaaacaggtgctggttcactcggaccagggcagtcaatacacaagccataagtggcagtcgttcctgaaatcacaaggcctggaggggagcatgagccgtcgcggtaactgtcacgataatgcggttgtagaaagctttctccagttgctgaaacgcgaacggataaagaaaaagctctacggaacgcgggaagaagcccgcagcgatatctttggttacatcgaaatgttttataacagtaagcgtcggcatggttcgagcaatcagatgtcaccgacagaatatgaaaaccagtattatcaacgactcggaagtgtctag

SEQ ID NO: 226901 - DNA, 195 bp, Klebsiella pneumoniae
atgaacagcttacttcctgacgatatcgatgaactgaaacgtctccttgccgaacaggaggcgctgaaccgtgcccttctggaaaagctgaacgagcgtgaacgcgaaatagatcacctgcaggcgcaactggataagctgcgccggatgaacttcggcagtcgctccgaaaaagtctcccgccgtatcccgtga

SEQ ID NO: 226902 - DNA, 1017 bp, Klebsiella pneumoniae; identical to SEQ ID NO: 219672

SEQ ID NO: 226903 - DNA, 555 bp, Klebsiella pneumoniae
atgaaaacaggtatccgcatggctgtggcgatggtaacggctgtgagcagcggcgcgatggccgcgccgtttagcgtaagcagcaatgatatgcgtgacgggcagccgctggcccagcagcactggtttgccggtttcggctgtaccggaggcaatgtctctccgcagctggcatggaaaaacgccccggcgggtacgcgcagcttcgcggtcaccgtccgggatcccgatgcgccttccggcagcggctggtggcactggacggtggtcaatatcgccagcagcgtcttttcgctgcccgctggcgcgggagataaaaacagcgctacactgccgggcggagcggtccagggccgcaacgattttggctatgccggcttcggcggcgcctgtccgccggcgggagataaaccgcaccgctatcgctttacggtatgggcgctggatgtccccacgctgccggtggatgccggggccagcggggcgctggtcggctatctgttacatagccatgctctcgccagcgcacagttgacggcgatggccgggcgttaa

SEQ ID NO: 226904 - DNA, 675 bp, Klebsiella pneumoniae
  misc_feature (78)..(87): n is a, c, g, or t
atgaaattaactgacagaatattcgtaaagttcttttataaaaaaataaaaataataattcagcgttcgtacaagaannnnnnnnnngataagggttatcgtaaaggtcatgatgatggtgtgttaaaatatcacattcgtcgcgaaatcgatacgttctcgatgtccgctattgacaactcgatttatggaccagaaaatattggcgttacgagagaattagagcaactcatgattgaaaaagtaagagttgcaactaaagctggaattataagttcaccttccccctctcagtgggaaatgattttttcagatcatccagcgacttgcgttgttgctggtgctggctcaggtaaatcaacaacactaattcttcgcgtagtgtttatgcatttttatttaaagattccattaaataaaattacagtaatatcatttacaaaaaaatcatgtgaggagttaagtgaaaagttaaataaagtatttactttttgggatgaagggcatgataaagaatctgttaattcactcgtcagcacattccactctcttatatataggttttcattgaactcaatgccaggaataagtgttttcgattttttaggcgaacataaaaatgagaatgagtctgccttggaaatatcattaggcaaaaaaataatgagcaaatag

SEQ ID NO: 226905 - DNA, 1431 bp, Klebsiella pneumoniae
gtgcctggtcccgtaaagtgctttcatgttaatggaaatattttttatgctaatgggtatgttgaacataataaaatgccggtttttttatcaggtaatattgggggtaagaaattatttgatgggaatgactcttttgatcctcatgaaaccgatcccaagaaaaaagtacttttaagtactgcaatatctataaaaaacaaaatagttgctggatacaataatagaatttctatatttataaatagcaatgacaaactaaactcagtaaataactttctgagaacatttaaaactggcgaatcccctagcaatttttcaatcaagttgcatggtgagttaaactcaacaaatatacttgaacttttatatgaccaaggctcttttattgaaagtcttggcaaagaagttgttacgacaatatctaatattacgctttttcgagaaaagggtattgagtattatttcgccaaggctttggctttattctggccattatttgaagagactatccataaaaataacataatgactttcaatcgaatgttcataatgttttcagatgagttagtgttgcagcaaagacgtgatttattcaaaaataaatatgttagatttgaaaatctattagtagatgaattccaggacatttcacctcaaatagctaattggttaagggctatacataaagaaaatgcaattttaagtcgaaggcctacgataatggctattggtgatgattggcaatcaatatattcatggagaggcagttctcctgatattttcatgaatttttcagattttttccctgtgcataaatcattgggaaaacataagacagtttttatgatggaaaactatcgttcggatgctgcgattcttaatgatgctgaaaaaatgatggctttagttaaagggaaaatcataaaagaatctatatcatgccgaaaacctgatggtgatgagcatggtgtctattgttatgggtatgatgataaaaaagatgataattcatggaaaaataaagcaattcagctaatttatgaacaattaaatatggtaaaaaatcaaaaacataaagataaaactcatattatagttttgagtcgaactaataatacacttaaagaaataagagatttttatatagaaagatatggcagtattaaaggaataaattttttaacgatccataaagctaaaggtttgcagggggaagtatgtgtgatctttgatgatagcaaagctcatataggacacattttaagaaatgaagtttataaacagattccctacttcaattatagttatgatcaagctatgatcgatgagtcatatcgtttggcatatgtagctataacacgagggataaaaagagtattctggtttgcaccaaaaggaagtgatggggcattctctcattttcggtaa

SEQ ID NO: 226906 - DNA, 705 bp, Klebsiella pneumoniae
atgagttttgaagatatcagagaattcttttggccagttttagttgaactgaatagtgaagaaataagacaagatcaagaaaagctggataatgatatcttaattattaaaaatactgactggacaaatgaaagtgaactagcccttgatgaggcaaaaaaactcaatgaattagaaaatcaaagaagagtaggagctgagagtaaagctgcaatatatttaacagctattactgctcttgctcctgtattagtctcgttagttcccggtattattagtagtggtggaaataatgcctttgtggattttttgtcatttgcaatttttgtgtatgcactttctaatttgcttagagctgcattatgggcttttaataccttaaaagtttcagcttccaatagaatcgacacgatagatttagttagaatttgggggggggccggagatgcatacaaaaaaaatttaattgttgaaaatctttgtgctgttcgaaaaaatagagatggagtaaatcgtaaggtaacatgtattaaaatgacgcatgaacttctccttagaacatttcttgcgtttgttttactcttattgttacaaacatcgatgtcatttattcctaatatcagcattgccaatcaggtctcttcaactacatgtaatgataaacaggagattgttcaacatcctgttaatatttatagaatatag

SEQ ID NO: 226907 - DNA, 963 bp, Klebsiella pneumoniae
atgatattgttggtgtctaataagcgcgatataactatggattatatcgtggttgagttaaaaaaacgaggcatcaagtacttccgtcttaatacagaagacttgccaagatcatactgttctatgtcagattcatcatttatggattggagtatatctattaatggaaatacaataaaaggtatcgatgttaaagccgcctactttcgtagacctgggaatcccgaagttcctgcctcaataactgatcctggtattgctgattacattcagggagaatggaatagtttccttaagagtctttattcgcgacttgattctttttggttttgctcgcctactaatataattttagctgaagataaaccaaagcaactggtcgttgccaaacgtttgggttttaatattccagagtcaaccatcattaattcatttgaagaaataaaaagttgtagcaatagctttcaaatgatcgctaagcctttacgacaagctctatttataaataatgatgctgaaagtatcatttttaccaacagattaggtcaactagatgagaccgattcgagttcactttctttggtacctattatagttcagcatgagataataaaaaagtttgatgttagagtaacagtagttgggaaaagagttttttctgttgcaatttactcccaaagccataaagaaacagaggtagactggcgcaaggggtctcgaattgacttaaaacataaacctttagagctacctacatcattgagttctaagtgtatagatctagtcgaatcacttaatcttcgatttggggcaatagattttatttgcgacgaagatgatgttttttggtttttagaaattaatcctaacggtcaatgggcatggatagaaaaccagacaggtcttcctattgctagttctatagtcgatgaacttatgaggatcggtagatatgagttttga

SEQ ID NO: 226908 - DNA, 636 bp, Klebsiella pneumoniae
atgaaaaaatttaattttgctgctctacttccggggtttttggcactcaataattctgtatgggcaagtgattcatctaccggagcaagtgatttgcctggtatgactcttaatgaacatgatttagtgatagccccacttaacaccgaagttccattctacattgcagggcatcgcagtcatagctcccatcggagccatagttctcaccgttcatcatcaggtggcgggtactatggtggcagcactccctattatccaaaaacatacagctcaccaagttcatctgggtcttcaagttcaggaacaagttcctcatcgtcctcttcctctgtgcgttcgcttcgttctaacgacaatattaactctactactacgaattcagttggaactacagaagctaaccgtgcaagtaatgggcttacttctgctacagagaagcgtaagcgcttaatcatgcgtgttcagttcgcattgctggacaagggattttacaatgggaatattgacggcataatgggaccatctacgaggcagtctgtgaaaaattaccgtattgcgaacggattacctattcctgcaactgaaacactcgacactcaacttttgaattctttaaatattttggctcgttaa

SEQ ID NO: 226909 - DNA, 1263 bp, Klebsiella pneumoniae
atggcgttgatagaaggttttcgcatttcaaactttagatcgcttaagaatgtgaccttaggaaaaacatggaatgacagaactaaaaaagccttaactcctttaacggtagttattggccgaaatggttcaggtaaaagctctttgtttgatgcctttggttttcttgctgactcactcacatacggtgtagaagaggcgtgccataaaaacgggcgaggtggatttgaacgattacgttcagcgggaagctcagaagatattgaatttgaaatatactacagagaatctccaaaagaacggccaataacttatgagttatccattggaactgatgaaacaggaagaccggtagtaaagaaagaaagacttcgtcagcgccgcagaggacaaaatagagggtggcctttttcattcttggaactttacaatggcgagggaaaagtatggtcgggtgatacattatctgagaatacagatgacaatattgatgcattattaaaagaagaatctaatggaacaatgcctattcaactggatagtagacaaatgttaggcatagccactttaggtaatttaaaagagcatccgcgcatcgctcgattcagaaaattcattgaaggttggtacctttcatactttacacctgacgcagcacgagatttgcctcgaatagggcctcaaaagcatttaaatagaattggtgataacttaggcaatttcgtacaatatatggaaagggagcatcctaaacaattcaaaatagtgcttgaagacatagcactaaaaataccagggatcgtaaaaatagataccgaatcatcccctgacggacgacttctattgagatttttcaataaaggtttcgataaaccattttacgcccaacaaatctcagatggaactttaaaattatttgcatatatgctgcttttggaagatccagatccagcgccatttgtttgtattgaagaacctgaaaatggcttatatcacaaattacttcaatcattagctgcagaatttagaagtcatgcgactggtaagaaaggtgattcacagctttttgtaactacgcatcaaccatattttgtagatgcgctagatcctgatgaagtctggattctcgaaaaagaggagagcggtttttctgctcttagtagagcctcagattatccagatgttgtcgcaatgtatgcagagggcttgccattaggcagtctttggtatagtgaccacatcgatagcaaggattgttactaa

SEQ ID NO: 226910 - DNA, 627 bp, Klebsiella pneumoniae
atgcatttcgaaatattagttgaaggtcagtgtgaactgacattcttatcaattattatgccaaaaattgttggtgaatataagtgtcctaatacatggaaaatccataaacatagggggattggctctattcctgcagacccagcagcacctccaaaagtaactgattcatcacttttagggcagcttcctgcaaaattgagagcctactcagcaaagcctgaccctaataggaaagtcattgtattattagatatcgatgataaagataaagcagtatttcatgctgaacttgctgctctcctacaccattgtcaatcaccttttgacgtacattttgcatttgcagaagaggaattagaagcttggtattttggagacaatgcagcattgctggcatacaatcctaaaataaatgtcgcaaagttaaatggatatattcaagattctatatgtgatacatggaaggttctaatggatgctgatgatccagcattatcaaaattaggtaaaagggacagaagaattttagaaaaaaaagtatattgggccaaaaaaatacctccacatatggaggtggataaaaatatatctccgagttttatagctttcaaaaattcgttgtga

SEQ ID NO: 226911 - DNA, 1128 bp, Klebsiella pneumoniae
atggctgccagaccacgtaaaaataatatatctattccaaatttatacccactcttcagcagaaaggttaataaagtatactggcgttataagcacccgataactggtaagtttcatagtctaggaacagacgaagcagaggccacggcaatagctattgaagcaaataaacgactcgctgaacaaaatacccgccaaattttggcactcagtgacaaagtagccaccagcaaaggaaaagccatcacagcaataacttggcttgatcgctactggaagattcaagaagaacggcttgcaaaaggcgatatcaaaaaaaacacatacaaacaaaaggccaaaccagttgcattattaaaagagcgagtcgggatgaagcttatatctgctgtagatgttcgtgatattgctcaaatccttgatgaatacatatcggaaggacaaccaagaatggctcaggtgatacgttcggttttgattgacgtctttaaagaggctcagcacgctggtgaagttcctccgggacataaccctgcacttgcgaccaaacaaccgcggcgtcgtattacccgccagcgtttaaatctggatgaatggcagaaaattttcgacattgctgatgcaaaccataagtacatgggaaatgcaatgttactggccctcatcactggccagcgattgggggatatctcacgaatgaaattcactgatgtatgggatgatcacctccatattgagcaggagaaaaccggaagtaagatagcaatcccgctggcactcaggtgcgatgctattaattggagcctaagggaagtcatcgcacgttgccgggattatgcggtaagcccgtatctggttcatttcctccattcaacgtcacaggcagagcgcggcgcacaagttaaagcaagaacactcaccatgaatttcagtaaagccagagataaagcgaaaattaattggggagatggcacaccagccaccttccatgaacagagatctttagcagagcgactttatgaagctcagggaatcgatactcagaagttgctggggcataaatccccgagccagactgctcgttaccatgatgacagaggtaaaggatggacgacaattgttgtttga

SEQ ID NO: 226912 - DNA, 201 bp, Klebsiella pneumoniae
atgttttttacccattgtttccagatcaaccataacgtgaacataatcaattggctgatcttcctgcttattatgatgaccggattcaatatctccagcatccgtttgatgaacaacttcatccgttttttctttttggttaaccttgcccttaacatcaacaagactgtcaatggaaaatactccgtccccaatttttga

SEQ ID NO: 226913 - DNA, 234 bp, Klebsiella pneumoniae
atgcgcctgacagttctcgacgacgatccggctgaacgcatcaaacgcggtcgcgagcgtatcacggtgtgccttgatggtgttgaggtgaagcacgttttctcggctgatagcgataaaggagaagtgattgccgccgtgcttgatagccggagttatcccactgccgagaacggtgagcttaagcggcagacgctgttaggtcaggtgaggatagagcgatgccctcgctaa

SEQ ID NO: 226914 - DNA, 657 bp, Klebsiella pneumoniae
atgagcaattctttcccggtttgcgaaccgatagcaattgatgatcctttgatagaaaaacttgtttttcagattaataaaaaatcaaaggccatccatgttccattgtataaacagttattgccactcaagaactgttattggaatgttgaacgcctcgtaaaagaatacggcggtagtttaatcaagggttggtgtgtgacctattggcctggcagccacctgtcggcatatcatcacgcagtatggcttactccagataaccacttgttagacataacagaaacaatcccaaccactaaagataaaaatactataattttcattcctgacaataaaataagcataaacttagataaggtcccttctattggaatgcacttccttgtcataaatgatactccagagctacgtgaagtaattaaactttatcggaagtacaatgaagtagaaaaagaatactctaactttctttatgcaattggaacgcgctgcgagctacaaagagctattgctttaggcaaacaagatgaaggaatttacatggatgagcagcagcagcgtgactacatgatatttcacaacaaaatactcgccctgcaagagctgtcggcagctgcaacaatatctttgaggaaagtaactggatttaattaa

SEQ ID NO: 226915 - DNA, 726 bp, Klebsiella pneumoniae
atgtcaaaaattgacgtgtctaaaaaaatactattaacaaacgttatactaaatttactaacacttttatctgctagcttggctgcaatagcaaaaacagcacctctatggtatggcggtggtaataataaggagatatacgaaagtatggacgtattagccacggtcctgaccccaattttgtttttagcaagttggtggactaacaaaaagattaataaagttgcacatcagaatgaaaagataagggatgaggagatatttaaggcaaaaagccaaatagcaatcttcgaatctaaagctgaagagttcagagctaaaacagaaaggtatcgtttggaatatgaaaacctaaaggcaagtatttcatggcgcgagatatcaagcgaacaggttaagtcgattagagagtcattgaaagatatagactctattgtaaatgtcgtgattgatgtgtctgaccctgaagcccaaagatatggacggcagttttctaatttattttctagtatgaataaaggtggctttgaggctgggtctacaattaatcatgaggggcttgtgttaattggggttaattccgaaataacaaaaaaaatcgaagttgctttcgctgatgtaaatattcatattgttgttgtaaataagaaaccaaatatatatccgggttctattttattatctgttgggaaaaaaggtatgccgagagtaaatgatttggattag

SEQ ID NO: 226916 - DNA, 1173 bp, Klebsiella pneumoniae
atgtcagaggtagagaagggcggtggtaatggtttggtggattttttggggcgtcagctatataatgatgtgaagttaattattccatatctatttaggaagttaactattccaactaaaaaagctatagctaaaagatataaaagtccagaggaattgttggatggattaaaatgtggtcatgtcaaagatggcgattttattgcaattgaatgtaagccgtcaacatttggaccattcttgagaagtcacgttctttctgtaataagttgcacaagaagtgatatgcatttagggcctcagttaataagtgatcatcctgagtttcctgaaatagagacacttatggtgcaatctaccagttacttgaaaccagtcgggttatatcctcctattgatgacaatatatctcaaattactttatttccatcagatgccacttgttgtggttttatcgggttaaggcctgatgttagaaatcttattacatctattcctgcaattgtcagtcaaaataaaataagtttgtgtggtgctccatctgtcgttataggaatagtgagaacagtgacacaatcaatgtttcaggataaaggaatatcacttgaaacatatgaggaattgaggcaggctggggatgcttggtatctggatattatatctgaaggtacagaaataaaacctatgtttgatggcgtagtaactgaaatgtggggcgggatttatgcgtcgggtcacattgagattgaaggtgaaattcaagttcaatcattaattgatggtgtttttgatgtttttaaaaatgctgggtttgaacccttttttcatcaaaacatggttgccagcaaagagtttaccgtgttgtccagaggcttgagatttaccatttatccatttggatgtatttattctttgcatatggatgcagagttggctattaattataaggccagtagaagtgtttttgatgatatttgtgataatttgttgagtgtaattttagagtcggcaaaaaaacatggtgctaaaataaaaaatccgaaggatttagattttacttatacggatgctgctaagtcattctctattttggaatctaaaacagcggggcttattagcgatccgatttctattgtagtgagagattggcatcgaaagaaaaatgcaaaatga

SEQ ID NO: 226917 - DNA, 651 bp, Klebsiella pneumoniae
atgagcctgagtcccgcacggcagcaccgcctgcgcgtccaggctgaacaggccgcccgacagggcggcaatgttcgccacgcgacggggtatgacctgatgctgatgcagctggcggaggaccgccgccgcctgaaaggtatccagtccaccgtgaagaaagcccaaatcaaagtggagctgctgccccgttattccgcctgggtggagggggtgctggctgctgatggtgcccggcaggatgacgtggtgatgtttgtgatgctctggcgtatcgatgccggtgattatgccggtgcgctggatgcagggcgtcatgcgctgcggcacggatgggtgatgcccatcggaaaccgtaacgtccagacggtgctggcagaggaaatggcagacgctgcgcaggccgccctgctggcaggtgaatctttcgatgccgggttgttactgcagacactggagctgacagacggccaggatatgccagaccagtcacgggcacgcctgcataaagcgattggcgctgtactgaccgaaaccagcccggcctccgccctgaatcacatcaatcatgcgctgcagcttgatccacgctgtggcgtcaaaaaagaaaaacagcagctggagcgcagattgcgcaatgacagccgttaa

SEQ ID NO: 226918 - DNA, 423 bp, Klebsiella pneumoniae
gtgaacaagcctcgatccttacgccgcgccctgaataacgcggtgccatatgtccgtgataacccggataagctgcatttgttcgttgataacggatcggtggtggcaaccggggcagcgtcactttcatgggaatatcgttacaccctgaatgtggtgattgtggatttcagtggcgatcaggggttattgatggcgccggtggtggcctggttaagggaaaatcagccggatgctattcataacccggaactgcgggaaaaattgctttcctttgaagtcgatattttgcgcaatgatatctgtgatatcagcctgaatctgcaactgacagagcgtgtgatagtcagcgctgacggtgacgtgtccagcgtcgaaacagtgccggaaccggacgaaatgtgggcggtgggccgtggctga

SEQ ID NO: 226919 - DNA, 750 bp, Klebsiella pneumoniae
atgcactctgctttctatacttctttggttaaaatctcatcatcatactttattaaagccgatacactttttagaactattatcttccaaaacattgctatctctcatgctaaccaaaaggtgaaccctgaacttcatgctgcatatatacaacttgagtcttttttagaagaaaactctccagaaatctcagataagggtattcgtcacgatttagtatctaaacacatgccatcattgtgctttagttcattagtatcagcatttgaggattacataattgaaatatcgaaactcatctttaaactccgacctgaaaatcttgataaagtaaaatgtgattatggagtatttaagtctttatcagaagatgaactttttgaccaccttgtcaatgaaggtgttgcaagtctcacctttggctcacctaaagaatacatcaataaactttgcaaactcatacaaatagaaaaaaaaacaatcgagccatatctaaagcaatacattgaaataaaagcaaggcgtgacacaggcgttcataacaactggataaaagactctcgttacgaaagaaaactggcagaggtcggactacaaccagatgcaaagaattatttaacgcctgacctaaattatttcagacattcctttgacttatgcggaaaacttgtgaagttaataagcaacaatatttctacagaattactaaaagaacaagaaatattcaaacaagagaaatctgagacttaa

SEQ ID NO: 226920 - DNA, 531 bp, Klebsiella pneumoniae
atgccgggcagaaacaacgggagtctactgtatgcgacgactaacgcaccggtaggtgctgagaagcaatggtctactgtattcgacgcaccgttaaatggccggggatcgccggttctgccgggcagaaacaacgggagtctactgtatgcgacgactaacgcaccggtaggtgctgagaagcaatggtctactgtattcgacgcaccgttaaatggccggggatcgccggttctgccgggcagaaacaacgggagtctactgtatgcgacgactaacgcaccggtaggtgctgacaggcaatggtctactgtattcgacgcaccgttaaatggccggggatcgccggttatcacaggtatgaacaacgggtgtctactgtatacgccaagccacgcaccggtaggtgctgacaggcaatggtctactgtattcgacgcccggctaaatggccgagtatcaccggttatgccgggcaggaacaacgggtgtctactgtatgcgacaactcacgtaccggataggttctga
